United States Patent Application Publication US 2002/0048763 A1 - sequence listing, part 7

SEQ ID NO: 21221 - DNA, 492 bp, Homo sapiens
  MAP TO AC012064.1; EXPRESSED IN BONE MARROW, SIGNAL = 1.6; EXPRESSED IN FETAL LIVER, SIGNAL =   1; EXPRESSED IN ADULT LIVER, SIGNAL = 1.3; EXPRESSED IN PLACENTA, SIGNAL = 1.8; EXPRESSED IN HEART, SIGNAL = 1.5; EXPRESSED IN HELA, SIGNAL = 1.1; EXPRESSED IN HBL100, SIGNAL = 1.5; EXPRESSED IN BT474, SIGNAL = 1.1; EXPRESSED IN BRAIN, SIGNAL = 1.6; EXPRESSED IN LUNG, SIGNAL = 1.3; NT HIT: gi4503098, EVALUE 0.00e+00; SWISSPROT HIT: Q00657, EVALUE 4.00e-64
acccccaataagcatgagggctgtgctgaagagttttctgccaatgatgatgtggccctgggcttctctgggtcccactctctggctgccttgcctgcctggggcactcaggatgaaggaaccctggagtttacactcaccacacagagctggcaggcacccttggccttccaggcagcaggctggcatggggacttcatccatgtggacatatttgagggccacctgtggtccatggttgagaagggccagggtactgtattgctcctcaacagtgtgcctgtgactgacgcacagccccacaaggtcagcatccacatcaacattcaccagctagaaatctccatggaccagtaccccacacgaactgaggagtcctcagctacctggagccacgtgacagtctccttcttggggagctggttgcagaggcctctcatcacctccaggaacaccgctcaggcctgacaccaggggctgccaatgcctccc

SEQ ID NO: 21222 - DNA, 111 bp, Homo sapiens
  MAP TO AC012593.1; EXPRESSED IN ADULT LIVER, SIGNAL = 2.6; EXPRESSED IN BT474, SIGNAL = 2.4; EXPRESSED IN FETAL LIVER, SIGNAL = 1.8; EXPRESSED IN BONE MARROW, SIGNAL = 1.7; EXPRESSED IN BRAIN, SIGNAL = 1.2; EXPRESSED IN LUNG, SIGNAL = 2.6; EXPRESSED IN HELA, SIGNAL =   2; EXPRESSED IN PLACENTA, SIGNAL = 1.8; EXPRESSED IN HBL100, SIGNAL = 1.7; EXPRESSED IN HEART, SIGNAL = 1.2; EST_HUMAN HIT: BE898327.1, EVALUE 1.40e+00; NT HIT: AB010273.1, EVALUE 2.10e-01
tccaaaagcttatgtgaaatttcccacgaactagtgacacaagaagtctttatctctccctgccacactacctgcctcctgccatcctgtattcaaattgccaaatccaag

SEQ ID NO: 21223 - DNA, 313 bp, Homo sapiens
  MAP TO AC012443.1; EXPRESSED IN HBL100, SIGNAL = 2.4; EXPRESSED IN HEART, SIGNAL = 1.9; EXPRESSED IN BT474, SIGNAL = 3.1; EXPRESSED IN BONE MARROW, SIGNAL =   2; EXPRESSED IN BRAIN, SIGNAL = 2.9; EXPRESSED IN PLACENTA, SIGNAL = 1.2; EXPRESSED IN HELA, SIGNAL = 2.2; EXPRESSED IN ADULT LIVER, SIGNAL = 2.1; EXPRESSED IN FETAL LIVER, SIGNAL = 2.1; EXPRESSED IN LUNG, SIGNAL = 0.98; NT HIT: AL161556.2, EVALUE 4.20e-02; SWISSPROT HIT: O54786, EVALUE 1.50e+00; EST_HUMAN HIT: AL042120.1, EVALUE 1.00e-117
gaaatctacaaagatgcaaatactcaagttcacacattaagaaaaatggtcaaagaaaaagaagaagcaattcaaagacagtctaccctggaaaaaaagattcatgagctagagaaacaagggaccattaaaattcagaagaaaggggatggggatatcgccatactgccagttgtggcttctggcacattgtccatggggtcagaagtggtagcaggtaactctgtgggacccacaatgggggccgcttcctcaggacccttgccccctcctccaccaccactgcctccctcatcagacacacctgaaacag

SEQ ID NO: 21224 - DNA, 171 bp, Homo sapiens
  MAP TO AC012072.1; EXPRESSED IN BONE MARROW, SIGNAL = 1.2; EXPRESSED IN PLACENTA, SIGNAL = 0.98; EXPRESSED IN FETAL LIVER, SIGNAL = 1.3; EXPRESSED IN HEART, SIGNAL = 1.7; EXPRESSED IN HELA, SIGNAL = 1.2; EXPRESSED IN HBL100, SIGNAL = 1.6; EXPRESSED IN BT474, SIGNAL =   2; EXPRESSED IN BRAIN, SIGNAL = 1.4; EST_HUMAN HIT: AL038060.2, EVALUE 1.00e-41; SWISSPROT HIT: P57072, EVALUE 3.00e-03; NT HIT: gi8922391, EVALUE 9.00e-45
tatcgtcagtgaagcaggagcatcaatctacagtgtcagccctgaagctaacaaagagatgccagggctggaccctaatttgagaagtgcaggtaagaaactatggaccatcacaaaaacatgtgattttgatattttgggcagcatgtgtggcatgctaaatattctaaa

SEQ ID NO: 21225 - DNA, 423 bp, Homo sapiens
  MAP TO AC011422.2; EXPRESSED IN LUNG, SIGNAL = 1.1; EXPRESSED IN BRAIN, SIGNAL =   2; EXPRESSED IN BONE MARROW, SIGNAL = 1.4; EXPRESSED IN FETAL LIVER, SIGNAL = 1.1; EXPRESSED IN ADULT LIVER, SIGNAL = 1.2; EXPRESSED IN PLACENTA, SIGNAL =   1; EXPRESSED IN HEART, SIGNAL = 1.6; EXPRESSED IN HELA, SIGNAL = 1.1; EXPRESSED IN HBL100, SIGNAL = 1.1; EXPRESSED IN BT474, SIGNAL = 1.5; NT HIT: L17000.1, EVALUE 0.00e+00; EST_HUMAN HIT: AI656423.1, EVALUE 0.00e+00; SWISSPROT HIT: Q16566, EVALUE 2.00e-54
cacatcttgctgtggaacttcaaaacccacagcagagcttccttgcccttctctgggagctgctgcctcctccacagtcttcagcttctcctctgctaggccctcctctagttccaggtcagccacctttatcccatcctccactgccttgggcaccattttgggggcctcttcagcatttatatctgcacctttaactttctctaaggcttgcaccttcatcagctcagcctgtgcccccttaactgcggcttgggccccatcgccttgaattttctctccttctggaatagctttcatgtcctcgttgccatcttggattggagaagggtctcggctagccttgtggctctcctggatgctgccatggctgctgctggcacttcccaggcgcgaagaggccaccacagccttcaccgctgc

SEQ ID NO: 21226 - DNA, 650 bp, Homo sapiens
  MAP TO AL031983.1; EXPRESSED IN HELA, SIGNAL =  10; EXPRESSED IN HEART, SIGNAL = 6.5; EXPRESSED IN BT474, SIGNAL = 6.6; EXPRESSED IN BONE MARROW, SIGNAL = 3.6; EXPRESSED IN PLACENTA, SIGNAL = 4.8; EXPRESSED IN HBL100, SIGNAL = 9.4; EXPRESSED IN ADULT LIVER, SIGNAL = 1.7; EXPRESSED IN FETAL LIVER, SIGNAL = 6.4; EXPRESSED IN BRAIN, SIGNAL = 3.4; EXPRESSED IN LUNG, SIGNAL = 7.8; NT HIT: gi11429825, EVALUE 3.00e-45; EST_HUMAN HIT: AI401723.1, EVALUE 4.00e-45; SWISSPROT HIT: Q95307, EVALUE 1.00e-26
acagaataatttataatacagagggtttttttttgtttgtttgtttttgaggaataaacaaacagtctttattaggctcagaccagaagtccatggatcttgaggagacctgtgtgtatttgtcagttttctttttcatgttcttttccacctatttctgtagcctcataagctgtttcttcttctggtagtggatcttggccttctccttcctcttcttcagggtggctgtcactgcctggtacttccagctaacttcataagctcggtgtccaggcggacaaattttcttgtaggcttcagacacacaagcttgagggcagcaggaaccaccaaagctttttcttgtcatggggcggtggaatgccgtcagacaccttgaggtggttgagggcggcctggccttggtgagtcttgtggggcagtgggccttgcaccatccaccagaagatgcggctagggccgagaaatggcagggcctccagaaggtgttcatccgcttgcggagaaagcccaggtacttcaacttgtttctgtagaacttgccagaaatgttgatgctctcgcattgtacgaccaccaccttctggcctagagggaaggaaagggttgggaagtgctgagggtgccatctgaaggctctccctcta

SEQ ID NO: 21227 - DNA, 282 bp, Homo sapiens
  MAP TO AC012079.2; EXPRESSED IN LUNG, SIGNAL =  21; EXPRESSED IN BRAIN, SIGNAL = 6.3; EXPRESSED IN BONE MARROW, SIGNAL = 6.6; EXPRESSED IN HELA, SIGNAL = 7.6; EXPRESSED IN BT474, SIGNAL = 6.2; EXPRESSED IN ADULT LIVER, SIGNAL = 7.7; EXPRESSED IN FETAL LIVER, SIGNAL = 6.8; EXPRESSED IN PLACENTA, SIGNAL = 5.7; EXPRESSED IN HEART, SIGNAL = 5.4; EXPRESSED IN HBL100, SIGNAL =   6; NT HIT: L26980.1, EVALUE 2.70e+00; SWISSPROT HIT: Q62191, EVALUE 6.20e-02
gccacatgaccgatattgctaagcagcttctcaccactgcaaggcgcaaaaggaaactgcagggagaggagcccgtgtgcaggaagtcagatgtggccctgttctgtgagaaggatcctgagctactgtgtcaccagtatagggtctcctcgaccactgagatcaccccgatgcccattgaacaagctgcagctaagcacaggaagcagttcgagagctacattgaacccttggaaaagcaagtttgagacgctgccatggggtgtgaaatgcacatctaag

SEQ ID NO: 21228 - DNA, 87 bp, Homo sapiens
  MAP TO AC011451.2; EXPRESSED IN PLACENTA, SIGNAL =  18; EXPRESSED IN HBL100, SIGNAL =  13; EXPRESSED IN HEART, SIGNAL =  10; EXPRESSED IN ADULT LIVER, SIGNAL =  13; EXPRESSED IN LUNG, SIGNAL =  15; EXPRESSED IN BRAIN, SIGNAL =  15; EXPRESSED IN HELA, SIGNAL =  17; EXPRESSED IN BT474, SIGNAL =  12; EXPRESSED IN FETAL LIVER, SIGNAL =  13; EXPRESSED IN BONE MARROW, SIGNAL =  11; EST_HUMAN HIT: AW607039.1, EVALUE 1.00e-39; NT HIT: U37251.1, EVALUE 5.00e-42
cctgtatttcactccatccttggctaccttccccttgctcgtcagactcttctcccaggccctcttcttgcttacttatacccagcc

SEQ ID NO: 21229 - DNA, 475 bp, Homo sapiens; identical to SEQ ID NO: 4481
  MAP TO AF011889.1; EXPRESSED IN LUNG, SIGNAL = 3.8; EXPRESSED IN HBL100, SIGNAL = 2.7; EXPRESSED IN HEART, SIGNAL = 2.8; EXPRESSED IN BT474, SIGNAL = 2.6; EXPRESSED IN BONE MARROW, SIGNAL = 2.9; EXPRESSED IN BRAIN, SIGNAL = 2.4; EXPRESSED IN PLACENTA, SIGNAL = 3.2; EXPRESSED IN HELA, SIGNAL = 2.9; EXPRESSED IN ADULT LIVER, SIGNAL = 3.1; EXPRESSED IN FETAL LIVER, SIGNAL =   3; NT HIT: L47841.1, EVALUE 3.00e-01; EST_HUMAN HIT: AW027563.1, EVALUE 7.70e-02; SWISSPROT HIT: P48284, EVALUE 3.70e+00

SEQ ID NO: 21230 - DNA, 110 bp, Homo sapiens
  MAP TO AC012109.1; EXPRESSED IN PLACENTA, SIGNAL = 1.5; EXPRESSED IN HEART, SIGNAL = 1.5; EXPRESSED IN ADULT LIVER, SIGNAL = 2.3; EXPRESSED IN LUNG, SIGNAL = 1.2; EXPRESSED IN HELA, SIGNAL = 1.4; EXPRESSED IN HBL100, SIGNAL = 1.3; EXPRESSED IN BT474, SIGNAL = 1.6; EXPRESSED IN FETAL LIVER, SIGNAL = 1.8; EXPRESSED IN BRAIN, SIGNAL = 1.8; EXPRESSED IN BONE MARROW, SIGNAL = 1.7; EST_HUMAN HIT: BF681547.1, EVALUE 1.40e+00; NT HIT: AL161566.2, EVALUE 3.70e+00
ctggtgatgtggagagaggagaaaagggtcaagaacgtgtgttcatgcgcgcacgtgtgtgtgtgcgtgtgcatgtgcgtgtgcctgtgcatgtagaagaagatcataag

SEQ ID NO: 21231 - DNA, 455 bp, Homo sapiens
  MAP TO AC011504.2; EXPRESSED IN BONE MARROW, SIGNAL =  14; EXPRESSED IN PLACENTA, SIGNAL =  15; EXPRESSED IN FETAL LIVER, SIGNAL = 9.7; EXPRESSED IN ADULT LIVER, SIGNAL =  15; EXPRESSED IN LUNG, SIGNAL =  12; EXPRESSED IN HEART, SIGNAL = 9.8; EXPRESSED IN HELA, SIGNAL =  13; EXPRESSED IN HBL100, SIGNAL =  12; EXPRESSED IN BT474, SIGNAL =  11; EXPRESSED IN BRAIN, SIGNAL =  13; NT HIT: gi11425376, EVALUE 0.00e+00; SWISSPROT HIT: Q99081, EVALUE 3.10e-01; EST_HUMAN HIT: AL133822.1, EVALUE 0.00e+00
acgagggcagcagggccatcttactcgcctcccgggcttggtctttgcagttgactgtgaccccgatggtgttatctttgcgtttcgctttgcccaggtggttggcctggagatgaagggccatgagctccatggaggacgttgtgaaagcacaaaacaagcagccgtgccatgcaatgctgtcctgcacagttaccgaggagcccgggagggaggcggcatctggccgcacagacaagtccaggggttcatactgagatttctcggacttcctctgggaggacttgccactgggtttctcctcaccaccatccactccgtggactttcatggaaggggggtcagccagggctttgtccttcatgtccttctccttcttcaaggaactgaggacaaaactgtccatgaaagcttgcaaggacccttggaaattcacaccgttgctcacaatgctt

SEQ ID NO: 21232 - DNA, 171 bp, Homo sapiens
  MAP TO AC012113.1; EXPRESSED IN BT474, SIGNAL = 1.2; EXPRESSED IN LUNG, SIGNAL = 1.2; EXPRESSED IN BRAIN, SIGNAL = 2.6; EXPRESSED IN BONE MARROW, SIGNAL = 1.4; EXPRESSED IN FETAL LIVER, SIGNAL = 1.1; EXPRESSED IN ADULT LIVER, SIGNAL = 1.7; EXPRESSED IN PLACENTA, SIGNAL = 1.2; EXPRESSED IN HEART, SIGNAL = 1.6; EXPRESSED IN HELA, SIGNAL = 1.3; EXPRESSED IN HBL100, SIGNAL = 1.2; EST_HUMAN HIT: AA984078.1, EVALUE 2.00e-89; SWISSPROT HIT: P13592, EVALUE 5.00e-29; NT HIT: gi11438640, EVALUE 8.00e-92
cttccttggcatcataccacttggaatgccatacttcttcaccaactgctctccactcagctttgtatttgaggatgggcaccccacctgtggcctctggttcatcaaactgcacctgggctgtgctggagtatggctccacctggtcgatggatggtgaagagggggtgt

SEQ ID NO: 21233 - DNA, 162 bp, Homo sapiens
  MAP TO AC011589.2; EXPRESSED IN LUNG, SIGNAL =   6; EXPRESSED IN BRAIN, SIGNAL = 6.4; EXPRESSED IN BONE MARROW, SIGNAL = 6.6; EXPRESSED IN HELA, SIGNAL = 6.9; EXPRESSED IN BT474, SIGNAL = 5.9; EXPRESSED IN ADULT LIVER, SIGNAL = 7.3; EXPRESSED IN FETAL LIVER, SIGNAL = 9.4; EXPRESSED IN PLACENTA, SIGNAL = 6.6; EXPRESSED IN HEART, SIGNAL = 5.4; EXPRESSED IN HBL100, SIGNAL = 5.4; NT HIT: AJ277546.2, EVALUE 5.80e+00; SWISSPROT HIT: P28929, EVALUE 8.60e+00
aacatagaagatgatcaatatatgggagctgttattggcagcagtggccaggatactgactgggctagtagtcacgatgcagctaggatggtggctgggagaggggctgagtggtgggttgaaatggcggcagtgatcatcaaagtgatggtaacaattatg

SEQ ID NO: 21234 - DNA, 106 bp, Homo sapiens
  MAP TO AC007842.1; EXPRESSED IN BT474, SIGNAL = 1.2; EXPRESSED IN HBL100, SIGNAL = 0.73; EXPRESSED IN FETAL LIVER, SIGNAL = 0.85; EXPRESSED IN HELA, SIGNAL = 0.61; EXPRESSED IN BRAIN, SIGNAL = 0.74; EXPRESSED IN PLACENTA, SIGNAL = 0.75; EXPRESSED IN LUNG, SIGNAL = 0.62; EXPRESSED IN HEART, SIGNAL = 1.2; NT HIT: gi11427704, EVALUE 1.00e-30; EST_HUMAN HIT: AA534387.1, EVALUE 4.00e-53; SWISSPROT HIT: P52738, EVALUE 1.00e-10
agttctccaacatcacatccctgtacaaggtcctctgatcaggctgcaggcactcccactcctcctgagagaagtcaatggccacatccctgaatgtcactgatcc

SEQ ID NO: 21235 - DNA, 170 bp, Homo sapiens
  MAP TO AC012513.2; EXPRESSED IN BONE MARROW, SIGNAL = 4.4; EXPRESSED IN LUNG, SIGNAL = 4.8; EXPRESSED IN BRAIN, SIGNAL = 3.8; EXPRESSED IN PLACENTA, SIGNAL = 4.4; EXPRESSED IN HBL100, SIGNAL = 6.2; EXPRESSED IN HELA, SIGNAL = 5.5; EXPRESSED IN HEART, SIGNAL =   4; EXPRESSED IN BT474, SIGNAL = 3.8; EXPRESSED IN FETAL LIVER, SIGNAL = 4.4; EXPRESSED IN ADULT LIVER, SIGNAL = 4.4; NT HIT: gi10863944, EVALUE 3.00e-91; SWISSPROT HIT: P13010, EVALUE 1.00e-27; EST_HUMAN HIT: BF130586.1, EVALUE 5.00e-91
ccccgggagcctctacccccaattcagcagcatatttggaatatgctgaatcctcccgctgaggtgacaacaaaaagtcagattcctctctctaaaataaagaccctttttcctctgattgaagccaagaaaaaggatcaagtgactgctcaggaaattttccaagacaa

SEQ ID NO: 21236 - DNA, 107 bp, Homo sapiens
  MAP TO AC011632.2; EXPRESSED IN BONE MARROW, SIGNAL = 2.2; EXPRESSED IN PLACENTA, SIGNAL = 1.3; EXPRESSED IN HEART, SIGNAL = 1.5; EXPRESSED IN ADULT LIVER, SIGNAL = 1.9; EXPRESSED IN LUNG, SIGNAL = 1.4; EXPRESSED IN HELA, SIGNAL = 1.2; EXPRESSED IN HBL100, SIGNAL = 1.6; EXPRESSED IN BT474, SIGNAL = 1.6; EXPRESSED IN FETAL LIVER, SIGNAL = 1.5; EXPRESSED IN BRAIN, SIGNAL = 1.6; SWISSPROT HIT: P39188, EVALUE 4.00e-03; NT HIT: AF135116.1, EVALUE 2.00e-13; EST_HUMAN HIT: BF340987.1, EVALUE 1.00e-13
atcacagcccactgaagcctggacctcccaggctcagacgatcctcccacctcagcctcacaggcgtacttctcctcatgtatgtcttcgttgtctttctctgtggc

SEQ ID NO: 21237 - DNA, 92 bp, Homo sapiens
  MAP TO AC008267.1; EXPRESSED IN BONE MARROW, SIGNAL = 0.77; EXPRESSED IN BRAIN, SIGNAL = 0.75; EXPRESSED IN PLACENTA, SIGNAL = 0.61; EXPRESSED IN BT474, SIGNAL = 0.99; EXPRESSED IN HBL100, SIGNAL = 0.75; EXPRESSED IN FETAL LIVER, SIGNAL = 0.86; EXPRESSED IN LUNG, SIGNAL = 0.63; EXPRESSED IN HEART, SIGNAL = 0.86; NT HIT: gi7657495, EVALUE 3.00e-24; EST_HUMAN HIT: AW813617.1, EVALUE 1.00e-42; SWISSPROT HIT: P02816, EVALUE 1.80e+00
agatgctgtgtgtccctgttaatgaagacatcccagaagtgtctgatacggtgttgaaggcaatcacaggtcagtgaaaccaagagcctttt

SEQ ID NO: 21238 - DNA, 111 bp, Homo sapiens
  MAP TO AC012130.1; EXPRESSED IN BRAIN, SIGNAL = 2.6; EXPRESSED IN BONE MARROW, SIGNAL = 2.9; EXPRESSED IN PLACENTA, SIGNAL =   3; EXPRESSED IN FETAL LIVER, SIGNAL =   3; EXPRESSED IN ADULT LIVER, SIGNAL =   3; EXPRESSED IN LUNG, SIGNAL = 2.3; EXPRESSED IN HEART, SIGNAL = 2.4; EXPRESSED IN HELA, SIGNAL = 2.5; EXPRESSED IN HBL100, SIGNAL = 2.8; EXPRESSED IN BT474, SIGNAL = 2.6; EST_HUMAN HIT: BF026487.1, EVALUE 2.30e-02; NT HIT: X58743.1, EVALUE 5.20e-02
ctgggcttgaccgtgaaacttgctttggccaaaagaacagtagcgaatgtggtacaaatgcttggccattggctgctcgttcttgttgctcttgggaatgctgggaccacc

SEQ ID NO: 21239 - DNA, 167 bp, Homo sapiens
  MAP TO AC011281.2; EXPRESSED IN BT474, SIGNAL = 1.5; EXPRESSED IN BRAIN, SIGNAL = 1.2; EXPRESSED IN BONE MARROW, SIGNAL =   1; EXPRESSED IN PLACENTA, SIGNAL = 1.8; EXPRESSED IN ADULT LIVER, SIGNAL = 1.5; EXPRESSED IN FETAL LIVER, SIGNAL = 1.1; EXPRESSED IN HEART, SIGNAL = 1.2; EXPRESSED IN HELA, SIGNAL = 1.1; EXPRESSED IN HBL100, SIGNAL =   1; SWISSPROT HIT: P70213, EVALUE 5.10e-02; NT HIT: AL163248.2, EVALUE 8.00e-18; EST_HUMAN HIT: AV725123.1, EVALUE 5.00e-20
ggagaatttcagccccttctctaaaggagataagactctgactcagcgcattcttagaagatttgaggcgcagtatctgcttctgaaaccaggaggagttaatgaccttgatttcatcactttctttcataactttgtccactgaacttaggagtaaccaactacct

SEQ ID NO: 21240 - DNA, 231 bp, Homo sapiens
  MAP TO AL049596.11; EXPRESSED IN BRAIN, SIGNAL = 0.96; EXPRESSED IN LUNG, SIGNAL = 1.2; EXPRESSED IN HBL100, SIGNAL = 1.3; EXPRESSED IN HELA, SIGNAL = 1.9; EXPRESSED IN HEART, SIGNAL = 3.5; EXPRESSED IN FETAL LIVER, SIGNAL = 1.4; EXPRESSED IN BT474, SIGNAL = 1.3; NT HIT: gi11430402, EVALUE 2.00e-77; EST_HUMAN HIT: AV690823.1, EVALUE 3.00e-77; SWISSPROT HIT: P00508, EVALUE 8.00e-31
gttgctggaggttatccctgccacagagatgcggccgtcctttgccatgtagatggagaactccttggtcagccaccccacctgttcaggctttagctctgtgaaacaagacatgccaatttggtcagtgatgtgttgccagttgtgagtggaacccttcttcttgaggttgaagaccagctgagtccgcatgctaatgatgcagtcggccatgcctttcacttcttacaa

SEQ ID NO: 21241 - DNA, 195 bp, Homo sapiens
  MAP TO AL049646.17; EXPRESSED IN BT474, SIGNAL = 1.1; EXPRESSED IN FETAL LIVER, SIGNAL = 1.2; EXPRESSED IN BONE MARROW, SIGNAL = 0.93; EXPRESSED IN LUNG, SIGNAL = 1.1; EXPRESSED IN HELA, SIGNAL =   1; EXPRESSED IN HEART, SIGNAL = 1.2; EXPRESSED IN ADULT LIVER, SIGNAL = 1.2; EXPRESSED IN BRAIN, SIGNAL =   1; EXPRESSED IN PLACENTA, SIGNAL = 1.1; EXPRESSED IN HBL100, SIGNAL = 1.1; SWISSPROT HIT: Q04182, EVALUE 8.30e+00; NT HIT: gi11422250, EVALUE 1.00e-38; EST_HUMAN HIT: BF212834.1, EVALUE 7.00e-38
cctgaaaacagactcctgctgaaggaagtcggacccacgggggaaggaagagtctctgtgattgaacagctgctggatgaggtaagtgttgccaaaggagccagtctctctgaagagttcagcctggcattccacctctgtctccttcagatgaaagttttgttcaatactgtgaaaattacactgccctttgat

SEQ ID NO: 21242 - DNA, 259 bp, Homo sapiens
  MAP TO AC012665.1; EXPRESSED IN LUNG, SIGNAL = 2.6; EXPRESSED IN PLACENTA, SIGNAL = 2.8; EXPRESSED IN ADULT LIVER, SIGNAL = 2.9; EXPRESSED IN BONE MARROW, SIGNAL = 3.1; EXPRESSED IN BRAIN, SIGNAL = 2.4; EXPRESSED IN HEART, SIGNAL = 2.4; EXPRESSED IN HELA, SIGNAL = 3.6; EXPRESSED IN HBL100, SIGNAL = 3.1; EXPRESSED IN FETAL LIVER, SIGNAL = 3.2; EXPRESSED IN BT474, SIGNAL = 2.5; SWISSPROT HIT: P09401, EVALUE 1.30e+00; NT HIT: AJ237939.1, EVALUE 9.70e+00
gcatccgattcaatacgaggaaggaggtgggcggggtgggggagacagacgggttctcgcccctctcccccgctcccaggctcttgagactttccgttcccttaccgccccaccttctgtactaaactttttccttccacatcttcccgcctgggccctgcagcgccgacctctgctggaacccggagcttttcttgcacctccccgggaagagggtcccaaagatgcacgccccttgggcaacagggaggcgcggcct

SEQ ID NO: 21243 - DNA, 173 bp, Homo sapiens
  MAP TO AC012071.2; EXPRESSED IN BONE MARROW, SIGNAL = 1.5; EXPRESSED IN LUNG, SIGNAL =   1; EXPRESSED IN PLACENTA, SIGNAL = 0.98; EXPRESSED IN HBL100, SIGNAL = 1.1; EXPRESSED IN HELA, SIGNAL = 1.4; EXPRESSED IN HEART, SIGNAL =   1; EXPRESSED IN ADULT LIVER, SIGNAL =   1; EXPRESSED IN BT474, SIGNAL = 1.4; EXPRESSED IN FETAL LIVER, SIGNAL = 1.1; EXPRESSED IN BRAIN, SIGNAL = 1.2; NT HIT: L10668.1, EVALUE 1.00e-01; EST_HUMAN HIT: AA906078.1, EVALUE 1.00e-02; SWISSPROT HIT: P50800, EVALUE 2.20e+00
aaaccactttcgtcctggttagagaaggtggagaagcagcggacatgaacactactcctgcagaagcaagggcagagcaacttaccacagaaatgggggtgggtgggcaggttgcaatggatatgtcgcatcttgtgccaggtgacaatgctactaaatgtcaaggtgagact

SEQ ID NO: 21244 - DNA, 240 bp, Homo sapiens
  MAP TO AC011330.4; EXPRESSED IN BT474, SIGNAL = 1.6; EXPRESSED IN BRAIN, SIGNAL = 1.7; EXPRESSED IN ADULT LIVER, SIGNAL = 1.4; EXPRESSED IN LUNG, SIGNAL = 1.2; EXPRESSED IN BONE MARROW, SIGNAL = 1.4; EXPRESSED IN PLACENTA, SIGNAL = 1.7; EXPRESSED IN HEART, SIGNAL = 1.2; EXPRESSED IN HELA, SIGNAL = 1.3; EXPRESSED IN HBL100, SIGNAL = 1.1; EXPRESSED IN FETAL LIVER, SIGNAL = 1.2; EST_HUMAN HIT: AA020739.1, EVALUE 1.00e-107; SWISSPROT HIT: P21783, EVALUE 5.10e-01; NT HIT: gi7662083, EVALUE 1.00e-109
gccttagagagacggagcaactctgctgtgccttgaagtcccagactcccattgtgctgcacatcatacttgacacagtcatagatgtcagggatcttactgatatcatagcgcccactcttctgtcgaaagtcacgctccagcttgctccaacgctgtagcattagctctagtgtctcactgtggtagagctgcaggtctggaagaaaggcaggaatcagataagaatcaaagatttta

SEQ ID NO: 21245 - DNA, 847 bp, Homo sapiens; identical to SEQ ID NO: 18819
  MAP TO AC000052.8; EXPRESSED IN BT474, SIGNAL = 1.1; EXPRESSED IN BONE MARROW, SIGNAL = 0.73; EXPRESSED IN FETAL LIVER, SIGNAL = 1.5; EXPRESSED IN LUNG, SIGNAL = 1.2; EXPRESSED IN HELA, SIGNAL = 0.73; EXPRESSED IN ADULT LIVER, SIGNAL = 1.6; EXPRESSED IN PLACENTA, SIGNAL = 2.3; EXPRESSED IN HBL100, SIGNAL = 0.67; EXPRESSED IN BRAIN, SIGNAL = 1.4; EXPRESSED IN HEART, SIGNAL = 1.2; NT HIT: U86076.1, EVALUE 1.20e-01; EST_HUMAN HIT: BE144286.1, EVALUE 1.00e-106; SWISSPROT HIT: Q15427, EVALUE 2.00e-04

SEQ ID NO: 21246 - DNA, 266 bp, Homo sapiens
  MAP TO AF067844.1; EXPRESSED IN BT474, SIGNAL = 2.5; EXPRESSED IN FETAL LIVER, SIGNAL = 3.2; EXPRESSED IN BONE MARROW, SIGNAL =   2; EXPRESSED IN LUNG, SIGNAL = 4.4; EXPRESSED IN BRAIN, SIGNAL = 0.96; EXPRESSED IN PLACENTA, SIGNAL = 2.9; EXPRESSED IN HBL100, SIGNAL = 2.9; EXPRESSED IN HELA, SIGNAL = 2.5; EXPRESSED IN HEART, SIGNAL =   2; EXPRESSED IN ADULT LIVER, SIGNAL = 1.2; EST_HUMAN HIT: AI222037.1, EVALUE 0.00e+00; NT HIT: AF143314.1, EVALUE 0.00e+00; SWISSPROT HIT: O08586, EVALUE 2.00e-44
gttatctttttaccacagttgcacaatatccttttgaagaccataacccaccacagctagaacttatcaaacccttttgtgaagatcttgaccaatggctaagtgaagatgacaatcatgttgcagcaattcactgtaaagctggaaagggacgaactggtgtaatgatatgtgcatatttattacatcggggcaaatttttaaaggcacaagaggccctagatttctatggggaagtaaggaccagagacaaaaaggtaagttat

SEQ ID NO: 21247 - DNA, 360 bp, Homo sapiens
  MAP TO AF134471.1; EXPRESSED IN BT474, SIGNAL = 4.8; EXPRESSED IN ADULT LIVER, SIGNAL = 5.7; EXPRESSED IN FETAL LIVER, SIGNAL =   5; EXPRESSED IN BONE MARROW, SIGNAL = 5.3; EXPRESSED IN LUNG, SIGNAL = 5.4; EXPRESSED IN BRAIN, SIGNAL = 4.3; EXPRESSED IN HELA, SIGNAL = 4.8; EXPRESSED IN PLACENTA, SIGNAL = 6.7; EXPRESSED IN HBL100, SIGNAL = 5.1; EXPRESSED IN HEART, SIGNAL = 4.2; EST_HUMAN HIT: BF667027.1, EVALUE 1.00e-126; SWISSPROT HIT: P22193, EVALUE 7.30e-02; NT HIT: gi4506384, EVALUE 1.00e-127
tccagatccccctgcaaaggtgtttcgcgatctgcaggaacaggccccaggagcatcccttggggccgaatgtgcagtgggcgatgcccctcctgacccaacagatccaagacgagcatgatcaatacagtcttgtggccagccttgacaatgttaggaatctctccactatcttaaaagctattcatttccgaaaatgtgctgtgtgtttcgcaactaaaaatggaatcaaagtaacaatggaaaatgcaaagtgtgtgcaagcaaatgcttttattcaggctggaatatttcaagagcttaaagttcaggaagagtctgttactttttgaattaatttcattgtccttttagactgtt

SEQ ID NO: 21248 - DNA, 362 bp, Homo sapiens
  MAP TO AF134726.1; EXPRESSED IN LUNG, SIGNAL =  14; EXPRESSED IN PLACENTA, SIGNAL =  12; EXPRESSED IN HEART, SIGNAL = 8.7; EXPRESSED IN ADULT LIVER, SIGNAL =  13; EXPRESSED IN FETAL LIVER, SIGNAL =  11; EXPRESSED IN BONE MARROW, SIGNAL =  11; EXPRESSED IN BRAIN, SIGNAL =  10; EXPRESSED IN HELA, SIGNAL =  12; EXPRESSED IN HBL100, SIGNAL =  10; EXPRESSED IN BT474, SIGNAL =  11; NT HIT: AJ245418.1, EVALUE 0.00e+00; SWISSPROT HIT: O46392, EVALUE 1.70e-01; EST_HUMAN HIT: AW901419.1, EVALUE 5.80e-02
gtcttcagacccagctgctggtagaagtgacagggttgggttccagagccaatcctggggatcctcagccgcatttctcccacgtcatccttcgaggggtcccagagggtgccgaactaggccaggtgcccttggagcccgtgggacctccggagcgaggtctcctcgcagcctcgctgtcgcccacgctgctgtccacccctagacccttctccctggagctgattggccaggacgcagcggggcggcgcctgcacagggctgcccctcagcctagcactgtagtccctgtccttctggaggtgagacgccaggggaaagtgcggctggggctggagagagttagagcggccccttccctg

SEQ ID NO: 21249 - DNA, 173 bp, Homo sapiens
  MAP TO AC007912.2; EXPRESSED IN PLACENTA, SIGNAL = 0.8; EXPRESSED IN HBL100, SIGNAL = 0.75; EXPRESSED IN BRAIN, SIGNAL = 0.72; EXPRESSED IN HEART, SIGNAL = 0.97; EXPRESSED IN HELA, SIGNAL = 0.65; EXPRESSED IN BT474, SIGNAL = 0.85; EXPRESSED IN BONE MARROW, SIGNAL = 0.96; EXPRESSED IN FETAL LIVER, SIGNAL = 0.65; EXPRESSED IN LUNG, SIGNAL = 0.67; EXPRESSED IN ADULT LIVER, SIGNAL = 0.73; EST_HUMAN HIT: AA649141.1, EVALUE 7.00e-10; SWISSPROT HIT: P30658, EVALUE 9.80e-01; NT HIT: AL163227.2, EVALUE 2.00e-11
aagatcaaggcaccaatagatttggtgcctgctcccttgttcatggctgccacctcttgttgtcttctcatggtagaagggccaaggcagctctctggggcctcttttacaaaggcactaatctcattcgtgagggttccaccttcatgacctaatcatgttccaaagtcctc

SEQ ID NO: 21250 - DNA, 151 bp, Homo sapiens
  MAP TO AL034403.17; EXPRESSED IN PLACENTA, SIGNAL = 0.92; EXPRESSED IN FETAL LIVER, SIGNAL = 0.8; EXPRESSED IN BT474, SIGNAL = 1.3; EXPRESSED IN HEART, SIGNAL = 0.94; EXPRESSED IN BRAIN, SIGNAL = 0.73; EXPRESSED IN ADULT LIVER, SIGNAL = 0.92; EXPRESSED IN HELA, SIGNAL = 0.94; EXPRESSED IN LUNG, SIGNAL = 0.79; EXPRESSED IN HBL100, SIGNAL = 0.78; EXPRESSED IN BONE MARROW, SIGNAL = 1.1; NT HIT: AJ131016.1, EVALUE 5.00e-03; SWISSPROT HIT: P48533, EVALUE 1.20e-01
aggtccagagccagtctccaaaatggtccatcaagactgatgattcctgggggctcctctttccggttccagtggtccaaaccaccattaccacacaggagccccaggtatttctggaaattgaagggaggaaagtggatctccttctgga

SEQ ID NO: 21251 - DNA, 192 bp, Homo sapiens
  MAP TO AP000038.1; EXPRESSED IN HBL100, SIGNAL = 1.5; EXPRESSED IN HELA, SIGNAL = 0.94; EXPRESSED IN BRAIN, SIGNAL = 1.2; EXPRESSED IN PLACENTA, SIGNAL = 1.2; EXPRESSED IN BT474, SIGNAL = 2.2; EXPRESSED IN BONE MARROW, SIGNAL = 1.4; EXPRESSED IN FETAL LIVER, SIGNAL = 1.3; EXPRESSED IN LUNG, SIGNAL = 2.4e+02; EXPRESSED IN ADULT LIVER, SIGNAL = 0.93; EXPRESSED IN HEART, SIGNAL = 0.9; NT HIT: AF231920.1, EVALUE 1.00e-104; EST_HUMAN HIT: BF215569.1, EVALUE 1.00e-104
atcaatagtaacgggagtcatctcattactgggagttttgaaagggactgtattatctgttttttgagatttggcatctgatgatccataggccgtataactataaggaatgccataggatgagccgtaaggcattgtctggtaagtgttctggtagtacatattcacttctgcgggttgactggcttgaac

SEQ ID NO: 21252 - DNA, 142 bp, Homo sapiens
  MAP TO AJ003147.1; EXPRESSED IN PLACENTA, SIGNAL = 3.7; EXPRESSED IN HELA, SIGNAL = 5.6; EXPRESSED IN HBL100, SIGNAL = 5.5; EXPRESSED IN HEART, SIGNAL = 6.3; EXPRESSED IN BT474, SIGNAL = 6.5; EXPRESSED IN ADULT LIVER, SIGNAL = 2.8; EXPRESSED IN FETAL LIVER, SIGNAL =   5; EXPRESSED IN BONE MARROW, SIGNAL = 4.2; EXPRESSED IN LUNG, SIGNAL = 3.5; EXPRESSED IN BRAIN, SIGNAL = 4.5; NT HIT: gi11431360, EVALUE 1.00e-40; EST_HUMAN HIT: BE886797.1, EVALUE 2.00e-40; SWISSPROT HIT: P98182, EVALUE 2.00e-10
gacgtgagttgttgagtaggatccaagctcacacattcttcctggcagtgaaatacattcaaatcctcaaagaccaccagctcctgaaagagcaagaggcccctttcatcttagtaactgaggttcactgacagccctactg

SEQ ID NO: 21253 - DNA, 112 bp, Homo sapiens
  MAP TO AL034547.11; EXPRESSED IN HEART, SIGNAL = 1.2; EXPRESSED IN BONE MARROW, SIGNAL = 0.9; EXPRESSED IN ADULT LIVER, SIGNAL = 1.1; EST_HUMAN HIT: AL138001.1, EVALUE 9.80e-01; NT HIT: AJ011048.1, EVALUE 5.30e-02
gaaaattgaagtacaaagaaacaagtgcttcctcagcatcttggaaattgggattaagggtcaaaaaggttaagatttcatgctgagaacggttgagcccaatcacaaagat

SEQ ID NO: 21254 - DNA, 180 bp, Homo sapiens
  MAP TO AL034380.21; EXPRESSED IN HELA, SIGNAL = 1.1; EXPRESSED IN HEART, SIGNAL = 1.1; EXPRESSED IN LUNG, SIGNAL = 1.4; EST_HUMAN HIT: AA705222.1, EVALUE 5.00e-90; NT HIT: AF060568.1, EVALUE 1.70e+00; SWISSPROT HIT: P29974, EVALUE 2.20e-02
atgatcactctggtgattatgctgaggacagacttggaaggaaaagaggaagaaaagaaacagaacagtcagaagtttgtggcaagacaccaggtgagagataacagggacccgaaaaaacaaaaggcagtggagaaagagaggggaaaccagattcaaaagcaaaaaccatttctgtgg

SEQ ID NO: 21255 - DNA, 108 bp, Homo sapiens
  MAP TO AC007682.1; EXPRESSED IN PLACENTA, SIGNAL = 0.84; EXPRESSED IN BT474, SIGNAL = 0.91; EXPRESSED IN HBL100, SIGNAL = 1.3; EXPRESSED IN LUNG, SIGNAL = 1.1; EXPRESSED IN ADULT LIVER, SIGNAL = 0.82; EXPRESSED IN BONE MARROW, SIGNAL = 1.1; EXPRESSED IN FETAL LIVER, SIGNAL =   1; EXPRESSED IN HELA, SIGNAL =   1; EXPRESSED IN BRAIN, SIGNAL = 1.1; EXPRESSED IN HEART, SIGNAL =   1; EST_HUMAN HIT: BE312597.1, EVALUE 9.40e-01; NT HIT: L13763.1, EVALUE 9.20e-01
aaaacagagcacagcacatcggataaattcaataactatcttaagaatcagcaaaacaacatgcagatggctgattggcaatagtttcagtaggcagattttgattaa

SEQ ID NO: 21256 - DNA, 114 bp, Homo sapiens
  MAP TO AL109836.9; EXPRESSED IN ADULT LIVER, SIGNAL = 0.98; EXPRESSED IN HBL100, SIGNAL = 1.1; EXPRESSED IN HEART, SIGNAL = 1.1; EXPRESSED IN LUNG, SIGNAL = 1.1; EXPRESSED IN BONE MARROW, SIGNAL = 1.1; EST_HUMAN HIT: AA487021.1, EVALUE 6.00e-03; NT HIT: AJ243211.1, EVALUE 5.40e-02
tcatttactggaactttatgagtttccttggtgttgtcatgtttgcctgattcttcgtcacctatgtgcctgtgcatttgaaggaacaaacaattcttccaaattgtagagacg

SEQ ID NO: 21257 - DNA, 114 bp, Homo sapiens
  MAP TO AP000043.1; EXPRESSED IN BT474, SIGNAL = 0.63; EXPRESSED IN HEART, SIGNAL = 0.99; NT HIT: U82671.2, EVALUE 4.00e-03; EST_HUMAN HIT: AW629294.1, EVALUE 4.00e-04
caaggtgtcagcagaattggttccttctgagatctctcttcttggctcatagatggcggatttctgagtcttcacatggtcacccctctgtgtctgtgtcctaatctcctcttc

SEQ ID NO: 21258 - DNA, 384 bp, Homo sapiens
  MAP TO AP000089.1; EXPRESSED IN BONE MARROW, SIGNAL =  47; EXPRESSED IN FETAL LIVER, SIGNAL = 0.65; EXPRESSED IN LUNG, SIGNAL = 0.64; EXPRESSED IN HELA, SIGNAL = 0.64; EXPRESSED IN HEART, SIGNAL = 0.84; SWISSPROT HIT: P23004, EVALUE 1.20e+00; NT HIT: D87675.1, EVALUE 0.00e+00; EST_HUMAN HIT: BE165330.1, EVALUE 5.00e-98
ctaatagtaaaagcctatcgtataccacctagcaggactagaggaatagatgtccttgatcagatcacaaaaccaatacaggagaaagacctagatgtggcagggggtttcaacctttctggggcaactaccacaggtctattcgagaagtaccatagtaatagaattaaaagctgctatgctgacattataatgtacccagaaggaaaaaaaaaagcgagagggagaaagcagaagggaattattaccacagagctgattctggccaacaaggagaagctcatcattgggaaaagtgataggaacccgggatttgtagccacaggaagccttggactcgtagtgagagcacagcattatgtaggaaatcagattccaaacacg

SEQ ID NO: 21259 - DNA, 141 bp, Homo sapiens
  MAP TO AP000044.1; EXPRESSED IN BT474, SIGNAL = 0.87; EXPRESSED IN BONE MARROW, SIGNAL = 0.99; EXPRESSED IN HELA, SIGNAL = 0.75; EXPRESSED IN ADULT LIVER, SIGNAL = 1.1; EXPRESSED IN BRAIN, SIGNAL = 0.88; EXPRESSED IN PLACENTA, SIGNAL = 1.1; EXPRESSED IN HBL100, SIGNAL = 1.2; EXPRESSED IN FETAL LIVER, SIGNAL = 0.79; EXPRESSED IN LUNG, SIGNAL = 0.97; EXPRESSED IN HEART, SIGNAL = 0.82; EST_HUMAN HIT: AW950868.1, EVALUE 7.00e-74; NT HIT: Z17227.1, EVALUE 4.00e-74; SWISSPROT HIT: Q08334, EVALUE 5.00e-24
gtagaagtacttgctgattctttacatatgcgtttcttagcccctaaaattgagaatgaatacgaaacttggactatgaagaatgtgtataactcatggacttataatgtgcaatactggaaaaacggtactgatgaaaag

SEQ ID NO: 21260 - DNA, 121 bp, Homo sapiens
  MAP TO AL049694.9; EXPRESSED IN PLACENTA, SIGNAL = 0.61; EXPRESSED IN FETAL LIVER, SIGNAL = 0.66; EXPRESSED IN LUNG, SIGNAL = 0.59; EXPRESSED IN HEART, SIGNAL = 0.85; EXPRESSED IN BRAIN, SIGNAL = 1.5; EXPRESSED IN HBL100, SIGNAL = 1.3; EXPRESSED IN HELA, SIGNAL = 1.6; EST_HUMAN HIT: W52878.1, EVALUE 4.00e-38; SWISSPROT HIT: P11586, EVALUE 7.00e-06; NT HIT: X67618.1, EVALUE 1.10e+00
tgggtcgatgtcgagacgggcaaatttactcacttcctcttctgtcagtgtgctcggatcagtcttatttattcccagtttctaatgattaagaagaaaaaaggtgagaagtttgagaaga

SEQ ID NO: 21261 - DNA, 129 bp, Homo sapiens
  MAP TO AC007681.2; EXPRESSED IN HEART, SIGNAL = 0.96; EXPRESSED IN FETAL LIVER, SIGNAL = 0.59; EXPRESSED IN ADULT LIVER, SIGNAL = 0.77; EXPRESSED IN PLACENTA, SIGNAL = 0.7; EXPRESSED IN LUNG, SIGNAL = 0.65; EST_HUMAN HIT: AA196396.1, EVALUE 6.60e+00; SWISSPROT HIT: P25932, EVALUE 8.90e+00
gaagacaactgccaatctctgcagcatgagctgcttcgtgcccaggagctccaaggtgccaccaaccacaagggctacagccatgcagagcatgagcatgcaggcctaggtgtccagggtgggaatggg

SEQ ID NO: 21262 - DNA, 102 bp, Homo sapiens
  MAP TO AC006483.2; EXPRESSED IN LUNG, SIGNAL = 0.95; EXPRESSED IN BRAIN, SIGNAL = 0.7; EXPRESSED IN HEART, SIGNAL = 0.95; EXPRESSED IN PLACENTA, SIGNAL = 0.8; EXPRESSED IN BT474, SIGNAL = 0.75; EXPRESSED IN HBL100, SIGNAL = 0.84; EXPRESSED IN FETAL LIVER, SIGNAL = 0.72; EXPRESSED IN ADULT LIVER, SIGNAL = 0.7; EXPRESSED IN BONE MARROW, SIGNAL = 0.97; EXPRESSED IN HELA, SIGNAL = 0.67; NT HIT: AP001517.1, EVALUE 8.60e-01; EST_HUMAN HIT: BE925424.1, EVALUE 1.30e+00; SWISSPROT HIT: P81013, EVALUE 8.00e-01
agccaccagctccagacaaatccagcccaaggggaaacacactgacatccacagtccatgtggtgacgaagagcagttggtaccgcatggctttaaattgtt

SEQ ID NO: 21263 - DNA, 227 bp, Homo sapiens
  MAP TO AC007041.3; EXPRESSED IN LUNG, SIGNAL = 0.98; EXPRESSED IN ADULT LIVER, SIGNAL = 0.84; EXPRESSED IN HEART, SIGNAL = 0.84; EXPRESSED IN PLACENTA, SIGNAL = 0.86; EXPRESSED IN BT474, SIGNAL =   2; EXPRESSED IN BONE MARROW, SIGNAL = 1.7; EXPRESSED IN HBL100, SIGNAL = 1.8; EXPRESSED IN FETAL LIVER, SIGNAL = 1.5; EXPRESSED IN HELA, SIGNAL = 1.2; NT HIT: AF315591.1, EVALUE 1.00e-125; EST_HUMAN HIT: BE315412.1, EVALUE 1.00e-125; SWISSPROT HIT: P36738, EVALUE 7.70e-01
actggatgaggatccatgtgatgaaagtgatggcggtggcgtaagtgaatgtcctggagtttggcttggcagaggcatgcctattggacttggagaggaggaaaatcccagactattgtaaaatggttgccctatgggtgctaggctgctactagatcttttgtacaagtcagagctagtagatagagactctctccttgtggcactactacttgcagaactgccaa

SEQ ID NO: 21264 - DNA, 124 bp, Homo sapiens
  MAP TO AC009225.1; EXPRESSED IN LUNG, SIGNAL = 2.6; EXPRESSED IN HEART, SIGNAL = 1.1; NT HIT: gi4506466, EVALUE 5.90e-02; EST_HUMAN HIT: BE968922.1, EVALUE 2.60e-02
cctacatcccctaaactcaatgagacagatgttccctgaatatcagctggtgggagtaggtaaagacaaaaagagaaacaaaatgcctctcaccgtcaaggtgattataatctcattgctaaaa

SEQ ID NO: 21265 - DNA, 243 bp, Homo sapiens
  MAP TO AC007091.3; EXPRESSED IN HEART, SIGNAL = 1.4; EXPRESSED IN BT474, SIGNAL = 0.88; EXPRESSED IN FETAL LIVER, SIGNAL = 0.93; EXPRESSED IN LUNG, SIGNAL = 1.2; EXPRESSED IN ADULT LIVER, SIGNAL = 0.89; EXPRESSED IN BRAIN, SIGNAL = 0.85; EXPRESSED IN PLACENTA, SIGNAL = 0.81; EXPRESSED IN BONE MARROW, SIGNAL = 1.2; EXPRESSED IN HBL100, SIGNAL = 0.75; EXPRESSED IN HELA, SIGNAL = 1.2; EST_HUMAN HIT: D44666.1, EVALUE 4.00e-11; SWISSPROT HIT: P18168, EVALUE 1.50e+00; NT HIT: X54816.1, EVALUE 6.00e-04
gcaccactatgttcctctcatccagagacaggtgcctacagcagaagccacccacaatgcatctgatccagctgaagactttcatggagccagcacctgtggtggtgcctgtagctgcccaccccaccacagcagccagtgtggcacactgcatagaccccacactcacttgctcacatgccccttgcctctctgcacctggcttgcccttggcagtcatgggatccaggccagtagcatgag

SEQ ID NO: 21266 - DNA, 203 bp, Homo sapiens
  MAP TO AC008274.1; EXPRESSED IN HBL100, SIGNAL = 0.76; EXPRESSED IN ADULT LIVER, SIGNAL = 0.71; EXPRESSED IN PLACENTA, SIGNAL = 0.93; EXPRESSED IN LUNG, SIGNAL = 0.59; EXPRESSED IN HELA, SIGNAL = 0.83; EXPRESSED IN FETAL LIVER, SIGNAL = 0.75; EXPRESSED IN HEART, SIGNAL = 0.85; SWISSPROT HIT: P00513, EVALUE 6.30e+00; NT HIT: AF149773.1, EVALUE 3.00e-05; EST_HUMAN HIT: AI419886.1, EVALUE 3.00e-05
aaaatgataaaagaaggaactatgaagtatcagaaggaagaacaaaaagagcaaaaatatgggtaaatacaatagactgttcttttccacatacatgttctaaatcatatttgatgatcagaacaaaagttgtaaaccatatgacattcaagacaataatatttaaaagtggggaaggtaaagggactgacccaaatatggag

SEQ ID NO: 21267 - DNA, 104 bp, Homo sapiens
  MAP TO AC009300.1; EXPRESSED IN BRAIN, SIGNAL = 0.8; EXPRESSED IN HEART, SIGNAL = 0.85; EXPRESSED IN BONE MARROW, SIGNAL = 0.74; EXPRESSED IN HELA, SIGNAL = 0.88; EXPRESSED IN PLACENTA, SIGNAL = 0.88; EXPRESSED IN BT474, SIGNAL = 0.72; EXPRESSED IN ADULT LIVER, SIGNAL = 0.75; EXPRESSED IN LUNG, SIGNAL =   1; EXPRESSED IN FETAL LIVER, SIGNAL = 0.82; EXPRESSED IN HBL100, SIGNAL = 0.7; NT HIT: AB009668.1, EVALUE 5.00e-11; EST_HUMAN HIT: BF448385.1, EVALUE 6.00e-12
atgacttttgctcttgactggtggtttgtttttggtttgactgcactgtttccgcctcttggtagccattgctttgattgtgctttgtcttcagaaccatactg

SEQ ID NO: 21268 - DNA, 86 bp, Homo sapiens
  MAP TO AJ229042.1; EXPRESSED IN BONE MARROW, SIGNAL = 1.1; EXPRESSED IN HEART, SIGNAL = 1.1; EXPRESSED IN ADULT LIVER, SIGNAL = 2.1; EXPRESSED IN BRAIN, SIGNAL = 1.2; EXPRESSED IN LUNG, SIGNAL =   1; EXPRESSED IN HELA, SIGNAL = 1.4; EXPRESSED IN HBL100, SIGNAL = 1.2; EXPRESSED IN PLACENTA, SIGNAL = 1.2; EXPRESSED IN BT474, SIGNAL = 1.1; EXPRESSED IN FETAL LIVER, SIGNAL = 2.1; NT HIT: AJ229042.1, EVALUE 2.00e-41; EST_HUMAN HIT: AI909830.1, EVALUE 1.80e-01
tcccctggcgggcaaaatcaccctctccctcttgagaaccattgctctcgtgcaaggatagcaaggatgtttcaacttgcttattg

SEQ ID NO: 21269 - DNA, 208 bp, Homo sapiens
  MAP TO AL008626.1; EXPRESSED IN FETAL LIVER, SIGNAL = 2.7; EXPRESSED IN LUNG, SIGNAL = 2.6; EXPRESSED IN BONE MARROW, SIGNAL = 2.7; EXPRESSED IN HELA, SIGNAL = 2.8; EXPRESSED IN HEART, SIGNAL = 2.1; EXPRESSED IN PLACENTA, SIGNAL = 2.8; EXPRESSED IN BT474, SIGNAL = 2.5; EXPRESSED IN ADULT LIVER, SIGNAL = 3.2; EXPRESSED IN BRAIN, SIGNAL = 2.5; EXPRESSED IN HBL100, SIGNAL = 2.6; EST_HUMAN HIT: AI806335.1, EVALUE 2.00e-15; SWISSPROT HIT: O97561, EVALUE 2.50e-01; NT HIT: U12821.1, EVALUE 7.00e-03
atcctggagtcaaacctgatgaaaaggcacttgaatttaatcagacacaggaagaacatgttcaaagctatgagtgtacaccacattaaagaggaacataaacaggaaaaccaacaccttgagcagggtaatccatggcttttagtaatagcatgggaagttttctggctacatgaagcaatcaagacacatcaagaaaagccaagaa

SEQ ID NO: 21270 - DNA, 398 bp, Homo sapiens; identical to SEQ ID NO: 4523
  MAP TO AL021391.2; EXPRESSED IN HBL100, SIGNAL = 1.4; EXPRESSED IN ADULT LIVER, SIGNAL =   2; EXPRESSED IN FETAL LIVER, SIGNAL = 1.7; EXPRESSED IN LUNG, SIGNAL = 1.4; EXPRESSED IN HEART, SIGNAL = 1.5; EXPRESSED IN HELA, SIGNAL = 1.5; EXPRESSED IN PLACENTA, SIGNAL = 1.7; EXPRESSED IN BT474, SIGNAL = 2.3; EXPRESSED IN BRAIN, SIGNAL = 1.7; EXPRESSED IN BONE MARROW, SIGNAL = 1.5; NT HIT: U10307.1, EVALUE 5.40e-02; EST_HUMAN HIT: AA174072.1, EVALUE 0.00e+00; SWISSPROT HIT: O88322, EVALUE 2.50e-01

SEQ ID NO: 21271 - DNA, 159 bp, Homo sapiens
  MAP TO AC006344.2; EXPRESSED IN BT474, SIGNAL = 0.93; EXPRESSED IN HBL100, SIGNAL = 1.3; EXPRESSED IN FETAL LIVER, SIGNAL = 0.93; EXPRESSED IN PLACENTA, SIGNAL = 1.1; EXPRESSED IN BONE MARROW, SIGNAL = 1.4; EXPRESSED IN LUNG, SIGNAL = 0.87; EXPRESSED IN HELA, SIGNAL = 0.81; EXPRESSED IN ADULT LIVER, SIGNAL = 0.92; EXPRESSED IN BRAIN, SIGNAL =   1; EXPRESSED IN HEART, SIGNAL = 0.86; NT HIT: X87344.1, EVALUE 4.00e-13; EST_HUMAN HIT: AI799349.1, EVALUE 1.00e-14; SWISSPROT HIT: P78617, EVALUE 5.00e+00
gcttccattatcctcaacaatctaatgcaggagcagaaaaccaaatactgtgttttctcacttataagtgggagctgaatgataagaacaagtggacacatgggggaaacaacacatactggggcctgttggagggtggatggtaaaaggaggaagagc

SEQ ID NO: 21272 - DNA, 148 bp, Homo sapiens
  MAP TO AP000150.1; EXPRESSED IN PLACENTA, SIGNAL = 0.73; EXPRESSED IN LUNG, SIGNAL = 1.2; EXPRESSED IN HEART, SIGNAL = 0.81; SWISSPROT HIT: P13321, EVALUE 6.70e+00; EST_HUMAN HIT: BF679654.1, EVALUE 1.30e-01; NT HIT: gi11423025, EVALUE 5.20e+00
ggaagcatggcatgagtctcttgggggcttcattagcagtggaataattctccagggagtccacaaacaacagtggcagagctgcaaggaggaagataatgggagtgttaggattctggatgaggtgatgttgggcaagaggagcctg

SEQ ID NO: 21273 - DNA, 806 bp, Homo sapiens
  MAP TO AL022718.1; EXPRESSED IN HBL100, SIGNAL = 1.4; EXPRESSED IN PLACENTA, SIGNAL =   2; EXPRESSED IN HELA, SIGNAL = 1.8; EXPRESSED IN HEART, SIGNAL = 1.6; EXPRESSED IN BT474, SIGNAL = 1.5; EXPRESSED IN ADULT LIVER, SIGNAL = 2.4; EXPRESSED IN FETAL LIVER, SIGNAL =   2; EXPRESSED IN BONE MARROW, SIGNAL = 1.6; EXPRESSED IN LUNG, SIGNAL = 2.3; EXPRESSED IN BRAIN, SIGNAL = 1.5; NT HIT: gi11419809, EVALUE 0.00e+00; EST_HUMAN HIT: BE161779.1, EVALUE 0.00e+00; SWISSPROT HIT: Q07833, EVALUE 1.30e-01
tgctgccctaggctggacttactcgcgacacgtcgcccaagcccatcatagtaatactgcacagtccagccagaagccttattgtaggctttctgcagcaggccattagaattatattcaaaaatatcatttcccctctgcctcagaaagccatcttcatccattttatactgaatttctcctaatctggtgatgcggtctcggaggtcatatcggagaggagtaagacgagcactcttcccatggcttaagaggttgatgtttccattcagatcgtaactataacgccactgggttttgtcatttacagaaacagtctgaagttgcccatcagcatcgtattcatagaagtaccttgttatattggcatctactcctacccttatgtcacatattaccatgcggcccacattatcatattgaatggtcatccagtaggcaattgcctttaggatttcatattggacttcaatgacttgtccattggcactgaagattttggtgtgtttcatcactgtagtagttatgacctgatttaaatcgtaattaattacactgaattttccaaactgctctgttctgccagagacatcaacatatcggtaaagatctataggcaaaggggtttcattgattacagcttgcatgcttgtgactcggaaattgttgtagctgtagtcgaaccgtgcattcacaaggccttcttcactgaatctgaaaatctggcgtccaataagaggtcctgcaggaaccaaaacaaaaacagtaagaagctaggcgatcaatgtggaagagtcagaaaggtc

SEQ ID NO: 21274 - DNA, 331 bp, Homo sapiens
  MAP TO AL009182.13; EXPRESSED IN HBL100, SIGNAL = 0.99; EXPRESSED IN FETAL LIVER, SIGNAL = 1.2; EXPRESSED IN LUNG, SIGNAL =   1; EXPRESSED IN BONE MARROW, SIGNAL = 1.3; EXPRESSED IN HELA, SIGNAL = 1.2; EXPRESSED IN HEART, SIGNAL = 1.1; EXPRESSED IN PLACENTA, SIGNAL = 1.3; EXPRESSED IN BT474, SIGNAL =   1; EXPRESSED IN ADULT LIVER, SIGNAL = 1.5; EXPRESSED IN BRAIN, SIGNAL = 1.2; NT HIT: U61380.1, EVALUE 5.20e-02; SWISSPROT HIT: P05882, EVALUE 7.30e-01
aagaaggtggccatgctcttccagcccactgtgcttcgctgccacttctcaacatcctcccatcagcctgcagttgtgcagtggaagttcaagtcctactgccaggatcgcatgggagaatccttgggcatgtcctctacccgggcccaatctctcagcaagagaaacctggaatgggacccctacttggattgtttggacagcaggaggactgttcgagtagtagcttcaaaacagggctcgactgtcaccctgggagatttctacaggggcagagagatcacgattgttcatggtaataatgcccctattttgaatctaggaaatggga

SEQ ID NO: 21275 - DNA, 1072 bp, Homo sapiens
  MAP TO AJ011929.1; EXPRESSED IN HBL100, SIGNAL = 2.8; EXPRESSED IN ADULT LIVER, SIGNAL = 2.9; EXPRESSED IN FETAL LIVER, SIGNAL = 2.4; EXPRESSED IN LUNG, SIGNAL = 1.8; EXPRESSED IN HEART, SIGNAL = 1.2; EXPRESSED IN HELA, SIGNAL = 5.8; EXPRESSED IN PLACENTA, SIGNAL = 3.3; EXPRESSED IN BT474, SIGNAL = 2.4; EXPRESSED IN BRAIN, SIGNAL = 3.2; EXPRESSED IN BONE MARROW, SIGNAL = 2.1; SWISSPROT HIT: P03355, EVALUE 4.00e-27; EST_HUMAN HIT: AW819886.1, EVALUE 0.00e+00; NT HIT: AL163284.2, EVALUE 0.00e+00
atacctctactccctccttggctaccaatcatgcaccccttaccatctcattaaaacctaatcacccttaccccactcaatgccaatatcccatcccacagcacgctttaaaaagattaaacctgttatcactcgcctgctacagcatggccttttaaagcctataaactctccttacaattcccccattttacctgtcctaaaaccagacaagccttacaagttagttcaggatctgtgccttatcaaccaaattgttttgcctatcccccctgtggtgcccaacccatatactctcctatcctcaataccttcctccaccactcactattccgtgcttgatcttaaagatgcttttttcactattcccctgcacccctcgtcccagcctctcttttctttcacttggactgaccctgacacctattaggctcagcaaattacctaggctgtactgccacaaggcttcatagacagcccccattacttcagtcaagcccaaatttcatcctcatctgttacctatctcggcataattctcataaaaacatacgtgctttccctgctgatcgtgtcctattaatctcccaaacctcaatctcttacaaaacaacaactcctttccttcctaggcatagttagtgcagtcagaattcttacacaagagccaggaccgcaccctgtagcctttctgtgcaaacaacttgaccttactgttttagcctacccctcgtgtctgcgtgcagcggctgccgctgctttaatacttttagaggccctcaaaatcacaaactatgctcaactcactctctacagttctcataacttccaaaatctattttcttcctcatacctgacgcatatactttctgcttcccggctccttcagctatactcactctttgttgagtctcccacaattaccattgttcctggcgtggacttcaatctggcctctcacattattcctgataccacacatgacccccatgactgtatctctctgatccacctgatattcaccccgtttccccatatttccttctttcctgttcctcaccctgatcacgct

SEQ ID NO: 21276 - DNA, 778 bp, Homo sapiens
  MAP TO AC006059.3; EXPRESSED IN HBL100, SIGNAL = 1.2; EXPRESSED IN HELA, SIGNAL = 1.9; EXPRESSED IN PLACENTA, SIGNAL = 1.3; EXPRESSED IN HEART, SIGNAL = 1.7; EXPRESSED IN BT474, SIGNAL = 1.4; EXPRESSED IN FETAL LIVER, SIGNAL = 1.7; EXPRESSED IN BONE MARROW, SIGNAL = 1.4; EXPRESSED IN LUNG, SIGNAL = 4.6; EXPRESSED IN BRAIN, SIGNAL = 2.8; EST_HUMAN HIT: BE622075.1, EVALUE 0.00e+00; NT HIT: AF184110.1, EVALUE 0.00e+00; SWISSPROT HIT: P30414, EVALUE 1.00e-111
cgataagatgatgtggaacttctcgatcgacttcttgagtgactataggagacagaccttgttctgtgtcttgatttggtttcagatttacttcgagatctacttggactcctggactggctatcatcatcccgactaggcgtctgctcatcacttgaactctcctgatttcttggtctacggtttaagcgtgctgtctttcttacttcatcaaagagagacccaggccgaactttatttttgcttttaatttctattctcaagccttgtggtttcatttcaggcacagtggtcaacaccttaacttccacagcactggatgtggcagcattaggtgctgccaggttccccacaccttgcaggggcttccatttcttatcaatgaggttgatctggctcttctcagccacctccttcttcccggtactttctccagcactagccaagctagcagagctgctgtcctgtttccccacttcacccaacactttactttcggacatgctgctttcctgttttactacctctgcttgaggatgttccgttgccatatcctgcttcaaaacaatgtttatatctggggtatcaagccgtgcatttcctagaggggaagtctcctctacttttgctggggaactcctatcaggagtgcagatctccatgttgtcatctgtttgaagcacatcttccactccattgggaacactttcttcaacgtgctgaatgttttgtaaacaggccacattttcctcagtatttaaagctgtgggagaaatac

SEQ ID NO: 21277 - DNA, 335 bp, Homo sapiens
  MAP TO AJ011930.1; EXPRESSED IN HBL100, SIGNAL = 5.1; EXPRESSED IN FETAL LIVER, SIGNAL = 5.4; EXPRESSED IN LUNG, SIGNAL =   5; EXPRESSED IN BONE MARROW, SIGNAL = 5.5; EXPRESSED IN HEART, SIGNAL = 4.4; EXPRESSED IN HELA, SIGNAL = 5.7; EXPRESSED IN PLACENTA, SIGNAL = 4.8; EXPRESSED IN BT474, SIGNAL = 4.9; EXPRESSED IN ADULT LIVER, SIGNAL = 6.1; EXPRESSED IN BRAIN, SIGNAL = 4.9; EST_HUMAN HIT: AI492246.1, EVALUE 1.00e-122; SWISSPROT HIT: P28968, EVALUE 5.00e-08; NT HIT: AL163300.2, EVALUE 0.00e+00
aagtaatatgcacatagcaagcagctcaggcagcagcacagacacacagcccgccacggcctcggcaacacagagacacacagcccgccacggcctcagcagcacagagacacagcccaccacggcctcagcagcagagacacagcccaccacggcctcagcagcagagacacagcccaccacggcctcagcagcagagacacagcccaccacggcctcagcagcagagacacagcccgccacggcctcggcaacacagagacacacagcccgccacggcctcaggagcgtggacacagcccaccatagccactgctccaacacgcaggtcctct

SEQ ID NO: 21278 - DNA, 487 bp, Homo sapiens
  MAP TO AL021155.1; EXPRESSED IN BONE MARROW, SIGNAL = 1.8; EXPRESSED IN BRAIN, SIGNAL = 1.7; EXPRESSED IN HBL100, SIGNAL = 1.8; EXPRESSED IN ADULT LIVER, SIGNAL = 2.2; EXPRESSED IN FETAL LIVER, SIGNAL = 1.9; EXPRESSED IN LUNG, SIGNAL = 1.8; EXPRESSED IN HEART, SIGNAL = 1.9; EXPRESSED IN HELA, SIGNAL = 1.8; EXPRESSED IN PLACENTA, SIGNAL =   2; EXPRESSED IN BT474, SIGNAL = 1.7; EST_HUMAN HIT: BF569474.1, EVALUE 0.00e+00; SWISSPROT HIT: P16860, EVALUE 2.00e-45; NT HIT: M31776.1, EVALUE 0.00e+00
ggaggtggggagaaggtattgtgggcatggtaatgaaataagcccacatttactaattccacaaaggcaccccttggccctgaaggctgttaacaagaggaagcgatgtccaggtgaccttttctcaaagagtgtggttcccagagacaacaaaccccaaagtgactctaacagtgtcacacactggaatgggggaaggcggccggggtggcagggggtgcttacctttgcagcccaggccactggaggagctgatccggtccatcttcctcccaaagcagccagacccttgcaccatcttggggcttcgtggtgcccgcagggtgtagaggaccattttgcggtgcccacggatgccctcggtggctacctcccgggacttccagacacctgtgggacgggggctctcctggaggggctccagggatgtctgctccacctgcagctccgacagtttgccctgcaaatggttgcgctgctcctgcaa

SEQ ID NO: 21279 - DNA, 230 bp, Homo sapiens
  MAP TO AJ229042.1; EXPRESSED IN BONE MARROW, SIGNAL = 2.4; EXPRESSED IN ADULT LIVER, SIGNAL = 2.9; EXPRESSED IN FETAL LIVER, SIGNAL = 2.8; EXPRESSED IN BRAIN, SIGNAL = 1.9; EXPRESSED IN LUNG, SIGNAL = 2.6; EXPRESSED IN HEART, SIGNAL = 1.9; EXPRESSED IN HELA, SIGNAL = 2.8; EXPRESSED IN HBL100, SIGNAL = 3.6; EXPRESSED IN PLACENTA, SIGNAL = 2.7; EXPRESSED IN BT474, SIGNAL = 2.3; NT HIT: AL163268.2, EVALUE 1.00e-127; EST_HUMAN HIT: AW005107.1, EVALUE 1.00e-105; SWISSPROT HIT: Q61188, EVALUE 5.00e-37
acaatgattttgtggtggatgcaacctgcaagggtaacaaaattcgttttgcaaatcattcggtaaatccaaactgctatgcaaaagttatgatggttaatggtgatcacaggataggtgtttttgtcaggagagccatccagacttgcgaagaactgttttttgattacagatacagccaggctgatgccctgaagtatgttggcattgaaagagaaatggaaatccct

SEQ ID NO: 21280 - DNA, 1196 bp, Homo sapiens
  MAP TO AL021808.1; EXPRESSED IN HBL100, SIGNAL = 2.1; EXPRESSED IN HELA, SIGNAL = 2.2; EXPRESSED IN PLACENTA, SIGNAL =   2; EXPRESSED IN HEART, SIGNAL = 2.1; EXPRESSED IN BT474, SIGNAL = 2.3; EXPRESSED IN FETAL LIVER, SIGNAL = 2.3; EXPRESSED IN ADULT LIVER, SIGNAL =   2; EXPRESSED IN BONE MARROW, SIGNAL = 2.1; EXPRESSED IN LUNG, SIGNAL = 1.9; EXPRESSED IN BRAIN, SIGNAL = 2.1; NT HIT: gi7662205, EVALUE 7.70e-01; EST_HUMAN HIT: AI017213.1, EVALUE 1.00e-110; SWISSPROT HIT: P52591, EVALUE 3.00e-54
cgcgtgaatcccaaccgtcaaccgaacactgcgctcttcgactctgtccgattctgcagacgtccgaaacctcggaagccaaaaccgtgcttgaactcactgcccgcgcctcatctctcctcatgggcagtttcctgagcaaactggaactttcgccctcgtccccagcccaggtgcgcaccgacttgcccgagaggcccacgaaacgccggccacctcagccccttcaccaagttcatcgggttcagttcgtccaccgcgcccaccctgccccacggtatagacctgtgaggaggcggccaaacctggatcctgccaatccaaccacgtggctggccaacgaggcctggaggcgctttcccatgaagaagtcccagaattcccccctggggcctctcccttcagactggtgggaaagttacttaaagcggactatttggtctcttcgacatcccaggccaatttggagcccagtgaccatcaggatcactcctcctgaccagagagtgcccccttccacttctcctgaagatgtaattgcccttgcaggactcccgccctctgaggagctcgcagatccatgttcaaaggagacagtgttgagggccctcagagagtgcagaaaagggaaagggaggttggaagaaccactattccctgagagtctggacagtaagagaaggagtccagagaccagaccatcggcatttaagcccctgatgaaaaatggaaccctcacttcttttgtgcccaggcctgggccgctgaagagaagtctccactcctggggctcagatcacagcttgactaagaggcccaattgctcctccatgagctccttggccagcatatacagaggtggcaccctcagctccaaaaggaatgctattggcagctcttacagctcttgcagaaatttctcagacccttggaagagaagtgttcccagtgtatcattcgagacaccagagtggccaataaaaaaggaaaaaagttgtcatcggccttcctctccagtcccactggtatcagattttgagtccctaggaggatctgaaagttctgggcagcaaaaccagaagattccacagctgccgtctagccctgagaacctggtgtcagagatcccacctccccagcttggttatgcagtctctgatgagaacttgactttggggaagaaagctgagctacag

SEQ ID NO: 21281 - DNA, 152 bp, Homo sapiens
  MAP TO AL049697.8; EXPRESSED IN BT474, SIGNAL =   1; EXPRESSED IN FETAL LIVER, SIGNAL = 1.9; EXPRESSED IN HEART, SIGNAL = 0.92; EXPRESSED IN LUNG, SIGNAL = 4.1; EST_HUMAN HIT: AA424887.1, EVALUE 8.90e-02; SWISSPROT HIT: Q05961, EVALUE 6.60e+00; NT HIT: Z49444.1, EVALUE 2.90e-01
tagattaggctctgttacccgagaaattacagataacagagcatgtgctaaagaagaattggaaagcctctaccggaagattatcagctatgtgttactccgctctggccttggatcccctacagacatcaagactgtcagagaggtaacag

SEQ ID NO: 21282 - DNA, 120 bp, Homo sapiens
  MAP TO AL008633.1; EXPRESSED IN FETAL LIVER, SIGNAL = 1.2; EXPRESSED IN BT474, SIGNAL = 1.1; EXPRESSED IN HEART, SIGNAL =   1; EXPRESSED IN ADULT LIVER, SIGNAL =   2; EXPRESSED IN BRAIN, SIGNAL = 1.1; EXPRESSED IN LUNG, SIGNAL =   1; EXPRESSED IN BONE MARROW, SIGNAL = 1.3; EXPRESSED IN HELA, SIGNAL = 1.9; EXPRESSED IN HBL100, SIGNAL = 1.3; NT HIT: AL163213.2, EVALUE 4.00e-03; EST_HUMAN HIT: AL134376.1, EVALUE 1.00e-31
catgggcttcaggccttgggtgaaacccagggccttgttcacttcagatgtgaccagtgcattcccagatatggtgggcatgagaaactccttctacttgagaaaaggagagggaagagt

SEQ ID NO: 21283 - DNA, 3233 bp, Homo sapiens
  MAP TO AL022166.1; EXPRESSED IN HEART, SIGNAL = 0.96; SWISSPROT HIT: P20129, EVALUE 3.50e-01; EST_HUMAN HIT: AW810205.1, EVALUE 2.00e-01; NT HIT: Z38002.1, EVALUE 1.10e-01
aatgtttctgagcctgtgacattgctccgatactgttgccaatgcagaagatactggcagacctcttcccttgagcagagcaaccgggataagatgctgacagacagcaaacagtgggcatctgcccatgaaaaaaagacaggttccagggcatcctccttgggcccagtgttgcggccttggccccagcaggcaagtgcagagcagacaatggccatgaccaaagggagatttggattcggcctgggctcacgttggctcctgtgaggtgggtagcgggcaggatccccccgactcttttctttggcagaaaggtagaattctggccttctggaggaaattattttggagtcgtggtggaggtggagaagggtgattcttacgaagatgtgctgagacctgtacacagattcctccagggctcgtgagccatggaacagttaaatgtcaaagagcagatggaatttctttgaaaatccctgtgagggcactttgtcaaaggaggggctcagctcagccaagactacatagaagaataactggagtaatctggggctcagagactggaggagaagtgggctctaggcttgcactgctcatcatgcaacaggcttgcaaagctcacaagggtgatttggaggggaaggcagagtctatacacagatagtgaaaatcaggcccagttcttgactggtcgacttccgccccagttcctgtggcaaatgacaccagtgttgccaatgttatctccagatgtgcaacgcatgagaagtggttgagattcctcctgtaacttggaccacggaggcctgtgtagtctcaataataatgtagcctatattattttgcatgttgtgattatccaatgattcatccattcactctttcaacgagtgcttattaaggtctactacgtgccagtctagtcaactgggattcataggtgaacaaatctcaagcaccctggccctcgtgaatggtacatacaagagcaaggaaacagaaaataaaatgcaaaccttttacattactaattatatagaagggtagaaggagacaatcactttgggtggggcaggtggtggtggtggtggtggtaagctaacacacagcagggtagggtgcattcgggtcgttgagaatgggagaagagaaagggagtagagcattcactgccatatgcaagggtacacaggtaggcttcattggaggggtgacattggaggaaagaaatgaagaaggtgagagggtttgccttgcggatatataaagaaagtactgtccgggcagaaggtccagctggtgcaaacgctctaaggccagggagtgactaccacgtttgagaaatggcagagaggccagcgtggttgctgtagagtgagccaaaaggacgagagcaggagatgaggtcagagagattaacagaatcccacattatgtagggcctgggaggccgttttaaggaccttagctcttgcttggggtgaaatgtggggggaagaaggagggaagcagtgaggggtggaacagaggagtcatgtgatctgacacacgtttggaagggatcactttgattacttactatgccgagaatagagtgaattcaggcgagggtagtgggagcgtggaaaccaggtaggaagctactgctgcaagccaggctagagataatggtggtttggaccatcctggtgtctgtagacatggtgagaactgcacaggttctggaaacattttgaggtagacccaacagaattcctgatggtttgaatgtggcatgtcagcgaggaccaaggctgactccaggggttttttttgcctgagcaacaagtagactgggattggtatcaattccagtctactggggagtgctgcagtgagaataggctttgtaggtggggaggggttcaaaaattcagttttgtacacattgagttaagctgtctctctgacatccatgtgagtcaagtaggcagttgtatatacaagtcaggaatttggctgaaagatctatacctacatatatgtggatggcgcttaaaagccacgagactacatgagctccgctagggagggagagcacacagaggagggcagaaggtcacgaacagagccctgcagcataaagggatcagaaagaagaggagacaccagctgaggagatggggaaattggcaccagtgacgcatggaggaaaaccaagagtgtcctgggaactatgtgaataaaagtgtctcaagaggcatccagcggtccactctgctcaaactgctgatgtcaggggaaataagaagaggagtgagaattaaccattgcatttagcagtgcggaggttcctggtgaccttaataagagcagcttctttgggggactgtgtgaaaaagcctgcttgggacagctttaagagagaatgggaggagaggaatcaatgagtatggacaagtttcacaaggagttttgcagcaatggggagcagagaaatcaggcggcatctggtggggaaagagggagtcaggaaaaggtttacttcaggtggaagaaataccattgtgctgaaggcaagcacccggtggagagacatgaaatcaatagcacaggggtggcagagagcatccttggagcagcagctttgagtaggcaggagggcgccgggaacttgtatcaaggggagagctggagcatgcaggaggagttgcaaaatagggagctactggagtgggtagatgtcagctaggcattctggccctcctgaactcttctagctgaggttaggcacctgcctatttgttgattctgcatgtctgttgagtatctactatgcatgaggcacacttgtgggcactttactaacatttaacactccaaacaacccgttaggtgggttgtgtcataataccatgctacctgtgagaggtctgccgctcaaggaggtcagctggactggccaagttcacttagcaaacaattggaagagtaaagctttgagagacagcctgcctctccaggtaggcttataaagctcacatctgctggcaagtcagagtgtgggattactcttgcatcctcttacactggtaacaagcctgcccactgaaccacagaagcttctgatgaccacacggaagccacagtctctatgtctgggcacctgcctcagtttcctgtgtgccactgctacttcagtgtgcatgagctcgattctgagtctgaggctgagtggcagggcctctctg

SEQ ID NO: 21284 - DNA, 166 bp, Homo sapiens
  MAP TO AL109823.11; EXPRESSED IN BRAIN, SIGNAL =   3; EXPRESSED IN HEART, SIGNAL = 3.5; EXPRESSED IN FETAL LIVER, SIGNAL =   3; EXPRESSED IN ADULT LIVER, SIGNAL = 3.6; EXPRESSED IN LUNG, SIGNAL = 3.3; EXPRESSED IN BONE MARROW, SIGNAL =   4; EXPRESSED IN HELA, SIGNAL = 3.2; EXPRESSED IN PLACENTA, SIGNAL = 3.8; EXPRESSED IN HBL100, SIGNAL = 3.9; EXPRESSED IN BT474, SIGNAL = 3.9; EST_HUMAN HIT: BF081743.1, EVALUE 6.00e-84; NT HIT: AB007866.2, EVALUE 6.00e-89; SWISSPROT HIT: P98161, EVALUE 1.30e+00
agacagccagctgcaacttgaaggccagcgtgtgcgagtaaactggtccagccctggcactgatgggggcctgggtgactagggagccagccagctttggcaggacatctttgcagaaccggctgcgaagaaagtcaccacacttgcttcccagggtacgtaaaac

SEQ ID NO: 21285 - DNA, 184 bp, Homo sapiens
  MAP TO AL118508.9; EXPRESSED IN BT474, SIGNAL = 1.2; EXPRESSED IN BONE MARROW, SIGNAL = 1.4; EXPRESSED IN HEART, SIGNAL = 1.9; EXPRESSED IN FETAL LIVER, SIGNAL = 1.4; EXPRESSED IN LUNG, SIGNAL = 1.3; EXPRESSED IN HELA, SIGNAL = 1.2; EXPRESSED IN PLACENTA, SIGNAL = 3.4; EXPRESSED IN HBL100, SIGNAL =   2; EXPRESSED IN ADULT LIVER, SIGNAL = 1.8; EST_HUMAN HIT: BE878606.1, EVALUE 1.60e-01; NT HIT: X96402.1, EVALUE 9.20e-02; SWISSPROT HIT: P16112, EVALUE 8.40e+00
ccattttaggagctgcctcttcctcaaagccttctgagtcctccccttcccttatgggtgagcccctccctgcccctgagatctctgggggcacctgtgcgacttcttcccgaggtgccctatacaaccccttgcctagtagattcagctgtgttttctcagacaccacaaaaggcttgtgcat

SEQ ID NO: 21286 - DNA, 218 bp, Homo sapiens
  MAP TO AC007156.2; EXPRESSED IN PLACENTA, SIGNAL = 0.92; EXPRESSED IN FETAL LIVER, SIGNAL = 1.1; EXPRESSED IN BONE MARROW, SIGNAL =   1; EXPRESSED IN BRAIN, SIGNAL = 0.96; EXPRESSED IN HBL100, SIGNAL = 0.96; EXPRESSED IN HELA, SIGNAL = 1.1; EXPRESSED IN HEART, SIGNAL =   2; NT HIT: S44957.1, EVALUE 1.10e-01; SWISSPROT HIT: P11976, EVALUE 5.50e-01
ggggatggaatgacctggagcgtgttgagtttggtgtcagagaggattgtgctgcaactgtctgcagaaaggttcaggcagacgttagaagttggtgcacaagcaaaaagcaacaggggagtctcacagcaagatgtaccatatgacagagaaaaagtgcaaggacaggactcttggaagcacagccctgaggagcggctgtgaggccaccagtatac

SEQ ID NO: 21287 - DNA, 119 bp, Homo sapiens
  MAP TO AL118517.5; EXPRESSED IN BT474, SIGNAL = 1.2; EXPRESSED IN HEART, SIGNAL = 1.3; EXPRESSED IN FETAL LIVER, SIGNAL = 1.2; EXPRESSED IN ADULT LIVER, SIGNAL = 1.1; EXPRESSED IN BRAIN, SIGNAL = 1.1; EXPRESSED IN LUNG, SIGNAL = 1.5; EXPRESSED IN BONE MARROW, SIGNAL = 1.9; EXPRESSED IN HELA, SIGNAL = 1.3; EXPRESSED IN PLACENTA, SIGNAL = 1.4; EXPRESSED IN HBL100, SIGNAL = 1.6; EST_HUMAN HIT: H29240.1, EVALUE 6.80e-02; NT HIT: AB013100.1, EVALUE 5.60e-02; SWISSPROT HIT: P98092, EVALUE 3.10e+00
atccaatattctcatggctaacattccttccagtttcagttcaaatctcactttctccatgaatcctgtcttgaccaccatatttcaaactacagtccagatctcttccccaaccagca

SEQ ID NO: 21288 - DNA, 654 bp, Homo sapiens
  MAP TO AC002094.1; EXPRESSED IN PLACENTA, SIGNAL =  31; EXPRESSED IN ADULT LIVER, SIGNAL = 4.9; EXPRESSED IN BT474, SIGNAL =  31; EXPRESSED IN LUNG, SIGNAL = 7.6; EXPRESSED IN BRAIN, SIGNAL = 1.5; EXPRESSED IN HEART, SIGNAL = 1.9; EXPRESSED IN HELA, SIGNAL =  36; EXPRESSED IN HBL100, SIGNAL =  11; EXPRESSED IN FETAL LIVER, SIGNAL = 8.8; EXPRESSED IN BONE MARROW, SIGNAL = 1.9; NT HIT: gi11434787, EVALUE 0.00e+00; EST_HUMAN HIT: BE799458.1, EVALUE 0.00e+00; SWISSPROT HIT: P05783, EVALUE 2.00e-70
ctccaccctctccaccaactaccagtccctgggcactgtccaggcacccagctatgtgcccagctggtcagcagtgtggccagtgtctatgcaggcatcaggggctctggttcccggatctccatgtcctgcttcaccagcttccagggcagcatggggtccaggggcctgcccgcagtgatggccgggggtctggcaggaatgggagtcatccagaatgagaaggaaaccatgcaaagcctcaacgaccacctggcctcctacctggacagagttaggagcctggataccaagaactggaagctggagagccaggagcacctggagaagaagggaccccaggtcagagactggagccatgacttcaagaccatcgagaacctgagggctcagatctttgcaaatactgtggacagtgcccacattgttctgcagatcgacaatgcctgtcttgctggtgatgactttagggtcaagtatgagacagagctggccatgtgccagtctgtggagagtgacatccatgggctccacaaggtcattgatgacaccaatgtcacttggctgcagctggaagcagagatcaaggctctcaaggagaagctgctcttcatgaagaagaaccatgaagaggaagtaaagggcctataagcc

SEQ ID NO: 21289 - DNA, 1310 bp, Homo sapiens
  MAP TO AC005242.1; EXPRESSED IN BRAIN, SIGNAL = 1.5; EXPRESSED IN HEART, SIGNAL = 1.3; EXPRESSED IN PLACENTA, SIGNAL = 1.4; EXPRESSED IN ADULT LIVER, SIGNAL =   1; NT HIT: AF153819.1, EVALUE 0.00e+00; SWISSPROT HIT: P48049, EVALUE 0.00e+00; EST_HUMAN HIT: AI369228.1, EVALUE 1.00e-19
aagcactggagtccccagcagaagcgatgggcagtgtgcgaaccaaccgctacagcatcgtctcttcagaagaagacggtatgaagttggccaccatggcagttgcaaatggctttgggaacgggaagagtaaagtccacacccgacaacagtgcaggagccgctttgtgaagaaagatggccactgtaatgttcagttcatcaatgtgggtgagaaggggcaacggtacctcgcagacatcttcaccacgtgtgtggacattcgctggcggtggatgctggttatcttctgcctggctttcgtcctgtcatggctgttttttggctgtgtgttttggttgatagctctgctccatggggacctggatgcatccaaagagggcaaagcttgtgtgtccgaggtcaacagcttcacggctgccttcctcttctccattgagacccagacaaccataggctatggtttcagatgtgtcacggatgaatgcccaattgctgttttcatggtggtgttccagtcaatcgtgggctgcatcatcgatgctttcatcattggcgcagtcatggccaagatggcaaagccaaagaagagaaacgagactcttgtcttcagtcacaatgccgtgattgccatgagagacggcaagctgtgtttgatgtggcgagtgggcaatcttcggaaaagccacttggtggaagctcatgttcgagcacagctcctcaaatccagaattacttctgaaggggagtatatccctctggatcaaatagacatcaatgttgggtttgacagtggaatcgatcgtatatttctggtgtccccaatcactatagtccatgaaatagatgaagacagtcctttatatgatttgagtaaacaggacattgacaacgcagactttgaaatcgtggtcatactggaaggcatggtggaagccactgccatgacgacacagtgccgtagctcttatctagcaaatgaaatcctgtggggccaccgctatgagcctgtgctctttgaagagaagcactactacaaagtggactattccaggttccacaaaacttacgaagtccccaacactcccctttgtagtgccagagacttagcagaaaagaaatatatcctctcaaatgcaaattcattttgctatgaaaatgaagttgccctcacaagcaaagaggaagacgacagtgaaaatggagttccagaaagcactagtacggacacgccccctgacatagaccttcacaaccaggcaagtgtacctctagagcccaggcccttacggcgagagtcggagatatga

SEQ ID NO: 21290 - DNA, 582 bp, Homo sapiens
  MAP TO AC002467.1; EXPRESSED IN BT474, SIGNAL = 2.6; EXPRESSED IN FETAL LIVER, SIGNAL = 1.6; EXPRESSED IN HELA, SIGNAL = 2.6; EXPRESSED IN PLACENTA, SIGNAL = 2.6; EXPRESSED IN BRAIN, SIGNAL = 1.5; EXPRESSED IN LUNG, SIGNAL = 1.4; EXPRESSED IN BONE MARROW, SIGNAL = 1.3; EXPRESSED IN HEART, SIGNAL = 1.2; EXPRESSED IN HBL100, SIGNAL = 2.1; SWISSPROT HIT: P32323, EVALUE 7.40e-01; EST_HUMAN HIT: AW378049.1, EVALUE 1.00e-120; NT HIT: AF167441.1, EVALUE 0.00e+00
gatgactcaaattcaggtgctagagaaccaccacctcctgccccagcacctgctcaccatcatcctgaatatcagggtcaaccagtggtatcgcaccctcatcatattatgcctccacagcaacattatgcaccacccccacctcctccaccaccaataagccatccaatgccacatcctccccaggctgcaggtactcctcacttggtatatagccaagctccacctccaccaatgacctctgctccaccaccaataacccctccccctggacatattattgcccagatgccaccttatatgaatcatcctcctccaggacctcccccacctcaacatggtggtccacctgtaactgcaccccctcctcaccattataatcctaactcattaccccagttcactgaagatcaaggaactctgagccctccatttacacaaccagggggaatgagtcctggtatatggcctgcaccaagagggccaccaccacctccacgattgcagggtccgccttctcaaaccccacttcctggaccacatcatccagatcagacaagatatagaccgtattaccaatga

SEQ ID NO: 21291 - DNA, 146 bp, Homo sapiens
  MAP TO AC007189.6; EXPRESSED IN HBL100, SIGNAL = 1.8; EXPRESSED IN HEART, SIGNAL = 1.8; EXPRESSED IN PLACENTA, SIGNAL = 1.8; EXPRESSED IN HELA, SIGNAL = 2.1; EXPRESSED IN BT474, SIGNAL = 1.7; EXPRESSED IN FETAL LIVER, SIGNAL =   2; EXPRESSED IN ADULT LIVER, SIGNAL = 2.1; EXPRESSED IN LUNG, SIGNAL =   2; EXPRESSED IN BONE MARROW, SIGNAL = 1.7; EXPRESSED IN BRAIN, SIGNAL = 1.5; NT HIT: AF126284.1, EVALUE 1.10e+00; EST_HUMAN HIT: BE069912.1, EVALUE 3.40e-01; SWISSPROT HIT: P29317, EVALUE 5.10e+00
tacctaaagacttgcaatttgtccttaaaacccagctcaagcccctccaggaatctggtgaccctgttaaccaccagtatcaccaccaagctgtgttcctggtgctctttgttcatatagacatcttggtacatatcagcctccat

SEQ ID NO: 21292 - DNA, 178 bp, Homo sapiens
  MAP TO AL109759.1; EXPRESSED IN LUNG, SIGNAL = 2.5; EXPRESSED IN HEART, SIGNAL = 3.6; EST_HUMAN HIT: AW748787.1, EVALUE 6.20e-01; SWISSPROT HIT: P32432, EVALUE 6.50e+00
aaagtacattttaataaatcatgtgatatataatcatatcacagaaagatatttagctttacccagcatgcatatccctatgaataagaaaattcattctcttaacggaaataatcatctttgctttactgaatgtcatattcaagacactaattccagttttgcaccatctcataag

SEQ ID NO: 21293 - DNA, 154 bp, Homo sapiens
  MAP TO AL121675.8; EXPRESSED IN LUNG, SIGNAL = 6.8; EXPRESSED IN HELA, SIGNAL = 7.9; EXPRESSED IN PLACENTA, SIGNAL = 9.5; EXPRESSED IN HEART, SIGNAL = 7.9; EXPRESSED IN FETAL LIVER, SIGNAL = 8.6; EXPRESSED IN ADULT LIVER, SIGNAL =   7; EXPRESSED IN BT474, SIGNAL = 6.9; EXPRESSED IN BRAIN, SIGNAL =   7; EXPRESSED IN BONE MARROW, SIGNAL = 9.3; EXPRESSED IN HBL100, SIGNAL =  11; EST_HUMAN HIT: BE770133.1, EVALUE 1.00e-81; SWISSPROT HIT: P13730, EVALUE 1.50e-01; NT HIT: gi11421145, EVALUE 1.00e-81
cccatgcaggtgctgttttccggtgaggccacccaccgcaagtactattccaccacccacggtgctctgctgtccggccagcgtgaggctgcccgcctcattgagatgtaccgagacctcttccagcaggggacctgagggctgtcctcgctgc

SEQ ID NO: 21294 - DNA, 209 bp, Homo sapiens
  MAP TO AC010183.6; EXPRESSED IN BONE MARROW, SIGNAL = 1.2; EXPRESSED IN LUNG, SIGNAL = 1.4; EXPRESSED IN PLACENTA, SIGNAL = 0.97; EXPRESSED IN HELA, SIGNAL = 1.3; EXPRESSED IN HBL100, SIGNAL = 1.3; EXPRESSED IN HEART, SIGNAL = 1.4; EXPRESSED IN BT474, SIGNAL = 0.98; EXPRESSED IN FETAL LIVER, SIGNAL = 1.3; EST_HUMAN HIT: BE182700.1, EVALUE 1.00e-05; SWISSPROT HIT: P50895, EVALUE 2.80e+00; NT HIT: AF149774.1, EVALUE 5.00e-07
tccttcctcagttggcttctgttaagttcctctaatgtgtagtgctccctcctgccacagagcctttgcacatgctgttcctctgcctcctccccttggcttactaattccagctcaagagttacttcctcagggcagccttctatggtgacacagagtaattgaggttctctcatgatatagtttggatggatgttcatcccctccaa

SEQ ID NO: 21295 - DNA, 136 bp, Homo sapiens
  MAP TO AP000080.1; EXPRESSED IN LUNG, SIGNAL = 1.5; EXPRESSED IN HELA, SIGNAL = 1.4; EXPRESSED IN PLACENTA, SIGNAL = 2.2; EXPRESSED IN ADULT LIVER, SIGNAL =   1; EXPRESSED IN BT474, SIGNAL = 2.9; EXPRESSED IN BONE MARROW, SIGNAL = 2.3; EXPRESSED IN BRAIN, SIGNAL = 1.8; EXPRESSED IN HBL100, SIGNAL = 2.6; EXPRESSED IN HEART, SIGNAL = 1.6; EXPRESSED IN FETAL LIVER, SIGNAL = 1.6; SWISSPROT HIT: P38123, EVALUE 6.80e+00; EST_HUMAN HIT: AV738824.1, EVALUE 4.50e-01; NT HIT: U01103.1, EVALUE 2.60e-01
ctagcatcattatcccacatgatctgagtggcagccaatatctatcgcctttctcaaaaccccaagtgacactatctgtgctgccatcttctctgttccctgagttatccttgtcttccatgccttcttcatagcc

SEQ ID NO: 21296 - DNA, 410 bp, Homo sapiens
  MAP TO AC010930.2; EXPRESSED IN BONE MARROW, SIGNAL = 1.1; EXPRESSED IN LUNG, SIGNAL = 1.1; EXPRESSED IN PLACENTA, SIGNAL = 1.1; EXPRESSED IN HELA, SIGNAL = 1.1; EXPRESSED IN HBL100, SIGNAL = 1.1; EXPRESSED IN HEART, SIGNAL = 1.1; EXPRESSED IN ADULT LIVER, SIGNAL = 1.4; EXPRESSED IN BT474, SIGNAL =   1; EXPRESSED IN FETAL LIVER, SIGNAL = 1.2; EST_HUMAN HIT: BF674130.1, EVALUE 3.00e-08; NT HIT: L17432.1, EVALUE 3.00e-13; SWISSPROT HIT: P23269, EVALUE 8.00e-24
catccccttctgctttgcttatactctggccctgctaggcaactgtacccttctcttcattatccaggctgatgcagccctccatgaacccatgtacctctttctggccatgttggcaaccattgacttggttctttcttctacaacgctgcccaaaatgcttgccatattctggttcagggatcaggagatcaacttctttgcctgtctggtccagatgttcttccttcactccttctccatcatggagtcagcagtgctgctggccatggcctttgaccgctatgtggccatctgcaagccattgcactacacgacggtcctgactgggtccctcatcaccaagattggcatggctgctgtggcccgggctgtgacactaatgactccactccccttcctgctcagac

SEQ ID NO: 21297 - DNA, 350 bp, Homo sapiens
  MAP TO AL022101.1; EXPRESSED IN HEART, SIGNAL = 0.95; EXPRESSED IN PLACENTA, SIGNAL = 0.9; EXPRESSED IN ADULT LIVER, SIGNAL =   1; EST_HUMAN HIT: AW182053.1, EVALUE 2.00e-17; NT HIT: gi11417832, EVALUE 2.00e-17; SWISSPROT HIT: O60811, EVALUE 7.00e-49
ctggggcgatccttctgtgtaagcagcatatgaagcccttccagcaatgctttcaatggctccagatgaagcgtcttcatcagcgataccagagggaggcaggtgaaaggccaggcctgcaccatcaccgtcagagtctggaagtgtctcctgctgaaggcctccctgaagagtgggagatagagcaccctgggcagctcctccatggcagagatggacaaggcctggtctctcagcaggctctgccccgccagctccagtagtctcggtggggcctggatgctcatcctgatggatctgcaagaaaaatctctagaagacaaatccagggagaatgtatcactctcagg

SEQ ID NO: 21298 - DNA, 126 bp, Homo sapiens
  MAP TO AC007172.6; EXPRESSED IN BONE MARROW, SIGNAL = 1.3; EXPRESSED IN BRAIN, SIGNAL = 1.9; EXPRESSED IN HELA, SIGNAL = 1.6; EXPRESSED IN LUNG, SIGNAL = 1.7; EXPRESSED IN HEART, SIGNAL = 1.4; EXPRESSED IN HBL100, SIGNAL = 1.4; EXPRESSED IN PLACENTA, SIGNAL = 1.4; EXPRESSED IN ADULT LIVER, SIGNAL = 1.2; EXPRESSED IN FETAL LIVER, SIGNAL = 1.4; EXPRESSED IN BT474, SIGNAL = 1.4; NT HIT: gi6912385, EVALUE 3.00e-65; EST_HUMAN HIT: AA713573.1, EVALUE 4.00e-65
ctgcatgaggcgctccaactggtaaaatttgcaatgcaaatcttcgaagttttgcttgaaaagttccctgagcccatagtcaaacatgatcttgaccagaacactgaatgcctgttcttcaggcat

SEQ ID NO: 21299 - DNA, 147 bp, Homo sapiens
  MAP TO L78833.1; EXPRESSED IN FETAL LIVER, SIGNAL = 3.4; EXPRESSED IN ADULT LIVER, SIGNAL = 1.7; EXPRESSED IN LUNG, SIGNAL =   2; EXPRESSED IN BONE MARROW, SIGNAL = 2.1; EXPRESSED IN BRAIN, SIGNAL = 2.3; EXPRESSED IN PLACENTA, SIGNAL =   2; EXPRESSED IN BT474, SIGNAL = 1.9; EXPRESSED IN HEART, SIGNAL = 1.9; EXPRESSED IN HELA, SIGNAL = 2.4; EXPRESSED IN HBL100, SIGNAL = 2.3; EST_HUMAN HIT: AU125312.1, EVALUE 2.00e-77; SWISSPROT HIT: P38398, EVALUE 4.00e-12; NT HIT: gi11424969, EVALUE 1.00e-77
tgataaagctccagcaggaaatggctgaactagaagctgtgttagaacagcatgggagccagccttctaacagctacccttccatcataagtgactcttctgcccttgaggacctgcgaaatccagaacaaagcacatcagaaaaag

SEQ ID NO: 21300 - DNA, 190 bp, Homo sapiens
  MAP TO AL132642.1; EXPRESSED IN BRAIN, SIGNAL = 6.1; EXPRESSED IN HELA, SIGNAL = 5.9; EXPRESSED IN HBL100, SIGNAL = 6.3; EXPRESSED IN PLACENTA, SIGNAL = 3.2; EXPRESSED IN ADULT LIVER, SIGNAL = 1.6; EXPRESSED IN HEART, SIGNAL = 8.1; EXPRESSED IN BT474, SIGNAL =   9; EXPRESSED IN FETAL LIVER, SIGNAL = 4.5; EXPRESSED IN BONE MARROW, SIGNAL =   6; EXPRESSED IN LUNG, SIGNAL = 2.4; NT HIT: gi11437420, EVALUE 2.00e-83; EST_HUMAN HIT: BE744504.1, EVALUE 3.00e-83; SWISSPROT HIT: Q61001, EVALUE 2.20e+00
ctgccttctccttgatgacggcccagtcctcaaagctgtcgatgtgttccttcagccgcgagcagagctgcacgttgcccacgtagtccaggaggacatcgatgatgggccccgcccagcggctcacctctggggcagatacgaactcacagaactgaaagagaacatgccgggaccaagaagtgagttc

SEQ ID NO: 21301 - DNA, 203 bp, Homo sapiens
  MAP TO AL122001.5; EXPRESSED IN BT474, SIGNAL = 4.1; EXPRESSED IN FETAL LIVER, SIGNAL = 3.3; EXPRESSED IN BONE MARROW, SIGNAL = 4.3; EXPRESSED IN LUNG, SIGNAL =   3; EXPRESSED IN BRAIN, SIGNAL = 3.9; EXPRESSED IN HBL100, SIGNAL = 3.3; EXPRESSED IN HELA, SIGNAL = 2.8; EXPRESSED IN PLACENTA, SIGNAL =   3; EXPRESSED IN ADULT LIVER, SIGNAL = 2.9; EXPRESSED IN HEART, SIGNAL = 2.1; EST_HUMAN HIT: AU117812.1, EVALUE 1.00e-110; NT HIT: U67925.1, EVALUE 4.10e-01; SWISSPROT HIT: P41951, EVALUE 2.10e+00
acaaaatccttggcactcagctgctccagcttagcacttacatgatcccaggcagcaaagttattgaccagtgcaccatacttctgctctgagaggagactgacacggattgatggccaaagatctccaaactgcacactgtaagtcatgtcaaaattctgcaaagccagtcgaacagcagggaatttgggctctgtggcagc

SEQ ID NO: 21302 - DNA, 128 bp, Homo sapiens
  MAP TO D84394.1; EXPRESSED IN BT474, SIGNAL = 5.1; EXPRESSED IN FETAL LIVER, SIGNAL =  16; EXPRESSED IN BONE MARROW, SIGNAL =  37; EXPRESSED IN LUNG, SIGNAL =  62; EXPRESSED IN BRAIN, SIGNAL = 9.5; EXPRESSED IN HBL100, SIGNAL =  39; EXPRESSED IN HELA, SIGNAL =  30; EXPRESSED IN PLACENTA, SIGNAL =  14; EXPRESSED IN ADULT LIVER, SIGNAL = 8.5; EXPRESSED IN HEART, SIGNAL =  13; NT HIT: AJ300180.1, EVALUE 3.00e-66; EST_HUMAN HIT: AW408206.1, EVALUE 6.00e-61; SWISSPROT HIT: P03989, EVALUE 1.60e-01
agccgtcttcccagtccaccgtccccatcgtgggcattgttgctggcctggctgtcctagcagttgtggtcatcggagctgtggtcgctgctgtgatgtgtaggaggaagagctcaggtagggaaggg

SEQ ID NO: 21303 - DNA, 168 bp, Homo sapiens
  MAP TO D87675.1; EXPRESSED IN PLACENTA, SIGNAL = 3.6; EXPRESSED IN HEART, SIGNAL = 4.1; EXPRESSED IN ADULT LIVER, SIGNAL = 2.3; EXPRESSED IN BT474, SIGNAL = 5.2; EXPRESSED IN LUNG, SIGNAL = 4.9; EXPRESSED IN HELA, SIGNAL = 4.5; EXPRESSED IN HBL100, SIGNAL = 4.9; EXPRESSED IN FETAL LIVER, SIGNAL = 3.8; EXPRESSED IN BRAIN, SIGNAL = 7.6; EXPRESSED IN BONE MARROW, SIGNAL = 6.1; NT HIT: M34868.1, EVALUE 5.00e-90; EST_HUMAN HIT: BE836757.1, EVALUE 3.00e-83; SWISSPROT HIT: P08592, EVALUE 1.00e-28
gaacaagccgagacggggccgtgccgagcaatgatctcccgctggtactttgatgtgactgaagggaagtgtgccccattcttttacggcggatgtggcggcaaccggaacaactttgacacagaagagtactgcatggccgtgtgtggcagcgccagtaagtggacc

SEQ ID NO: 21304 - DNA, 198 bp, Homo sapiens
  MAP TO AC007638.1; EXPRESSED IN HEART, SIGNAL = 0.99; EST_HUMAN HIT: AA744097.1, EVALUE 8.00e-06; NT HIT: D00649.1, EVALUE 7.00e-09; SWISSPROT HIT: O02696, EVALUE 1.30e+00
  unsure 180
aaagatctggtatcaaataatccatatgatattattaatgcctttttggatgttatcgaccgaattgtgtcccctcccctgccccattcatatgttgaagtcctagctcccagtactcagaatgtggctatatttggaaataaggtcattgaagagatactttagttaaaatgaggtcanttggggtaggccctaatc

SEQ ID NO: 21305 - DNA, 177 bp, Homo sapiens
  MAP TO AC011446.2; EXPRESSED IN HBL100, SIGNAL = 9.3; EXPRESSED IN HEART, SIGNAL = 5.9; EXPRESSED IN FETAL LIVER, SIGNAL = 4.4; EXPRESSED IN LUNG, SIGNAL = 6.6; EXPRESSED IN BRAIN, SIGNAL = 6.6; EXPRESSED IN PLACENTA, SIGNAL = 9.9; EXPRESSED IN BT474, SIGNAL = 7.7; EXPRESSED IN ADULT LIVER, SIGNAL = 4.7; EXPRESSED IN BONE MARROW, SIGNAL = 7.4; EXPRESSED IN HELA, SIGNAL = 7.4; NT HIT: L78810.1, EVALUE 3.00e-54; EST_HUMAN HIT: AI961087.1, EVALUE 3.00e-54; SWISSPROT HIT: Q11196, EVALUE 2.20e+00
gtcgaggaggctcgggcggtacaggagcccacggagggggtgggaggctcaggcatggcgggctgcaggtcccgagccctgccccacggaaaggcagctaaggcccggcgagaaattgagcgcagcgccggtgggctggcgctgctgggggacccagtataccctctgcagctgctg

SEQ ID NO: 21306 - DNA, 593 bp, Homo sapiens
  MAP TO AC006078.1; EXPRESSED IN ADULT LIVER, SIGNAL =  24; EXPRESSED IN BT474, SIGNAL =  11; EXPRESSED IN FETAL LIVER, SIGNAL =  12; EXPRESSED IN PLACENTA, SIGNAL =  17; EXPRESSED IN BRAIN, SIGNAL = 5.2; EXPRESSED IN LUNG, SIGNAL =  10; EXPRESSED IN BONE MARROW, SIGNAL =   6; EXPRESSED IN HEART, SIGNAL =  22; EXPRESSED IN HELA, SIGNAL = 7.9; EXPRESSED IN HBL100, SIGNAL = 3.4; EST_HUMAN HIT: BE466420.1, EVALUE 0.00e+00; SWISSPROT HIT: P10266, EVALUE 1.00e-109; NT HIT: Y18890.1, EVALUE 0.00e+00
aaaaaccggtatgggtaaatcagtggccgctaccaaaacaaaaactggaggctttacatttattagcaaaggaacaattagaaaagggacatattgagccttcattctcgccttggaattctcctgtgtttgtaattcaaaaaaaatccggcagatggcataagttaactgacttaagagccgtaaatgccgtaattcaacccatggggcctctccaacccgggttgccctctctggccatgatcccaaaagactggcctttaattataattgatctgaaggactgcttttttaccatccctctggcggagcaggattatgaaaaatttgcctttactataccagccataaataataaagaaccagccaccagatttcagtggaaagtgttacctcagggaatgcttaatagtccaactatttgtcaagctcttcaaccagttagagacaagttttcagactgttatatcattcactatgttgatgatattttatgtgctgcagaaatgagagacaaattaattaactgttatacatttctgcaagcagaggttgccaatgctggactggcaatagcatctgataagattcaa

SEQ ID NO: 21307 - DNA, 84 bp, Homo sapiens
  MAP TO AC011493.2; EXPRESSED IN BONE MARROW, SIGNAL = 6.9; EXPRESSED IN LUNG, SIGNAL = 8.2; EXPRESSED IN HELA, SIGNAL = 7.4; EXPRESSED IN PLACENTA, SIGNAL = 9.3; EXPRESSED IN HBL100, SIGNAL =  15; EXPRESSED IN HEART, SIGNAL = 5.5; EXPRESSED IN FETAL LIVER, SIGNAL =   5; EXPRESSED IN ADULT LIVER, SIGNAL = 1.3; EXPRESSED IN BT474, SIGNAL =  12; EXPRESSED IN BRAIN, SIGNAL = 2.5; SWISSPROT HIT: P47904, EVALUE 4.00e-11; NT HIT: U57847.1, EVALUE 4.00e-39; EST_HUMAN HIT: N22458.1, EVALUE 2.00e-33
tatagcatcctgggcatttcacatccatgaagtaggaattggggctctgcaccaggcgtttcttcttgtgtttcctcttctctt

SEQ ID NO: 21308 - DNA, 543 bp, Homo sapiens
  MAP TO AL009178.4; EXPRESSED IN BONE MARROW, SIGNAL = 1.5; EXPRESSED IN PLACENTA, SIGNAL = 1.6; EXPRESSED IN HELA, SIGNAL = 1.6; EXPRESSED IN FETAL LIVER, SIGNAL = 1.7; EXPRESSED IN ADULT LIVER, SIGNAL = 1.7; EXPRESSED IN BT474, SIGNAL = 1.5; EXPRESSED IN BRAIN, SIGNAL = 1.2; EXPRESSED IN LUNG, SIGNAL = 1.8; EXPRESSED IN HEART, SIGNAL = 2.8; EXPRESSED IN HBL100, SIGNAL = 1.4; EST_HUMAN HIT: AW382320.1, EVALUE 8.80e-02; SWISSPROT HIT: Q05904, EVALUE 7.00e-12
tctccagaactgggaggagtctctccggaactgggaggagtctctccggagctgggaggagtctctccggaactgggaggagtctctccggaactgggaggagtctctccggaactgggaggagtctctccagaactgggaggagttgctccggaactgggaggtgtctctccagaactgggaggagtctctccagagctttgaggagtctctccggagctgggaggagtctctccggaactgggaggagtctctccggagctgggaggagtctctccggaactgggaggtgtctctctggagctgggaggagtctctccggaactgggaggagtctctccggagctgggaggagtctctccggagctgggaagtgtctctcccgaactgggaggagtttccctggaaccccctcccctcccagggctgagtcagcgtccgagccgggagctggggctgccttccagaggctggctccctccactgagagaggctcagccctccctgggcatttgggctgtgtgggagacagagacacctgca

SEQ ID NO: 21309 - DNA, 219 bp, Homo sapiens
  MAP TO AC012119.1; EXPRESSED IN HELA, SIGNAL = 1.7; EXPRESSED IN HBL100, SIGNAL = 2.4; EXPRESSED IN HEART, SIGNAL = 2.8; EXPRESSED IN FETAL LIVER, SIGNAL = 2.8; EXPRESSED IN LUNG, SIGNAL = 2.4; EXPRESSED IN PLACENTA, SIGNAL = 3.1; EXPRESSED IN BT474, SIGNAL = 1.8; EXPRESSED IN ADULT LIVER, SIGNAL = 1.7; EXPRESSED IN BRAIN, SIGNAL = 2.2; EXPRESSED IN BONE MARROW, SIGNAL = 2.7; SWISSPROT HIT: P52823, EVALUE 2.00e-36; NT HIT: AF098463.1, EVALUE 1.00e-120; EST_HUMAN HIT: AW954342.1, EVALUE 1.00e-116
tttgtacctgttggagaagtgattgggcagctggacgacctcagtgatggcttcagggttccgcttggcgatgctgcacacattcagcttgctgtagcactcttcctgcacctcagcaatcatcctttggaaagtggagcacctccgaatggcgaggaagaccttggaggtgaccccgttggcgatgcattttaagctctctttgacgaatgcttttcc

SEQ ID NO: 21310 - DNA, 125 bp, Homo sapiens
  MAP TO AL035697.18; EXPRESSED IN FETAL LIVER, SIGNAL = 0.83; EXPRESSED IN BONE MARROW, SIGNAL = 0.79; EXPRESSED IN HBL100, SIGNAL = 0.91; EXPRESSED IN ADULT LIVER, SIGNAL = 0.73; EXPRESSED IN BRAIN, SIGNAL = 0.84; EXPRESSED IN PLACENTA, SIGNAL = 0.81; EXPRESSED IN BT474, SIGNAL = 0.8; EXPRESSED IN LUNG, SIGNAL = 0.79; EXPRESSED IN HEART, SIGNAL = 0.87; NT HIT: U29449.1, EVALUE 1.00e-03; EST_HUMAN HIT: BF688642.1, EVALUE 1.60e+00; SWISSPROT HIT: P32271, EVALUE 2.00e-01
tatcagggttgaggactcatttttgtgtttcgacacattcttggcacgttccccttgagcatgaggcagaacgcaactgcctttgcttattttatctagagaatgatgaccaaggtgctctttcc

SEQ ID NO: 21311 - DNA, 233 bp, Homo sapiens
  MAP TO AC011700.3; EXPRESSED IN FETAL LIVER, SIGNAL = 5.4; EXPRESSED IN ADULT LIVER, SIGNAL = 5.4; EXPRESSED IN BT474, SIGNAL = 5.9; EXPRESSED IN BRAIN, SIGNAL = 6.1; EXPRESSED IN BONE MARROW, SIGNAL =   6; EXPRESSED IN LUNG, SIGNAL = 6.3; EXPRESSED IN HELA, SIGNAL = 4.9; EXPRESSED IN PLACENTA, SIGNAL = 7.3; EXPRESSED IN HBL100, SIGNAL = 4.8; EXPRESSED IN HEART, SIGNAL = 5.5; NT HIT: gi11426673, EVALUE 1.00e-128; SWISSPROT HIT: Q92786, EVALUE 4.00e-38; EST_HUMAN HIT: AV647211.1, EVALUE 7.00e-26
cgccagcggcagggccggaggcagactggtcagaggagtttttgcggacaaccaggggcagtgcttctgtctggtcagtggaactggccatctgcacattgccaaaggtgtccagggggttcggaatgatgacgtcgccaaagcactgcaggcgctggttggcggtgtggaaattgtggttttccccattgactgcaaatctggcctgggggatctggagaggtgggaagacc

SEQ ID NO: 21312 - DNA, 561 bp, Homo sapiens
  MAP TO AC006501.5; EXPRESSED IN PLACENTA, SIGNAL = 1.9; EXPRESSED IN FETAL LIVER, SIGNAL = 1.2; EXPRESSED IN ADULT LIVER, SIGNAL =   1; EXPRESSED IN BT474, SIGNAL = 1.3; EXPRESSED IN LUNG, SIGNAL = 3.1; EXPRESSED IN HEART, SIGNAL = 2.3; EXPRESSED IN HELA, SIGNAL = 2.3; EXPRESSED IN HBL100, SIGNAL = 1.3; SWISSPROT HIT: O13695, EVALUE 3.10e-01; EST_HUMAN HIT: BE081527.1, EVALUE 0.00e+00
tatgaacagttacactctgagcatgttcgtgtgtggtttgtaatgttaccttacattttcctacaaaggcaattcgtggcagctctggctgacctgcaagaggctgtgaaactctgtcccaccaatcaggaagtcaagaggcttctggcccgcgtagaagaggagtgcaaacaactccagaggagtcaacagcaaaaacagcagggcccgctaccagctccactcaacgactccgagaacgaagaggacaccccaacccctggcttaagtgaccactttcactctgaggagactgaagaggaagaaacttctccccaggaagaatctgtttccccaactcccaggtcccagccatcctcatctgtcccttcctcatacatccgaaaccttcaagaagggttacagtccaaaggaaggccggtatcgccacagagcagggcaggaatcggcaagtccctgagagagcctgtggcccagccagggctgctcctgcagccctccaagcaggcccagatcgtgaaaaccagccagcacctgggctctggccagtcggcagtgaga

SEQ ID NO: 21313 - DNA, 125 bp, Homo sapiens
  MAP TO AC012132.1; EXPRESSED IN HBL100, SIGNAL = 1.4; EXPRESSED IN HEART, SIGNAL = 1.3; EXPRESSED IN FETAL LIVER, SIGNAL = 1.3; EXPRESSED IN BT474, SIGNAL = 1.1; EXPRESSED IN LUNG, SIGNAL = 1.2; EXPRESSED IN PLACENTA, SIGNAL = 1.4; EXPRESSED IN HELA, SIGNAL = 1.3; EXPRESSED IN ADULT LIVER, SIGNAL = 1.5; EXPRESSED IN BRAIN, SIGNAL = 1.5; EXPRESSED IN BONE MARROW, SIGNAL = 1.7; EST_HUMAN HIT: AV747880.1, EVALUE 4.10e-01
taggacttgtgtggcatcagatgcaaatacaggttccagaataagaaacagaccgatcaaatgctcatggcagttcttgctgaagctgcagctgtgctgggtagcatcatctaataagggtgtac

SEQ ID NO: 21314 - DNA, 180 bp, Homo sapiens
  MAP TO AC012367.2; EXPRESSED IN BONE MARROW, SIGNAL = 2.4; EXPRESSED IN HELA, SIGNAL = 1.9; EXPRESSED IN HBL100, SIGNAL = 2.1; EXPRESSED IN HEART, SIGNAL = 1.8; EXPRESSED IN FETAL LIVER, SIGNAL = 1.7; EXPRESSED IN LUNG, SIGNAL = 1.9; EXPRESSED IN PLACENTA, SIGNAL =   2; EXPRESSED IN BT474, SIGNAL =   2; EXPRESSED IN ADULT LIVER, SIGNAL = 2.4; EXPRESSED IN BRAIN, SIGNAL = 3.3; NT HIT: X65740.2, EVALUE 9.00e-02; EST_HUMAN HIT: AW609076.1, EVALUE 4.30e-01; SWISSPROT HIT: P44550, EVALUE 1.70e+00
gtttgctccaaccacaggtccaaaagagaaagagagtttgcaatgttcataacaattacataggcacaacgctaaagctgaagtatttaatcaatgggataaattcaccaatgagatcttggtgtgagtctctgcctgcatttctgaagccctctgccctgaagctgacatctttcagag

SEQ ID NO: 21315 - DNA, 80 bp, Homo sapiens
  MAP TO AC012443.1; EXPRESSED IN FETAL LIVER, SIGNAL = 1.3; EXPRESSED IN ADULT LIVER, SIGNAL = 1.7; EXPRESSED IN BT474, SIGNAL = 1.4; EXPRESSED IN BRAIN, SIGNAL = 1.7; EXPRESSED IN BONE MARROW, SIGNAL = 1.2; EXPRESSED IN LUNG, SIGNAL = 1.4; EXPRESSED IN HELA, SIGNAL = 1.3; EXPRESSED IN PLACENTA, SIGNAL = 1.7; EXPRESSED IN HBL100, SIGNAL = 1.5; EXPRESSED IN HEART, SIGNAL = 1.3; EST_HUMAN HIT: AI290556.1, EVALUE 6.10e-02
atagcctttgagcttgtgaatgtatgtatggggaggatcttcacgtggaatcgttcctgcagaaagcagcaaaagtccaa

SEQ ID NO: 21316 - DNA, 98 bp, Homo sapiens
  MAP TO AC012447.2; EXPRESSED IN HBL100, SIGNAL = 2.6; EXPRESSED IN HEART, SIGNAL = 2.5; EXPRESSED IN FETAL LIVER, SIGNAL =   3; EXPRESSED IN BT474, SIGNAL = 2.9; EXPRESSED IN LUNG, SIGNAL =   3; EXPRESSED IN PLACENTA, SIGNAL =   3; EXPRESSED IN HELA, SIGNAL = 2.7; EXPRESSED IN ADULT LIVER, SIGNAL = 3.7; EXPRESSED IN BRAIN, SIGNAL = 2.6; EXPRESSED IN BONE MARROW, SIGNAL = 2.7; EST_HUMAN HIT: H49239.1, EVALUE 2.00e-35; SWISSPROT HIT: Q07954, EVALUE 7.00e+00
ctgagatctgccctcacacgttctcctacatgtctgtaaatttccactaagctgtttattgctgcatctcgaacctagatataaaagaagagatctta

SEQ ID NO: 21317 - DNA, 169 bp, Homo sapiens
  MAP TO AC007382.2; EXPRESSED IN BT474, SIGNAL = 0.66; EXPRESSED IN BRAIN, SIGNAL = 0.98; EXPRESSED IN HEART, SIGNAL = 0.98; NT HIT: gi11430548, EVALUE 5.00e-90; EST_HUMAN HIT: AL135549.1, EVALUE 5.00e-90; SWISSPROT HIT: P70483, EVALUE 5.00e-25
gtatctacaggaggtgggttatacagatactattctagatgtgaaatctaaacgagtgcgagctttgttgggcttttcaagtgatgtcacggacagggaagatgacaaaaatcaggactcagttgtaaatggcacagaggctgaagttaaagagacagcaatgattgcg

SEQ ID NO: 21318 - DNA, 103 bp, Homo sapiens
  MAP TO AC007251.1; EXPRESSED IN BT474, SIGNAL =   1; EXPRESSED IN FETAL LIVER, SIGNAL = 1.3; EXPRESSED IN BRAIN, SIGNAL = 1.1; EXPRESSED IN BONE MARROW, SIGNAL = 1.2; EXPRESSED IN PLACENTA, SIGNAL = 1.1; EXPRESSED IN HELA, SIGNAL = 1.1; EXPRESSED IN HEART, SIGNAL = 1.7; EST_HUMAN HIT: H93034.1, EVALUE 1.30e+00; NT HIT: Z54280.1, EVALUE 4.80e-02
gaaacagcagagcaggcagtaagaagaaaggggactgaggaggagtggggagtggtgcttggaggagctcagcttgcaggtgcagaacagtgaaaagctttgg

SEQ ID NO: 21319 - DNA, 443 bp, Homo sapiens
  MAP TO AF019413.1; EXPRESSED IN BRAIN, SIGNAL = 2.3; EXPRESSED IN HELA, SIGNAL = 2.1; EXPRESSED IN HBL100, SIGNAL =   2; EXPRESSED IN HEART, SIGNAL =   2; EXPRESSED IN ADULT LIVER, SIGNAL = 2.1; EXPRESSED IN FETAL LIVER, SIGNAL =   2; EXPRESSED IN BT474, SIGNAL = 2.1; EXPRESSED IN LUNG, SIGNAL = 1.9; EXPRESSED IN BONE MARROW, SIGNAL = 2.2; EXPRESSED IN PLACENTA, SIGNAL = 1.9; EST_HUMAN HIT: AL042665.2, EVALUE 2.00e-17; SWISSPROT HIT: P22105, EVALUE 7.00e-45; NT HIT: L26263.1, EVALUE 0.00e+00
aacttcccacctcagccttgggccaagcctggaagataaaaatggagcaccccatggcgcccctcactcagattctcccctgggcttctcccacgcagccccagaagaggacacaccagccccagagttagccccagaggcccctgagcctcctgaagagccccgcctaggagtgctgaccgtgaccgacacaaccccagactccatgcgcctctcgtggagcgtggcccagggcccctttgattccttcgtggtccagtatgaggacacgaacgggcagccccaggccttgctcgtggacggcgaccagagcaagatcctcatctcaggcctggagcccagcaccccctacaggttcctcctctatggcctccatgaagggaagcgcctggggcccctctcagctgagggcaccacaggtaccaccaggcgtctccggcctc

SEQ ID NO: 21320 - DNA, 253 bp, Homo sapiens
  MAP TO AC012553.2; EXPRESSED IN BONE MARROW, SIGNAL = 1.3; EXPRESSED IN HEART, SIGNAL = 0.98; EXPRESSED IN FETAL LIVER, SIGNAL =   1; EXPRESSED IN PLACENTA, SIGNAL = 4.4; EXPRESSED IN HELA, SIGNAL = 0.96; EXPRESSED IN HBL100, SIGNAL = 1.2; EXPRESSED IN BT474, SIGNAL = 1.5; EXPRESSED IN ADULT LIVER, SIGNAL = 1.2; EXPRESSED IN BRAIN, SIGNAL = 1.3; EXPRESSED IN LUNG, SIGNAL = 1.6; NT HIT: gi11431695, EVALUE 1.00e-127; EST_HUMAN HIT: BF116048.1, EVALUE 1.00e-127; SWISSPROT HIT: P22523, EVALUE 3.80e+00
tgacatgtcgccctttggcgtggaggaacgggaggagcccttgtctgtgctctctgaccccgagctgctctggttctgctgttctgaccctgcactggaggtcactgtggatgaggatgtcgatgaggagcgagtcttttccttaaagtctgtgataatgacggtgacgttgcccacagttactgccaactgctgtgcagtgctcctgtccacgtttttcagccggggcctagaagcaacaccacaggggaag

SEQ ID NO: 21321 - DNA, 93 bp, Homo sapiens
  MAP TO AC012446.1; EXPRESSED IN BONE MARROW, SIGNAL = 6.3; EXPRESSED IN PLACENTA, SIGNAL = 5.5; EXPRESSED IN FETAL LIVER, SIGNAL =   5; EXPRESSED IN ADULT LIVER, SIGNAL = 5.9; EXPRESSED IN LUNG, SIGNAL = 5.6; EXPRESSED IN HEART, SIGNAL = 4.4; EXPRESSED IN HELA, SIGNAL = 5.1; EXPRESSED IN HBL100, SIGNAL = 5.8; EXPRESSED IN BT474, SIGNAL = 5.6; EXPRESSED IN BRAIN, SIGNAL = 5.1; NT HIT: AF068749.1, EVALUE 2.60e+00
atcagtaaagcacaaagaaccccactttggatgtggcgtatgtgcataaatgtccagagcatagtggttcacagcatccaggtctacctctgg

SEQ ID NO: 21322 - DNA, 316 bp, Homo sapiens
  MAP TO AL021579.1; EXPRESSED IN LUNG, SIGNAL =   3; EXPRESSED IN HELA, SIGNAL = 2.9; EXPRESSED IN HBL100, SIGNAL = 2.4; EXPRESSED IN HEART, SIGNAL = 2.6; EXPRESSED IN BRAIN, SIGNAL = 2.6; EXPRESSED IN BONE MARROW, SIGNAL = 2.5; EXPRESSED IN PLACENTA, SIGNAL = 2.9; EXPRESSED IN ADULT LIVER, SIGNAL = 3.4; EXPRESSED IN FETAL LIVER, SIGNAL = 2.9; EXPRESSED IN BT474, SIGNAL = 3.4; NT HIT: AL096857.1, EVALUE 1.00e-115; EST_HUMAN HIT: AW962224.1, EVALUE 1.00e-115; SWISSPROT HIT: P48634, EVALUE 2.00e-06
ttcaggaacagatgaaacagcagcagtggcagcagcagcaacagcaaggtgtacttccacagactgttccttcacaaccgtccagtagtactgtccctcctccaccacacagacctctttatcagcctatgcagcctcatcctcagcatttggcttctatgggttttgatccaaggtggctcatgatgcagtcctacatggatcctcgaatgatgtcaggaagacctgctatggatattccacccattcatcctggtcagttgaatttgcatttatagttttacaggatcaaaatttttttttccctgcttttagt

SEQ ID NO: 21323 - DNA, 270 bp, Homo sapiens
  MAP TO AB020863.1; EXPRESSED IN HELA, SIGNAL = 1.9; EXPRESSED IN HEART, SIGNAL = 0.85; EXPRESSED IN LUNG, SIGNAL = 1.8; NT HIT: gi11427201, EVALUE 2.00e-81; EST_HUMAN HIT: AI750669.1, EVALUE 2.00e-81; SWISSPROT HIT: P42159, EVALUE 1.90e+00
gacagctggagggccccagccaggtctgacttgctttgagttcatgtgtcttttattcctagcgtcaagcagaatgagcgctacggccagttgactctggtcaactccacctcggcagacacaggtgaattcagctgctgggtgcagctctgcagcggctacatctgcaggaaggacgaggccaaaacgggctccacctacatcttttttacaggtaaaatacttggtgcattaatggaactcttcaaacttctggaccgggctgagagc

SEQ ID NO: 21324 - DNA, 250 bp, Homo sapiens
  MAP TO AC012513.2; EXPRESSED IN PLACENTA, SIGNAL = 2.7; EXPRESSED IN HBL100, SIGNAL = 2.5; EXPRESSED IN HEART, SIGNAL = 2.7; EXPRESSED IN ADULT LIVER, SIGNAL = 2.6; EXPRESSED IN LUNG, SIGNAL = 2.5; EXPRESSED IN BRAIN, SIGNAL = 2.7; EXPRESSED IN HELA, SIGNAL = 2.5; EXPRESSED IN BT474, SIGNAL = 2.2; EXPRESSED IN FETAL LIVER, SIGNAL = 2.5; EXPRESSED IN BONE MARROW, SIGNAL = 2.9; NT HIT: AB037820.1, EVALUE 0.00e+00; EST_HUMAN HIT: AW954545.1, EVALUE 0.00e+00; SWISSPROT HIT: P17931, EVALUE 3.70e+00
cggtgtaccgcatctttaaacggtggcaggctgtcaaccagcagtggaaagtgctgaactatgacaagacaaaagacctggaggatcaaaaggcaggaggcaggaccaacccccggacctcctcatccacccaggccaatatcccctcctcggaagaggagaccgcaggcacccctgcccctgagcagggccctgcccaggctgccggccacccctcaggccctctgtcccatcaccactgtgcttatac

SEQ ID NO: 21325 - DNA, 253 bp, Homo sapiens
  MAP TO AF024533.1; EXPRESSED IN BT474, SIGNAL = 2.3; EXPRESSED IN LUNG, SIGNAL = 2.1; EXPRESSED IN BRAIN, SIGNAL = 2.7; EXPRESSED IN BONE MARROW, SIGNAL = 3.3; EXPRESSED IN ADULT LIVER, SIGNAL = 1.8; EXPRESSED IN FETAL LIVER, SIGNAL =   2; EXPRESSED IN PLACENTA, SIGNAL = 3.1; EXPRESSED IN HEART, SIGNAL = 2.6; EXPRESSED IN HELA, SIGNAL = 2.5; EXPRESSED IN HBL100, SIGNAL = 2.2; NT HIT: M74099.1, EVALUE 0.00e+00; SWISSPROT HIT: P39880, EVALUE 3.00e-29
cgaggttgttgtccgtcagcacctccttcacccgcttggttatgccgtaggtgtccagctccggggacatggctactaattcttggatgctgagggccgagtgtccggagagaggcagcggggttgtgggctgggagtcggatgctggcgggtcactgggctctggtggcttgctgtccttgctcgcctcgatggggggacagggctgctggaccagctcggtcaggctcttcaccgactcactggaactcat

SEQ ID NO: 21326 - DNA, 120 bp, Homo sapiens
  MAP TO AL080312.4; EXPRESSED IN HEART, SIGNAL =  23; EXPRESSED IN LUNG, SIGNAL = 0.91; EXPRESSED IN BONE MARROW, SIGNAL =   1; EXPRESSED IN BRAIN, SIGNAL = 0.93; EST_HUMAN HIT: BE674249.1, EVALUE 9.90e-02; SWISSPROT HIT: P50495, EVALUE 1.00e+00
ttcaggtgcctcctgaccctgaccacgggctggcaccttttcttcctcctgcgtcgtgtcctgcgctctgtgttgaaactgggttcccattaattattaatttttctccagagaatactt

SEQ ID NO: 21327 - DNA, 299 bp, Homo sapiens
  MAP TO AL022143.1; EXPRESSED IN PLACENTA, SIGNAL = 2.3; EXPRESSED IN ADULT LIVER, SIGNAL = 2.8; EXPRESSED IN FETAL LIVER, SIGNAL = 1.6; EXPRESSED IN BONE MARROW, SIGNAL = 1.9; EXPRESSED IN BRAIN, SIGNAL = 1.4; EXPRESSED IN HELA, SIGNAL =   2; EXPRESSED IN HBL100, SIGNAL = 1.6; EXPRESSED IN HEART, SIGNAL = 1.7; EXPRESSED IN BT474, SIGNAL = 2.1; EXPRESSED IN LUNG, SIGNAL = 2.3; NT HIT: AB008681.1, EVALUE 2.00e-68; SWISSPROT HIT: P14077, EVALUE 1.00e-08; EST_HUMAN HIT: AA668227.1, EVALUE 6.00e-57
ctattgttggatcatctggttggggacttcaggcctagagaacctttgtcctctggggcagtgcgccttccagtgatttccttggcataatggacatgggcgagggggcagcttgtttcttgttggacaatcttttttaaagtgtccttgcaaagaacactggtaacaagtcctactgggtgattggcctgctccattttctgttctctgaacgaccaaggtttgtttgtctgaggatgatgaaggctgtggcctttctctgatcttgcttttccttttcggcttgttcctcttggtcc

SEQ ID NO: 21328 - DNA, 520 bp, Homo sapiens
  MAP TO AL021917.1; EXPRESSED IN LUNG, SIGNAL =   4; EXPRESSED IN PLACENTA, SIGNAL = 2.1; EXPRESSED IN ADULT LIVER, SIGNAL = 2.3; EXPRESSED IN BRAIN, SIGNAL = 1.8; EXPRESSED IN BONE MARROW, SIGNAL = 2.4; EXPRESSED IN HEART, SIGNAL = 1.8; EXPRESSED IN HELA, SIGNAL = 2.6; EXPRESSED IN HBL100, SIGNAL = 2.9; EXPRESSED IN FETAL LIVER, SIGNAL =   2; EXPRESSED IN BT474, SIGNAL = 2.2; EST_HUMAN HIT: R87400.1, EVALUE 1.00e-127; SWISSPROT HIT: P18892, EVALUE 5.00e-47; NT HIT: gi11418858, EVALUE 0.00e+00
aaggctgaacggggacatgtgtagatgtgcgatctgtccctcatgttgtagaaggagacatctccagcttcatagtccaggaagacgcccacccggcaaagggactccttcaaagggagaatcctctcaggggaggacagggcccggtattggtttccaaacatctccagggtccagaagccattctgaggaatcagcaggacctcccctttcctctcaacactgtgtctgcagacccccacagtccacaccatcacgttttccacctccacctcccagtaatgtttccctgaggcgaagctctcccatcccaggacacaaggctgactgtcgaatctctctgggttgtcaggcactctctgcctgtaggggccccgcctcacacttctccggtcctctgacaggaagagctcgggatgagcggtgtctggatccaggaccacatcagctgcagaggaagtctcaggtttatgcctggggtctcaggaaccctggggattgtgtggttcctggtccccag

SEQ ID NO: 21329 - DNA, 377 bp, Homo sapiens
  MAP TO AL021997.1; EXPRESSED IN FETAL LIVER, SIGNAL = 1.1; EXPRESSED IN BONE MARROW, SIGNAL = 1.2; EXPRESSED IN LUNG, SIGNAL =   2; EXPRESSED IN BRAIN, SIGNAL = 1.3; EXPRESSED IN PLACENTA, SIGNAL = 1.2; EXPRESSED IN HBL100, SIGNAL = 1.2; EXPRESSED IN HELA, SIGNAL =   1; EXPRESSED IN HEART, SIGNAL = 0.99; SWISSPROT HIT: O43309, EVALUE 3.00e-29; EST_HUMAN HIT: BE278730.1, EVALUE 0.00e+00; NT HIT: gi11526411, EVALUE 0.00e+00
aaggaatgcccctcactctgatctgggatttcaggaggaaacaggccacagcgctcagatactaaacctgttctttctacctgcggcgccggctcatccagctgcctctccaaatactccaatagcaccaccacctcctccccgctctctggatgctgctcccgcacccagctctgcagattccccggcaggatggtcaggaactgctccagcaccagcagctccaggatctgctccttgctgtgcatctcaggctgcagccactgtcggcagagctctcggagccgactcagcgcctcgcgggggcctgcagcctccgggtagcggaagcctcggaagcgctcgcgggagccctcagaacccagatctgggctact

SEQ ID NO: 21330 - DNA, 335 bp, Homo sapiens
  MAP TO AL022145.1; EXPRESSED IN FETAL LIVER, SIGNAL = 1.2; EXPRESSED IN LUNG, SIGNAL =   1; EXPRESSED IN PLACENTA, SIGNAL =   1; EXPRESSED IN BRAIN, SIGNAL = 1.1; EXPRESSED IN BONE MARROW, SIGNAL = 1.2; EXPRESSED IN HEART, SIGNAL = 1.1; EXPRESSED IN HELA, SIGNAL = 1.1; EXPRESSED IN HBL100, SIGNAL = 0.97; EST_HUMAN HIT: AA633640.1, EVALUE 4.00e-15; SWISSPROT HIT: Q61137, EVALUE 3.00e-33; NT HIT: AB006627.1, EVALUE 2.00e-90
ggagccgcttcatcttgctggaggggagccagctggatgccagtgactggctgaaccctgcccaagtggttctcttctctcagcagaactccagcggaccctgggccatggacctctgtgcccggcggctcctggacccctgtgaacaccaatgtgaccccgaaactggtaggcgggagcaccgggcagcgggtaactgtcagagagatcatgcctcttgcaatcactcccttgaaattcagaccatgcctcccaactccccgtcccactgccatctcgagcctagaccatgcggactgcctgcatgtggttgggccgcagagcttattggctaa

SEQ ID NO: 21331 - DNA, 522 bp, Homo sapiens
  MAP TO AL024509.1; EXPRESSED IN PLACENTA, SIGNAL = 1.9; EXPRESSED IN HELA, SIGNAL = 1.6; EXPRESSED IN HBL100, SIGNAL = 1.7; EXPRESSED IN HEART, SIGNAL = 1.5; EXPRESSED IN BT474, SIGNAL = 1.5; EXPRESSED IN ADULT LIVER, SIGNAL = 1.4; EXPRESSED IN FETAL LIVER, SIGNAL = 1.6; EXPRESSED IN BONE MARROW, SIGNAL = 1.4; EXPRESSED IN LUNG, SIGNAL = 1.6; EXPRESSED IN BRAIN, SIGNAL = 1.2; NT HIT: AF079525.1, EVALUE 5.10e+00; SWISSPROT HIT: P30745, EVALUE 6.40e-01
aaaaccaagcttagattttgcaagatgggtgacctgaagttttgcctagagggagagaagggtctcttcctcctttcactctgttcttgacagcgcctgcagcctgccctggaagaacgggtttcttcttcagatagaaaggaattgctggctcttctgccagccttgcccataggcctggctgtttccctgatgcaccttccctgctcaagttgctatccttatcattttatatttttgtgccagtatagatttggtcctataaggctgcagatacatagtgggcagaaagatggggggatgagagcactgagcctacaacctatttggagggactctgggcagcatgaggatgaggggcagggccagggccaccgctaactagttagcagtcaggcaaatagtcaaggacagagaccttgtatacattaatagtgccagcattttaaagatctttacccagggaaggctgtatatatacagttatttgggagaaaccagaaatggtgtatttaaaaaaat

SEQ ID NO: 21332 - DNA, 150 bp, Homo sapiens
  MAP TO AF165138.1; EXPRESSED IN HEART, SIGNAL = 0.96; EXPRESSED IN ADULT LIVER, SIGNAL = 0.68; EXPRESSED IN PLACENTA, SIGNAL = 0.83; EXPRESSED IN BONE MARROW, SIGNAL = 0.97; EXPRESSED IN LUNG, SIGNAL = 0.61; EXPRESSED IN HELA, SIGNAL = 0.66; EXPRESSED IN FETAL LIVER, SIGNAL = 0.62; SWISSPROT HIT: O01671, EVALUE 1.70e+00; NT HIT: AL163206.2, EVALUE 2.00e-79
ctcccaaccttggatgagccgtttcttatctttccgctgctctttattcagctttccatggccaagagaaaaacctgtcttccttctgttgatgttccctgccccacgttgagggagctgaggcgagagctgcagaggatccgtaaggag

SEQ ID NO: 21333 - DNA, 357 bp, Homo sapiens
  MAP TO AL049548.6; EXPRESSED IN BONE MARROW, SIGNAL = 1.6; EXPRESSED IN LUNG, SIGNAL = 0.81; EXPRESSED IN FETAL LIVER, SIGNAL = 0.66; EXPRESSED IN BRAIN, SIGNAL = 0.77; EXPRESSED IN HEART, SIGNAL = 0.88; NT HIT: AE004472.1, EVALUE 5.60e-02; SWISSPROT HIT: Q09455, EVALUE 1.00e-02; EST_HUMAN HIT: BF239763.1, EVALUE 5.00e-65
gagctgatagattccagagagattggtgcaagccgtctcagcagagtggagtcgctggctcccgaagtgaaacagaacacaactgccagtgggtgtgagctcatgcacacggagatgcaggccctgcgtgccgactggaagcagtgggaagacagtgtattccaaacgcagagctgtttggagaacctggtcagccagatggccctttcggagcaggaattctcaggccaagtggctcaactggagcaggccctggaacagttcagtgcccttctgaaaacctgggctcagcagttaaccctcctggaaggcaagaacacggatgaggagatagtggaatgctggcacaaaggacaa

SEQ ID NO: 21334 - DNA, 383 bp, Homo sapiens
  MAP TO AL109982.1; EXPRESSED IN BRAIN, SIGNAL = 1.1; EXPRESSED IN ADULT LIVER, SIGNAL = 1.2; EXPRESSED IN HEART, SIGNAL = 1.1; EXPRESSED IN BONE MARROW, SIGNAL =   1; SWISSPROT HIT: P40798, EVALUE 2.40e-01; NT HIT: Y16091.1, EVALUE 9.50e-01; EST_HUMAN HIT: BE378471.1, EVALUE 2.00e-05
gctcttctacttgctgaccatgtctgactggcagagagttttagcaaggtggcatttgcagccatgcaccagcctgcccattccatctctcaactgcacaactacaccttcctcagacctgtggccaagccccacatggctttcccagagcatgtgtgtgggcagaccttgccttccctgctctaacagcgtgcatgtgcccatgtgcctgccctgccccttctggcagtgggagtgcattctgcccccacctcccctgtcataccaacattggtgtcaaagctttggtgggcacagagcccaccaaaacccttcctccacaagcaccctgcccctgcaccaacactgctgctggagtgagaacagtggaccctcccctaccc

SEQ ID NO: 21335 - DNA, 275 bp, Homo sapiens
  MAP TO AL049780.2; EXPRESSED IN ADULT LIVER, SIGNAL = 0.77; EXPRESSED IN PLACENTA, SIGNAL = 1.1; EXPRESSED IN FETAL LIVER, SIGNAL = 0.64; EXPRESSED IN LUNG, SIGNAL = 0.71; EXPRESSED IN HEART, SIGNAL = 1.1; NT HIT: L11659.1, EVALUE 5.70e-01; EST_HUMAN HIT: BE390050.1, EVALUE 0.00e+00; SWISSPROT HIT: Q48451, EVALUE 2.60e+00
acgagtaaaacaaaccatttccttggccctgggaatcactttctggatcttgctggctgattccagtacagtggggataggagtagctccgggcttttgtttgggtgttccatttggggtgagtatagactttatccagaatcaactctttgttgctcaaaagctgcttctggaaattgttcctcaggtgccccttcaaggactgctgggaagagtcaccttgttcgtaagagtcttgcttggctgagtggggccctggagcttccgttgtatta

SEQ ID NO: 21336 - DNA, 128 bp, Homo sapiens
  MAP TO AP000147.1; EXPRESSED IN HELA, SIGNAL = 0.59; EXPRESSED IN ADULT LIVER, SIGNAL = 0.71; EXPRESSED IN HEART, SIGNAL =  79; EXPRESSED IN LUNG, SIGNAL = 0.76; EXPRESSED IN BRAIN, SIGNAL = 0.7; NT HIT: gi11466563, EVALUE 7.20e-02; SWISSPROT HIT: O60547, EVALUE 1.30e+00
tgaatatctggctcataaaattggttttggacggtttgtagaaaaatattttttatgtgtgggatttgtcacttttgaaggtgctaatcttgatctgctgggtcgctttaaggagacaacaaagaaag

SEQ ID NO: 21337 - DNA, 339 bp, Homo sapiens
  MAP TO AL022316.2; EXPRESSED IN BRAIN, SIGNAL = 0.99; EXPRESSED IN BONE MARROW, SIGNAL = 1.1; EXPRESSED IN HEART, SIGNAL = 1.1; EST_HUMAN HIT: BF348454.1, EVALUE 7.90e-02; NT HIT: U17755.1, EVALUE 1.80e-01; SWISSPROT HIT: Q10690, EVALUE 1.90e-01
agccttcttggaaaagcgatgacatccccagcctcaagacaaggatgggaaactaaggcacgggctccagacccaggcctgccacttgctctggctcaggcacgctctgaccttcagcttcctcgcctgctcttccagtccacagctcacctgacacctgcggggcaggcgcagatccaaataccccccggctcgcgcctcaccccccgagggagcagagcaaaccacttgcgcgagtccctttgggtccgcttccagcctttcatctgctttgctcaccacttccctgaggccaccctgatcccggctcctgtcatctctgcctggactttgcagtag

SEQ ID NO: 21338 - DNA, 194 bp, Homo sapiens
  MAP TO AC007738.2; EXPRESSED IN PLACENTA, SIGNAL =   3; EXPRESSED IN HBL100, SIGNAL =   3; EXPRESSED IN HELA, SIGNAL = 3.4; EXPRESSED IN HEART, SIGNAL = 3.1; EXPRESSED IN BT474, SIGNAL = 2.3; EXPRESSED IN ADULT LIVER, SIGNAL = 3.3; EXPRESSED IN FETAL LIVER, SIGNAL = 3.4; EXPRESSED IN BONE MARROW, SIGNAL = 2.5; EXPRESSED IN LUNG, SIGNAL = 3.1; EXPRESSED IN BRAIN, SIGNAL = 2.9; NT HIT: AJ242954.1, EVALUE 9.80e-02; EST_HUMAN HIT: AW869159.1, EVALUE 3.00e-67; SWISSPROT HIT: P78820, EVALUE 3.30e-01
caaacttaaaaatcccccatcatgggtagcagtgacttgaggtgatggttcaaaccattcacaggattttcccagtaaattcttcaaagttttcacagatgaaacagttaaagcaccagagcatcgagctaaagtcactgcactgtctgcccaccaattgacatctatcagtgggtaaaaggactctttatcta

SEQ ID NO: 21339 - DNA, 158 bp, Homo sapiens
  MAP TO AC007911.3; EXPRESSED IN BT474, SIGNAL =   8; EXPRESSED IN ADULT LIVER, SIGNAL = 8.4; EXPRESSED IN LUNG, SIGNAL =   8; EXPRESSED IN BRAIN, SIGNAL = 5.7; EXPRESSED IN PLACENTA, SIGNAL = 7.9; EXPRESSED IN HELA, SIGNAL = 7.4; EXPRESSED IN BONE MARROW, SIGNAL =   6; EXPRESSED IN HEART, SIGNAL = 6.8; EXPRESSED IN HBL100, SIGNAL = 6.9; EXPRESSED IN FETAL LIVER, SIGNAL = 8.2; NT HIT: Z49144.1, EVALUE 2.00e-02; EST_HUMAN HIT: AA324242.1, EVALUE 6.00e-03; SWISSPROT HIT: P52111, EVALUE 6.60e+00
ataggcccctcagtacgagctgggagcatcttgtatcaccactgtggcaagaagcaatccaacttggccaagaggcaagaggtcatccatagaaaggaatcccaagaaaagagacactaaagagggcacgcagatatttttctattctctttggagca

SEQ ID NO: 21340 - DNA, 102 bp, Homo sapiens
  MAP TO AL049696.8; EXPRESSED IN BONE MARROW, SIGNAL = 1.2; EXPRESSED IN HELA, SIGNAL = 1.3; EXPRESSED IN ADULT LIVER, SIGNAL = 1.1; EXPRESSED IN BRAIN, SIGNAL = 1.5; EXPRESSED IN PLACENTA, SIGNAL = 1.3; EXPRESSED IN BT474, SIGNAL =   1; EXPRESSED IN LUNG, SIGNAL = 1.3; EXPRESSED IN HEART, SIGNAL = 1.1; EXPRESSED IN HBL100, SIGNAL = 0.84; EXPRESSED IN FETAL LIVER, SIGNAL = 1.2; SWISSPROT HIT: P98059, EVALUE 1.80e+00; NT HIT: Y19122.1, EVALUE 7.30e-01; EST_HUMAN HIT: AA290599.1, EVALUE 5.60e-02
gactagcttcagaaacaaaggaatcctgagatccaaactccagcagcaaacaggcacactaacaacgcagggagccagtcttcccatcccactctgtgtgat

SEQ ID NO: 21341 - DNA, 178 bp, Homo sapiens
  MAP TO AC007327.1; EXPRESSED IN FETAL LIVER, SIGNAL = 4.3; EXPRESSED IN ADULT LIVER, SIGNAL = 6.2; EXPRESSED IN LUNG, SIGNAL = 3.2; EXPRESSED IN BRAIN, SIGNAL = 4.9; EXPRESSED IN PLACENTA, SIGNAL = 2.6; EXPRESSED IN HELA, SIGNAL = 7.2; EXPRESSED IN BT474, SIGNAL = 5.5; EXPRESSED IN BONE MARROW, SIGNAL = 4.9; EXPRESSED IN HEART, SIGNAL =   5; EXPRESSED IN HBL100, SIGNAL = 5.4; NT HIT: AF004914.1, EVALUE 1.40e+00; EST_HUMAN HIT: AA534093.1, EVALUE 4.20e-01; SWISSPROT HIT: O14967, EVALUE 7.50e-01
gggaatttgtcttaccagcgtggataaggttgtgcatcgcagcgttggttgtggaaacagtctgtgtgtccacttagactgtagtccagccacaaagggggacattctgcagctggaacagaaggaagagaaggcccacatggaaaaatttctgttctatagtgttcagagcaaaaag

SEQ ID NO: 21342 - DNA, 149 bp, Homo sapiens
  MAP TO AC007993.8; EXPRESSED IN PLACENTA, SIGNAL =   4; EXPRESSED IN HELA, SIGNAL = 4.2; EXPRESSED IN HBL100, SIGNAL = 3.6; EXPRESSED IN HEART, SIGNAL = 4.5; EXPRESSED IN FETAL LIVER, SIGNAL =   4; EXPRESSED IN BT474, SIGNAL = 3.7; EXPRESSED IN ADULT LIVER, SIGNAL =   4; EXPRESSED IN BONE MARROW, SIGNAL = 3.8; EXPRESSED IN LUNG, SIGNAL = 3.9; EXPRESSED IN BRAIN, SIGNAL = 4.1; SWISSPROT HIT: P10082, EVALUE 2.00e-15; NT HIT: gi11525891, EVALUE 9.00e-79; EST_HUMAN HIT: AI183955.1, EVALUE 2.00e-55
tgcttctggccctgctcgtctgcctaggggcgctggtcgacgcctaccccatcaaacccgaggctccccgcgaagacgcctcgccggaggagctgaaccgctactacgcctccctgcgccactacctcaacctggtcacccggcagcgg

SEQ ID NO: 21343 - DNA, 163 bp, Homo sapiens
  MAP TO AC008018.18; EXPRESSED IN BRAIN, SIGNAL = 3.5; EXPRESSED IN BONE MARROW, SIGNAL = 2.7; EXPRESSED IN LUNG, SIGNAL = 3.5; EXPRESSED IN PLACENTA, SIGNAL =   3; EXPRESSED IN HBL100, SIGNAL = 2.9; EXPRESSED IN HELA, SIGNAL = 3.6; EXPRESSED IN HEART, SIGNAL = 3.8; EXPRESSED IN FETAL LIVER, SIGNAL = 3.1; EXPRESSED IN BT474, SIGNAL = 3.1; EXPRESSED IN ADULT LIVER, SIGNAL = 2.4; EST_HUMAN HIT: AL043314.2, EVALUE 1.00e-84; SWISSPROT HIT: P11274, EVALUE 2.00e-24; NT HIT: gi11417842, EVALUE 1.00e-78
gatggcagagaaggaggcagtcaataagatgtccctgcacaaccttggcacggtctttggccccacgctgctccggccctccgagaaggagagcaagctccctgccaaccccagccagcccatcaccatgactgacagctggtccttggaggtcatgtcccag

SEQ ID NO: 21344 - DNA, 89 bp, Homo sapiens
  MAP TO AC007349.1; EXPRESSED IN BT474, SIGNAL = 4.1; EXPRESSED IN ADULT LIVER, SIGNAL = 4.1; EXPRESSED IN LUNG, SIGNAL = 2.1; EXPRESSED IN BRAIN, SIGNAL = 4.4; EXPRESSED IN PLACENTA, SIGNAL = 2.4; EXPRESSED IN BONE MARROW, SIGNAL = 4.6; EXPRESSED IN HEART, SIGNAL = 4.8; EXPRESSED IN HELA, SIGNAL = 5.7; EXPRESSED IN HBL100, SIGNAL = 4.9; EXPRESSED IN FETAL LIVER, SIGNAL = 2.9; NT HIT: AF225421.1, EVALUE 7.30e-01
tgtcttttggcaaaagcagtatagccagttgggtggagcttgggttaagcgtatacatcctaactttggcatctactacatgtgggacc

SEQ ID NO: 21345 - DNA, 107 bp, Homo sapiens
  MAP TO AC008266.1; EXPRESSED IN BONE MARROW, SIGNAL = 1.3; EXPRESSED IN HELA, SIGNAL = 0.74; EXPRESSED IN ADULT LIVER, SIGNAL = 1.2; EXPRESSED IN BRAIN, SIGNAL = 0.73; EXPRESSED IN PLACENTA, SIGNAL = 0.73; EXPRESSED IN BT474, SIGNAL = 1.1; EXPRESSED IN LUNG, SIGNAL =   1; EXPRESSED IN HEART, SIGNAL = 0.79; EXPRESSED IN HBL100, SIGNAL = 0.79; EXPRESSED IN FETAL LIVER, SIGNAL = 0.81; NT HIT: gi11559979, EVALUE 9.10e-01
agtccgtcactggacccaccctgcagctattcactaagttcactgtcatggccatgctgatgcacctctctgcggtcctcaaagtgtggtctagggaccagtagcca

SEQ ID NO: 21346 - DNA, 111 bp, Homo sapiens; identical to SEQ ID NO: 18273
  MAP TO AC008132.26; EXPRESSED IN BONE MARROW, SIGNAL = 8.5; EXPRESSED IN LUNG, SIGNAL =  11; EXPRESSED IN PLACENTA, SIGNAL = 9.1; EXPRESSED IN HBL100, SIGNAL = 7.9; EXPRESSED IN HELA, SIGNAL =  11; EXPRESSED IN HEART, SIGNAL = 8.6; EXPRESSED IN FETAL LIVER, SIGNAL =  10; EXPRESSED IN BT474, SIGNAL = 7.8; EXPRESSED IN ADULT LIVER, SIGNAL = 9.4; EXPRESSED IN BRAIN, SIGNAL = 8.9; EST_HUMAN HIT: AL045185.1, EVALUE 2.00e-39; SWISSPROT HIT: P52591, EVALUE 2.10e-01; NT HIT: gi7657020, EVALUE 1.00e-39

SEQ ID NO: 21347 - DNA, 146 bp, Homo sapiens
  MAP TO AC008430.2; EXPRESSED IN FETAL LIVER, SIGNAL = 1.1; EXPRESSED IN LUNG, SIGNAL = 1.5; EXPRESSED IN BRAIN, SIGNAL = 2.5; EXPRESSED IN PLACENTA, SIGNAL = 0.97; EXPRESSED IN BONE MARROW, SIGNAL = 0.92; EXPRESSED IN HEART, SIGNAL =   2; EXPRESSED IN HELA, SIGNAL = 1.9; EXPRESSED IN HBL100, SIGNAL = 0.99; EST_HUMAN HIT: AA112613.1, EVALUE 8.00e-73; NT HIT: gi11417138, EVALUE 5.00e-77; SWISSPROT HIT: P79385, EVALUE 2.00e-10
tatcaaaccagcaaatcacagcttcctctactcaccgagctctttttggactccaaaaatggtatccctactatgcacgtcttaataagaaggggcttataaatgcgtggacagctgcagaaaatgacagatggccgtggattcag

SEQ ID NO: 21348 - DNA, 151 bp, Homo sapiens
  MAP TO AC008526.2; EXPRESSED IN PLACENTA, SIGNAL = 1.2; EXPRESSED IN HELA, SIGNAL = 1.8; EXPRESSED IN HBL100, SIGNAL = 1.2; EXPRESSED IN HEART, SIGNAL = 3.4; EXPRESSED IN FETAL LIVER, SIGNAL = 1.3; EXPRESSED IN BT474, SIGNAL = 1.1; EXPRESSED IN ADULT LIVER, SIGNAL = 1.1; EXPRESSED IN BONE MARROW, SIGNAL = 1.1; EXPRESSED IN LUNG, SIGNAL = 1.6; EXPRESSED IN BRAIN, SIGNAL =   2; NT HIT: L78810.1, EVALUE 7.40e-02
gaattccagacaaggtctcctcaccctgttggatagtttcaacacagtcacaattaagataatgaacatatttgtaaccccaaagaacttccttctgcccctttataattcagccctcctgccccttcctgccttccccaagttactcagg

SEQ ID NO: 21349 - DNA, 133 bp, Homo sapiens
  MAP TO AC007981.31; EXPRESSED IN HBL100, SIGNAL = 3.5; EXPRESSED IN HEART, SIGNAL = 3.4; EXPRESSED IN FETAL LIVER, SIGNAL = 3.9; EXPRESSED IN ADULT LIVER, SIGNAL = 1.9; EXPRESSED IN LUNG, SIGNAL = 5.2; EXPRESSED IN BRAIN, SIGNAL =   5; EXPRESSED IN PLACENTA, SIGNAL = 2.2; EXPRESSED IN HELA, SIGNAL = 4.2; EXPRESSED IN BT474, SIGNAL = 2.8; EXPRESSED IN BONE MARROW, SIGNAL = 3.6; NT HIT: gi7657020, EVALUE 6.00e-67; EST_HUMAN HIT: AL045185.1, EVALUE 7.00e-67; SWISSPROT HIT: P52591, EVALUE 2.00e-03
aaggccgtgagggtctgcagtccgagatggccttgtcctcaacctgcagtgcactgttgatgcgctggaatgccgcctccttctcccggtccaggtcttcaacagtgacccggtaccccagctctaagggagg

SEQ ID NO: 21350 - DNA, 198 bp, Homo sapiens
  MAP TO AL031074.1; EXPRESSED IN PLACENTA, SIGNAL =   1; EXPRESSED IN ADULT LIVER, SIGNAL = 1.3; EXPRESSED IN BONE MARROW, SIGNAL = 1.1; EXPRESSED IN HEART, SIGNAL = 0.94; EST_HUMAN HIT: AW975974.1, EVALUE 8.00e-03; NT HIT: AF223391.1, EVALUE 2.00e-03; SWISSPROT HIT: P22747, EVALUE 1.30e+00
ggtttttgtcgatggaagcctccaaaggtagctgcttctaatgggccatcttggcccctacctcctgagaaagtcttgatctcatatgcatcttctgaaaaacatcccagaggcaaaatatgcagattgtgagagttgtatacatctacaactttgtagggaatgtgattttggaacacctgcttctgtgcctggaga

SEQ ID NO: 21351 - DNA, 175 bp, Homo sapiens
  MAP TO AC007333.2; EXPRESSED IN BONE MARROW, SIGNAL = 1.2; EXPRESSED IN LUNG, SIGNAL = 1.4; EXPRESSED IN BRAIN, SIGNAL = 1.2; EXPRESSED IN PLACENTA, SIGNAL = 1.4; EXPRESSED IN HELA, SIGNAL = 1.4; EXPRESSED IN HBL100, SIGNAL = 1.2; EXPRESSED IN HEART, SIGNAL = 1.2; EXPRESSED IN FETAL LIVER, SIGNAL = 1.4; EXPRESSED IN BT474, SIGNAL = 1.4; EXPRESSED IN ADULT LIVER, SIGNAL = 1.4; NT HIT: X85808.1, EVALUE 1.60e+00; EST_HUMAN HIT: AI420623.1, EVALUE 6.00e-01; SWISSPROT HIT: P29919, EVALUE 1.70e+00
agtgttgattccaaaagcttcctgtacactagtctccatttcaaattctgctttctggggaataagatctgcaacagttggtattagaagtagttggagaaagcagatgctgagatgggattttggagctggatcacttgctgctgtccaagtggcaaggaggactcgttggtgg

SEQ ID NO: 21352 - DNA, 227 bp, Homo sapiens
  MAP TO AC007220.1; EXPRESSED IN BT474, SIGNAL = 1.3; EXPRESSED IN BONE MARROW, SIGNAL = 1.5; EXPRESSED IN BRAIN, SIGNAL = 1.7; EXPRESSED IN HELA, SIGNAL =   1; EXPRESSED IN HBL100, SIGNAL = 1.4; EXPRESSED IN HEART, SIGNAL = 1.4; EXPRESSED IN ADULT LIVER, SIGNAL = 1.4; NT HIT: AB002348.2, EVALUE 5.00e-78; EST_HUMAN HIT: BF085009.1, EVALUE 3.00e-80; SWISSPROT HIT: P46578, EVALUE 2.00e-08
ctgcaataggcctgcaaacttgaccactccccagccaagcctggacacatcaggctccaccaaactcatctggtaaatatccacagccaggaatcgctggaccatgccgccatccttggtgatcactgtacatgcaatcaagtcgctgttatctgggaggaggaaggtgagaagagaatgaggcacagtctggctgcccagggtgatggagacaccaaagctgactc

SEQ ID NO: 21353 - DNA, 170 bp, Homo sapiens
  MAP TO AC007444.1; EXPRESSED IN HELA, SIGNAL = 5.7; EXPRESSED IN HEART, SIGNAL = 4.7; EXPRESSED IN FETAL LIVER, SIGNAL =   6; EXPRESSED IN ADULT LIVER, SIGNAL = 6.2; EXPRESSED IN BRAIN, SIGNAL = 4.5; EXPRESSED IN PLACENTA, SIGNAL =   6; EXPRESSED IN HBL100, SIGNAL = 5.4; EXPRESSED IN BT474, SIGNAL = 4.8; EXPRESSED IN LUNG, SIGNAL = 5.7; EXPRESSED IN BONE MARROW, SIGNAL = 5.7; NT HIT: Y08501.1, EVALUE 2.10e-02; SWISSPROT HIT: P24265, EVALUE 1.70e+00
gagaaccaccaccccaaacctgaaagccccaaacagacagtgtctgctcggctggctttagtgaggttagacaaagataaaccacatggtggtggctgccccaagccccagcaattccaagaattactaactgaatccatggccacatcagcccatcttctggtgaagct

SEQ ID NO: 21354 - DNA, 212 bp, Homo sapiens
  MAP TO AC008469.2; EXPRESSED IN BONE MARROW, SIGNAL = 1.8; EXPRESSED IN HEART, SIGNAL = 1.7; EXPRESSED IN BT474, SIGNAL = 1.5; EXPRESSED IN FETAL LIVER, SIGNAL = 1.9; EXPRESSED IN ADULT LIVER, SIGNAL = 1.5; EXPRESSED IN BRAIN, SIGNAL = 1.8; EXPRESSED IN PLACENTA, SIGNAL = 1.6; EXPRESSED IN HELA, SIGNAL = 1.9; EXPRESSED IN HBL100, SIGNAL = 1.9; EXPRESSED IN LUNG, SIGNAL = 1.7; NT HIT: M74178.1, EVALUE 5.00e-01; EST_HUMAN HIT: R87773.1, EVALUE 2.00e-03; SWISSPROT HIT: P41612, EVALUE 6.60e-01
gtgaatgcctgtgcctggaatgcttgtcctcagcttccctgggctggctccttctgggaagctttcctccactcttcccagatttcccatgaatagcatgcttgtagcaccatggccgctcacaccccctgtgcagatggcattgcgatcgtctctctccttgcctatattcttctctggagtacaggcgctaagggtgggaataacattgt

SEQ ID NO: 21355 - DNA, 199 bp, Homo sapiens
  MAP TO AC007450.1; EXPRESSED IN LUNG, SIGNAL = 1.3; EXPRESSED IN BONE MARROW, SIGNAL = 1.3; EXPRESSED IN BRAIN, SIGNAL = 1.2; EXPRESSED IN PLACENTA, SIGNAL = 2.2; EXPRESSED IN HBL100, SIGNAL = 1.7; EXPRESSED IN HELA, SIGNAL = 1.5; EXPRESSED IN HEART, SIGNAL = 1.3; EXPRESSED IN BT474, SIGNAL =   1; EXPRESSED IN FETAL LIVER, SIGNAL = 1.8; EXPRESSED IN ADULT LIVER, SIGNAL = 1.3; NT HIT: U50450.1, EVALUE 1.00e-01; SWISSPROT HIT: Q28071, EVALUE 6.30e+00
caacggaacccgtgaagtattgcagagtgaaaaggcagaggcaggctgggccagcaatagcttcacaaagagctgccaaaccaacttgggccttcgtaggaggaagaaatacacttcggtttgcgtcattgttaattttggtctttgttactgtggccagacagataccctaactaatgctcattttatgaagtcatag

SEQ ID NO: 21356 - DNA, 709 bp, Homo sapiens
  MAP TO AC004230.1; EXPRESSED IN FETAL LIVER, SIGNAL = 5.3; EXPRESSED IN LUNG, SIGNAL =  68; EXPRESSED IN BRAIN, SIGNAL = 5.9; EXPRESSED IN HBL100, SIGNAL = 5.8; EXPRESSED IN HELA, SIGNAL =  12; EXPRESSED IN PLACENTA, SIGNAL =  51; EXPRESSED IN BT474, SIGNAL =  45; EXPRESSED IN ADULT LIVER, SIGNAL = 9.2; EXPRESSED IN BONE MARROW, SIGNAL = 5.6; EXPRESSED IN HEART, SIGNAL =  37; NT HIT: M80902.1, EVALUE 0.00e+00; EST_HUMAN HIT: AW946377.1, EVALUE 0.00e+00; SWISSPROT HIT: gi1351900, EVALUE 8.00e-89
acatcaggcatggagatcttgggggtcttgaagtgcatctcaggcatcttaaacttggggcccttcagcttcccttctggaccttcaaggctcacatctgggacttcaacatccaccttgggtcctgagacatcaacgtcagccttgggcaagttcacatccacttctgggccctctcctttgaagccaggcatgctgaacttgggcattttcatcttaggcatcttcaggtgccagtctgggccatgaacatccacatctggggcatcaatgtccactttgggccctctgatgtcaacatctggcactttcatttcaccttctaccttgggaacagacacatccatatcccctttgactttggggcctttcaagtttaagttcacatcaggcatggagatcttgggggtcttgaagtgcatctcaggcatcttaaacttgggccctttcaactttgcatcaggacactccagctcaacatcaggcacctccacatccacactggggcctgttaaatctccctccaattttggcaaagacacatccacatcccctttgactttggggcctttcaagtgtaagtccacatcaggcatggagatcttgggggccttgaagtgcatctcaggcatcttaagcttggggcccttcagcttcccttctggaccttcaaggctcacatctgggacttcaacatccaccttgggtc

SEQ ID NO: 21357 - DNA, 139 bp, Homo sapiens
  MAP TO AC010736.3; EXPRESSED IN BT474, SIGNAL = 2.1; EXPRESSED IN FETAL LIVER, SIGNAL = 1.8; EXPRESSED IN ADULT LIVER, SIGNAL = 1.6; EXPRESSED IN LUNG, SIGNAL =   2; EXPRESSED IN BONE MARROW, SIGNAL = 1.5; EXPRESSED IN BRAIN, SIGNAL = 1.6; EXPRESSED IN PLACENTA, SIGNAL = 1.9; EXPRESSED IN HBL100, SIGNAL = 1.8; EXPRESSED IN HELA, SIGNAL = 1.9; EXPRESSED IN HEART, SIGNAL = 1.8; NT HIT: V00641.1, EVALUE 1.70e-02; SWISSPROT HIT: P42917, EVALUE 2.30e+00
cctggaggggtccgcgatccagacctccagcactggctgctggagagaagcagcctggactccaacctgtcagtcctggagcaagtcaggagcagtgcagaccagaaagtggacaagcaaggcagcaagcacgaacgtg

SEQ ID NO: 21358 - DNA, 136 bp, Homo sapiens
  MAP TO AC009961.3; EXPRESSED IN BONE MARROW, SIGNAL = 1.5; EXPRESSED IN HELA, SIGNAL = 1.4; EXPRESSED IN FETAL LIVER, SIGNAL = 1.5; EXPRESSED IN BRAIN, SIGNAL = 1.2; EXPRESSED IN PLACENTA, SIGNAL = 1.2; EXPRESSED IN HEART, SIGNAL = 1.3; EXPRESSED IN HBL100, SIGNAL = 1.5; EXPRESSED IN BT474, SIGNAL = 1.4; EXPRESSED IN ADULT LIVER, SIGNAL = 1.2; EXPRESSED IN LUNG, SIGNAL = 1.3; SWISSPROT HIT: Q48251, EVALUE 2.30e+00
atgaataatagcgtaattactagatatccttgccttgctcctgatggtactagtaaaaatgtccttggtgttttccattatgatgatgactttaaggtgtgtgtgtgtatatatacatatacctatacatcaaagg

SEQ ID NO: 21359 - DNA, 779 bp, Homo sapiens
  MAP TO AC004682.1; EXPRESSED IN LUNG, SIGNAL = 4.5; EXPRESSED IN BRAIN, SIGNAL = 2.2; EXPRESSED IN HEART, SIGNAL = 3.1; EXPRESSED IN HELA, SIGNAL = 2.9; EXPRESSED IN HBL100, SIGNAL = 2.2; EXPRESSED IN PLACENTA, SIGNAL = 3.1; EXPRESSED IN BT474, SIGNAL = 1.9; EXPRESSED IN ADULT LIVER, SIGNAL =  88; EXPRESSED IN FETAL LIVER, SIGNAL = 1.3e+02; EXPRESSED IN BONE MARROW, SIGNAL = 6.6; EST_HUMAN HIT: AI061661.1, EVALUE 0.00e+00; SWISSPROT HIT: P00737, EVALUE 0.00e+00; NT HIT: gi11432405, EVALUE 0.00e+00
ttagttctcagctatggtcttctgaacccagtcctggatggaagtcaccttcacatacacaccatactcagccacagcacagctcttatcaaagcttaagatcccagtcgcataccaggtgtcctcctccaggtcgtgaacggcaaaggcactgcccgcatcgccatagcaggtgtcttcttggtacttagacatgccagcacagaaggtgtgttcattcagtatgggctgcacccctacagggctcttcggtgtcttcttttcggggactgtgctgccttcataatgccttatgcattggtcttggtcagccacaggcagcatgacatacttcagatggtcagtaaatttaaaattggcatttcgcccccagccagaaacataacccacacgccctacttctgcataatcctttgaaggtaggcagatgggcatcactctctcattaacagacaccttctgtttgagtttgatgagcccaatatctacctgggagtagttagggtgtagaacaaccttctcaatctctacaagctgctttttccccacatagagtgttaaagtaggggcaatgtctttcgctgttgcattttctgaatggttcaggaagagatttttagccgtggtcagcagccattgttcattgatcagcgtggcacctgtggtgagattatggtgggaaaccatcttagcctgccagggaaagctgcctttggcatccaggtgtccacccaggatccgctgcactgggtttgccggattcttgggcttcccacata

SEQ ID NO: 21360 - DNA, 192 bp, Homo sapiens
  MAP TO AC010812.2; EXPRESSED IN LUNG, SIGNAL = 3.5; EXPRESSED IN BONE MARROW, SIGNAL =   3; EXPRESSED IN HELA, SIGNAL = 4.1; EXPRESSED IN FETAL LIVER, SIGNAL = 3.2; EXPRESSED IN BRAIN, SIGNAL = 2.9; EXPRESSED IN PLACENTA, SIGNAL = 3.1; EXPRESSED IN HEART, SIGNAL =   3; EXPRESSED IN HBL100, SIGNAL = 3.6; EXPRESSED IN BT474, SIGNAL =   3; EXPRESSED IN ADULT LIVER, SIGNAL = 3.3; NT HIT: AF217490.1, EVALUE 3.80e-01; EST_HUMAN HIT: AI591312.1, EVALUE 4.00e-94; SWISSPROT HIT: Q12923, EVALUE 3.00e-05
ccaagccaaccagccttctgatgtggagaccagcaggggctgggtagacagacacttctttctcatgaacccgacaagcttccagaaccgactgcaacgtgcaccgcctgtgaggctggtcttcacacatggtcagcaggatggagtgcaggggctcgcagagctgcaggggctggaggcagacagggccgg

SEQ ID NO: 21361 - DNA, 130 bp, Homo sapiens
  MAP TO AC010825.2; EXPRESSED IN PLACENTA, SIGNAL = 1.6; EXPRESSED IN HBL100, SIGNAL = 1.5; EXPRESSED IN HELA, SIGNAL = 1.6; EXPRESSED IN HEART, SIGNAL = 2.5; EXPRESSED IN BT474, SIGNAL = 1.5; EXPRESSED IN FETAL LIVER, SIGNAL = 1.7; EXPRESSED IN ADULT LIVER, SIGNAL = 1.5; EXPRESSED IN LUNG, SIGNAL = 1.8; EXPRESSED IN BONE MARROW, SIGNAL = 1.3; EXPRESSED IN BRAIN, SIGNAL = 1.2; EST_HUMAN HIT: AI752367.1, EVALUE 5.00e-03
gctgtcagggaactaaaatccactactcaagaagaagaaggggctgtgcctggtccccttgataaacaggtttgtttggtgaggggactttatctgagggagcagattgaggaaaaatatgttaggccag

SEQ ID NO: 21362 - DNA, 1134 bp, Homo sapiens
  MAP TO AC006059.3; EXPRESSED IN BRAIN, SIGNAL = 1.9; EXPRESSED IN HELA, SIGNAL = 1.3; EXPRESSED IN PLACENTA, SIGNAL = 2.1; EXPRESSED IN FETAL LIVER, SIGNAL = 1.3; EXPRESSED IN LUNG, SIGNAL = 2.2; EXPRESSED IN BONE MARROW, SIGNAL = 2.2; EXPRESSED IN HEART, SIGNAL = 1.1; EXPRESSED IN HBL100, SIGNAL = 1.9; EXPRESSED IN ADULT LIVER, SIGNAL = 1.1; EXPRESSED IN BT474, SIGNAL = 1.8; NT HIT: AF184110.1, EVALUE 0.00e+00; EST_HUMAN HIT: AI801430.1, EVALUE 0.00e+00; SWISSPROT HIT: P30414, EVALUE 1.00e-127
cttcttccttgtcagaggatggatgggagtcatttttactgtttttagtgacatctcgttctgaatttgactcagagtcccatttactaccagcataattcttccttttgggcttactgccatttctaaggtgatcagaaagattctctttcaaagttcttttttttgaatgagggcattcccgttcagacttggatttttcttcacctctgtttttttcttgtttattatgtgttctttccatttggccctgcttctctttttcctgggctgactgtgtggcctgaacacttgactgctcactgtctgaagaataatctaaagatgatctgctctcgctatactttctcacacatgaagacctgtctctacctttgacatatttactgtgaagtgtcttttcagagctgctgctatgctttttatgtgaaacgctattttttttcccactggatctaagtctcctcttagctcgccttccatcatcactgctaatagaagtatatgaagatgatctactacactgtgaatgatcactgtatttatttcgtgaatgagatctagatgatggagacctagaccttgaatgtgaactagctagactacgtgatcttgtatatgatctggaataagatctactcctagaagatctgctccttgaccttggtgagctttctgaacttctatcactgtattttgaataagtgctctgatcactttccgaatttttttctcttttatggtaggatgatgagctaccagtctctttaatatttgctaaactgtaagtgctttggatgggtagcaaatgggttgttttagctttcatttcctgaattcgctcataagagggcttccaaggtttctgtccaggcttccatcttgaaggggggggactgtcactcagtggtattacaggaatattttctgctacaactggttgtactactacattttcattttgtgccatggttgctcttaaaggttctgttttaactggtttattttcacttaactgagaagctgtttttcttggtgattttgatgctctctttcggtgcccagacttggaactagatctggactttgatctacttcgagaatgtgatgaggactttgacgcagtccttgatc

SEQ ID NO: 21363 - DNA, 364 bp, Homo sapiens
  MAP TO AC005829.1; EXPRESSED IN BT474, SIGNAL = 2.5; EXPRESSED IN ADULT LIVER, SIGNAL = 1.9; EXPRESSED IN BRAIN, SIGNAL =   2; EXPRESSED IN HELA, SIGNAL = 1.6; EXPRESSED IN PLACENTA, SIGNAL = 1.7; EXPRESSED IN FETAL LIVER, SIGNAL = 1.3; EXPRESSED IN LUNG, SIGNAL = 2.3; EXPRESSED IN BONE MARROW, SIGNAL = 2.9; EXPRESSED IN HEART, SIGNAL = 1.3; EXPRESSED IN HBL100, SIGNAL =   3; NT HIT: gi11426034, EVALUE 0.00e+00; EST_HUMAN HIT: BE698427.1, EVALUE 1.00e-47; SWISSPROT HIT: Q02817, EVALUE 1.00e-03
gctccaggtccagaggttgaacggtggcttgagtcaggtgtgaatgctgagcctgacccttgtctgaaggtggaagtgtcacctcagggtgtcctggaggaggagctgtagtcatcagggctgtagaaggttcaacctctgtcatggattttggagtgatggtaaaccccaggtccaaaggttgaactgtggctcgagtcaggtgtgaatgctgagtctgaacctggtctggatgtggaagtgtcacctcaggatgctttggagaaactatagtcctcttcgggggtgtagaatgtccaacctccgtagtaggttctggagtgatggtaagtcccaggtccaaaagttgaactgtaacgctggg

SEQ ID NO: 21364 - DNA, 942 bp, Homo sapiens
  MAP TO AC005962.1; EXPRESSED IN ADULT LIVER, SIGNAL = 1.5; EXPRESSED IN BRAIN, SIGNAL = 1.3; EXPRESSED IN HBL100, SIGNAL = 1.1; EXPRESSED IN HELA, SIGNAL = 0.99; EXPRESSED IN HEART, SIGNAL = 1.3; EXPRESSED IN BT474, SIGNAL = 1.1; EXPRESSED IN LUNG, SIGNAL = 0.96; EXPRESSED IN BONE MARROW, SIGNAL = 1.2; EST_HUMAN HIT: BF083448.1, EVALUE 2.00e-05; NT HIT: X89670.1, EVALUE 1.00e-117; SWISSPROT HIT: O76099, EVALUE 1.00e-64
gtgtatggagaaaacaccatggaaacagggaacctcacgtgggtatcagactttgtcttcctggggctctcgcagactcgggagctccagcgtttcctgtttctaatgttcctgtttgtctacatcaccactgttatgggaaacatccttatcatcatcacagtgacctctgattcccagctccacacacccatgtactttctgctccgaaacctggctgtcctagacctctgtttctcttcagtcactgctcccaaaatgctagtggacctcctctctgagaagaaaaccatctcttaccagggctgcatgggtcagatcttcttcttccactttttgggaggtgccatggtcttcttcctctcagtgatggcctttgaccgcctcattgccatctcccggcccctccgctatgtcaccgtcatgaacactcagctctgggtggggctggtggtagccacctgggtgggaggctttgtccactctattgtccagctggctctgatgctcccactgcccttctgtggccccaacattttggataacttctactgtgatgttccccaagtactgagacttgcctgcactgacacctcactgctggagttcctcaagatctccaacagtgggctgctggatgtcgtctggttcttcctcctcctgatgtcctacttattcatcctggtgatgctgaggtcacatccaggggaggcaagaaggaaggcagcttccacctgcaccacccacatcatcgtggtttccatgatcttcgttccaagcatttacctctatgcccggcccttcactccattccctatggacaagcttgtgtccatcggccacacagtcatgacccccatgctcaaccccatgatctataccctgaggaaccaggacatgcaggcagcagtgagaagattagggagacaccggctggtttga

SEQ ID NO: 21365 - DNA, 169 bp, Homo sapiens
  MAP TO AF067844.1; EXPRESSED IN HEART, SIGNAL = 1.3; EXPRESSED IN FETAL LIVER, SIGNAL = 1.3; EXPRESSED IN ADULT LIVER, SIGNAL = 1.6; EXPRESSED IN BT474, SIGNAL = 1.6; EXPRESSED IN BRAIN, SIGNAL = 1.6; EXPRESSED IN BONE MARROW, SIGNAL = 1.9; EXPRESSED IN LUNG, SIGNAL = 1.2; EXPRESSED IN HELA, SIGNAL = 1.5; EXPRESSED IN PLACENTA, SIGNAL = 1.5; EXPRESSED IN HBL100, SIGNAL = 1.4; SWISSPROT HIT: P14773, EVALUE 2.90e+00; EST_HUMAN HIT: BF687665.1, EVALUE 1.50e-01
gcactggatattagttctcttcttgtgtgtgggctgctttccctcttgttgagatttcaggtctccagggactggggtcatgtctgtcctttgtagttccccaaaccaggcacagcacttcaccttgaggtgatgcttgctaatgcttggcaatggtaatctgtgccca

SEQ ID NO: 21366 - DNA, 79 bp, Homo sapiens
  MAP TO AF139813.1; EXPRESSED IN BRAIN, SIGNAL = 7.4; EXPRESSED IN BONE MARROW, SIGNAL = 8.9; EXPRESSED IN HELA, SIGNAL = 8.7; EXPRESSED IN HBL100, SIGNAL = 8.2; EXPRESSED IN HEART, SIGNAL = 7.1; EXPRESSED IN FETAL LIVER, SIGNAL = 7.7; EXPRESSED IN LUNG, SIGNAL = 8.5; EXPRESSED IN PLACENTA, SIGNAL =   8; EXPRESSED IN BT474, SIGNAL = 7.4; EXPRESSED IN ADULT LIVER, SIGNAL = 8.5; NT HIT: AL163280.2, EVALUE 4.00e-05; EST_HUMAN HIT: AV650201.1, EVALUE 3.00e-07
ggaggtgcacagtctatgcaccttcggtaccagtctatggaccaggggttggggacccctgatataaaaggtaagttga

SEQ ID NO: 21367 - DNA, 166 bp, Homo sapiens
  MAP TO AJ009611.1; EXPRESSED IN BONE MARROW, SIGNAL = 3.2; EXPRESSED IN LUNG, SIGNAL = 2.5; EXPRESSED IN HBL100, SIGNAL = 3.2; EXPRESSED IN HELA, SIGNAL = 2.9; EXPRESSED IN PLACENTA, SIGNAL = 5.3; EXPRESSED IN HEART, SIGNAL = 2.4; EXPRESSED IN FETAL LIVER, SIGNAL = 2.8; EXPRESSED IN BT474, SIGNAL = 2.2; EXPRESSED IN ADULT LIVER, SIGNAL = 2.3; EXPRESSED IN BRAIN, SIGNAL = 2.7; NT HIT: gi11428432, EVALUE 8.00e-64; SWISSPROT HIT: P52888, EVALUE 3.00e-20; EST_HUMAN HIT: BE890425.1, EVALUE 1.00e-63
atggaggacggcaagttgaaggtcaccctcaagtacccccattacttccccctcctgaagaaatgccacgtgcctgagaccaggaggaaagtggaggaggccttcaactgccggtgcaaggaggtgagaaggcacggccagggggccccagaacagtgggtctgga

SEQ ID NO: 21368 - DNA, 110 bp, Homo sapiens
  MAP TO AC010183.6; EXPRESSED IN BT474, SIGNAL = 1.1; EXPRESSED IN FETAL LIVER, SIGNAL = 1.3; EXPRESSED IN ADULT LIVER, SIGNAL = 1.1; EXPRESSED IN BONE MARROW, SIGNAL = 0.94; EXPRESSED IN LUNG, SIGNAL = 1.4; EXPRESSED IN BRAIN, SIGNAL = 1.1; EXPRESSED IN PLACENTA, SIGNAL = 1.1; EXPRESSED IN HELA, SIGNAL = 1.1; EXPRESSED IN HEART, SIGNAL = 1.3; NT HIT: AF280107.1, EVALUE 4.00e-03; EST_HUMAN HIT: BF333236.1, EVALUE 3.00e-29
atgaatgggaaagagttttttctctagcccaatctcatgctgataacctccagcttcatgagccagacctccagaaaggcattaaagcagtttcccaagaggatccccaa

SEQ ID NO: 21369 - DNA, 133 bp, Homo sapiens
  MAP TO AC010083.1; EXPRESSED IN LUNG, SIGNAL = 7.9; EXPRESSED IN ADULT LIVER, SIGNAL = 0.95; EXPRESSED IN HEART, SIGNAL = 0.89; EST_HUMAN HIT: AA719772.1, EVALUE 2.00e-55; NT HIT: M95963.1, EVALUE 1.00e-58; SWISSPROT HIT: Q03333, EVALUE 3.00e-16
catcatccataattccaatggtaacacctttccctgtgtatcccagctcccaggcttcagccacattcaaatcaaggccaggagtgccatcagcttgcccagtattgatctggtacaggaatttcaaagcaga

SEQ ID NO: 21370 - DNA, 396 bp, Homo sapiens; identical to SEQ ID NO: 4628
  MAP TO AL008715.1; EXPRESSED IN BONE MARROW, SIGNAL = 2.3; EXPRESSED IN HBL100, SIGNAL = 2.3; EXPRESSED IN PLACENTA, SIGNAL = 1.8; EXPRESSED IN FETAL LIVER, SIGNAL = 1.3; EXPRESSED IN LUNG, SIGNAL =   2; EXPRESSED IN HEART, SIGNAL = 1.9; EXPRESSED IN HELA, SIGNAL = 2.2; EXPRESSED IN ADULT LIVER, SIGNAL = 2.4; EXPRESSED IN BT474, SIGNAL = 1.9; EXPRESSED IN BRAIN, SIGNAL =   2; NT HIT: AL163268.2, EVALUE 2.50e-01; EST_HUMAN HIT: AV732224.1, EVALUE 9.30e-02; SWISSPROT HIT: P25162, EVALUE 2.90e+00

SEQ ID NO: 21371 - DNA, 129 bp, Homo sapiens
  MAP TO AC007653.1; EXPRESSED IN ADULT LIVER, SIGNAL = 0.85; EXPRESSED IN HBL100, SIGNAL = 0.71; EXPRESSED IN FETAL LIVER, SIGNAL = 0.6; EXPRESSED IN HELA, SIGNAL = 0.71; EXPRESSED IN HEART, SIGNAL = 1.3; EST_HUMAN HIT: AA311884.1, EVALUE 1.00e-53; NT HIT: gi4507848, EVALUE 8.00e-54; SWISSPROT HIT: Q92995, EVALUE 2.00e-18
caagcgatgtttttcgttttttggtggaagaacgcattcagtgctgtcagacccggaaagtccgctacacggagagggtggattacctgatgcagttacctgtggccatggaggcggcaaccaacaagg

SEQ ID NO: 21372 - DNA, 80 bp, Homo sapiens
  MAP TO AP000240.1; EXPRESSED IN PLACENTA, SIGNAL = 0.69; EXPRESSED IN HEART, SIGNAL = 0.88; NT HIT: D89730.1, EVALUE 1.60e-01; EST_HUMAN HIT: AL119067.1, EVALUE 3.00e-03
ttgaaagcgtgaatggtgcaactggaaatcattccaacagtgcaggaaaaaatagagctataaataaaatgaagaaacaa

SEQ ID NO: 21373 - DNA, 304 bp, Homo sapiens
  MAP TO AP000311.1; EXPRESSED IN FETAL LIVER, SIGNAL = 0.79; EXPRESSED IN HEART, SIGNAL = 0.87; EXPRESSED IN PLACENTA, SIGNAL = 0.71; EXPRESSED IN BT474, SIGNAL = 0.62; EXPRESSED IN HELA, SIGNAL = 0.74; EXPRESSED IN BRAIN, SIGNAL = 0.83; EST_HUMAN HIT: AI580905.1, EVALUE 6.00e-88; SWISSPROT HIT: P34216, EVALUE 2.00e-04; NT HIT: AF114488.1, EVALUE 5.00e-88
gggtaagagtgctaattattttgttttcgtgttggtgggagtggtggttttggaaaggttcttttatggtcacagttgttctcaggccatgctgttggtttgcagggcactagctgacatgaataatgatggaagaatggatcaagtggagttttccatagctatgaaacttatcaaactgaagctacaaggatatcagctaccctctgcacttccccctgtcatgaaacagcaaccagttgctatttctagcgcaccagcatttggtaagtctgaaaatgaattggtttctgtattttcttgt

SEQ ID NO: 21374 - DNA, 347 bp, Homo sapiens
  MAP TO AL021938.1; EXPRESSED IN PLACENTA, SIGNAL =   7; EXPRESSED IN HEART, SIGNAL = 5.9; EXPRESSED IN ADULT LIVER, SIGNAL = 6.4; EXPRESSED IN LUNG, SIGNAL = 7.6; EXPRESSED IN BRAIN, SIGNAL = 6.7; EXPRESSED IN BONE MARROW, SIGNAL = 8.3; EXPRESSED IN HBL100, SIGNAL = 7.8; EXPRESSED IN HELA, SIGNAL = 7.9; EXPRESSED IN BT474, SIGNAL = 7.8; EXPRESSED IN FETAL LIVER, SIGNAL = 6.5; NT HIT: AL163227.2, EVALUE 2.90e+00; SWISSPROT HIT: Q09472, EVALUE 1.00e+00; EST_HUMAN HIT: BF693617.1, EVALUE 3.20e-01
agaattttcttttgttgaccctaacttagagcttgttcccatcggatgctctcccacagtcactttctcccctctgtctgtctcaggcctccccactgacccagctggcacagatctagcctccattacatgccacatgctggctctgaaactctctgctagggctcctcagagacttcagaacccaatagtctgtggggtacccctcctatacaaacctaacaccgactacgcctacagggcagctttcaccaacaccactgaggatgccttgctggggaaaactagagaggcaatccttccttccatgcttgtcagggccgcagcagtctcagctcgccaagccc

SEQ ID NO: 21375 - DNA, 111 bp, Homo sapiens
  MAP TO AC009507.1; EXPRESSED IN HEART, SIGNAL =   1; EXPRESSED IN FETAL LIVER, SIGNAL = 1.3; NT HIT: AF043541.1, EVALUE 9.60e-01; EST_HUMAN HIT: H65292.1, EVALUE 2.50e-01; SWISSPROT HIT: P57447, EVALUE 7.10e+00
tggagctatcacttactacaccacctgcaagctgctgtcccagtggagcaaaggaaaggcctgataaagcaacagctggggcacctgcttgcaaatgatgccctggaaaga

SEQ ID NO: 21376 - DNA, 208 bp, Homo sapiens
  MAP TO AL022099.1; EXPRESSED IN ADULT LIVER, SIGNAL = 3.3; EXPRESSED IN BT474, SIGNAL = 2.8; EXPRESSED IN LUNG, SIGNAL = 2.7; EXPRESSED IN BRAIN, SIGNAL = 2.7; EXPRESSED IN BONE MARROW, SIGNAL = 2.7; EXPRESSED IN HBL100, SIGNAL = 2.5; EXPRESSED IN FETAL LIVER, SIGNAL = 2.1; EXPRESSED IN PLACENTA, SIGNAL = 3.2; EXPRESSED IN HEART, SIGNAL = 2.5; EXPRESSED IN HELA, SIGNAL = 2.5; EST_HUMAN HIT: AW139674.1, EVALUE 8.00e-10; NT HIT: AL163204.2, EVALUE 8.00e-06; SWISSPROT HIT: P31260, EVALUE 2.10e+00
aaagctgagaagcctccttcactcttgcattctgtgcacctgctggcttaacacaacatggaaaccatcaaggcttgtatcagccagcactcttcaaagcagcagcccaagctgtacctggggccctttgagccaaagctggaatcagagtggccaggatgtaggaagcagtgtcctgaggctgagcagggaggcagcaccctggacc

SEQ ID NO: 21377 - DNA, 181 bp, Homo sapiens
  MAP TO AP000186.1; EXPRESSED IN PLACENTA, SIGNAL = 0.69; EXPRESSED IN FETAL LIVER, SIGNAL = 0.94; EXPRESSED IN LUNG, SIGNAL = 0.63; EXPRESSED IN ADULT LIVER, SIGNAL = 0.8; EXPRESSED IN HEART, SIGNAL = 0.85; EST_HUMAN HIT: N71175.1, EVALUE 9.80e+00; SWISSPROT HIT: P48099, EVALUE 1.70e+00; NT HIT: AL161590.2, EVALUE 1.70e+00
aaacacctccaaattccttaaacagcatagcaaaatcaagaacatattttcaaaagacaatttaatcaatatctcttacattgaaacacacacacacatatatacacgcgccttttataaatacatattttatagcacttttagaaatgggggaaatgtcacgaaacaaaacatcaagaag

SEQ ID NO: 21378 - DNA, 343 bp, Homo sapiens
  MAP TO AL021878.1; EXPRESSED IN BONE MARROW, SIGNAL = 1.2; EXPRESSED IN HBL100, SIGNAL = 1.1; EXPRESSED IN HELA, SIGNAL = 0.95; EXPRESSED IN HEART, SIGNAL = 1.5; EXPRESSED IN ADULT LIVER, SIGNAL =   1; EXPRESSED IN BT474, SIGNAL = 1.3; EXPRESSED IN FETAL LIVER, SIGNAL = 1.1; EXPRESSED IN BRAIN, SIGNAL = 1.5; SWISSPROT HIT: P10635, EVALUE 2.00e-05; EST_HUMAN HIT: BF378533.1, EVALUE 1.00e-114; NT HIT: X58467.1, EVALUE 0.00e+00
acatatgttgcccaatgggcttgcatgcccactgccaagtccagctccacctccaggcccttgccctactcttccttggcctttggaaaatccagtccttcatgccatgtataaatgtccttccccaggacgtcccccaaacctgcttccccttctcagcctggcttctgatccagcctgtggtttaacccaccacccatgtttgctggtggtggggcatcctcaggacctctgccgccctccaggacctcctccctcacctggtcgaagcagtatggtgtgttctggaagtccacatgcagcaaggttgcccagcccgggcagtggcaggggacctggcggg

SEQ ID NO: 21379 - DNA, 332 bp, Homo sapiens
  MAP TO AL031778.1; EXPRESSED IN HELA, SIGNAL = 2.8; EXPRESSED IN HEART, SIGNAL = 3.1; EXPRESSED IN BRAIN, SIGNAL = 2.3; EXPRESSED IN BONE MARROW, SIGNAL = 0.94; EXPRESSED IN LUNG, SIGNAL = 0.96; NT HIT: AJ222689.1, EVALUE 4.40e-02; EST_HUMAN HIT: T57199.1, EVALUE 5.30e-02; SWISSPROT HIT: P48632, EVALUE 7.20e-01
agcccttaatcatcccttctcatttctggctgaaacctatcacaccctccaaaaaagactgactatgccccagcggctcaaggatactcaccaggcactttctcttacctccgcacagagtccacttcttgtctggcatcacagttttccagactttcatcttccaccaggcccctcctctcatctgcatctctttgaatttatgcttcagtgacagtctcagtcttgattccccttttggtcctacgtgcccagggttctgcattttccagggcagtccgagtctactttgttctctcaccgccagcaccctggacttccaccagtccaga

SEQ ID NO: 21380 - DNA, 215 bp, Homo sapiens
  MAP TO AC008176.1; EXPRESSED IN HELA, SIGNAL = 0.64; EXPRESSED IN HEART, SIGNAL = 0.84; EXPRESSED IN BONE MARROW, SIGNAL = 0.69; EXPRESSED IN ADULT LIVER, SIGNAL = 0.8; EXPRESSED IN BRAIN, SIGNAL = 0.74; EXPRESSED IN FETAL LIVER, SIGNAL = 0.65; EXPRESSED IN LUNG, SIGNAL = 0.83; NT HIT: U29185.1, EVALUE 7.00e-03; EST_HUMAN HIT: BE868881.1, EVALUE 1.00e-105; SWISSPROT HIT: Q03610, EVALUE 9.00e-01
atgtattgcatgtaaagccaggcgcagcactgtgctgatcagcaaagtgtttgcacctgcagcgaatgggctggctaccattcaaggggacataaaggtaagccctgcactggcagccagtcacttggcagggcagatcaatggggcactgctgaggaatcgcttccaagtcagttttatgttgtttatacctaaaaaaggagaaagagagagaa

SEQ ID NO: 21381 - DNA, 234 bp, Homo sapiens; identical to SEQ ID NO: 19139
  MAP TO AL034380.22; EXPRESSED IN BRAIN, SIGNAL = 1.9; EXPRESSED IN BONE MARROW, SIGNAL = 1.7; EXPRESSED IN PLACENTA, SIGNAL = 2.5; EXPRESSED IN HELA, SIGNAL = 1.9; EXPRESSED IN HBL100, SIGNAL =   2; EXPRESSED IN FETAL LIVER, SIGNAL = 2.2; EXPRESSED IN LUNG, SIGNAL = 1.7; EXPRESSED IN HEART, SIGNAL = 1.6; EXPRESSED IN BT474, SIGNAL = 1.7; EXPRESSED IN ADULT LIVER, SIGNAL = 2.7; SWISSPROT HIT: O35625, EVALUE 1.40e+00; EST_HUMAN HIT: AU140888.1, EVALUE 1.00e-116; NT HIT: AB024069.1, EVALUE 1.00e-124

SEQ ID NO: 21382 - DNA, 88 bp, Homo sapiens
  MAP TO AL031665.18; EXPRESSED IN BT474, SIGNAL =   2; EXPRESSED IN BRAIN, SIGNAL = 1.9; EXPRESSED IN PLACENTA, SIGNAL = 2.4; EXPRESSED IN HELA, SIGNAL = 2.4; EXPRESSED IN HBL100, SIGNAL = 2.9; EXPRESSED IN ADULT LIVER, SIGNAL = 1.8; EXPRESSED IN FETAL LIVER, SIGNAL = 2.7; EXPRESSED IN LUNG, SIGNAL = 2.3; EXPRESSED IN BONE MARROW, SIGNAL = 2.4; EXPRESSED IN HEART, SIGNAL = 2.8; EST_HUMAN HIT: AU127964.1, EVALUE 2.00e-42; NT HIT: gi5803122, EVALUE 1.00e-42; SWISSPROT HIT: Q04896, EVALUE 1.80e+00
cttcccaatgcaagaagcagacgagcgcgtcctgcctgcaggtgatggccggcgctgccgatgcgaacagtacctccaggcccgccat

SEQ ID NO: 21383 - DNA, 358 bp, Homo sapiens
  MAP TO AL031678.2; EXPRESSED IN PLACENTA, SIGNAL =   4; EXPRESSED IN HELA, SIGNAL = 3.4; EXPRESSED IN HEART, SIGNAL = 3.4; EXPRESSED IN HBL100, SIGNAL = 4.3; EXPRESSED IN FETAL LIVER, SIGNAL =   4; EXPRESSED IN ADULT LIVER, SIGNAL = 4.5; EXPRESSED IN BT474, SIGNAL = 3.2; EXPRESSED IN BRAIN, SIGNAL =   3; EXPRESSED IN BONE MARROW, SIGNAL = 4.3; EXPRESSED IN LUNG, SIGNAL = 4.3; NT HIT: U47273.1, EVALUE 2.00e-07; EST_HUMAN HIT: BE906399.1, EVALUE 2.00e-05; SWISSPROT HIT: P52181, EVALUE 6.00e-18
gatagaggaagctgggggcacaggtaccctggggcccttctctcccagggtacctgtgcacaggactccggcgaagacccagcactggccgtacttgactggcttgtacctgcccttgagccacttctgcagaatggccacgctgccgcgccagtgcagcgggctggtgccgccgccgtacttgccctgccactgtccttgcaccacacctcggtcgttgttgctgttcacctgggcagaggagggcacgggtccacaaccaggcagggcttcctacctcaagaaccgcatcgtggtcaaatcctgtccaactttggaccaccaggtccatcggggtcactcttgctttttaactgtc

SEQ ID NO: 21384 - DNA, 233 bp, Homo sapiens
  MAP TO AL035091.2; EXPRESSED IN FETAL LIVER, SIGNAL = 1.3; EXPRESSED IN HBL100, SIGNAL = 1.1; EXPRESSED IN HEART, SIGNAL = 1.2; EXPRESSED IN PLACENTA, SIGNAL = 1.4; EXPRESSED IN BT474, SIGNAL = 1.1; EXPRESSED IN ADULT LIVER, SIGNAL =   1; EXPRESSED IN BRAIN, SIGNAL = 1.2; EXPRESSED IN LUNG, SIGNAL = 1.4; EXPRESSED IN BONE MARROW, SIGNAL = 0.97; EXPRESSED IN HELA, SIGNAL = 1.1; EST_HUMAN HIT: AU141111.1, EVALUE 1.00e-98; SWISSPROT HIT: P28906, EVALUE 4.00e-22; NT HIT: gi4502660, EVALUE 6.00e-99
ccaagcatcaccagcatctctccgggatctgacacaaatgctgtttttacctgtgatgtttgttgtggcctcattgccatgttgagacacagggtgcaggctggtacttccaagggtactaggtgttgtagtttcttggtaggatacatttgtagaaacatttgaaaatgttccctgggtaggtaactctggggtagcagtaccgttgttgtcaagactcatgaacccagaag

SEQ ID NO: 21385 - DNA, 184 bp, Homo sapiens
  MAP TO AL035446.4; EXPRESSED IN PLACENTA, SIGNAL = 1.1; EXPRESSED IN HELA, SIGNAL = 1.2; EXPRESSED IN HBL100, SIGNAL = 1.3; EXPRESSED IN HEART, SIGNAL = 1.1; EXPRESSED IN FETAL LIVER, SIGNAL = 1.5; EXPRESSED IN ADULT LIVER, SIGNAL = 1.6; EXPRESSED IN BT474, SIGNAL = 1.2; EXPRESSED IN BRAIN, SIGNAL = 1.3; EXPRESSED IN BONE MARROW, SIGNAL = 1.3; EXPRESSED IN LUNG, SIGNAL = 0.96; NT HIT: AF101095.1, EVALUE 3.60e-01; EST_HUMAN HIT: AL121524.1, EVALUE 6.40e-01; SWISSPROT HIT: Q27225, EVALUE 2.50e-01
atggaatgtgggacactggatttttgaagtaaatgaaaggctcaggatattgtccaacatgaatacagcagacaaagctgaagttgaagaagcagttcaacatgttccgcactgtcttgagaatatttctgcaagtatttagcatccagcttccaattttgaggcagaaattcatcttattcat

SEQ ID NO: 21386 - DNA, 294 bp, Homo sapiens
  MAP TO AC008277.1; EXPRESSED IN BONE MARROW, SIGNAL = 0.81; EXPRESSED IN FETAL LIVER, SIGNAL = 0.83; EXPRESSED IN HEART, SIGNAL = 0.95; EXPRESSED IN BRAIN, SIGNAL = 1.1; EXPRESSED IN PLACENTA, SIGNAL = 0.74; EXPRESSED IN BT474, SIGNAL = 1.1; EXPRESSED IN LUNG, SIGNAL = 0.89; NT HIT: gi11430990, EVALUE 0.00e+00; EST_HUMAN HIT: AW754125.1, EVALUE 0.00e+00; SWISSPROT HIT: P16167, EVALUE 8.70e+00
aatcagatagtaattcagaatcagatacagaaggatcagaagaagaagatgatgatgataaagaccaagatgaatcagatagtgatactgaaggagagaaaacttcaatgaaactgaataaaacaacttcctctgtcaaaagcccttccatgagtctcacaggtcactcaacacctcgtaacctccacatagcaaaagccccaggctctgctcctgctgccttatgttctgaatcccagtcacctgcttttcttggtacatcttcttccacacttacttcaagcccacactctg

SEQ ID NO: 21387 - DNA, 206 bp, Homo sapiens
  MAP TO AL078591.17; EXPRESSED IN BT474, SIGNAL = 5.8; EXPRESSED IN ADULT LIVER, SIGNAL = 8.9; EXPRESSED IN BRAIN, SIGNAL = 4.9; EXPRESSED IN BONE MARROW, SIGNAL =   5; EXPRESSED IN PLACENTA, SIGNAL = 5.9; EXPRESSED IN HELA, SIGNAL =   5; EXPRESSED IN HBL100, SIGNAL = 5.1; EXPRESSED IN FETAL LIVER, SIGNAL = 5.1; EXPRESSED IN LUNG, SIGNAL = 5.4; EXPRESSED IN HEART, SIGNAL = 5.1; NT HIT: AB037832.1, EVALUE 1.00e-112; SWISSPROT HIT: P36304, EVALUE 9.50e-01; EST_HUMAN HIT: AA370782.1, EVALUE 1.00e-112
ctattggaaatatttgagggcagcaaccagaaagaatttctctaaaaatatttccgaatcaagaacagctatatgtgcagctctcccaatgagtgaatcagctgtattgggcaatgcattgatgacattatagcgaaccaaattacagtccttgctttgcagaacgggtcgaagcaagttgtggatcatttctgaatagatctgtc

SEQ ID NO: 21388 - DNA, 196 bp, Homo sapiens
  MAP TO AC008177.1; EXPRESSED IN LUNG, SIGNAL = 0.59; EXPRESSED IN HEART, SIGNAL = 0.79; EXPRESSED IN FETAL LIVER, SIGNAL = 0.75; EXPRESSED IN HELA, SIGNAL = 0.84; EXPRESSED IN ADULT LIVER, SIGNAL = 0.67; EST_HUMAN HIT: AW945631.1, EVALUE 2.70e+00; NT HIT: gi4502456, EVALUE 2.00e-92; SWISSPROT HIT: P06795, EVALUE 2.00e-13
cagaccaatggtggctgctccaatcccaatgagagggctgacagaaataataaccaaggtcagtttccaacccctgaaaaatcccaacaggaaaccacagatggtcgaggtcatgcgctgaatgaaaagggccatttggtcagctatggcatcattgattttattaatatcactagaaaccagaaagattttggtc

SEQ ID NO: 21389 - DNA, 131 bp, Homo sapiens
  MAP TO AL050342.36; EXPRESSED IN PLACENTA, SIGNAL =   4; EXPRESSED IN BT474, SIGNAL = 3.6; EXPRESSED IN FETAL LIVER, SIGNAL = 4.7; EXPRESSED IN LUNG, SIGNAL = 5.8; EXPRESSED IN HEART, SIGNAL = 3.8; EXPRESSED IN HELA, SIGNAL = 4.6; EXPRESSED IN HBL100, SIGNAL = 4.7; EXPRESSED IN ADULT LIVER, SIGNAL = 4.6; EXPRESSED IN BRAIN, SIGNAL =   4; EXPRESSED IN BONE MARROW, SIGNAL = 4.7; EST_HUMAN HIT: BF667821.1, EVALUE 4.30e-01; NT HIT: AF007768.1, EVALUE 2.50e-01
gaccatgctgagaatgtggacgtgaaggtgtgtgaagaggtgtgtgaacagccgcacaaactccttcatccccctagttatgatttctcctgaacctgcttccaaaaagaaattatggtgccttaaaatat

SEQ ID NO: 21390 - DNA, 160 bp, Homo sapiens
  MAP TO AL035660.13; EXPRESSED IN ADULT LIVER, SIGNAL = 1.8; EXPRESSED IN BRAIN, SIGNAL = 1.7; EXPRESSED IN BONE MARROW, SIGNAL = 1.7; EXPRESSED IN PLACENTA, SIGNAL = 2.2; EXPRESSED IN HELA, SIGNAL = 1.6; EXPRESSED IN HBL100, SIGNAL = 1.7; EXPRESSED IN BT474, SIGNAL = 1.8; EXPRESSED IN FETAL LIVER, SIGNAL = 1.8; EXPRESSED IN LUNG, SIGNAL = 1.9; EXPRESSED IN HEART, SIGNAL = 1.9; SWISSPROT HIT: P08547, EVALUE 4.00e-09; NT HIT: AJ002153.2, EVALUE 1.00e-13; EST_HUMAN HIT: AW197206.1, EVALUE 1.00e-13
cagaaccacaacgagaagccacttcacatgtactatgatagctataatcttaaaaaaaaaaaacctaaaataacaagtgttagtgaggatgtggagaatctggaacattcatacattgctggtgggaacataaaatggtacatcctctgtggaaaacagt

SEQ ID NO: 21391 - DNA, 205 bp, Homo sapiens
  MAP TO AL050349.9; EXPRESSED IN HBL100, SIGNAL = 2.7; EXPRESSED IN PLACENTA, SIGNAL = 1.6; EXPRESSED IN BT474, SIGNAL =   1; EXPRESSED IN FETAL LIVER, SIGNAL = 1.6; EXPRESSED IN BRAIN, SIGNAL = 1.9; EXPRESSED IN LUNG, SIGNAL = 2.9; EXPRESSED IN BONE MARROW, SIGNAL = 1.4; EXPRESSED IN HEART, SIGNAL = 1.6; EXPRESSED IN HELA, SIGNAL = 1.7; EST_HUMAN HIT: BE148074.1, EVALUE 2.00e-96; SWISSPROT HIT: P39929, EVALUE 4.00e-04; NT HIT: AE000928.1, EVALUE 1.90e+00
atgttgtcatgggccgccttcatggccttggcggcatagcccatgttcttgagcacctcggtgttggtgttggcattctccagggcctcccgctggaactcgatggttgataatgtgccgtcgatctgcgccagctgcttctcatacctcttcttacgcttcagtgcctggagggccgctgcgtgagggagaaaacagggtttca

SEQ ID NO: 21392 - DNA, 301 bp, Homo sapiens
  MAP TO AL035669.28; EXPRESSED IN BONE MARROW, SIGNAL = 1.6; EXPRESSED IN LUNG, SIGNAL = 1.1; EXPRESSED IN PLACENTA, SIGNAL = 1.3; EXPRESSED IN HBL100, SIGNAL = 1.2; EXPRESSED IN HELA, SIGNAL = 1.2; EXPRESSED IN HEART, SIGNAL = 1.1; EXPRESSED IN BT474, SIGNAL = 1.3; EXPRESSED IN FETAL LIVER, SIGNAL = 1.3; EXPRESSED IN ADULT LIVER, SIGNAL = 1.7; EXPRESSED IN BRAIN, SIGNAL = 1.4; NT HIT: AF026801.1, EVALUE 0.00e+00; SWISSPROT HIT: Q28640, EVALUE 1.20e-01
tgtccctaagacaaaaagagacagctgacattctcccgccctccccagccacctgcagccacccaacccacccacccactctctgacggaccacaaccttccccatccaccaggggacttggagacccttcatcctgtcccccaagtggccagtgctgggagctgctggcccacccacagggcatgtgacaacgacagaatccacctgtccttggggcaggatggccatggggacctgagtcctgaccatccccaagttggctggcctagccacagccactgcccccaccattgactgttc

SEQ ID NO: 21393 - DNA, 146 bp, Homo sapiens
  MAP TO AL079338.13; EXPRESSED IN BRAIN, SIGNAL = 2.2; EXPRESSED IN BONE MARROW, SIGNAL = 2.5; EXPRESSED IN LUNG, SIGNAL = 2.3; EXPRESSED IN PLACENTA, SIGNAL = 2.2; EXPRESSED IN HBL100, SIGNAL = 2.1; EXPRESSED IN HELA, SIGNAL =   2; EXPRESSED IN HEART, SIGNAL =   2; EXPRESSED IN FETAL LIVER, SIGNAL = 1.5; EXPRESSED IN BT474, SIGNAL = 2.5; EXPRESSED IN ADULT LIVER, SIGNAL = 2.8; NT HIT: gi8923430, EVALUE 7.20e-02; SWISSPROT HIT: Q90964, EVALUE 1.40e+00; EST_HUMAN HIT: AI040099.1, EVALUE 6.00e-06
aagatggcatgcgatgcgctttccatcccacagctcttcttacagtgtaataatgatactcccctcattgggaaatgggatctacagttattccttgagcaacacaggtttgagctgcacaggtctacttatatgtggattttttt

SEQ ID NO: 21394 - DNA, 141 bp, Homo sapiens
  MAP TO AL033397.7; EXPRESSED IN HELA, SIGNAL = 0.78; EXPRESSED IN BRAIN, SIGNAL = 0.86; EXPRESSED IN HEART, SIGNAL = 0.89; EXPRESSED IN PLACENTA, SIGNAL = 0.7; EXPRESSED IN ADULT LIVER, SIGNAL = 0.87; EXPRESSED IN LUNG, SIGNAL =  33; EXPRESSED IN FETAL LIVER, SIGNAL = 0.71; EXPRESSED IN BONE MARROW, SIGNAL = 0.81; EXPRESSED IN BT474, SIGNAL = 0.72; EST_HUMAN HIT: AI797236.1, EVALUE 3.00e-07; NT HIT: AF048727.1, EVALUE 3.00e-04
cattagaacactcagtaattttacaagttgtgccattgttttttggcttaactgcttttttgttgttgtttgtttctgtttttgttgttgtttcagtctttttcccattgggtttgatcaaactatctgacttgatcaaat

SEQ ID NO: 21395 - DNA, 265 bp, Homo sapiens
  MAP TO AC007906.2; EXPRESSED IN LUNG, SIGNAL =  23; EXPRESSED IN HELA, SIGNAL = 0.86; EXPRESSED IN BRAIN, SIGNAL = 0.84; EXPRESSED IN HEART, SIGNAL = 0.92; EXPRESSED IN PLACENTA, SIGNAL = 0.82; EXPRESSED IN BT474, SIGNAL = 0.83; EXPRESSED IN BONE MARROW, SIGNAL = 1.1; EXPRESSED IN HBL100, SIGNAL = 0.75; EXPRESSED IN FETAL LIVER, SIGNAL = 0.83; EXPRESSED IN ADULT LIVER, SIGNAL = 0.86; NT HIT: gi7019320, EVALUE 0.00e+00; EST_HUMAN HIT: AW300405.1, EVALUE 0.00e+00; SWISSPROT HIT: P18449, EVALUE 2.80e-01
tggatttcatccttctacctttcttttcctcttttccttcaactgaagcagtaggaaagttttcagggctcattactcgtggaatattgcgttccccacgctcctttgcttttgctatggcctctgatattatacgattagccttttcttgcttgctttctgattccaccttttttctctgcttcttctcagacatgaccctcacctgggtattctgcaacttagtatatgtcccagaaccatcgctcttcttggaagatggagg

SEQ ID NO: 21396 - DNA, 103 bp, Homo sapiens
  MAP TO AL080274.13; EXPRESSED IN HBL100, SIGNAL = 2.4; EXPRESSED IN HEART, SIGNAL = 2.4; EXPRESSED IN ADULT LIVER, SIGNAL = 3.2; EXPRESSED IN LUNG, SIGNAL = 2.4; EXPRESSED IN BRAIN, SIGNAL = 2.4; EXPRESSED IN BONE MARROW, SIGNAL = 2.7; EXPRESSED IN PLACENTA, SIGNAL = 2.5; EXPRESSED IN HELA, SIGNAL = 2.3; EXPRESSED IN BT474, SIGNAL = 2.5; EXPRESSED IN FETAL LIVER, SIGNAL = 2.6; NT HIT: U29185.1, EVALUE 8.00e-04; EST_HUMAN HIT: AW081403.1, EVALUE 3.30e-01
gcccccagagattctgattctgcaaatcttgagcagcctgagattctgcagttctatgaagcttccaggtagtgtcaatgctggtgctaggctgaccatagta

SEQ ID NO: 21397 - DNA, 304 bp, Homo sapiens
  MAP TO AL035451.5; EXPRESSED IN BT474, SIGNAL = 5.3; EXPRESSED IN BRAIN, SIGNAL = 5.6; EXPRESSED IN BONE MARROW, SIGNAL = 4.8; EXPRESSED IN HEART, SIGNAL = 4.5; EXPRESSED IN FETAL LIVER, SIGNAL = 5.3; EXPRESSED IN ADULT LIVER, SIGNAL = 5.5; EXPRESSED IN LUNG, SIGNAL = 5.7; EXPRESSED IN PLACENTA, SIGNAL = 5.4; EXPRESSED IN HELA, SIGNAL = 4.9; EXPRESSED IN HBL100, SIGNAL = 4.8; NT HIT: AL163206.2, EVALUE 4.00e-21; SWISSPROT HIT: P25446, EVALUE 3.60e-01; EST_HUMAN HIT: AV761677.1, EVALUE 8.00e-17
agcagaaattctacagctgaaaaatgcaagtgacacaatgaagaatgcatcagtgtcttttagtagcagaattgatcaagcagaaaaaagaattagtgagcttcaagacagtataattgaaaagcactttctagatcctgttgatgtgcttctttgttttttcttatttctttcatatcaggagaaaaacaaagaagcacaccaaaaggatctagaaaatggcctcaaaaaggcaaatctaagagctatcggccttaatgaggaggtagagaaagaaataggggtagaaagtttattcagagga

SEQ ID NO: 21398 - DNA, 244 bp, Homo sapiens
  MAP TO AL078600.14; EXPRESSED IN BONE MARROW, SIGNAL = 3.7; EXPRESSED IN HBL100, SIGNAL = 3.4; EXPRESSED IN ADULT LIVER, SIGNAL = 3.8; EXPRESSED IN LUNG, SIGNAL = 3.9; EXPRESSED IN BRAIN, SIGNAL = 3.4; EXPRESSED IN PLACENTA, SIGNAL = 3.8; EXPRESSED IN HEART, SIGNAL = 2.9; EXPRESSED IN HELA, SIGNAL = 3.7; EXPRESSED IN BT474, SIGNAL = 3.4; EXPRESSED IN FETAL LIVER, SIGNAL = 3.4; NT HIT: AF114179.1, EVALUE 3.70e-02; EST_HUMAN HIT: AA678111.1, EVALUE 1.50e-01; SWISSPROT HIT: P15276, EVALUE 9.00e-01
tgattccacaagacttaaaatccataattggtgtgtcccaaaaatgtattttcttatcatcatccttgtcacagaaatagcatttactgaacacttacacatcaggaagtatgtaaagcatttctccgctcatcccttacaacaactctgcaaggaaggtagtctccccagagagagtcccattgcacagatgaagaaatcaagaggtaaagtaattttcccaacatcagatcttggtggtgga

SEQ ID NO: 21399 - DNA, 224 bp, Homo sapiens
  MAP TO AL109615.9; EXPRESSED IN PLACENTA, SIGNAL = 2.3; EXPRESSED IN HELA, SIGNAL = 6.6; EXPRESSED IN BONE MARROW, SIGNAL = 2.3; EXPRESSED IN HEART, SIGNAL = 3.6; EXPRESSED IN HBL100, SIGNAL = 6.5; EXPRESSED IN BT474, SIGNAL = 3.3; EXPRESSED IN ADULT LIVER, SIGNAL = 1.1; EXPRESSED IN FETAL LIVER, SIGNAL = 4.3; EXPRESSED IN BRAIN, SIGNAL = 1.6; EXPRESSED IN LUNG, SIGNAL = 6.1; EST_HUMAN HIT: AA653025.1, EVALUE 2.00e-77; SWISSPROT HIT: P25886, EVALUE 7.00e-14; NT HIT: AF116627.1, EVALUE 5.00e-75
acgtcaagaaccacaacacacacaaccagtccccaaaatggcacagaaatggcatcaggaaaccccgatcacaaagatacaaatgtcttaatggggtggacctcaagttcctaaggagcatgcaccttgccaagaagcacaacaagaagggcctaaaaaagatgcaggccaacaatgccgaggccatgagggcacgtgctgaggctatcaaggtcctcgaaagc

SEQ ID NO: 21400 - DNA, 101 bp, Homo sapiens
  MAP TO AL035468.3; EXPRESSED IN BRAIN, SIGNAL = 2.7; EXPRESSED IN BONE MARROW, SIGNAL =   3; EXPRESSED IN ADULT LIVER, SIGNAL = 2.9; EXPRESSED IN LUNG, SIGNAL = 2.8; EXPRESSED IN PLACENTA, SIGNAL = 2.7; EXPRESSED IN HEART, SIGNAL = 2.4; EXPRESSED IN HELA, SIGNAL = 3.7; EXPRESSED IN HBL100, SIGNAL = 3.4; EXPRESSED IN BT474, SIGNAL = 3.2; EXPRESSED IN FETAL LIVER, SIGNAL = 2.5; SWISSPROT HIT: P11311, EVALUE 5.30e+00; NT HIT: AF009663.1, EVALUE 3.40e+00
ctaatatgcacatggttttaagctattattatgggcacttagtcaatttcatcatcataatctatggacctggaattctagaagtttccatgtttctccag

SEQ ID NO: 21401 - DNA, 85 bp, Homo sapiens
  MAP TO AL117344.7; EXPRESSED IN BRAIN, SIGNAL = 3.3; EXPRESSED IN PLACENTA, SIGNAL = 4.2; EXPRESSED IN HBL100, SIGNAL = 5.1; EXPRESSED IN HEART, SIGNAL = 4.5; EXPRESSED IN HELA, SIGNAL = 4.5; EXPRESSED IN BT474, SIGNAL = 4.4; EXPRESSED IN FETAL LIVER, SIGNAL =   5; EXPRESSED IN ADULT LIVER, SIGNAL = 5.3; EXPRESSED IN BONE MARROW, SIGNAL = 3.9; EXPRESSED IN LUNG, SIGNAL = 4.1; NT HIT: U52111.2, EVALUE 2.00e-06; SWISSPROT HIT: P52360, EVALUE 2.40e+00; EST_HUMAN HIT: AA779351.1, EVALUE 1.00e-06
tccttggtgccaaaaaagttggggaccactgccctagagggtccgatttcggtggcccaccatggtagcttgctcgatagcgcat

SEQ ID NO: 21402 - DNA, 105 bp, Homo sapiens
  MAP TO AC007277.2; EXPRESSED IN ADULT LIVER, SIGNAL = 0.84; EXPRESSED IN HELA, SIGNAL = 0.78; EXPRESSED IN LUNG, SIGNAL = 0.64; EXPRESSED IN HEART, SIGNAL = 0.84; NT HIT: Z93780.1, EVALUE 1.90e-01; EST_HUMAN HIT: BF312684.1, EVALUE 3.30e-01; SWISSPROT HIT: Q9ZFM2, EVALUE 7.00e+00
tcagacaacaatagtgtttaagagaacaaagccactcatcaggaccctgaccccaagcagggtccccagctgccagaacatctctgcacactggcagccaagagg

SEQ ID NO: 21403 - DNA, 88 bp, Homo sapiens; identical to SEQ ID NO: 18623
  MAP TO AL035703.19; EXPRESSED IN BT474, SIGNAL = 2.7; EXPRESSED IN BRAIN, SIGNAL = 2.9; EXPRESSED IN BONE MARROW, SIGNAL = 2.5; EXPRESSED IN HEART, SIGNAL = 2.4; EXPRESSED IN ADULT LIVER, SIGNAL = 2.4; EXPRESSED IN FETAL LIVER, SIGNAL = 2.5; EXPRESSED IN LUNG, SIGNAL = 2.5; EXPRESSED IN PLACENTA, SIGNAL = 2.7; EXPRESSED IN HELA, SIGNAL = 2.5; EXPRESSED IN HBL100, SIGNAL = 3.5; NT HIT: AB051897.1, EVALUE 1.80e-01; EST_HUMAN HIT: AW821631.1, EVALUE 1.90e-01

SEQ ID NO: 21404 - DNA, 173 bp, Homo sapiens
  MAP TO AP000557.2; EXPRESSED IN PLACENTA, SIGNAL = 1.2; EXPRESSED IN HBL100, SIGNAL = 1.8; EXPRESSED IN HEART, SIGNAL = 1.3; EXPRESSED IN BT474, SIGNAL = 1.6; EXPRESSED IN FETAL LIVER, SIGNAL = 1.9; EXPRESSED IN BONE MARROW, SIGNAL = 2.2; EXPRESSED IN LUNG, SIGNAL = 1.2; EXPRESSED IN BRAIN, SIGNAL = 2.6; NT HIT: AF012872.1, EVALUE 4.00e-78; EST_HUMAN HIT: AL042025.1, EVALUE 4.00e-78; SWISSPROT HIT: P42356, EVALUE 8.00e-22
ttgaagcggggcccgatggccgccacgtgccggttcatgctccccttggccctgccgatgttcagggacatggagcgctgcagcaggctggagaagatctccacttggtcagagctgcagtacttggcgatctcaaaccgctgcaccaggaactgagcgaaaagaggaagacg

SEQ ID NO: 21405 - DNA, 119 bp, Homo sapiens
  MAP TO AL035705.16; EXPRESSED IN HBL100, SIGNAL =   3; EXPRESSED IN LUNG, SIGNAL = 2.6; EXPRESSED IN BRAIN, SIGNAL = 2.9; EXPRESSED IN BONE MARROW, SIGNAL = 2.2; EXPRESSED IN PLACENTA, SIGNAL = 3.5; EXPRESSED IN HEART, SIGNAL =   3; EXPRESSED IN HELA, SIGNAL = 2.7; EXPRESSED IN BT474, SIGNAL = 2.8; EXPRESSED IN ADULT LIVER, SIGNAL = 1.8; EXPRESSED IN FETAL LIVER, SIGNAL = 2.4; NT HIT: AF305057.1, EVALUE 6.60e-02; EST_HUMAN HIT: BE719986.1, EVALUE 2.00e-55; SWISSPROT HIT: O15117, EVALUE 1.00e-04
ctgttccaataattcaagaaatggaatatttgatttgccaataagtcctggagaagaattggaagtcattgataccaccgaacaaaatctagtgatatgtcgtaattctaaaggcaaat

SEQ ID NO: 21406 - DNA, 94 bp, Homo sapiens
  MAP TO D87009.1; EXPRESSED IN BT474, SIGNAL = 1.4; EXPRESSED IN BONE MARROW, SIGNAL = 2.8; EXPRESSED IN BRAIN, SIGNAL = 1.2; EXPRESSED IN LUNG, SIGNAL = 1.7; EXPRESSED IN HBL100, SIGNAL = 1.2; EXPRESSED IN PLACENTA, SIGNAL = 1.1; EXPRESSED IN HEART, SIGNAL = 1.1; EXPRESSED IN FETAL LIVER, SIGNAL = 0.98; SWISSPROT HIT: P04211, EVALUE 1.00e-07; EST_HUMAN HIT: AW407157.1, EVALUE 2.00e-24; NT HIT: Z73660.1, EVALUE 3.00e-46
agcactggagcagtcaatgggggtcattatccttactggttccagcagaagcttggccaagcccccaggacactgatttatcatgcaagcaaca

SEQ ID NO: 21407 - DNA, 293 bp, Homo sapiens
  MAP TO AL109627.12; EXPRESSED IN BT474, SIGNAL = 4.3; EXPRESSED IN FETAL LIVER, SIGNAL = 5.1; EXPRESSED IN ADULT LIVER, SIGNAL = 5.6; EXPRESSED IN BONE MARROW, SIGNAL =   5; EXPRESSED IN LUNG, SIGNAL = 5.4; EXPRESSED IN BRAIN, SIGNAL = 4.2; EXPRESSED IN PLACENTA, SIGNAL =   5; EXPRESSED IN HBL100, SIGNAL = 4.7; EXPRESSED IN HELA, SIGNAL = 4.8; EXPRESSED IN HEART, SIGNAL = 4.3; SWISSPROT HIT: O88307, EVALUE 4.50e-01
agctgcctctttgaccacccaggaaccgtgttcttcagcatcttcatgtccttctggggccatggccttcctggagcactggaagcagggagtgccaccttggcccaccactgggactgcagtgacttccaggaccaggaggcaatgcccagttcagccccccaccactgggactgcagcgacttccaggaccaggaggtgatgcccagttcagccctccaccactgggactgcagcgacttccaggaccaggaggtgatgcccagttcagccctccaggccacaaccccact

SEQ ID NO: 21408 - DNA, 129 bp, Homo sapiens
  MAP TO AC010787.2; EXPRESSED IN PLACENTA, SIGNAL =   2; EXPRESSED IN HELA, SIGNAL = 1.8; EXPRESSED IN HBL100, SIGNAL = 1.6; EXPRESSED IN HEART, SIGNAL = 1.7; EXPRESSED IN FETAL LIVER, SIGNAL = 2.1; EXPRESSED IN BT474, SIGNAL = 3.1; EXPRESSED IN ADULT LIVER, SIGNAL = 2.5; EXPRESSED IN BONE MARROW, SIGNAL = 1.8; EXPRESSED IN LUNG, SIGNAL = 1.8; EXPRESSED IN BRAIN, SIGNAL = 1.5; EST_HUMAN HIT: AU131870.1, EVALUE 2.00e-30; SWISSPROT HIT: Q60649, EVALUE 9.00e-06; NT HIT: gi6677982, EVALUE 1.00e-18
gccaccatgagtgctgtccagccaagtctgtgctttgcattgacatctgcaccttctgacaacagcctaaaacaagacagaggaatattttcagtgtatggcttgacatctgcaccttctgacaacagc

SEQ ID NO: 21409 - DNA, 92 bp, Homo sapiens
  MAP TO AC010809.2; EXPRESSED IN BT474, SIGNAL =   5; EXPRESSED IN ADULT LIVER, SIGNAL = 6.9; EXPRESSED IN BRAIN, SIGNAL =   6; EXPRESSED IN BONE MARROW, SIGNAL = 5.3; EXPRESSED IN LUNG, SIGNAL = 6.6; EXPRESSED IN PLACENTA, SIGNAL = 6.1; EXPRESSED IN HBL100, SIGNAL = 5.6; EXPRESSED IN HELA, SIGNAL = 6.2; EXPRESSED IN HEART, SIGNAL = 5.4; EXPRESSED IN FETAL LIVER, SIGNAL = 6.2; NT HIT: gi4506758, EVALUE 1.00e-42; EST_HUMAN HIT: AW950824.1, EVALUE 5.00e-08; SWISSPROT HIT: P30957, EVALUE 9.00e-11
agctggagtttgatggcctatatatcaccgaacagccatctgaagatgacatcaaggggcagtgggaccgcttggtgatcaacacaccgtga

SEQ ID NO: 21410 - DNA, 292 bp, Homo sapiens
  MAP TO AL109752.7; EXPRESSED IN LUNG, SIGNAL =  26; EXPRESSED IN PLACENTA, SIGNAL =  22; EXPRESSED IN BRAIN, SIGNAL =  13; EXPRESSED IN BONE MARROW, SIGNAL =  18; EXPRESSED IN HEART, SIGNAL =  13; EXPRESSED IN HELA, SIGNAL =  31; EXPRESSED IN HBL100, SIGNAL =  35; EXPRESSED IN ADULT LIVER, SIGNAL = 4.6; EXPRESSED IN FETAL LIVER, SIGNAL =  29; EXPRESSED IN BT474, SIGNAL =  26; SWISSPROT HIT: P10126, EVALUE 1.00e-42; EST_HUMAN HIT: AW574561.1, EVALUE 2.00e-97; NT HIT: gi11418792, EVALUE 2.00e-97
ccagctccagcagccttctgatccactgccttgatgacacccacagcaactgtctgtctcatatcacaaacaccaaagtgacccagaggaggatagtctgagaagctctcaatacacatgaggttgccaggaaccatatcaatgatggcagcatcaccggacttcaagaatttagagccatcttccagcttcttaccagaacggtgatcaatcttttccttcagtacagcaaacttgcatgcagtgtgagccatgtggcaatccagtacaggagtatagccagcactgattt

SEQ ID NO: 21411 - DNA, 179 bp, Homo sapiens
  MAP TO AC011897.2; EXPRESSED IN FETAL LIVER, SIGNAL =   4; EXPRESSED IN BT474, SIGNAL = 3.8; EXPRESSED IN ADULT LIVER, SIGNAL = 4.1; EXPRESSED IN BRAIN, SIGNAL = 3.5; EXPRESSED IN BONE MARROW, SIGNAL = 3.6; EXPRESSED IN LUNG, SIGNAL = 4.4; EXPRESSED IN PLACENTA, SIGNAL = 3.8; EXPRESSED IN HBL100, SIGNAL = 3.8; EXPRESSED IN HELA, SIGNAL = 4.1; EXPRESSED IN HEART, SIGNAL = 3.1; NT HIT: AF214064.1, EVALUE 4.20e-01; SWISSPROT HIT: Q21815, EVALUE 4.90e+00
cttgcctgaaatcccctggctcctttgttgcaaatggcctcacttactgtacttccctaggaggtcatccatggatgaccatgttcactaccatttatccattgaagacttgtgggtcactctctgcctcaccacctccatttctaccttcattcatgatgatttcaaaatccaagtaa

SEQ ID NO: 21412 - DNA, 115 bp, Homo sapiens
  MAP TO AC011242.2; EXPRESSED IN HEART, SIGNAL = 2.2; EXPRESSED IN BT474, SIGNAL =   2; EXPRESSED IN FETAL LIVER, SIGNAL = 2.8; EXPRESSED IN ADULT LIVER, SIGNAL = 2.6; EXPRESSED IN BRAIN, SIGNAL =   2; EXPRESSED IN BONE MARROW, SIGNAL = 2.3; EXPRESSED IN LUNG, SIGNAL = 2.7; EXPRESSED IN HBL100, SIGNAL = 2.2; EXPRESSED IN PLACENTA, SIGNAL = 2.3; EXPRESSED IN HELA, SIGNAL = 2.5; EST_HUMAN HIT: AW027920.1, EVALUE 2.60e-01; NT HIT: AE004416.1, EVALUE 2.50e-01
atggtacaaacaattcatgtatcatttaatacacgtaagtgtgaaaaatataaattaccagatttaagagacatgcagagacttcaaagtaatgggaaggagcagaagaaaacaa

SEQ ID NO: 21413 - DNA, 148 bp, Homo sapiens
  MAP TO AC012002.2; EXPRESSED IN HELA, SIGNAL = 1.2; EXPRESSED IN HEART, SIGNAL =   1; EXPRESSED IN FETAL LIVER, SIGNAL = 1.1; EXPRESSED IN BT474, SIGNAL = 0.96; EXPRESSED IN BONE MARROW, SIGNAL = 0.92; EXPRESSED IN LUNG, SIGNAL = 1.5; SWISSPROT HIT: Q09442, EVALUE 1.00e+00; EST_HUMAN HIT: W31576.1, EVALUE 5.00e-01; NT HIT: AF166267.1, EVALUE 3.40e-01
acaccggccccaactgcccacccgcgggggcttccaggcctccaggtgccaagacatcccaccaggggccaaccacatgggacctctggggtagggcttccctacagtcagcctccaacacacccagaatccctgttccagacactgc

SEQ ID NO: 21414 - DNA, 187 bp, Homo sapiens
  MAP TO AC012062.1; EXPRESSED IN LUNG, SIGNAL = 8.7; EXPRESSED IN BONE MARROW, SIGNAL = 3.2; EXPRESSED IN HEART, SIGNAL = 5.1; EXPRESSED IN BT474, SIGNAL = 4.8; EXPRESSED IN FETAL LIVER, SIGNAL = 6.8; EXPRESSED IN ADULT LIVER, SIGNAL = 2.6; EXPRESSED IN BRAIN, SIGNAL =  11; EXPRESSED IN PLACENTA, SIGNAL =   5; EXPRESSED IN HELA, SIGNAL =  10; EXPRESSED IN HBL100, SIGNAL = 4.4; NT HIT: gi9635487, EVALUE 4.00e-66; SWISSPROT HIT: P03357, EVALUE 2.00e-03; EST_HUMAN HIT: AA397551.1, EVALUE 8.00e-43
tctgtcctcccacattattccagataccacacctgaccctcatgattgcatatctctgatccactggatgttcactccatttccccacatttccttcttccctatttctcactctgatcacacttggtttattgatggcagttccaccagtcctaatcgccattcaccagcaaaggcaggctatggt

SEQ ID NO: 21415 - DNA, 172 bp, Homo sapiens
  MAP TO AC011186.2; EXPRESSED IN PLACENTA, SIGNAL = 1.5; EXPRESSED IN HELA, SIGNAL = 1.3; EXPRESSED IN HEART, SIGNAL = 1.5; EXPRESSED IN LUNG, SIGNAL = 1.4; EXPRESSED IN BRAIN, SIGNAL = 1.3; EXPRESSED IN HBL100, SIGNAL = 1.3; EXPRESSED IN BT474, SIGNAL = 1.3; EXPRESSED IN ADULT LIVER, SIGNAL = 1.4; EXPRESSED IN FETAL LIVER, SIGNAL = 1.5; EXPRESSED IN BONE MARROW, SIGNAL = 1.2; NT HIT: L43126.1, EVALUE 5.30e+00
cgtacagtgaatttcagagggagatgatgatgatgatgatggtgatgatgatgatggtgatgacgatgatggtgatgatgatgatgatgatggtgatgatgacggtgatgatgatgatgatgatgatggtgatgatgatgatggtgattactagaaacaggaaaattcatat

SEQ ID NO: 21416 - DNA, 539 bp, Homo sapiens
  MAP TO AC011232.3; EXPRESSED IN LUNG, SIGNAL = 1.8; EXPRESSED IN BONE MARROW, SIGNAL = 1.5; EXPRESSED IN HELA, SIGNAL =   2; EXPRESSED IN FETAL LIVER, SIGNAL = 1.6; EXPRESSED IN BRAIN, SIGNAL = 1.9; EXPRESSED IN PLACENTA, SIGNAL = 1.3; EXPRESSED IN HEART, SIGNAL = 1.8; EXPRESSED IN HBL100, SIGNAL = 1.6; EXPRESSED IN BT474, SIGNAL = 1.7; EXPRESSED IN ADULT LIVER, SIGNAL = 1.5; NT HIT: gi8923690, EVALUE 1.00e-124; EST_HUMAN HIT: AW444637.1, EVALUE 0.00e+00; SWISSPROT HIT: Q9ZHB3, EVALUE 3.40e+00
gctggatcagtgcatgtaagaattcgacgagatgccaatgaacaaatggttcttgctcatgtgaccaacaggctgtacactctagtgtctactctaactgttcaaattttcaaggatgactggattaggcctgccttattgtctgggcctgttgcagccaatgtcctaaacttttcagatcatcacgtaatcccaatgcctcttttaaagggtactgatgatttgaacccagttacatcaactccagctaaacctagtagtccacctccagaattttcatttaacactcctgggaaaaatgtgaacccagttattcttctaaacacacaaacaaggccttatggttttggtctcaatcatggacacacaccttacagcagcatgcttaatcaaggacttggagttccaggaattggagcaactcaaggattgaggactggttttacaaatataccaagtagatatggaactaataatagaattggacaaccaagaccatgatagactctaacttatttttataaggaatattgactcct

SEQ ID NO: 21417 - DNA, 250 bp, Homo sapiens
  MAP TO AH008338.1; EXPRESSED IN PLACENTA, SIGNAL = 1.1; EXPRESSED IN HELA, SIGNAL = 1.1; EXPRESSED IN HBL100, SIGNAL = 0.98; EXPRESSED IN HEART, SIGNAL = 0.96; EXPRESSED IN FETAL LIVER, SIGNAL =   1; EXPRESSED IN ADULT LIVER, SIGNAL =   1; EXPRESSED IN BONE MARROW, SIGNAL = 1.1; EXPRESSED IN LUNG, SIGNAL = 1.2; NT HIT: gi4502938, EVALUE 1.00e-126; EST_HUMAN HIT: AW452590.1, EVALUE 1.00e-126; SWISSPROT HIT: P12107, EVALUE 3.00e-45
ggtccacctggtgaagtcattcagcctttaccaatcttgtcctccaaaaaaacgagaagacatactgaaggcatgcaagcagatgcagatgataatattcttgattactcggatggaatggaagaaatatttggttccctcaattccctgaaacaagacatcgagcatatgaaatttccaatgggtactcagaccaatccagcccgaacttgtaaagacctgcaactcagccatcctgacttcccagatg

SEQ ID NO: 21418 - DNA, 109 bp, Homo sapiens
  MAP TO AC011998.2; EXPRESSED IN PLACENTA, SIGNAL = 1.3; EXPRESSED IN HELA, SIGNAL = 2.2; EXPRESSED IN HEART, SIGNAL = 1.4; EXPRESSED IN LUNG, SIGNAL =   2; EXPRESSED IN BRAIN, SIGNAL = 2.1; EXPRESSED IN HBL100, SIGNAL = 2.2; EXPRESSED IN BT474, SIGNAL =   2; EXPRESSED IN ADULT LIVER, SIGNAL = 1.2; EXPRESSED IN FETAL LIVER, SIGNAL = 1.6; EXPRESSED IN BONE MARROW, SIGNAL = 1.2; EST_HUMAN HIT: AU130361.1, EVALUE 9.00e-36; NT HIT: gi5729729, EVALUE 5.00e-36; SWISSPROT HIT: P16100, EVALUE 3.10e+00
ctttcacaccatccagtatcacttgataggcatctttatgctggcccactcgctccgtggtatcggccatgatgccatagttgccgtaaagctcctctaccatcggcat

SEQ ID NO: 21419 - DNA, 180 bp, Homo sapiens
  MAP TO AC012064.1; EXPRESSED IN PLACENTA, SIGNAL = 3.2; EXPRESSED IN HBL100, SIGNAL = 3.4; EXPRESSED IN HELA, SIGNAL = 4.2; EXPRESSED IN HEART, SIGNAL = 2.8; EXPRESSED IN BT474, SIGNAL = 2.5; EXPRESSED IN FETAL LIVER, SIGNAL = 3.2; EXPRESSED IN ADULT LIVER, SIGNAL = 3.4; EXPRESSED IN LUNG, SIGNAL = 2.9; EXPRESSED IN BONE MARROW, SIGNAL = 3.3; EXPRESSED IN BRAIN, SIGNAL = 3.3; NT HIT: AF056490.1, EVALUE 2.00e-86; EST_HUMAN HIT: AW997532.1, EVALUE 5.00e-84; SWISSPROT HIT: O60658, EVALUE 1.00e-25
gtaatcaatattatcaatgctgcccaggaaagtagtcccatgcctgtgacagaagccctagaccgtgtgctggaaattctaagaaccactgagttatattcaccacagtttggtgctaaagatgatgatccccatgccaatgaccttgttgggggcttaatgtctgtaagtatatttgac

SEQ ID NO: 21420 - DNA, 241 bp, Homo sapiens
  MAP TO AL021921.1; EXPRESSED IN HEART, SIGNAL = 1.1; EXPRESSED IN BT474, SIGNAL = 1.2; EXPRESSED IN ADULT LIVER, SIGNAL = 1.1; EXPRESSED IN FETAL LIVER, SIGNAL = 0.92; EXPRESSED IN BONE MARROW, SIGNAL =   1; EXPRESSED IN HELA, SIGNAL = 0.97; NT HIT: Y15994.1, EVALUE 9.00e+00; EST_HUMAN HIT: BE173796.1, EVALUE 1.50e-01
gcccctgccaggctctgagcgccatctttgctgtggcccaggatgtagccaaagcagcctttggaggcaagtgaggagcagcctttgtggctgtgaccttgaccaccttgggcgggggaggtgttgggggaaacagagaaggaggaggggagaagaaaagagaaagggacaataacaaggagagagagagagggatggggaaggggacaggccagcaagccacagggaagacagacagggc

SEQ ID NO: 21421 - DNA, 360 bp, Homo sapiens
  MAP TO AL021939.1; EXPRESSED IN LUNG, SIGNAL =   1; EXPRESSED IN HBL100, SIGNAL =   1; EXPRESSED IN HELA, SIGNAL = 1.2; EXPRESSED IN PLACENTA, SIGNAL = 1.2; EXPRESSED IN HEART, SIGNAL = 1.1; EXPRESSED IN BT474, SIGNAL = 1.4; EXPRESSED IN FETAL LIVER, SIGNAL = 1.4; EXPRESSED IN ADULT LIVER, SIGNAL = 1.6; EXPRESSED IN BONE MARROW, SIGNAL = 0.99; SWISSPROT HIT: P80668, EVALUE 2.00e-17; EST_HUMAN HIT: AA482041.1, EVALUE 2.10e-02; NT HIT: AF303134.1, EVALUE 0.00e+00
ctggttggcaaagctggacctgacggttgccggaatgcactcatccaggttggcgtcctcaaagatgatggcaggattcttgccccccagctccagggagagctttttgcagtggggagcgctcagctgggtgatccgctcagcggtgggctggctcccggtgaaggagatcaggggcacctctgggtgggacaccagggcctcacccaccctgggcccggttccaaacacaatattgaccacacctggtggaacacctggataggaaacagtatcagttatagtaattctcagtatgttgaagagttcaagttacttggaaattctcctttaaagtccaatcgcttgaatgggagtggg

SEQ ID NO: 21422 - DNA, 164 bp, Homo sapiens
  MAP TO AC007383.2; EXPRESSED IN LUNG, SIGNAL = 5.5; EXPRESSED IN ADULT LIVER, SIGNAL = 0.91; EXPRESSED IN BT474, SIGNAL =   1; EXPRESSED IN HEART, SIGNAL = 1.1; EST_HUMAN HIT: BF308518.1, EVALUE 2.00e-84; NT HIT: AL161515.2, EVALUE 1.30e+00; SWISSPROT HIT: P22533, EVALUE 9.90e-01
ccccaaactgtgcaagcagaggcgactcaacggctacgccttctgtatcagacacgttctggaggacaagactgcccccttcaagcaatgtgaatatgtggccaagtataacagccaacgctgcaccaaccccatccccaaatcagaggatcgtaggtaagggc

SEQ ID NO: 21423 - DNA, 384 bp, Homo sapiens
  MAP TO AC007064.22; EXPRESSED IN HEART, SIGNAL = 1.1; EXPRESSED IN BRAIN, SIGNAL = 0.92; EST_HUMAN HIT: AI825017.1, EVALUE 3.60e-01; NT HIT: gi4759329, EVALUE 3.00e-59; SWISSPROT HIT: P51811, EVALUE 5.00e-18
ataatagtacggtgcttctggctgattttcagtacgtcctggcaacactttgcctgactgccatgggtacaaatactgatagaagaggagcataaagccagtggccaataggtagcttatgatgagctgcacggcaattaatgagtcacaacaattcagcaaagttttccctccaaagaacctaaataccaatatcattatcacattttctaaaaactgaaagctgtagtgtaggattctatggccccacctctgtctcccgtcaattattttgtcatctgacaactgcagtttcactgctgaccagcaggagaagttgatggcagcatatagcagtgtgatcaagaaaagcatcagtactgtacccaccatattggaattatt

SEQ ID NO: 21424 - DNA, 180 bp, Homo sapiens
  MAP TO AL121578.1; EXPRESSED IN BT474, SIGNAL = 1.3; EXPRESSED IN HELA, SIGNAL = 5.8; EXPRESSED IN HEART, SIGNAL = 1.2; SWISSPROT HIT: P79147, EVALUE 7.40e-01
accagccttaacagcatgatgagcgtttacagtgaaacgggagactatggcaacgtgaaagtcagtggtgaaatccttctccatatcagctactgctacaaaactggtgggctgtacatttttgtcaagaattgcagaaatctggccataggagatgaaaagaaacagaggacagatgcg

SEQ ID NO: 21425 - DNA, 141 bp, Homo sapiens
  MAP TO AC010809.2; EXPRESSED IN PLACENTA, SIGNAL = 1.1; EXPRESSED IN HELA, SIGNAL = 0.98; EXPRESSED IN HEART, SIGNAL = 1.2; EXPRESSED IN ADULT LIVER, SIGNAL =   1; SWISSPROT HIT: P30957, EVALUE 4.00e-15; EST_HUMAN HIT: H12181.1, EVALUE 4.70e-01; NT HIT: gi4506758, EVALUE 4.00e-59
gtggaacagcctttgaggtccaagaaggccgtctggcacaaactgttatcaaagcaacggaaacgggcagtggtggcctgtttcaggatggcccctctctacaacctgcccaggcaagtattttgtcttttttcctggcat

SEQ ID NO: 21426 - DNA, 373 bp, Homo sapiens
  MAP TO AL009172.1; EXPRESSED IN BT474, SIGNAL = 1.6; EXPRESSED IN HBL100, SIGNAL = 1.4; EXPRESSED IN HELA, SIGNAL = 1.6; EXPRESSED IN HEART, SIGNAL = 1.8; EXPRESSED IN FETAL LIVER, SIGNAL = 1.5; EXPRESSED IN BRAIN, SIGNAL = 1.8; EXPRESSED IN LUNG, SIGNAL = 1.1; EXPRESSED IN BONE MARROW, SIGNAL = 1.8; EXPRESSED IN PLACENTA, SIGNAL =   2; EXPRESSED IN ADULT LIVER, SIGNAL = 1.8; NT HIT: AF083242.1, EVALUE 0.00e+00; SWISSPROT HIT: Q9UBK9, EVALUE 6.00e-12; EST_HUMAN HIT: AV742158.1, EVALUE 0.00e+00
aacgccccacccaccacgtggaatgttccaaacgccccgccccccgcactgtcactcaccgcaagtcccgctgcagcacgtcactgatgaaggtctcgtagcgcagcactttctcccccgtggcctccaccgcccgccgcttagggggcgtcgccatgatgggctcctggggagtggggagggggaagaccatgttgaccgatccagtttggcctcacacacagttcatctctaccctctcaacgctgggaatcggcttgtccggctcaagctggaggttcagccttccgcccctcccaactcggggacccgaccacccagggacacccaagcgcggcctttacctcaggccgccagcaataagaacggttgg

SEQ ID NO: 21427 - DNA, 541 bp, Homo sapiens
  MAP TO AL022097.1; EXPRESSED IN PLACENTA, SIGNAL = 2.7; EXPRESSED IN HEART, SIGNAL = 2.7; EXPRESSED IN FETAL LIVER, SIGNAL = 2.8; EXPRESSED IN ADULT LIVER, SIGNAL =   3; EXPRESSED IN BT474, SIGNAL = 2.6; EXPRESSED IN BRAIN, SIGNAL = 2.9; EXPRESSED IN BONE MARROW, SIGNAL = 3.2; EXPRESSED IN LUNG, SIGNAL = 2.8; EXPRESSED IN HBL100, SIGNAL =   3; EXPRESSED IN HELA, SIGNAL = 2.7; NT HIT: gi6678322, EVALUE 8.70e-02; EST_HUMAN HIT: BE041483.1, EVALUE 8.80e-02; SWISSPROT HIT: Q9KA23, EVALUE 2.00e+00
tcatgggtcatgggaaaaggctgctggattcaaaactcggctttgtgtgcacccttggacacgctgcagacccttccaggcctcagtgtcttcatcttcttcatctatgatgtggaataattgcaggatccgctcataggcttgttgagaacatcgaacaggacaatgcctgtgaaccgctgtcacaagcctctcagtcacgtttactgcacaggtggagattctctctcctgtatacactgcctctctcgatccatttttcctttctttatgtaactgggaaaaaccaagaatgaagcaggtttgtttttgttttgcgtgtgaggaaaaggttgttgaatctgttctcaagaatgtttgaattaaattctctttgcctggggatggtatttttatcttatatgattgttctttgaacaagcagtaagaaaacaaaatgaaattgggaggctccttgctttcttcctgaaaagaggcttcagggctttgggccaaactgtgccttgaaatgaattttagaagcggccacagcaggcggtct

SEQ ID NO: 21428 - DNA, 99 bp, Homo sapiens
  MAP TO AC008283.2; EXPRESSED IN HELA, SIGNAL = 0.59; EXPRESSED IN ADULT LIVER, SIGNAL = 0.71; EXPRESSED IN HEART, SIGNAL = 0.81; EXPRESSED IN PLACENTA, SIGNAL = 0.6; EXPRESSED IN FETAL LIVER, SIGNAL = 0.67; NT HIT: Z73277.1, EVALUE 7.10e-01; SWISSPROT HIT: O07107, EVALUE 9.20e+00; EST_HUMAN HIT: BE836331.1, EVALUE 7.80e-02
atgacaatagtacgtgatagtacagtggaagcccctgcagtcagacatcatgatgatatgtcctgtgataaagtacatgtagatataaatgaggctggg

SEQ ID NO: 21429 - DNA, 348 bp, Homo sapiens; identical to SEQ ID NO: 4689
  MAP TO AL030998.1; EXPRESSED IN BONE MARROW, SIGNAL = 1.5; EXPRESSED IN HEART, SIGNAL = 1.3; EXPRESSED IN FETAL LIVER, SIGNAL = 1.8; EXPRESSED IN ADULT LIVER, SIGNAL = 1.8; EXPRESSED IN BT474, SIGNAL = 1.7; EXPRESSED IN LUNG, SIGNAL = 1.3; EXPRESSED IN PLACENTA, SIGNAL = 1.2; EXPRESSED IN HELA, SIGNAL = 1.6; EXPRESSED IN HBL100, SIGNAL = 1.4; EXPRESSED IN BRAIN, SIGNAL = 1.6; EST_HUMAN HIT: AW861224.1, EVALUE 5.60e-02; SWISSPROT HIT: P39791, EVALUE 8.90e+00; NT HIT: U09226.1, EVALUE 2.00e-04

SEQ ID NO: 21430 - DNA, 282 bp, Homo sapiens
  MAP TO AL009173.1; EXPRESSED IN HELA, SIGNAL = 1.4; EXPRESSED IN PLACENTA, SIGNAL = 2.2; EXPRESSED IN HBL100, SIGNAL = 1.3; EXPRESSED IN HEART, SIGNAL =   1; EXPRESSED IN BT474, SIGNAL = 0.92; EXPRESSED IN ADULT LIVER, SIGNAL = 1.2; EXPRESSED IN FETAL LIVER, SIGNAL = 1.2; EXPRESSED IN LUNG, SIGNAL = 1.7; EST_HUMAN HIT: BF574468.1, EVALUE 1.00e+00
ggatgctgtggtaaacgatacaatatgtggcttaaaccacgtggccaataagtggtgcaatttctttcataacaaagaattaaagggtaggtgggagtggctcttcttaatagtacagttcataatttccttgaacattttttttcccattttcacagtcttggtcttggtatatttggaaatcctagtgtacaagggaagaatacttccaccagaaaaaaagaaaaaacagatcatgggtttgatgagcaggaagctgagactaccccagtggccttttct

SEQ ID NO: 21431 - DNA, 168 bp, Homo sapiens
  MAP TO AL031003.1; EXPRESSED IN BT474, SIGNAL = 2.3; EXPRESSED IN BRAIN, SIGNAL = 2.2; EXPRESSED IN HELA, SIGNAL = 1.6; EXPRESSED IN HEART, SIGNAL =   2; EXPRESSED IN FETAL LIVER, SIGNAL = 2.2; EXPRESSED IN LUNG, SIGNAL = 1.8; EXPRESSED IN BONE MARROW, SIGNAL = 2.4; EXPRESSED IN PLACENTA, SIGNAL = 2.1; EXPRESSED IN HBL100, SIGNAL = 1.9; EXPRESSED IN ADULT LIVER, SIGNAL = 2.1; SWISSPROT HIT: P06684, EVALUE 2.60e-01; NT HIT: AB033070.1, EVALUE 4.00e-90
catcacgcctggcgccagggtcggccgcttcctgtagtagtcaccgtgggagagcttcaggttgaggagcagggcgcagtgtgcagctgtgtagaggctgtctgcgttcatcagcatctggaagctgaggctgctattcccgtcaaagccaggagagtgcatcatgcc

SEQ ID NO: 21432 - DNA, 416 bp, Homo sapiens
  MAP TO AL022396.1; EXPRESSED IN PLACENTA, SIGNAL = 6.2; EXPRESSED IN ADULT LIVER, SIGNAL = 6.6; EXPRESSED IN BT474, SIGNAL = 5.3; EXPRESSED IN HBL100, SIGNAL = 6.3; EXPRESSED IN HELA, SIGNAL = 6.6; EXPRESSED IN HEART, SIGNAL = 4.3; EXPRESSED IN FETAL LIVER, SIGNAL = 5.5; EXPRESSED IN BRAIN, SIGNAL = 6.4; EXPRESSED IN LUNG, SIGNAL = 5.6; EXPRESSED IN BONE MARROW, SIGNAL = 5.6; NT HIT: L78833.1, EVALUE 6.60e-02; SWISSPROT HIT: P39195, EVALUE 3.20e+00; EST_HUMAN HIT: AA719297.1, EVALUE 1.00e-09
aggctgtctcgagaagctacaaattctgccagtcaatgtcactagtgtctctgtccctctgggcatggtgactctcacctgtaagctactcgagaggctggggcaggaagattgtttgagcctgagatttcgaaaccagcctgggcaacatgacgagactccatattgtctctgtctgccctggctcctgatgacttctccggagagagggctgagatggggtcagagagaggaacaacagcaaggtgcctgtgggcacctccatttcagggaggttcctcttcacctgcaatgtggggccatgggtgcttttcaagtgcatataagaagacttggagtccaccctggagagtgcttctctggctgaactcccaatctagtctgcgtgaaggaaggcagatttcttctgataacaa

SEQ ID NO: 21433 - DNA, 178 bp, Homo sapiens
  MAP TO AL049871.2; EXPRESSED IN FETAL LIVER, SIGNAL = 0.67; EXPRESSED IN BRAIN, SIGNAL = 0.68; EXPRESSED IN LUNG, SIGNAL = 1.3; EXPRESSED IN HEART, SIGNAL = 1.1; EST_HUMAN HIT: AI167357.1, EVALUE 2.00e-49; SWISSPROT HIT: P17081, EVALUE 7.00e-14; NT HIT: AJ276567.1, EVALUE 8.00e-49
tgggggacggtgccgtggggaaaacctgcctgctgatgagctacgccaacgacgccttcccagaggaatacgtgcccactgtgtttgaccactatgcaggtaagaaaaagtgggaaactctctgcatccagacaaacgatgcagggggcgagaccctaagttcagaggggcctggctc

SEQ ID NO: 21434 - DNA, 226 bp, Homo sapiens
  MAP TO AL031114.1; EXPRESSED IN PLACENTA, SIGNAL = 1.2; EXPRESSED IN ADULT LIVER, SIGNAL = 1.3; EXPRESSED IN BT474, SIGNAL = 1.5; EXPRESSED IN HELA, SIGNAL = 1.3; EXPRESSED IN HBL100, SIGNAL = 1.4; EXPRESSED IN HEART, SIGNAL = 1.2; EXPRESSED IN FETAL LIVER, SIGNAL = 1.1; EXPRESSED IN BRAIN, SIGNAL = 1.3; EXPRESSED IN LUNG, SIGNAL = 1.1; EXPRESSED IN BONE MARROW, SIGNAL = 1.5; EST_HUMAN HIT: M77852.1, EVALUE 9.00e-07; NT HIT: AJ271735.1, EVALUE 6.00e-19; SWISSPROT HIT: P08547, EVALUE 7.00e-18
acatttctttattatccttttgatgttcataggctcagtagtgatagctcctctttcatttatgatattagtaatttgtatcttccttctttctttcttagatagcctgattagaggtttatccattttatggatcttttcaaagaaccagcttttggtttcattgattttctttcttgattttctgttttcaatttcatcgagttatgttctaatttttattaat

SEQ ID NO: 21435 - DNA, 102 bp, Homo sapiens
  MAP TO AL031120.1; EXPRESSED IN BRAIN, SIGNAL = 2.6; EXPRESSED IN BONE MARROW, SIGNAL = 2.9; EXPRESSED IN HEART, SIGNAL = 2.7; EXPRESSED IN FETAL LIVER, SIGNAL =   3; EXPRESSED IN ADULT LIVER, SIGNAL =   3; EXPRESSED IN BT474, SIGNAL = 2.9; EXPRESSED IN LUNG, SIGNAL =   3; EXPRESSED IN PLACENTA, SIGNAL = 3.2; EXPRESSED IN HELA, SIGNAL = 2.9; EXPRESSED IN HBL100, SIGNAL = 3.2; EST_HUMAN HIT: AI090125.1, EVALUE 3.00e-22; NT HIT: L44140.1, EVALUE 3.00e-19
tttttcccatttttaagtgtacagttcagtggcattaagtacattcacattatattgcagtcatcaccacgatccatcttcagaacgttttcatcttcccaa

SEQ ID NO: 21436 - DNA, 424 bp, Homo sapiens
  MAP TO AL023279.1; EXPRESSED IN BRAIN, SIGNAL = 5.6; EXPRESSED IN BONE MARROW, SIGNAL = 6.2; EXPRESSED IN HELA, SIGNAL = 7.1; EXPRESSED IN HEART, SIGNAL =   6; EXPRESSED IN BT474, SIGNAL = 7.4; EXPRESSED IN ADULT LIVER, SIGNAL = 5.9; EXPRESSED IN FETAL LIVER, SIGNAL = 5.7; EXPRESSED IN LUNG, SIGNAL = 5.5; EXPRESSED IN PLACENTA, SIGNAL = 8.3; EXPRESSED IN HBL100, SIGNAL = 6.3; NT HIT: gi11420096, EVALUE 5.00e-21; SWISSPROT HIT: P43363, EVALUE 5.00e-14; EST_HUMAN HIT: BE729944.1, EVALUE 5.00e-13
atagtccttatacttcttgatgacagtcgtcagcatctctgcctttgtgacaggctcttttgtttgatatttgaggagaagaaactgcaccaactcagccaccttttcatccagggcatacctgggcaaggattcactttctggcaaggcatgccaagtagctgtatcctcctcttcactgctggactcctcatccaatcgggtccacaaaagaggggatgagcaggagtctagaggactctggggaggactctgcggaggaccctggggagagatcttgggaggaccctggggaggaatctcaggaggactctggggaagaggtggcatcccagcagcaggcatatcctcatcttctggaacacccagaatgagagtagagggtaagggtgaggacaagggtgaggatgaggacaaggaagag

SEQ ID NO: 21437 - DNA, 335 bp, Homo sapiens
  MAP TO AC011421.2; EXPRESSED IN PLACENTA, SIGNAL = 1.3; EXPRESSED IN HEART, SIGNAL =   2; EXPRESSED IN BRAIN, SIGNAL = 2.3; EXPRESSED IN LUNG, SIGNAL = 2.5; EST_HUMAN HIT: AU132548.1, EVALUE 0.00e+00; NT HIT: M65189.1, EVALUE 0.00e+00; SWISSPROT HIT: P08050, EVALUE 7.00e-48
ttaggcaaactccttgacaaggttcaagcctacttaactgctggagggaaggtgtggctgtcagtacttttcattttccaaatcctgctgctgaagacagtggttgagtcagcctggggagatgagcagtctgcctttcgttgtaacactcagcaacctggttgtgaaaatgtctgctatgacaagtctttcccaatctctcatgtgcgcttctgggtcctgcagatcatatttgtgtctgtacccatactcttgtacctggctcatgtgttctatgtgatgcaaaaggaagagaaactgaacaagaaagaggaggaactcaaggttgcccaaac

SEQ ID NO: 21438 - DNA, 467 bp, Homo sapiens; identical to SEQ ID NO: 4698
  MAP TO AL022334.1; EXPRESSED IN HBL100, SIGNAL = 3.6; EXPRESSED IN PLACENTA, SIGNAL = 3.5; EXPRESSED IN ADULT LIVER, SIGNAL = 3.3; EXPRESSED IN HELA, SIGNAL = 3.4; EXPRESSED IN HEART, SIGNAL = 3.2; EXPRESSED IN FETAL LIVER, SIGNAL = 3.2; EXPRESSED IN BT474, SIGNAL = 3.4; EXPRESSED IN BRAIN, SIGNAL = 3.7; EXPRESSED IN LUNG, SIGNAL = 3.2; EXPRESSED IN BONE MARROW, SIGNAL = 3.7; NT HIT: AJ230113.1, EVALUE 2.50e-01; SWISSPROT HIT: Q10697, EVALUE 6.20e+00; EST_HUMAN HIT: BF129277.1, EVALUE 4.40e-01

SEQ ID NO: 21439 - DNA, 199 bp, Homo sapiens
  MAP TO AL022344.1; EXPRESSED IN BT474, SIGNAL = 2.2; EXPRESSED IN LUNG, SIGNAL =   3; EXPRESSED IN BRAIN, SIGNAL = 1.7; EXPRESSED IN BONE MARROW, SIGNAL = 1.4; EXPRESSED IN HBL100, SIGNAL = 3.7; EXPRESSED IN HEART, SIGNAL = 2.8; EXPRESSED IN FETAL LIVER, SIGNAL = 2.7; EXPRESSED IN ADULT LIVER, SIGNAL = 2.8; EXPRESSED IN PLACENTA, SIGNAL = 3.4; EXPRESSED IN HELA, SIGNAL = 3.1; NT HIT: gi7661979, EVALUE 1.00e-108; EST_HUMAN HIT: AW467637.1, EVALUE 1.00e-108
tcagaagatgaagaaggccaaggagcagcggcacctgcacaataaagagcacttcagagccaagcagaaggaggaggaggagaagctgaagcggcagaaggacctcaggaagaagctcttcagaattcaggggcagaaggaaagaagaaaccagaagtccagtttgaagggggctgagggccaattgcagtgagccttt

SEQ ID NO: 21440 - DNA, 98 bp, Homo sapiens
  MAP TO AJ239323.2; EXPRESSED IN HBL100, SIGNAL = 1.9; EXPRESSED IN HEART, SIGNAL = 0.93; EXPRESSED IN BRAIN, SIGNAL = 0.94; EXPRESSED IN BT474, SIGNAL = 1.1; EXPRESSED IN FETAL LIVER, SIGNAL =   1; EST_HUMAN HIT: AI434600.1, EVALUE 1.20e+00; NT HIT: X92179.1, EVALUE 1.80e-01
tgtgggaagaaacacccttagagtggagatggctgcatcaggatcgtagaacttgataataatctcagatcttgttacacagctccctttgtttacta

SEQ ID NO: 21441 - DNA, 172 bp, Homo sapiens
  MAP TO AL031000.1; EXPRESSED IN LUNG, SIGNAL = 1.2; EXPRESSED IN BRAIN, SIGNAL = 1.3; EXPRESSED IN BONE MARROW, SIGNAL = 1.1; EXPRESSED IN HBL100, SIGNAL = 1.7; EXPRESSED IN HELA, SIGNAL = 1.2; EXPRESSED IN HEART, SIGNAL =   1; EXPRESSED IN BT474, SIGNAL = 1.5; EXPRESSED IN ADULT LIVER, SIGNAL = 1.1; EXPRESSED IN FETAL LIVER, SIGNAL = 0.96; EXPRESSED IN PLACENTA, SIGNAL = 1.3; NT HIT: AB014607.1, EVALUE 9.00e-39; EST_HUMAN HIT: BE064386.1, EVALUE 7.00e-46; SWISSPROT HIT: Q42510, EVALUE 4.40e-01
attgttctctgtgtcagcccttgttgagggaatactcacagcagtggtgatcactgctattatggctatgattaaattactcatggtgactggttgtcctgctttcctcaggttttcttctgctatctgtgacagcttcttgatctgtccgcaggtagttggctgtgttcaa

SEQ ID NO: 21442 - DNA, 101 bp, Homo sapiens
  MAP TO AL022477.1; EXPRESSED IN BRAIN, SIGNAL = 1.9; EXPRESSED IN BONE MARROW, SIGNAL = 2.2; EXPRESSED IN HBL100, SIGNAL = 1.9; EXPRESSED IN PLACENTA, SIGNAL = 1.9; EXPRESSED IN FETAL LIVER, SIGNAL = 1.9; EXPRESSED IN LUNG, SIGNAL = 1.9; EXPRESSED IN HEART, SIGNAL = 1.6; EXPRESSED IN HELA, SIGNAL = 1.8; EXPRESSED IN ADULT LIVER, SIGNAL = 1.9; EXPRESSED IN BT474, SIGNAL = 2.2; NT HIT: AL163284.2, EVALUE 2.00e-04; EST_HUMAN HIT: AI886939.1, EVALUE 4.00e-06
ttgcagacaaccaccttttggctgtgtccttacatggtaaagagaaagagagacagtaagctctctggtgtttcttcttatatgggcactagtcccttaca

SEQ ID NO: 21443 - DNA, 295 bp, Homo sapiens
  MAP TO AL020993.1; EXPRESSED IN BT474, SIGNAL = 1.2; EXPRESSED IN HEART, SIGNAL = 0.82; EXPRESSED IN ADULT LIVER, SIGNAL = 0.67; EXPRESSED IN HELA, SIGNAL = 1.5; EXPRESSED IN LUNG, SIGNAL = 0.91; EXPRESSED IN HBL100, SIGNAL = 1.1; EXPRESSED IN PLACENTA, SIGNAL = 0.67; EXPRESSED IN BRAIN, SIGNAL = 0.97; EXPRESSED IN FETAL LIVER, SIGNAL = 0.66; NT HIT: gi11418108, EVALUE 6.00e-91; SWISSPROT HIT: Q09906, EVALUE 1.00e-04; EST_HUMAN HIT: BF312113.1, EVALUE 8.00e-91
cttgccagaaggaaagaaagatgacggacttgaccatgaagaacttgaggacggggctgtaggggctgagcagctcccgggtggcgaagtagaagaggaagagggcgtagagggccaggctgacggagatgttgtagatgatggtcacgtagaggtagccactggtgacgctgcgggacggggagcattttctggctgggacagacccttggagggaaggggctctcctcgactgcaccacacacagtccccatggctctcagccccacacctccagcagagctcaacgagccac

SEQ ID NO: 21444 - DNA, 108 bp, Homo sapiens
  MAP TO AL034424.9; EXPRESSED IN BRAIN, SIGNAL = 0.74; EXPRESSED IN HELA, SIGNAL = 0.61; EXPRESSED IN ADULT LIVER, SIGNAL = 0.71; EXPRESSED IN LUNG, SIGNAL = 0.64; EXPRESSED IN HEART, SIGNAL = 1.3; EXPRESSED IN FETAL LIVER, SIGNAL = 0.61; SWISSPROT HIT: P35527, EVALUE 5.30e+00; EST_HUMAN HIT: BF511846.1, EVALUE 2.00e-49; NT HIT: AL163278.2, EVALUE 7.90e-01
cacggacgggtgggggacatactgcgtgtgctgtcctgcctctcttctaagggcacagaggtggaagccctggcaccttcggaggattagagggagtcgggccgacat

SEQ ID NO: 21445 - DNA, 213 bp, Homo sapiens
  MAP TO AL022578.1; EXPRESSED IN PLACENTA, SIGNAL =  11; EXPRESSED IN HEART, SIGNAL = 9.2; EXPRESSED IN ADULT LIVER, SIGNAL =   7; EXPRESSED IN LUNG, SIGNAL =  11; EXPRESSED IN BRAIN, SIGNAL =  10; EXPRESSED IN BONE MARROW, SIGNAL =  10; EXPRESSED IN HBL100, SIGNAL =  12; EXPRESSED IN HELA, SIGNAL =  10; EXPRESSED IN BT474, SIGNAL =  10; EXPRESSED IN FETAL LIVER, SIGNAL =  10; NT HIT: AF134304.2, EVALUE 1.00e-117; EST_HUMAN HIT: AI497805.1, EVALUE 1.00e-102; SWISSPROT HIT: Q92558, EVALUE 7.00e-22
atgcagaggacatttttggagagctctttactcaggcaaatacctttgcctctccggtaagctcccttgctgagagggtcgatggactacaagttaaagtcactcagctggatcccaaggaagaagaagtgtcactgcaagtaatcaacacccgaaaagccttcagaagctccaccattcaagaccagaagctttttgacagaaactctctcc

SEQ ID NO: 21446 - DNA, 161 bp, Homo sapiens
  MAP TO AL023283.6; EXPRESSED IN BONE MARROW, SIGNAL = 1.5; EXPRESSED IN PLACENTA, SIGNAL = 1.2; EXPRESSED IN HEART, SIGNAL = 1.2; EXPRESSED IN LUNG, SIGNAL = 1.3; EXPRESSED IN BRAIN, SIGNAL = 1.3; EXPRESSED IN HELA, SIGNAL = 1.3; EXPRESSED IN HBL100, SIGNAL = 1.4; EXPRESSED IN ADULT LIVER, SIGNAL = 1.2; EXPRESSED IN BT474, SIGNAL = 1.4; EXPRESSED IN FETAL LIVER, SIGNAL = 1.4; EST_HUMAN HIT: AI754928.1, EVALUE 3.80e-01; SWISSPROT HIT: P23023, EVALUE 1.00e+00; NT HIT: AB008019.1, EVALUE 7.90e-02
agaacctgcttagggagcttggggtggagaagagagaatggtattacagtagggagaaagggcccttgattcatgatgcccagtttagagatacctgtggttatgcctgtgatcccaaactacatggtgaattaaaacaactgattatttgccctccccat

SEQ ID NO: 21447 - DNA, 96 bp, Homo sapiens
  MAP TO AL031228.1; EXPRESSED IN BRAIN, SIGNAL = 1.3; EXPRESSED IN BONE MARROW, SIGNAL = 1.2; EXPRESSED IN HBL100, SIGNAL = 1.3; EXPRESSED IN HELA, SIGNAL =   1; EXPRESSED IN PLACENTA, SIGNAL = 1.2; EXPRESSED IN HEART, SIGNAL = 1.1; EXPRESSED IN BT474, SIGNAL = 1.1; EXPRESSED IN FETAL LIVER, SIGNAL = 1.3; EST_HUMAN HIT: BF311244.1, EVALUE 3.00e-47; NT HIT: AJ223830.1, EVALUE 6.00e-14
atcacacgccgctatgcagagttctcctccgctcttgtcagtatcaaccagacaattcctaatgaacggaccatgcaattgctgggacagctgcag

SEQ ID NO: 21448 - DNA, 420 bp, Homo sapiens; identical to SEQ ID NO: 4708
  MAP TO AL031447.4; EXPRESSED IN PLACENTA, SIGNAL =   6; EXPRESSED IN HEART, SIGNAL = 5.3; EXPRESSED IN ADULT LIVER, SIGNAL = 8.8; EXPRESSED IN LUNG, SIGNAL = 6.8; EXPRESSED IN BRAIN, SIGNAL = 5.8; EXPRESSED IN BONE MARROW, SIGNAL = 7.1; EXPRESSED IN HELA, SIGNAL = 6.6; EXPRESSED IN HBL100, SIGNAL = 6.4; EXPRESSED IN BT474, SIGNAL =   6; EXPRESSED IN FETAL LIVER, SIGNAL = 5.6; NT HIT: AB033335.1, EVALUE 4.10e+00; SWISSPROT HIT: P23881, EVALUE 3.60e-01; EST_HUMAN HIT: AI015076.1, EVALUE 1.70e-02

SEQ ID NO: 21449 - DNA, 163 bp, Homo sapiens
  MAP TO AL031584.1; EXPRESSED IN BT474, SIGNAL =   7; EXPRESSED IN FETAL LIVER, SIGNAL = 5.8; EXPRESSED IN BRAIN, SIGNAL = 6.3; EXPRESSED IN BONE MARROW, SIGNAL = 7.6; EXPRESSED IN HBL100, SIGNAL = 7.1; EXPRESSED IN PLACENTA, SIGNAL = 6.9; EXPRESSED IN HEART, SIGNAL = 5.6; EXPRESSED IN LUNG, SIGNAL = 7.2; EXPRESSED IN HELA, SIGNAL = 6.6; EXPRESSED IN ADULT LIVER, SIGNAL = 7.9; EST_HUMAN HIT: AV696726.1, EVALUE 1.40e-01; NT HIT: X72794.1, EVALUE 8.00e-02; SWISSPROT HIT: P04035, EVALUE 3.40e-01
tgcccctctgtcttcaagtacctgggctcctggagggcctgggtcagggcctgagtgctcaggagcaggcgggaaaccacaccagagagcccctctcttcctgcccacgcctggagagtcaaggtcagcaaattacctggctagaaagctcccctggggtctc

SEQ ID NO: 21450 - DNA, 432 bp, Homo sapiens
  MAP TO AL034345.3; EXPRESSED IN HEART, SIGNAL = 5.5; EXPRESSED IN ADULT LIVER, SIGNAL = 7.8; EXPRESSED IN LUNG, SIGNAL = 7.6; EXPRESSED IN BRAIN, SIGNAL = 6.7; EXPRESSED IN BONE MARROW, SIGNAL = 7.6; EXPRESSED IN PLACENTA, SIGNAL = 6.9; EXPRESSED IN HELA, SIGNAL = 7.4; EXPRESSED IN HBL100, SIGNAL = 6.9; EXPRESSED IN BT474, SIGNAL = 6.6; EXPRESSED IN FETAL LIVER, SIGNAL = 6.9; NT HIT: AB037831.1, EVALUE 2.00e-04; SWISSPROT HIT: Q39575, EVALUE 6.00e-25; EST_HUMAN HIT: BF221813.1, EVALUE 7.00e-83
tttaattacttgcaagtgaaaagtgattttctgttttaattattttcaggtgaaaacattttcctcattttagatggtcctgtggatgccatctggattgagaacttaaattccgttttggatgacaataaaactctgacgttagctaatggagatcgcattcccatggcccctagttgtaagcttctgtttgaagtccacaatatcgagaacgcctctcctgccacggtttctaggatgggcatggtctatatcagcagctctgctctcagctggaggccaatcttacaggtggggcagagagatgggaagaagaaccctcagagtctctccacgtttcactttctcaataaacacagattctgtttctttgttgcaggcatggttgaagaaacgcactgcacaggaagctgctgtattcctgacactgta

SEQ ID NO: 21451 - DNA, 137 bp, Homo sapiens
  MAP TO AL031661.17; EXPRESSED IN BONE MARROW, SIGNAL = 5.3; EXPRESSED IN LUNG, SIGNAL = 5.5; EXPRESSED IN BRAIN, SIGNAL = 4.7; EXPRESSED IN PLACENTA, SIGNAL = 5.2; EXPRESSED IN HBL100, SIGNAL = 5.1; EXPRESSED IN HELA, SIGNAL = 5.4; EXPRESSED IN ADULT LIVER, SIGNAL = 6.9; EXPRESSED IN HEART, SIGNAL = 4.5; EXPRESSED IN BT474, SIGNAL = 4.7; EXPRESSED IN FETAL LIVER, SIGNAL =   5; NT HIT: gi6753775, EVALUE 1.00e+00; EST_HUMAN HIT: BE153778.1, EVALUE 3.00e-04; SWISSPROT HIT: P77221, EVALUE 3.00e+00
cctcctgatcttatcagaagcatcaatacttttcagatcaaactcatgcatgttcaggcaatgcacctttgtcacaactgccacctggccaacagtgcttgtaagaggcaatcaatcataacccatttacagaaatg

SEQ ID NO: 21452 - DNA, 382 bp, Homo sapiens
  MAP TO AL034369.1; EXPRESSED IN BT474, SIGNAL = 8.4; EXPRESSED IN FETAL LIVER, SIGNAL = 8.4; EXPRESSED IN BRAIN, SIGNAL =   8; EXPRESSED IN BONE MARROW, SIGNAL = 9.4; EXPRESSED IN LUNG, SIGNAL = 8.9; EXPRESSED IN HBL100, SIGNAL = 8.6; EXPRESSED IN PLACENTA, SIGNAL = 8.6; EXPRESSED IN HELA, SIGNAL = 9.9; EXPRESSED IN ADULT LIVER, SIGNAL =  12; EXPRESSED IN HEART, SIGNAL = 7.3; SWISSPROT HIT: Q31849, EVALUE 4.00e-01; NT HIT: AE002273.1, EVALUE 3.70e+00
gtttaatattttggctcttcgaaaatccagcttccatcaaagtgtttttagcgcctcagtgaagttcgtcccctttgctctttccttaagcaacaggaacctacccccacctcaggtcattcaagccactgacctccttttcccttttgacatccttgttacaaatgaaatgctaaggcaacataccaagaagagtgaggtaaagtctcaggcttcaggtcttttgcgtctttttgttgttgttgttttttctaaattatgggtttttttgtttgtttacttttttttaaacctaccaaggcatctgaacaaattgagaatttgcccatcacctattcaaaggaaaatactcctttttcaaaggagaatcagtgttccagtt

SEQ ID NO: 21453 - DNA, 168 bp, Homo sapiens
  MAP TO AL031664.1; EXPRESSED IN PLACENTA, SIGNAL = 1.9; EXPRESSED IN HELA, SIGNAL = 1.9; EXPRESSED IN HEART, SIGNAL = 1.9; EXPRESSED IN FETAL LIVER, SIGNAL = 1.6; EXPRESSED IN ADULT LIVER, SIGNAL = 2.2; EXPRESSED IN BT474, SIGNAL =   2; EXPRESSED IN BRAIN, SIGNAL = 2.3; EXPRESSED IN HBL100, SIGNAL = 1.8; EXPRESSED IN LUNG, SIGNAL = 1.6; EXPRESSED IN BONE MARROW, SIGNAL =   2; NT HIT: M95967.1, EVALUE 4.00e-90; EST_HUMAN HIT: BE257514.1, EVALUE 5.00e-90; SWISSPROT HIT: P28841, EVALUE 2.00e-27
atgctggaccagccattcatgacagacatcatcgaggcctcctccatcagtcatatgccacagctgattgacatctacagcgccagctggggccccacagacaacggcaagacagtggatgggccccgggagctcacgctgcaggccatggccgatggcgtgaacaag

SEQ ID NO: 21454 - DNA, 141 bp, Homo sapiens
  MAP TO AL035700.13; EXPRESSED IN HELA, SIGNAL = 0.62; EXPRESSED IN ADULT LIVER, SIGNAL = 0.69; EXPRESSED IN BRAIN, SIGNAL = 0.76; EXPRESSED IN PLACENTA, SIGNAL = 0.89; EXPRESSED IN HEART, SIGNAL = 0.86; EXPRESSED IN FETAL LIVER, SIGNAL = 0.63; EXPRESSED IN LUNG, SIGNAL = 0.63; EXPRESSED IN BT474, SIGNAL = 0.67; EST_HUMAN HIT: AI823432.1, EVALUE 2.10e-02; NT HIT: AJ295617.1, EVALUE 3.20e-01; SWISSPROT HIT: P12577, EVALUE 9.10e+00
ttgctagtatctttctcagttatttgcatcaagaacccaaactggcacaacttattcttgttgattccctggagtggaatcaatccttactgtgagcaggattcttccttctctgagaatgtgggtgatgagattctaaag

SEQ ID NO: 21455 - DNA, 170 bp, Homo sapiens
  MAP TO AL035416.7; EXPRESSED IN HBL100, SIGNAL = 0.96; EXPRESSED IN HEART, SIGNAL = 1.1; EXPRESSED IN BONE MARROW, SIGNAL = 1.1; EXPRESSED IN BRAIN, SIGNAL =   1; EXPRESSED IN FETAL LIVER, SIGNAL = 0.99; EXPRESSED IN BT474, SIGNAL = 1.3; NT HIT: gi11426992, EVALUE 5.00e-53; SWISSPROT HIT: P23886, EVALUE 7.50e-01; EST_HUMAN HIT: AI242628.1, EVALUE 9.10e+00
cttctgcaagactagtcaattcatcattcctatgctggaattcgattagctgcttttcaagttcttcacagtgaacacggtaatcatcttttgcagcttcaagccttgaacaaataaaaaagtaagtatttataacttccatgatttgttataattatataattgtaact

SEQ ID NO: 21456 - DNA, 176 bp, Homo sapiens
  MAP TO AL109823.11; EXPRESSED IN HBL100, SIGNAL = 1.3; EXPRESSED IN HELA, SIGNAL = 1.1; EXPRESSED IN FETAL LIVER, SIGNAL = 1.2; EXPRESSED IN BT474, SIGNAL = 1.2; EXPRESSED IN PLACENTA, SIGNAL = 0.91; EXPRESSED IN HEART, SIGNAL = 1.1; EXPRESSED IN ADULT LIVER, SIGNAL = 1.6; EXPRESSED IN LUNG, SIGNAL = 1.1; EXPRESSED IN BONE MARROW, SIGNAL = 1.1; NT HIT: gi11034844, EVALUE 4.00e-72; EST_HUMAN HIT: BE882389.1, EVALUE 6.00e-72; SWISSPROT HIT: P34237, EVALUE 4.40e-01
aagcatgtctgttactagcagaatataacgggcgcctggcagcagaactggaggaccgtcgccagctggctcggatgttggtggagtatacccagaatcagaaagatgttttgtcggagaaggagaaaaaactagaggtgagtgcattgaaggcagacccagactgcccacgtttc

SEQ ID NO: 21457 - DNA, 119 bp, Homo sapiens
  MAP TO AL118508.9; EXPRESSED IN BONE MARROW, SIGNAL = 2.1; EXPRESSED IN PLACENTA, SIGNAL = 2.5; EXPRESSED IN HBL100, SIGNAL = 1.7; EXPRESSED IN HELA, SIGNAL = 2.1; EXPRESSED IN FETAL LIVER, SIGNAL = 2.8; EXPRESSED IN BT474, SIGNAL = 2.1; EXPRESSED IN LUNG, SIGNAL = 2.9; EXPRESSED IN BRAIN, SIGNAL = 1.7; EXPRESSED IN HEART, SIGNAL = 1.8; EXPRESSED IN ADULT LIVER, SIGNAL = 2.5; EST_HUMAN HIT: AI073485.1, EVALUE 1.00e-03; SWISSPROT HIT: P15309, EVALUE 6.90e+00
ataaaacagcatgtaagcatctctgcagttgctgtccccagagcccacttcctggatattgccagctgcctggaccaacctttccgaaagatcagccaggtcacagtgagggtcaaagg

SEQ ID NO: 21458 - DNA, 144 bp, Homo sapiens
  MAP TO AL132766.1; EXPRESSED IN PLACENTA, SIGNAL =   6; EXPRESSED IN HBL100, SIGNAL = 5.6; EXPRESSED IN HEART, SIGNAL = 6.2; EXPRESSED IN BT474, SIGNAL = 5.9; EXPRESSED IN FETAL LIVER, SIGNAL = 5.9; EXPRESSED IN BONE MARROW, SIGNAL = 4.3; EXPRESSED IN HELA, SIGNAL =   4; EXPRESSED IN ADULT LIVER, SIGNAL = 4.8; EXPRESSED IN BRAIN, SIGNAL = 4.3; EXPRESSED IN LUNG, SIGNAL = 5.8; EST_HUMAN HIT: BE154067.1, EVALUE 1.00e-03; SWISSPROT HIT: P26235, EVALUE 6.70e+00
tcattaatgttggtacttttattttctcttgaatttattacattcaggtttttgcccagcactccatggaaactactcttgtcaaggtcactaatgatgtttcctttgctaaatccaataatcatttttagtatacatgttact

SEQ ID NO: 21459 - DNA, 116 bp, Homo sapiens
  MAP TO AL109938.4; EXPRESSED IN BT474, SIGNAL = 1.3; EXPRESSED IN BRAIN, SIGNAL = 1.4; EXPRESSED IN PLACENTA, SIGNAL = 1.1; EXPRESSED IN HELA, SIGNAL = 1.2; EXPRESSED IN HBL100, SIGNAL = 1.4; EXPRESSED IN ADULT LIVER, SIGNAL = 1.7; EXPRESSED IN FETAL LIVER, SIGNAL = 1.3; EXPRESSED IN LUNG, SIGNAL = 1.5; EXPRESSED IN BONE MARROW, SIGNAL = 1.4; EXPRESSED IN HEART, SIGNAL = 1.2; SWISSPROT HIT: P10866, EVALUE 5.30e+00; NT HIT: D90917.1, EVALUE 2.50e-01; EST_HUMAN HIT: AJ003492.1, EVALUE 2.60e-01
tgcaatggttaactgcagagatggtggtgctgcaaaccgagacctcaacacatgctgggcagcaggtgtggatgggggaagatatgtcattttgcagtcttaagttggaagtggtg

SEQ ID NO: 21460 - DNA, 182 bp, Homo sapiens
  MAP TO AL132773.1; EXPRESSED IN FETAL LIVER, SIGNAL = 0.96; EXPRESSED IN ADULT LIVER, SIGNAL = 1.5; EXPRESSED IN LUNG, SIGNAL =   1; EXPRESSED IN HBL100, SIGNAL = 1.6; EXPRESSED IN PLACENTA, SIGNAL = 1.4; EXPRESSED IN BT474, SIGNAL = 1.6; EXPRESSED IN BRAIN, SIGNAL = 1.3; EXPRESSED IN BONE MARROW, SIGNAL = 1.2; EXPRESSED IN HEART, SIGNAL = 1.5; EXPRESSED IN HELA, SIGNAL =   1; NT HIT: AF218902.1, EVALUE 2.00e-98; EST_HUMAN HIT: AI372810.1, EVALUE 2.00e-98; SWISSPROT HIT: P22897, EVALUE 8.00e-03
caggttgcagccttcagtccccgagtactgggttctgataaaattccacagaatccagcatcactgggctcagacggcatccactgtagtaaactatttgtaaatggggacatatcttcccagcaccagtaggacacattgatcttccgaaggccgacccatggggttaaggtgagcttgga

SEQ ID NO: 21461 - DNA, 110 bp, Homo sapiens
  MAP TO AP000009.2; EXPRESSED IN FETAL LIVER, SIGNAL = 1.6; EXPRESSED IN BONE MARROW, SIGNAL = 1.8; EXPRESSED IN LUNG, SIGNAL = 2.1; EXPRESSED IN HELA, SIGNAL = 1.8; EXPRESSED IN PLACENTA, SIGNAL = 1.1; EXPRESSED IN HEART, SIGNAL = 0.98; EXPRESSED IN BT474, SIGNAL = 4.5; EXPRESSED IN ADULT LIVER, SIGNAL = 1.4; NT HIT: AF237812.1, EVALUE 1.00e-55; EST_HUMAN HIT: AI660615.1, EVALUE 2.00e-55; SWISSPROT HIT: P57054, EVALUE 6.00e-05
tttggctgcaagaaagaacatttggtttacttcactaatagaaatatctcttaaggctggaatggcctcctcttggtatttcttctgctgttgattttttgcatagttat

SEQ ID NO: 21462 - DNA, 145 bp, Homo sapiens
  MAP TO AL118496.10; EXPRESSED IN HEART, SIGNAL = 2.8; EXPRESSED IN BT474, SIGNAL = 2.6; EXPRESSED IN BRAIN, SIGNAL = 2.7; EXPRESSED IN PLACENTA, SIGNAL =   5; EXPRESSED IN HELA, SIGNAL =   3; EXPRESSED IN HBL100, SIGNAL = 2.8; EXPRESSED IN ADULT LIVER, SIGNAL =   4; EXPRESSED IN FETAL LIVER, SIGNAL = 3.5; EXPRESSED IN LUNG, SIGNAL = 3.1; EXPRESSED IN BONE MARROW, SIGNAL = 2.7; EST_HUMAN HIT: BF305776.1, EVALUE 1.90e+00; NT HIT: M20210.1, EVALUE 3.30e-01
caaatatgtgtgtgagaagtatgggggcagctggttggtcctgagctctaatttcacccattggaacatgaaaaactggacctgtgaaaacgttgccctcatccctgaagaggtgagacgtactgccaaggtctctattgccatc

SEQ ID NO: 21463 - DNA, 84 bp, Homo sapiens
  MAP TO AL121759.5; EXPRESSED IN FETAL LIVER, SIGNAL = 2.1; EXPRESSED IN HBL100, SIGNAL = 2.3; EXPRESSED IN HEART, SIGNAL = 1.8; EXPRESSED IN PLACENTA, SIGNAL = 1.3; EXPRESSED IN ADULT LIVER, SIGNAL = 2.4; EXPRESSED IN BT474, SIGNAL = 2.2; EXPRESSED IN BRAIN, SIGNAL = 1.5; EXPRESSED IN LUNG, SIGNAL = 1.5; EXPRESSED IN BONE MARROW, SIGNAL = 2.2; EXPRESSED IN HELA, SIGNAL = 2.5; EST_HUMAN HIT: AL048383.2, EVALUE 1.10e-02
gcccatggctttgacaccaactatctccacctcccaaaccagccacttgctgatgctccacctcttctggtagaagtttcaacc

SEQ ID NO: 21464 - DNA, 101 bp, Homo sapiens
  MAP TO AL109810.4; EXPRESSED IN PLACENTA, SIGNAL = 2.2; EXPRESSED IN HELA, SIGNAL = 2.9; EXPRESSED IN HBL100, SIGNAL = 2.1; EXPRESSED IN HEART, SIGNAL = 2.5; EXPRESSED IN FETAL LIVER, SIGNAL = 2.9; EXPRESSED IN ADULT LIVER, SIGNAL = 1.7; EXPRESSED IN BT474, SIGNAL = 3.5; EXPRESSED IN BRAIN, SIGNAL = 2.1; EXPRESSED IN BONE MARROW, SIGNAL = 1.7; EXPRESSED IN LUNG, SIGNAL = 2.8; EST_HUMAN HIT: AA211216.1, EVALUE 2.20e-01; NT HIT: U73850.1, EVALUE 8.50e-01; SWISSPROT HIT: O59230, EVALUE 9.10e+00
ttcacccttaacactgtgctttctggccagggagcaaaccacagaaaagtaaataaacagaaggtgagagaattgcagattgtgaaaagttctttcaggaa

SEQ ID NO: 21465 - DNA, 208 bp, Homo sapiens; identical to SEQ ID NO: 20304
  MAP TO AL118501.4; EXPRESSED IN BONE MARROW, SIGNAL = 0.98; EXPRESSED IN LUNG, SIGNAL = 1.7; EXPRESSED IN PLACENTA, SIGNAL = 1.2; EXPRESSED IN HELA, SIGNAL = 1.2; EXPRESSED IN HEART, SIGNAL = 1.3; EXPRESSED IN HBL100, SIGNAL = 1.1; EXPRESSED IN FETAL LIVER, SIGNAL = 1.2; EXPRESSED IN ADULT LIVER, SIGNAL = 1.3; EXPRESSED IN BT474, SIGNAL = 1.3; EXPRESSED IN BRAIN, SIGNAL = 1.2; NT HIT: Y07695.1, EVALUE 1.10e-01; SWISSPROT HIT: O08808, EVALUE 1.60e+00; EST_HUMAN HIT: W39378.1, EVALUE 2.90e+00

SEQ ID NO: 21466 - DNA, 273 bp, Homo sapiens
  MAP TO AC005537.2; EXPRESSED IN ADULT LIVER, SIGNAL = 0.78; EXPRESSED IN BRAIN, SIGNAL = 1.1; EXPRESSED IN HEART, SIGNAL = 0.79; EXPRESSED IN BONE MARROW, SIGNAL = 0.64; EXPRESSED IN FETAL LIVER, SIGNAL = 0.61; EXPRESSED IN PLACENTA, SIGNAL = 0.8; EXPRESSED IN LUNG, SIGNAL = 0.66; SWISSPROT HIT: Q42429, EVALUE 1.10e+00; NT HIT: gi6755922, EVALUE 2.60e+00; EST_HUMAN HIT: BE896785.1, EVALUE 2.50e-01
tggttccctccacccagacaaaaccctggactgatgccaggcacagggtatgtgacctatgcttccatctcctcttccgtccctgggactgtggccatagatattcacctccatcaggttccactgataaaggagaaggagaggacacagttcatagaaaaggaagctctggccaaactggaagccaccaaacccagggtgtggctcctagagtattgccatctctcaggagccttccaaggcttatcccgtaacaccttccactcttcttag

SEQ ID NO: 21467 - DNA, 85 bp, Homo sapiens
  MAP TO AL109836.12; EXPRESSED IN ADULT LIVER, SIGNAL = 1.7; EXPRESSED IN BRAIN, SIGNAL = 2.4; EXPRESSED IN BONE MARROW, SIGNAL = 1.7; EXPRESSED IN PLACENTA, SIGNAL =   2; EXPRESSED IN HBL100, SIGNAL = 2.2; EXPRESSED IN FETAL LIVER, SIGNAL = 2.4; EXPRESSED IN BT474, SIGNAL = 3.5; EXPRESSED IN LUNG, SIGNAL = 1.8; EXPRESSED IN HEART, SIGNAL = 1.5; EXPRESSED IN HELA, SIGNAL = 2.5; NT HIT: AJ243211.1, EVALUE 3.70e-02; EST_HUMAN HIT: AA487021.1, EVALUE 4.00e-03
cttgatttctttagggtcatttactggaactttatgagtttccttggtgttgtcatgtttgcctgattcttcgtcacctatgtgc

SEQ ID NO: 21468 - DNA, 541 bp, Homo sapiens
  MAP TO AL118511.6; EXPRESSED IN BT474, SIGNAL = 1.7; EXPRESSED IN ADULT LIVER, SIGNAL = 1.7; EXPRESSED IN BRAIN, SIGNAL = 1.7; EXPRESSED IN BONE MARROW, SIGNAL = 1.4; EXPRESSED IN PLACENTA, SIGNAL = 1.8; EXPRESSED IN HELA, SIGNAL = 1.8; EXPRESSED IN HBL100, SIGNAL = 1.5; EXPRESSED IN FETAL LIVER, SIGNAL = 1.3; EXPRESSED IN LUNG, SIGNAL = 2.6; EXPRESSED IN HEART, SIGNAL = 1.6; NT HIT: AF260753.1, EVALUE 7.40e-02; SWISSPROT HIT: P43597, EVALUE 1.20e-02; EST_HUMAN HIT: N34078.1, EVALUE 1.00e-126
ctgtgcaaacttgggttccgagaacagggtgtcttccccatcgtcctgcctgacatcaggagatggcagcttcccctcgagctgggagggggcagcctcgtgcagtgcactgctgaaggcctggacaggctggggtctctcacgttcggtgctcacgttgggaagaggacgctgctcctgacggagggtgctgggcctttccaccttggcctccctgtccttcggggcaggttcctgccggtagcagggaggcaagaccttttcccccttctccatggacttgatctggctaggggtcagcgactggaactcggcctcaggcccctcccctcgggaccgctcagcattgatcttccagaatgacgcttcctcctccttcctggtggggcccagggcgtccaggctggaggacctgctgccttgggaggacttgagggcctgggagccctgggaagctttggacagtggtctgggctcgctggcggcggtgccgttgctcggctcctggatggatagggcggagatactgaactccatctga

SEQ ID NO: 21469 - DNA, 149 bp, Homo sapiens
  MAP TO AC007366.2; EXPRESSED IN PLACENTA, SIGNAL = 0.59; EXPRESSED IN LUNG, SIGNAL = 0.64; EXPRESSED IN HELA, SIGNAL = 4.7; EXPRESSED IN HEART, SIGNAL = 0.92; NT HIT: U75644.1, EVALUE 3.40e-01; EST_HUMAN HIT: BE271052.1, EVALUE 3.40e-01; SWISSPROT HIT: Q51548, EVALUE 3.90e+00
caaaaatccagtttggtggctcatgtaggtcaacaggaaagtcatctttagctactggtcttccttctgcttttccctcttgcttatgtaattgtgccccacacaggtttgtatgtccctccactctttcctcaaaaattcttgccatt

SEQ ID NO: 21470 - DNA, 209 bp, Homo sapiens
  MAP TO AP000067.1; EXPRESSED IN BONE MARROW, SIGNAL = 1.3; EXPRESSED IN BRAIN, SIGNAL = 0.99; EXPRESSED IN PLACENTA, SIGNAL = 1.9; EXPRESSED IN BT474, SIGNAL = 1.2; EXPRESSED IN FETAL LIVER, SIGNAL =   1; EXPRESSED IN LUNG, SIGNAL = 1.3; EXPRESSED IN HEART, SIGNAL = 1.8; EXPRESSED IN HELA, SIGNAL = 1.1; EXPRESSED IN HBL100, SIGNAL = 1.1; EXPRESSED IN ADULT LIVER, SIGNAL = 1.2
acctcctcctctcctccatctccatccctctgcattcgcttcctcctccatcttctccccctcctccttttccttctcctccatctcctccccctcctccttttcctcctcctccttcttttcctcttgcatctcctccctctcctctttttcctcctcctcctcttcctcctccatctcctccttcttttccccctccccctccttct

SEQ ID NO: 21471 - DNA, 83 bp, Homo sapiens
  MAP TO AL121754.8; EXPRESSED IN BONE MARROW, SIGNAL = 1.2; EXPRESSED IN BRAIN, SIGNAL = 1.1; EXPRESSED IN PLACENTA, SIGNAL = 1.3; EXPRESSED IN BT474, SIGNAL = 1.2; EXPRESSED IN FETAL LIVER, SIGNAL = 1.1; EXPRESSED IN LUNG, SIGNAL = 1.3; EXPRESSED IN HEART, SIGNAL = 1.4; EXPRESSED IN HELA, SIGNAL = 1.1; EXPRESSED IN HBL100, SIGNAL = 1.3; EXPRESSED IN ADULT LIVER, SIGNAL = 1.7; EST_HUMAN HIT: AI247635.1, EVALUE 1.70e-01
ggaccatggtaacttatctgcatctccattttatgtggctttgctgggtctgccagtcacggtgacattgcagcccagcccag

SEQ ID NO: 21472 - DNA, 308 bp, Homo sapiens
  MAP TO AP000014.2; EXPRESSED IN BONE MARROW, SIGNAL = 2.1; EXPRESSED IN BRAIN, SIGNAL = 1.9; EXPRESSED IN BT474, SIGNAL = 5.8; EXPRESSED IN FETAL LIVER, SIGNAL = 1.6; EXPRESSED IN LUNG, SIGNAL = 1.9; EXPRESSED IN PLACENTA, SIGNAL = 2.6; EXPRESSED IN HEART, SIGNAL = 1.9; EXPRESSED IN HELA, SIGNAL = 1.6; EXPRESSED IN HBL100, SIGNAL =   2; EXPRESSED IN ADULT LIVER, SIGNAL = 1.6; EST_HUMAN HIT: AW137359.1, EVALUE 7.10e-02; SWISSPROT HIT: P46911, EVALUE 7.50e+00; NT HIT: D28134.1, EVALUE 7.50e-01
ggaaggtgggggtgctgccagggctgtgcccaagtgcctggttccattttttcccccaacaccagacagcagccaatatcccaggacagctctggggctcctacaagctgggagctgttcctgaaaacccactcagctctctgctcctgaagcctctgaatgggtacgggctattgttttatgcgggaaattatctgtcaaaagaaacgccttctgtgttcctactcagcattgagaggcatatttttgttgagaggatgctttatattggggtctatggctttgttggagcctgctcacatagacaa

SEQ ID NO: 21473 - DNA, 116 bp, Homo sapiens
  MAP TO AL121763.5; EXPRESSED IN BT474, SIGNAL = 1.6; EXPRESSED IN ADULT LIVER, SIGNAL = 1.4; EXPRESSED IN BONE MARROW, SIGNAL = 1.7; EXPRESSED IN FETAL LIVER, SIGNAL = 1.3; EXPRESSED IN LUNG, SIGNAL = 1.8; EXPRESSED IN BRAIN, SIGNAL = 1.6; EXPRESSED IN PLACENTA, SIGNAL = 2.1; EXPRESSED IN HBL100, SIGNAL = 1.6; EXPRESSED IN HELA, SIGNAL = 1.6; EXPRESSED IN HEART, SIGNAL = 1.8; NT HIT: gi7427522, EVALUE 3.00e-59; EST_HUMAN HIT: AW968071.1, EVALUE 1.00e+00; SWISSPROT HIT: P28827, EVALUE 1.00e-08
ctgccttcacccagccctcagtgacgaccccggacacattccacacagggttcccttgggggccaccattcaccttcacgtagacgttcaaggcccctgggctggacctgtcacgg

SEQ ID NO: 21474 - DNA, 346 bp, Homo sapiens; identical to SEQ ID NO: 18648
  MAP TO AP000351.3; EXPRESSED IN BONE MARROW, SIGNAL = 4.6; EXPRESSED IN HBL100, SIGNAL =   7; EXPRESSED IN ADULT LIVER, SIGNAL = 4.7; EXPRESSED IN BRAIN, SIGNAL = 2.8; EXPRESSED IN LUNG, SIGNAL = 3.6; EXPRESSED IN PLACENTA, SIGNAL = 2.9; EXPRESSED IN HEART, SIGNAL = 2.8; EXPRESSED IN HELA, SIGNAL = 5.8; EXPRESSED IN BT474, SIGNAL = 4.8; EXPRESSED IN FETAL LIVER, SIGNAL = 3.6; NT HIT: AF240786.1, EVALUE 0.00e+00; EST_HUMAN HIT: AW054828.1, EVALUE 1.00e-104; SWISSPROT HIT: P04722, EVALUE 5.10e+00

SEQ ID NO: 21475 - DNA, 250 bp, Homo sapiens
  MAP TO AL122023.1; EXPRESSED IN HBL100, SIGNAL = 3.4; EXPRESSED IN HELA, SIGNAL = 5.4; EXPRESSED IN BT474, SIGNAL = 5.7; EXPRESSED IN LUNG, SIGNAL = 4.7; EXPRESSED IN BRAIN, SIGNAL = 5.2; EXPRESSED IN BONE MARROW, SIGNAL =   5; EXPRESSED IN PLACENTA, SIGNAL = 4.1; EXPRESSED IN HEART, SIGNAL = 2.4; EXPRESSED IN ADULT LIVER, SIGNAL = 5.9; EXPRESSED IN FETAL LIVER, SIGNAL =   5; SWISSPROT HIT: P30622, EVALUE 7.30e-01; EST_HUMAN HIT: R96567.1, EVALUE 1.00e-02; NT HIT: AL163280.2, EVALUE 3.30e-02
ctacgttcaactgacatacagatttggggattaagttcccaacacatgcaatgtggggaacagcaaatcatagtagacatctataataaaaaattaagtaatacatatgaggtccttatcatagaagacatagtgaagaatgctcaccaaactggtaaggggaatggtggagaggaagaaggaaacgatgactgaggtttctaccttgcataactgggtggttacaatgctgtaaaccaagaagcatata

SEQ ID NO: 21476 - DNA, 587 bp, Homo sapiens
  MAP TO AB019441.1; EXPRESSED IN PLACENTA, SIGNAL = 1.1; EXPRESSED IN HEART, SIGNAL = 2.8; EXPRESSED IN FETAL LIVER, SIGNAL = 1.8; EXPRESSED IN BONE MARROW, SIGNAL = 1.6; EXPRESSED IN BRAIN, SIGNAL =   2; EXPRESSED IN HELA, SIGNAL = 1.9; EXPRESSED IN HBL100, SIGNAL = 2.4; EXPRESSED IN BT474, SIGNAL = 3.3; EXPRESSED IN LUNG, SIGNAL = 0.97; NT HIT: X87205.1, EVALUE 0.00e+00; SWISSPROT HIT: Q99965, EVALUE 1.30e-02
catcatgaggctggacgaccttgcgtacgaaatcaaacccctccaggattcccgcaggtttgaacatgttgtttttcagatagtggccgagcccaacgcaacagggcccacatttagagatgatgacaatgagacagaccccctgttctctgaagcaaatgacagcatgaatcccaggatatctaattcgctgtatagttctcatagaggcaatataaaaggccacgttcaatgttccaattcatattatcgcatatatggcaatattacaacttgttccaaagaggtggtccagatgttcagtctcattgacagcattgctcaaaatattgatctgcggtactatatttatcttttgaccatatataataatcgtgacccagcccctgtgaatgaatatcgaattcagagtgcaatgtttacctattttaaaacaactttttttgatacttttcatgttcattcatccacactacttattaaatacgtgccacatgaatctaactatgaacctgaaaggtataacttctgttcccgtatagccctgttacacattggtactccaggcagacattatttattggtag

SEQ ID NO: 21477 - DNA, 222 bp, Homo sapiens
  MAP TO D87675.1; EXPRESSED IN BT474, SIGNAL = 2.8; EXPRESSED IN FETAL LIVER, SIGNAL = 1.2; EXPRESSED IN BRAIN, SIGNAL =   5; EXPRESSED IN BONE MARROW, SIGNAL =   1; EXPRESSED IN ADULT LIVER, SIGNAL = 1.1; EXPRESSED IN LUNG, SIGNAL = 4.3; EXPRESSED IN PLACENTA, SIGNAL = 3.8; EXPRESSED IN HEART, SIGNAL = 1.8; EXPRESSED IN HELA, SIGNAL = 3.4; EXPRESSED IN HBL100, SIGNAL = 2.4; EST_HUMAN HIT: W27334.1, EVALUE 1.00e-122; NT HIT: Y00264.1, EVALUE 1.00e-122; SWISSPROT HIT: P05067, EVALUE 1.00e-37
atgagctgcttcagaaagagcaaaactattcagatgacgtcttggccaacatgattagtgaaccaaggatcagttacggaaacgatgctctcatgccatctttgaccgaaacgaaaaccaccgtggagctccttcccgtgaatggagagttcagcctggacgatctccagccgtggcattcttttggggctgactctgtgccagccaacacagaaaacgaag

SEQ ID NO: 21478 - DNA, 1682 bp, Homo sapiens
  MAP TO AC005074.1; EXPRESSED IN FETAL LIVER, SIGNAL = 1.2; EXPRESSED IN HELA, SIGNAL = 2.5; EXPRESSED IN BT474, SIGNAL = 2.8; EXPRESSED IN BRAIN, SIGNAL = 1.1; EXPRESSED IN LUNG, SIGNAL = 2.9; EXPRESSED IN BONE MARROW, SIGNAL = 0.93; EXPRESSED IN PLACENTA, SIGNAL = 0.99; EXPRESSED IN HEART, SIGNAL = 1.3; EXPRESSED IN HBL100, SIGNAL = 1.8; EST_HUMAN HIT: BF700490.1, EVALUE 0.00e+00; SWISSPROT HIT: Q28279, EVALUE 5.00e-03; NT HIT: AF084479.1, EVALUE 0.00e+00
tactaagaggaagaatactggatccccagacaggaagccctcaaagaaatccaagacagacaactcttctcttagttcaccactaaatcctaagttatggtgtcacgtacacttgaagaagtcattgagtggctcgccactcaaagtgaagaactcaaagaattccaaatctcctgaagaacatctagaagaaatgatgaagatgatgtcgcccaataagctgcacactaactttcacattcctaaaaaaggcccacctgccaagaaaccagggaagcacagtgacaagcctttgaaggcaaagggcagaagcaaaggcatcctgaatggacagaaatccacagggaattccaaatctcccaaaaaaggactgaagactcctaaaaccaaaatgaagcagatgactttgttggatatggccaaaggcacgcagaagatgacacgagccccacggaattctgggggtacacctaggacctctagtaaacctcataaacatctgcctcctgcagccctacacctcattgcatactacaaagaaaacaaagacagggaggacaagaggagcgccctgtcctgtgttatctccaaaacagctcgtcttctctctagtgaagatagagctcgtctcccagaagaattgcgaagtcttgttcaaaaacgctatgaacttctagagcacaaaaagaggtgggcttctatgtctgaagaacaacggaaagaatatttgaaaaagaaacgggaggagctgaaaaagaagttgaaggaaaaagccaaagaacgaagagagaaagaaatgcttgagagattagaaaaacagaagcggtatgaggaccaagagttaactggcaaaaaccttccagcattcagattggtggatacccctgaagggctgcccaacacgctgtttggggatgtggccatggtggtggaattcttgagctgttattctgggctacttttaccagatgctcagtatcctattactgctgtgtcccttatggaagccttgagtgcagataagggtggctttttataccttaacagggtgttggtcatcctcttacagaccctcctacaagatgagatagcagaagactatggtgaattgggaatgaagctgtcggaaatccccttgactctgcattctgtttcagagctggtgcggctctgcttgcgcagatctgatgttcaggaggaaagcgagggctcagacacagatgacaataaagattcagctgcatttgaggataatgaggtacaagatgagttcctagaaaagctggagacctctgaattttttgagctgacgtcagaggagaagctacagatcttgacagcactgtgccaccggatcctcatgacatactcagtgcaagaccacatggagaccagacagcagatgtctgcagagttgtggaaggaacggcttgctgtgttgaaggaagaaaatgataagaagagagcagagaaacagaaacggaaagaaatggaagccaaaaataaagaaaatggaaaagttgagaatgggttaggcaaaactgataggaaaaaagaaattgtgaagtttgagccccaagtagatacagaagctgaagacatgattagtgctgtgaagagcagaaggttgcttgccattcaagctaagaaggaacgggaaatccaggaaagagaaatgaaag

SEQ ID NO: 21479 - DNA, 970 bp, Homo sapiens
  MAP TO AC002086.1; EXPRESSED IN PLACENTA, SIGNAL =   1; EXPRESSED IN HBL100, SIGNAL = 1.5; EXPRESSED IN HEART, SIGNAL = 1.5; EXPRESSED IN FETAL LIVER, SIGNAL = 1.4; EXPRESSED IN BONE MARROW, SIGNAL = 1.3; EXPRESSED IN HELA, SIGNAL = 1.8; EXPRESSED IN BT474, SIGNAL = 2.1; EXPRESSED IN ADULT LIVER, SIGNAL =   1; EXPRESSED IN BRAIN, SIGNAL =   2; EXPRESSED IN LUNG, SIGNAL = 1.6; NT HIT: gi11422608, EVALUE 0.00e+00; EST_HUMAN HIT: AI762551.1, EVALUE 0.00e+00; SWISSPROT HIT: Q9ULJ3, EVALUE 4.00e-16
gaaaactgatttctgctacagacattcagtactctggcagtctgctgaactccttgaatgagcaacgtggccatggactcttctgtgatgttaccgttattgtggaagaccgaaaattccgggctcacaagaatattctttcagcttctagtacctacttccatcagctcttctctgttgctgggcaagttgttgaactgagctttataagagcagagatctttgcagaaattctcaattatatctatagttctaaaattgttcgtgttagatcagatttgcttgatgagttaattaaatcagggcagttattaggagtgaaatttatagcagagcttggtgtcccattgtcacaggttaaaagcatctcaggtacagcgcaggatggtaatactgagcctttacctcctgattctggtgacaagaaccttgtaatacagaaatcaaaagatgaagcccaagataatggggctactataatgcctattataacagagtctttttcattatctgccgaagattatgaaatgaaaaagatcattgttaccgattctgatgatgatgatgatgatgtcattttttgctccgagattctgcccacaaaggagactttgccgagtaataacacagtggcacaggtccaatctaacccaggccctgttgctatttcagatgttgcacctagtgctagcaataactcgccccctttaacaaatatcacacctactcagaaacttcctactcctgtgaatcaggcaactttgagccaaacacaaggaagtgaaaaattgttggtatcttcagctccaacacatctgactcccaatattattttgttaaatcagacaccactttctacaccaccaaatgtcagttcttcacttccaaatcatatgccctcttcaatcaatttacttgtgcagaatcagcagacaccaaacagtgctattttaacaggaaacaaggccaa

SEQ ID NO: 21480 - DNA, 577 bp, Homo sapiens
  MAP TO AC002368.1; EXPRESSED IN LUNG, SIGNAL = 5.2; EXPRESSED IN PLACENTA, SIGNAL = 4.5; EXPRESSED IN BRAIN, SIGNAL =   3; EXPRESSED IN BONE MARROW, SIGNAL =   3; EXPRESSED IN HEART, SIGNAL = 3.5; EXPRESSED IN HELA, SIGNAL = 5.3; EXPRESSED IN HBL100, SIGNAL = 4.2; EXPRESSED IN ADULT LIVER, SIGNAL = 1.8; EXPRESSED IN FETAL LIVER, SIGNAL = 4.7; EXPRESSED IN BT474, SIGNAL = 4.5; SWISSPROT HIT: P51816, EVALUE 1.00e-111; NT HIT: gi11421644, EVALUE 0.00e+00; EST_HUMAN HIT: BF349746.1, EVALUE 3.50e-02
acaaacaaaggtgatgcacttgccaaccgagtccagaacacgcttggaaactatgatgaaatgaagaatttgctaactaaccattctaatcagaatcacctagtgggaattccaaagaattctgtgccccagaatcccaacaacaaaaatgaaccaagcttttttccagaacaaaagaacagaataattccacctcaccaggataatacccatccttcagcaccaatgcctccaccttctgttgtgatactgaattcaactctaatacacagcaacagaaaatcaaaacctgagtggtcacgtgatagtcataaccctagcactgtactggcaagccaggccagtggtcagccaaacaagatgcagactttgacacaggaccagtctcaagccaaactggaagacttctttgtctacccagctgaacagccccagattggagaagttgaagagtcaaacccatctgcaaaggaagacagtaaccctaattctagtggagaagatgctttcaaagaaatctttcaatccaattcaccggaagaatctgaattcgccgtgcaagcgcctgggtctcccc

SEQ ID NO: 21481 - DNA, 76 bp, Homo sapiens
  MAP TO AL121959.4; EXPRESSED IN BT474, SIGNAL = 1.8; EXPRESSED IN FETAL LIVER, SIGNAL = 2.2; EXPRESSED IN BRAIN, SIGNAL = 1.8; EXPRESSED IN BONE MARROW, SIGNAL = 1.8; EXPRESSED IN ADULT LIVER, SIGNAL = 2.8; EXPRESSED IN LUNG, SIGNAL = 2.4; EXPRESSED IN PLACENTA, SIGNAL = 2.2; EXPRESSED IN HEART, SIGNAL = 2.1; EXPRESSED IN HELA, SIGNAL = 1.7; EXPRESSED IN HBL100, SIGNAL = 1.9; NT HIT: gi11426088, EVALUE 2.00e-03; EST_HUMAN HIT: AU141000.1, EVALUE 2.30e-01
ccccagctgtgcctcctctgttgcagctggcatcatggaagttgctgctccagatgggcccctgctgctatcaaaa

SEQ ID NO: 21482 - DNA, 325 bp, Homo sapiens
  MAP TO AC012271.1; EXPRESSED IN HBL100, SIGNAL =  14; EXPRESSED IN HELA, SIGNAL =  17; EXPRESSED IN HEART, SIGNAL =  62; EXPRESSED IN BONE MARROW, SIGNAL =  13; EXPRESSED IN LUNG, SIGNAL =  28; EXPRESSED IN PLACENTA, SIGNAL = 9.9; EXPRESSED IN ADULT LIVER, SIGNAL = 3.1; EXPRESSED IN FETAL LIVER, SIGNAL =  12; EXPRESSED IN BT474, SIGNAL =  27; EXPRESSED IN BRAIN, SIGNAL =  14; NT HIT: J00071.1, EVALUE 0.00e+00; EST_HUMAN HIT: C03012.1, EVALUE 0.00e+00; SWISSPROT HIT: O15998, EVALUE 9.00e-60
ggagttatggtgggtatgggtcagaaggactcctacgtaggtgatgaagcccagagcaagagaggcatcctgaccctgaagtatcccatcgagcatggtatcatcaccaactgggacgacatggagaagatctggcaccacaccttctacaatgagctccgtgtggctcccgaggagcaccccaccctgctcacagaggccccgctgaaccccaaggccaaccgggagaagatgactcagatcatgtttgagaccttcaatgtccctgccatgtacgtggccatccaggcagtgctatccctgtatgcttctggccgtaccacag

SEQ ID NO: 21483 - DNA, 1870 bp, Homo sapiens
  MAP TO AC003002.1; EXPRESSED IN BT474, SIGNAL = 1.4; EXPRESSED IN FETAL LIVER, SIGNAL = 1.2; EXPRESSED IN BONE MARROW, SIGNAL = 1.4; EXPRESSED IN LUNG, SIGNAL = 1.5; EXPRESSED IN BRAIN, SIGNAL =   1; EXPRESSED IN HELA, SIGNAL =   1; EXPRESSED IN PLACENTA, SIGNAL =   1; EXPRESSED IN HEART, SIGNAL = 1.4; SWISSPROT HIT: P52740, EVALUE 0.00e+00; EST_HUMAN HIT: BE799352.1, EVALUE 6.00e-28; NT HIT: gi11426556, EVALUE 0.00e+00
gtttttggtgtgaagcagaacatgaggcaccttctgagcagagcgtttctgtagaaggagtgtcacaggtcaggactgctgagtcaggtcttttccagaaagcacacccatgtgagatgtgtgacccactcttgaaagacattttgcacctggctgaacaccagggatcacaccttacacagaaactgtgcacacgtgggccgtgtaggagaagattctcgttcagtgcaaacttttaccagcaccagaagcaacataatggagagaattgcttcagaggggatgatggaggggcctcatttgtgaagagctgtacagtccacatgttagggagatcctttacgtgcagggaggaagggatggacttaccagatagctctggccttttccagcaccagaccacttacaatagggtgagtccatgcagaaggactgaatgcatggagtctttcccacacagctccagtctcaggcaacaccaaggagactatgatggacagatgcttttcagttgcggtgatgaagggaaagccttcctggacacctttactcttcttgacagccagatgactcatgctgaggtgagacccttcagatgcctaccatgtggaaatgtgttcaaggagaaatcagctcttattaatcacagaaaaatccacagtggagaaatatctcatgtgtgtaaggagtgtggaaaagccttcattcacttgcaccacctaaaaatgcaccagaaatttcacactggaaaaagacactatacatgcagtgaatgtgggaaggccttcagccgcaaggacacacttgttcagcatcagagagttcacactggagaaagatcttatgactgcagtgaatgtggaaaagcctacagcagaagctcccaccttgttcagcaccagagaattcacacaggagaaaggccttataagtgcaacgaatgtgggaaagcctttagccgtaaagacacacttgttcagcaccagagatttcatactggagaaaggccttatgagtgcagtgaatgtggaaaattctttagccaaagctcccaccttattgagcactggagaattcataccggggcaaggccctatgaatgcatagaatgtggaaaattctttagccataactctagcctcattaaacatcggagagtccacacaggagcaagatcctacgtgtgcagcaaatgtgggaaggcctttggctgcaaagacacacttgttcagcaccagataattcacactggagcaaggccttatgagtgcagtgaatgtgggaaggccttcagccgtaaagacacacttgtgcaacaccaaaaaatccacactggagaaaggccttatgagtgtggtgaatgtggtaaattcttcagccatagctccaaccttattgtacaccagagaattcacactggagcaaagccttatgagtgcaatgaatgtgggaaatgctttagccacaactccagcctcattttgcaccagagagttcacacaggagcaaggccttatgtgtgcagtgaatgtgggaaggcttacattagtagctcccaccttgttcaacacaagaaagttcacactggagcaagaccttatgagtgcagtgaatgtgggaaattctttagccgcaactctggcctcattctgcaccagagggttcacactggagaaaagccttacgtatgcagcgaatgtgggaaagcctatagcagaagctcccatcttgttcgtcaccagaaagctcacactggagaaagagctcacgagtgcaacagttttggtggccctttagctgcatctcttaaacttgtttaacaccagaaaattcacacaagagaaaggccttatgaatgcagaaaatatgt

SEQ ID NO: 21484 - DNA, 887 bp, Homo sapiens
  MAP TO AC005414.2; EXPRESSED IN PLACENTA, SIGNAL = 5.5; EXPRESSED IN HBL100, SIGNAL = 6.2; EXPRESSED IN HEART, SIGNAL = 7.1; EXPRESSED IN FETAL LIVER, SIGNAL = 6.1; EXPRESSED IN BONE MARROW, SIGNAL = 5.5; EXPRESSED IN HELA, SIGNAL = 8.2; EXPRESSED IN BT474, SIGNAL = 7.7; EXPRESSED IN ADULT LIVER, SIGNAL = 3.2; EXPRESSED IN BRAIN, SIGNAL = 7.9; EXPRESSED IN LUNG, SIGNAL =  11; EST_HUMAN HIT: BE787945.1, EVALUE 3.00e-03; NT HIT: S65019.1, EVALUE 1.20e-01
gactgttgctaatggcagctatggtggaggtgatgatggtggagataggggaggtggaaatggtggtaatggtgatgatgggggaggtggtgttggtggtggcaatgatggtaatggtagaggtagtttggatggtggtaatggggatggtggtaatggtgatagtggagatggtagaggtggtgatggtggtggtggggatggtgatgatggtggtggtggtaatggtggtggtaatgatggtggtgatgatggtggtgatggtggtggtaatggtggtggcggtggtgatgatggtgatagtagaggtagtagagatggtagtggtggtggcagtggagtggtggtggtggtgatggttgggatggtggtgataatgatggtgatgatggtggtggtggtggtaatggtagcggtatgatggtagtggtggtgagggtggtggtggtaatgatggtggtgatgatggtagtgatggtggtaatggtggtggcagtggtgatgatagtgatagtagaggtagtagtagggatggtggtaatggtgatagtggggatggtagtggtggtggtggtggggatggtgggataatgacggcgatggtgatggtggtggtggtggtggttgtgatggtggggatggtgatgataatgatggtgatggtggtggtggtaatgatagtggtaatgatggtggtggtggtggtggtggttgtggtgatggtggggatggtgatgataatgatgatggtggtggtaatgatggtggtggtggtgatggtggtcatggtagtcatggtggtggtggtgatggcggaaggaggtgatgttggaggtggacatggcaggcagatggggattgagaagtccagagcagggtggccactg

SEQ ID NO: 21485 - DNA, 875 bp, Homo sapiens
  MAP TO AC005538.2; EXPRESSED IN BONE MARROW, SIGNAL = 1.7; EXPRESSED IN LUNG, SIGNAL = 1.1; EXPRESSED IN HBL100, SIGNAL = 2.3; EXPRESSED IN HELA, SIGNAL = 1.9; EXPRESSED IN HEART, SIGNAL = 0.97; EXPRESSED IN BT474, SIGNAL = 1.3; EXPRESSED IN FETAL LIVER, SIGNAL = 1.7; EXPRESSED IN ADULT LIVER, SIGNAL = 0.98; NT HIT: gi11430857, EVALUE 0.00e+00; EST_HUMAN HIT: BE869162.1, EVALUE 0.00e+00; SWISSPROT HIT: P10387, EVALUE 4.80e+00
gagattgaaatccgatttgatcagcttcatcgggaatattgcctgagtcccaggaaccagcctcgccggatgtgcctcccggactcctgggccatgaacatgtacagagggggtcctgcgagtcctggtggccttcagggcttagaaacccgcaggctgagtttaccttccagcaaagcaaaagcaaaaagtttaagtgaggcttttgaaaacctaggcaaaagatctctggaagcaggtaggtgcctgcccaagagcgattcatcttcatcacttccaaagaccaaccccacacacagcgcaactcgcccgcagcagacatctgaccttcacgttcagggaaatagttctggaatatttagaaagtcagtgtcacccagcaaaactctttcagtcccagataaagaagtgccaggccacggaaggaatcgttacgatgaaattaaagaagaatttgacaagcttcatcaaaagtattgcctcaaatctcctgggcagatgacagtgcctttatgtattggagtgtctacagataaagcaagtatggaagttcgatatcaaacagaaggcttcttaggaaaattaaatccagaccctcacttccagggtttccagaagttgccatcatcacccctggggtgcagaaaaagtctactgggctcaactgcaattgaggctccttcatctacatgtgttgctcgtgccatcacgagggatggcacgagggaccatcagttccctgcaaaaagacccaggctatcagaaccccagggctccggacgccagggcaattccctgggtgcctcagatggggtggacaacaccgtcagaccgggagaccagggcagctcttcacagcccaactcagaagagag

SEQ ID NO: 21486 - DNA, 696 bp, Homo sapiens
  MAP TO AC003958.1; EXPRESSED IN BT474, SIGNAL = 1.7; EXPRESSED IN FETAL LIVER, SIGNAL = 1.9; EXPRESSED IN ADULT LIVER, SIGNAL = 1.3; EXPRESSED IN BONE MARROW, SIGNAL =   2; EXPRESSED IN LUNG, SIGNAL = 1.5; EXPRESSED IN BRAIN, SIGNAL = 1.6; EXPRESSED IN PLACENTA, SIGNAL =   2; EXPRESSED IN HBL100, SIGNAL = 1.3; EXPRESSED IN HELA, SIGNAL = 1.5; EXPRESSED IN HEART, SIGNAL = 2.2; NT HIT: L33886.1, EVALUE 9.60e-02; EST_HUMAN HIT: AI907096.1, EVALUE 1.00e-116; SWISSPROT HIT: P08131, EVALUE 9.00e-16
gctgctgccagcctgtaggctctgaagccacttcctgccaaccagtcctctgtgtgcccacttcctgccagcctgtcctctgcaaatccagctgctgccagccagttgtctgtgagcccagctgctgttcagctgtctgcaccctgcctagttcctgccaacctgtggtctgtgagccttcctgctgtcagccggtgtgcccgacacctacctgctctgtgaccagtagctgccaggctgtctgctgtgaccccagcccttgtgagccaagttgctcagagtctagcatctgccagccagctacgtgtgtggctctggtctgtgagccagtttgcctccgccctgtctgctgtgttcagagctcgtgcgagccaccttctgtccccagcacttgccaagagccttcttgttgtgtctccagtatctgccaacccatctgctctgagcccagcccctgctcaccagctgtctgtgtgtccagtccatgccaacctacttgctatgtagtcaagcgctgtccttctgtctgccctgagccagtttcctgcccatctacctcctgccgacctctttcctgcagtccagggtcttctgcatctgccatctgccgaccaacttgtcctaggactttctacatacccagttccagcaaacggccttgcagtgctacgatttcctaccgcccggtctcccgtc

SEQ ID NO: 21487 - DNA, 393 bp, Homo sapiens
  MAP TO AL078475.2; EXPRESSED IN HEART, SIGNAL = 0.8; NT HIT: AL163203.2, EVALUE 0.00e+00; EST_HUMAN HIT: BE968588.1, EVALUE 2.00e-27
tactctgacattatccagggatgtcttcattataggaattacactgcattcaattgcacacatggtgatccttgtgtccaggcatgagaggcaatctcagcaccttcacagcatcagcatctctccacaagccttcccagagaaaagggctgctcagaccatcccgctgttagtgagctactgtctggtcatgtgctgggtggacctcatcatctcatcttcttcaaccctgctgtggacgtgtaacccagtcttcctgagtatgcagaaccttgtgggcgatgtctacgccactgttgttccactggaacaaatcagctctgataaaaatatagttgacattctccaaaatatgcaaagtgctataaagctttaacaagttggcgacggaaa

SEQ ID NO: 21488 - DNA, 96 bp, Homo sapiens
  MAP TO AP000134.1; EXPRESSED IN ADULT LIVER, SIGNAL = 0.7; EXPRESSED IN PLACENTA, SIGNAL = 0.62; EXPRESSED IN LUNG, SIGNAL = 0.65; EXPRESSED IN HEART, SIGNAL = 0.83; EST_HUMAN HIT: BF346476.1, EVALUE 1.20e+00; NT HIT: gi11419273, EVALUE 8.00e-01; SWISSPROT HIT: P52920, EVALUE 3.10e+00
tgcccccagatgacgcggtggctttctggggctcattattacccctgcagagtgggcagaggaaaccaagagcaggaactaggattgatggattga

SEQ ID NO: 21489 - DNA, 132 bp, Homo sapiens
  MAP TO AL050324.5; EXPRESSED IN LUNG, SIGNAL = 0.65; EXPRESSED IN HEART, SIGNAL = 0.89; NT HIT: AB011070.1, EVALUE 2.50e-01
tcatgccgcctggtgaagctctgcctgttttatgatctgacgtcccagatcttcatctttattttgtttctcttggagatatgcttgatatttcatgctgtagagaaaatagtaaaaaaaaaaagtgttagt

SEQ ID NO: 21490 - DNA, 120 bp, Homo sapiens
  MAP TO AF001550.1; EXPRESSED IN HBL100, SIGNAL = 9.1; EXPRESSED IN HEART, SIGNAL = 7.6; EXPRESSED IN FETAL LIVER, SIGNAL =  11; EXPRESSED IN ADULT LIVER, SIGNAL =  11; EXPRESSED IN LUNG, SIGNAL =  10; EXPRESSED IN BRAIN, SIGNAL = 8.1; EXPRESSED IN PLACENTA, SIGNAL = 9.6; EXPRESSED IN HELA, SIGNAL = 9.5; EXPRESSED IN BT474, SIGNAL = 9.2; EXPRESSED IN BONE MARROW, SIGNAL = 9.2; SWISSPROT HIT: P40342, EVALUE 9.30e+00; NT HIT: X95955.1, EVALUE 8.90e-01; EST_HUMAN HIT: AW298181.1, EVALUE 1.00e-61
cagcctgagcatcatggggttcaccgtgtgcagatgctcctcgttccacttcttggcgctcctgtagacactgtgccagggcacaggggcccggatcactctttgaggaaacaagcgggg

SEQ ID NO: 21491 - DNA, 4778 bp, Homo sapiens
  MAP TO AC000119.1; EXPRESSED IN BT474, SIGNAL = 8.8; EXPRESSED IN FETAL LIVER, SIGNAL = 5.1; EXPRESSED IN ADULT LIVER, SIGNAL = 1.8; EXPRESSED IN LUNG, SIGNAL = 3.5; EXPRESSED IN PLACENTA, SIGNAL = 3.4; EXPRESSED IN BRAIN, SIGNAL = 5.7; EXPRESSED IN BONE MARROW, SIGNAL = 4.6; EXPRESSED IN HEART, SIGNAL = 7.8; EXPRESSED IN HELA, SIGNAL = 5.8; EXPRESSED IN HBL100, SIGNAL = 7.7; SWISSPROT HIT: P50495, EVALUE 2.10e-02; EST_HUMAN HIT: BE888763.1, EVALUE 0.00e+00; NT HIT: gi11422201, EVALUE 0.00e+00
ttaaacaatttcaatgtcataagcaagtgggcctccaatggaaaatcccaggtaaaaagacaccttctctatgcttctgccacttctaagttgacctaaaaaagcgggagtgatgggtattgtgattttttcattgattccatattctatatataaacaattgttttcagctcgaccttgtaaacgaagcaaaagttcttggactttttcctccttccacacatctccactctgccacaaggaattaatatctggtgtcttcttaaagcactggtcaatttttcctttgtgaacaagtctttccagtcttttaccttttccaagaaagaaatatgcaattggttgctttgtacgatgcatatgtttatattgccccttgaaagaattttttagtgcttgagcatactctttcatttgttcagaatgttgatctagttgttgattttctggccagaataagagggaagctagaaaatacggttctgaaaactgataagtcagtcctattggttgcaagacttctcgaagctgatcttttagtttttcaactggctttactaatctggaggtaggttggatacaggagagaataatgttggccaagatgaaatttagcttttcttttgactggattttgacagtgcattgttctaagagaaaagtatattcgttcactatacatttcatagtgcttatagcatcctcttgacttttgataagatattccaagagcccagaaaacttgtctgcttttaaagctactaggtttctcctgcatctctctacttgaagtggctcactgaactttgatccaagacctgtgttgttttgtgattcttctaagagacaaaatatatctacatatttcttaaaatatccagccacctttctccgagttttggcctcttcattttgcttaatattgttcctgggttttagcaggacaaagtattcatcaaaaaaatcaaaggactttttcaaagaaaatttcaatttagttaaataaggaatatagtttttgagggctaatttatattcattgtttggatcccctggaatatcactacttcctgatacaaaattgaccatatatcttttagatagctcatttttattatcaaaaaaaggaatgagctggagaatttggattgtgtaaagcccaacttctatctctccttgataaccagctatattgtaagtatcataccgcctttttgacttcggatacaatctttccttcacttcatactctctatcttcactttgctgttgagattctttgaatgcacttgaggcatgttctgctaaatccaaaagagcaattagatcatcaactgaaatgttcccgtttcctccgttttcctctatccaccatcttattttacttttgtagacttgacccagtgtatctgagatataagaattgtcaggttctatgatttttgcttgttttgcccagtttagagcattgccaaagtccttctttttaatgtagaaatgtcttgccaacgcttggcaaatgaatgcatttgggttgaaccgatggatactttcaagcaatacagcttcaactgcttcatttccttcatctttatgtaatgcttcaataaatggggaaaaccaatttcctgtttcaccttcatgttcatcgcggtgtcttgtgagtaggagtgtgtgcatatcttgcaaaaatttactttttcccataccagtatcgaagaacaaattctcagttagcatatccaacataatttgacttttattcaggtgatagcttttcttcaattcttccagtgagaactctgcaatcaaagagtgaatgatgcgtactccacagtagttcccacattcgatgacctctgtttttatcagaattgtagagtaggtgcccatcttgtcttcaaatttttctgtcccccagaaagccttcttgtttccaattcctaagaatttttcacactgtgatagtgaaatggtggtatcaggcacatatgaattaagaagagccagaaaagaaaagagctttgcttccttggtgaaaatattctgccctttcaggatattccggaccacattttctatgtattctttattaaaattggttttcatgatcataaaggaataaaaatcctcaaagtttttatgctgttctttgatttctttcaatttaagctcaaaagctctctgttctttgggagagagttgctgtattacggcaatactgtctgggatccttgcacttttttcaggattttgtgatctcatacaatttaggataatcaccagaggtttttcatatcgaatgtactttttagctatagctgtttgaatagagtactgcagaagatagacattatcttgttcttcaaaatcatcaacaaggagtagtacaggtacgtattcctgacggttcattgccccataggtgattaaactggttacctgttctccaatttcagaaaaatccactgtcttgtttttcagcacagcacatctgaatttcttccttagttcccagagaatgtgcatagccaaggtagttcccccacagcctggatgatgatacagatgaataattttggtacttgttggtttagaagaatctgcacagttttgaatcattgcttcaagtctttcatatttatcccttttgacaaaaggtgaagaataactttcagaagagaagtagaagttccaccatgacactttgccacctcgatagaagtcttcctcttttgatgccttgaattcaaggaatttatttttgtccttctctaacagtgtaccctcacattcattttcacagataatttccagagcagtcatgatatcttcttcctttttcagaaggacagtcgataaaccaatagatggcaaaagcctttttgaagattgagtcacagattttagtttaagaatagtgccattgatctcttcaaggcttaaagcagaaatacattggcttgaaatttcatcttggtgttttattaatcttgcttcaagtagatctttccatccctgaaatatgtgtgggtgcacacaaatacacagtatattttccattcctttgagatcctggtagaaagcacagaaagtctcaatgaggggatctcttgggtcatccacagaggacagtaatagaaataccaccaaaaacttccctcttggcattatgtcttcatgtgtaagaaatgaaatcagtttcctgacatcagaagctctttctctttgccaggaacttggatcaaagggtttatatttttcactgtcaaggtctaacctgccattgcagaaaatccagctgggttgatggtaaagatttagagtagaaatcgtctcatttggtgtggttttctgttctacatatacacttggaaagtgaaggtttgctactcggctttctttgtaagctttgaccactccattgatgttagactcaggatcaaactccaatacagcaaaccatttaatttccttcaggaaatctaagtgttttgtttgatctgggtggcatttatttgttacaagaatgtactgttcatagtatgaattatctaacaaatcttgatttcctgtcaataatttaaccaactttggtccctctctttcttttttatttgtttttgctctgaatttttcttctgctgcttttctggactctgccagtgttttaaaatctgctttaaatgctctgaaatcaactttatttttcgtaatgtccttagagctggtcccatctcgcacaaatagtgagaattttttactttgttcccatattttgttgttgtaattttgcattttaatctggaaataatcatattggcattcagagaactgtggaataatgtccacttcaataacaaatctgtcagatagagtactatttggcagtaaaacttccacaaatcttggctctcgaatgcacttctttgcttgttggacttgatggtcttcaaaatacttgtttatcatcagattgaaatggttaatgagggcttccttggtatcattggtgactttgatgccaacaattttcccatggggtttgtctttgactccaaaatgaatagtgccattggtacgtgaattcatacaagctgaagcaaatcggaaaacctcattgctaaatttcatcttgacatcctcttctgtggctgttgctgtatttgtgaaggctttgaattcatgtatcggatcaatgagattgcctggtcctgtttcaggctgtagactaaaatccaacttgtaacgatatggattactgaattcatcaaatggatatgatacacatgtcaggtctatggatggttgcctttcctttgtataatctattttatcttctatgagctcaacttttagtgacttagaacctttagcagttgtactcattgcagacggattagccatatctgggttctctttacccttttgtttttgctttgaagtttctctacgttccttttgagacacagtttggtctttaggagcatttttactgggctttcccatcttagatgtctgaatcgaatcttcaatggctgttttccgcaattctttgaatagttcttctatttgaatagctggtccatgtgtgatgcccatatcaacaagatgttctttttttaaccacttcaagactgctccattcacgtcttgttcagtcaaaatttccctgtgtttttggtcaatcttatgactttctaaccactgatttacatcctcttttgtccaatcatctgtattttctggaaggttaagttgctttgccattctgatac

SEQ ID NO: 21492 - DNA, 142 bp, Homo sapiens
  MAP TO AF001905.1; EXPRESSED IN BT474, SIGNAL = 2.6; EXPRESSED IN ADULT LIVER, SIGNAL = 2.7; EXPRESSED IN BRAIN, SIGNAL = 2.8; EXPRESSED IN BONE MARROW, SIGNAL = 2.3; EXPRESSED IN LUNG, SIGNAL =   3; EXPRESSED IN PLACENTA, SIGNAL = 2.7; EXPRESSED IN HBL100, SIGNAL = 2.8; EXPRESSED IN HELA, SIGNAL = 3.1; EXPRESSED IN HEART, SIGNAL = 2.7; EXPRESSED IN FETAL LIVER, SIGNAL = 3.1; SWISSPROT HIT: P52633, EVALUE 5.10e+00; NT HIT: M37522.1, EVALUE 3.00e-19; EST_HUMAN HIT: BE162737.1, EVALUE 1.00e-25
agcagcatgtggagactcaaatgatgaacttttgctccaagaattactacaggaacataccaggaaagctgagagaatccacagagcctttgaactggactacccctgcaggctctctgagatgccgaaaaactgtgagtca

SEQ ID NO: 21493 - DNA, 1225 bp, Homo sapiens
  MAP TO AL021808.1; EXPRESSED IN BT474, SIGNAL = 0.94; EXPRESSED IN ADULT LIVER, SIGNAL =   3; EXPRESSED IN BONE MARROW, SIGNAL = 1.2; EXPRESSED IN BRAIN, SIGNAL = 0.98; EXPRESSED IN HELA, SIGNAL = 0.96; EXPRESSED IN HEART, SIGNAL = 1.2; EXPRESSED IN FETAL LIVER, SIGNAL = 3.7; EST_HUMAN HIT: AI473677.1, EVALUE 4.60e+00; SWISSPROT HIT: P52591, EVALUE 7.00e-32
tccacgggagaggcaaccagtgtggcccattctcctttgaagacacccagcctaccgaccccacctgggtgctcacagtcagagctccttccaggcacctctccagactcaaagcccacagctactttcatcctgctgacccccacctctcccacattaccagttactgacaccacctggccgccttcaacctctcaggctgacaggtctcccatgcccccagacccacctgcaccacccaccatccaaagtactttgcttggaatggtgagtagcccaacatcccatctttctgcatctgcacctcctgatgcaacttctgctcacctcatgttaaaaccgattttggggcccctgcacaacagcgagattggaagctcctcatattccagaatttcagtcacagctgcagcatcttcaatctcttccctttccacaattcagggtaccttaactcctaccttcaagcctatctttggcagcatagatccacttaaaactacgcccatgatagctcctttctcctccaagcagacccctcctccatttactcatgcttctacccatcatttccatggcctggtcaaggccacctctgtggtcatgtccaccaccctagccagcacatctaaagactctgtttttaagccacctttggattttggtgtagtgaatgtcaccagtgccgtaggcaacacttattctgtcccttccacttgcgacactttcctgcttgggactgctcaggccttcagggccgacttcaccccagccacaggattcattttcccaccacaccaccatcctacaattcctactgtgcatacagtcaccatgtttacccaggtcctttccagtgttgtacagatatcccctagaagcagcactgctaatttcaggggtatgggcagccctctgcctgcctctgccctagtatccacaaactggcttgcatcaacccccagcatctccaacctgactccagcaatcacaagtcccttgggatcaagctcaaggccacctttcccactatcccaaggagctaatccccagcctgcatttggtgccacaaatggacagaaacaagggccttcccagccagcccttatgccaagtgtcagtagttcttttctttttgggagctcagcagtggcattgccaacccccatgccaactccagctcagccagccttcattagtaccacacagtcagccttggggtgtt

SEQ ID NO: 21494 - DNA, 89 bp, Homo sapiens
  MAP TO AC012277.1; EXPRESSED IN FETAL LIVER, SIGNAL = 1.7; EXPRESSED IN BT474, SIGNAL = 1.1; EXPRESSED IN ADULT LIVER, SIGNAL = 1.4; EXPRESSED IN BRAIN, SIGNAL = 1.2; EXPRESSED IN BONE MARROW, SIGNAL = 1.4; EXPRESSED IN LUNG, SIGNAL = 1.4; EXPRESSED IN PLACENTA, SIGNAL = 1.5; EXPRESSED IN HBL100, SIGNAL = 1.3; EXPRESSED IN HELA, SIGNAL = 1.5; EXPRESSED IN HEART, SIGNAL = 1.5; EST_HUMAN HIT: BF528188.1, EVALUE 2.80e-01; NT HIT: Y10820.1, EVALUE 2.90e+00
atgaagtctacatccaagtggtgcatgcagaaaggaaacagtgactacgtaggatcatgccaggacgtgatgcatgtatcgaatgaagg

SEQ ID NO: 21495 - DNA, 758 bp, Homo sapiens
  MAP TO AL022344.1; EXPRESSED IN BRAIN, SIGNAL = 0.97; EXPRESSED IN HELA, SIGNAL =   1; EXPRESSED IN HBL100, SIGNAL = 2.7; EXPRESSED IN HEART, SIGNAL = 0.95; EXPRESSED IN BT474, SIGNAL = 1.3; NT HIT: gi7661979, EVALUE 0.00e+00; SWISSPROT HIT: P38190, EVALUE 9.00e+00; EST_HUMAN HIT: BE928084.1, EVALUE 0.00e+00
gctaatgatgccaaaggaggaaaaacaaatggacttgaacactggtcgaatgcgtcggaaagccattttcggagatgaagatgaatctggagatagtgatgatgaagaagatgatgaaatgtctgaagatgacgggttggaaaacggctctagtgatgaggaagcagaagaggaggaaaatgctgagatgactgatcagtatatggctgttaagggcatcaaacgacggaaacttgagttggaagaagacagtgaaatggatttgccagcatttgctgacagtgacgatgaccttgagaggagctcagcggaagaaggggaagcggaggaagctgatgaaagcagtgaagaagaggactgcactgcaggagagaagggcatttcaggatcaaaggctgctggagaaggtagtaaagcagggctgtcaccagctaattgccagagtgaccgtgtgaatctggagaagtctttgctgatgaagaaagcagctctccccactttcgattctgggcattgcacagctgaagaggtgtttgcatctgaagatgaatctgaagaaagctcctcactcagtgcagaggaagaagactcagaaaatgaagaggctattagaaaaaagctttcaaagccttctcaagtgagcagtggtcagaaactggggccacagaacttcattgatgagaccagtgatatagaaaatttactcaaagaggaagaagattacaaggaagaaaataatgattccaaagaaacgtcag

SEQ ID NO: 21496 - DNA, 330 bp, Homo sapiens
  MAP TO AE000662.1; EXPRESSED IN HEART, SIGNAL = 1.7; EXPRESSED IN FETAL LIVER, SIGNAL = 1.8; EXPRESSED IN BT474, SIGNAL = 1.6; EXPRESSED IN ADULT LIVER, SIGNAL = 1.7; EXPRESSED IN BRAIN, SIGNAL = 1.8; EXPRESSED IN BONE MARROW, SIGNAL = 1.7; EXPRESSED IN LUNG, SIGNAL = 1.9; EXPRESSED IN PLACENTA, SIGNAL = 1.3; EXPRESSED IN HBL100, SIGNAL = 1.9; EXPRESSED IN HELA, SIGNAL = 1.6; EST_HUMAN HIT: AW610209.1, EVALUE 0.00e+00; NT HIT: M94081.1, EVALUE 0.00e+00; SWISSPROT HIT: P01848, EVALUE 7.00e-48
atatccagaaccctgaccctgccgtgtaccagctgagagactctaaatccagtgacaagtctgtctgcctattcaccgattttgattctcaaacaaatgtgtcacaaagtaaggattctgatgtgtatatcacagacaaaactgtgctagacatgaggtctatggacttcaagagcaacagtgctgtggcctggagcaacaaatctgactttgcatgtgcaaacgccttcaacaacagcattattccagaagacaccttcttccccagcccaggtaagggcagctttggtgccttcgcaggctgtttccttgcttcaggaatggccaggt

SEQ ID NO: 21497 - DNA, 149 bp, Homo sapiens
  MAP TO AF001549.1; EXPRESSED IN BONE MARROW, SIGNAL = 3.6; EXPRESSED IN HBL100, SIGNAL = 5.6; EXPRESSED IN HELA, SIGNAL = 3.2; EXPRESSED IN HEART, SIGNAL = 2.5; EXPRESSED IN FETAL LIVER, SIGNAL = 3.3; EXPRESSED IN BT474, SIGNAL = 3.5; EXPRESSED IN LUNG, SIGNAL = 4.2; EXPRESSED IN BRAIN, SIGNAL =   8; EXPRESSED IN PLACENTA, SIGNAL = 1.6; EST_HUMAN HIT: BE000837.1, EVALUE 9.00e-79; SWISSPROT HIT: Q13061, EVALUE 3.00e+00; NT HIT: D86974.1, EVALUE 1.00e-74
gaaataaaattgtcctgaaagacgtcattactctacggagacatgtggaaacaaaagttagagctaaaatccgtaagaggaaggtgacaacgaaaatcaaccatcatgacaaaatcaatggaaagaggaagaccgccagaaaacagtaa

SEQ ID NO: 21498 - DNA, 363 bp, Homo sapiens
  MAP TO AF030876.1; EXPRESSED IN BONE MARROW, SIGNAL = 1.5; EXPRESSED IN HBL100, SIGNAL = 1.8; EXPRESSED IN HELA, SIGNAL = 1.7; EXPRESSED IN HEART, SIGNAL = 1.7; EXPRESSED IN FETAL LIVER, SIGNAL = 1.8; EXPRESSED IN ADULT LIVER, SIGNAL = 1.7; EXPRESSED IN BRAIN, SIGNAL = 1.4; EXPRESSED IN PLACENTA, SIGNAL = 1.3; EXPRESSED IN BT474, SIGNAL = 1.1; EXPRESSED IN LUNG, SIGNAL =   2; EST_HUMAN HIT: BE903173.1, EVALUE 0.00e+00; NT HIT: X94628.1, EVALUE 0.00e+00; SWISSPROT HIT: P51608, EVALUE 5.00e-35
ttgatcaaatacacatcatacttcccagcagagcggccagatttcctttgcttaagcttccgtgtccagccttcaggcagggtggggtcatcatacatgggtccccggtcacggatgatggagcgccgctgtttgggggaggcagaagcttccggcacagccggggcggagcctgacccttctgatgtctctgctttgcctgcctctgcgggctcagcagagtggtgggctgatggctgcacgggctcatgcttgccctctttctcttctttcttatctttcttcacctttttaaacttgaggggtttgtccttgaggccctggaggtcctggtcttctgacttttcttccctgaagtgttaa

SEQ ID NO: 21499 - DNA, 123 bp, Homo sapiens
  MAP TO AF111167.2; EXPRESSED IN PLACENTA, SIGNAL = 1.3; EXPRESSED IN HELA, SIGNAL = 1.1; EXPRESSED IN ADULT LIVER, SIGNAL = 1.5; EXPRESSED IN LUNG, SIGNAL = 1.2; EXPRESSED IN BRAIN, SIGNAL =   1; EXPRESSED IN HEART, SIGNAL = 1.1; EXPRESSED IN BT474, SIGNAL = 1.4; EXPRESSED IN FETAL LIVER, SIGNAL = 1.2; EXPRESSED IN BONE MARROW, SIGNAL = 0.95; EXPRESSED IN HBL100, SIGNAL = 1.2; EST_HUMAN HIT: AA477725.1, EVALUE 2.60e-02; NT HIT: AF111167.2, EVALUE 2.00e-63; SWISSPROT HIT: Q44144, EVALUE 6.80e+00
aggcccaggattctttctactactctgggactcaagcagatacatggcttctgttcttgaggaaattgagaatgtagaaggatgcaaacattctagacataaacacgaacccactcacccaaa

SEQ ID NO: 21500 - DNA, 224 bp, Homo sapiens
  MAP TO AF042484.1; EXPRESSED IN BONE MARROW, SIGNAL = 2.9; EXPRESSED IN HBL100, SIGNAL =   3; EXPRESSED IN PLACENTA, SIGNAL = 2.6; EXPRESSED IN HELA, SIGNAL =   4; EXPRESSED IN FETAL LIVER, SIGNAL = 3.5; EXPRESSED IN ADULT LIVER, SIGNAL = 3.1; EXPRESSED IN LUNG, SIGNAL = 3.1; EXPRESSED IN BRAIN, SIGNAL = 2.7; EXPRESSED IN HEART, SIGNAL = 3.1; EXPRESSED IN BT474, SIGNAL = 2.7; SWISSPROT HIT: Q00323, EVALUE 4.50e+00; NT HIT: U91328.1, EVALUE 2.00e-22; EST_HUMAN HIT: BF183195.1, EVALUE 8.00e-35
gtgtcagaggccttccaaccagagcgactccatcttgaatacgggctgggtaaaacagggctgagacctactgggctgcattcccaggaggctaagcattctaagtcacaggatgagacaggaggtcagcacaagaccttgctgataaaacaggttgtaataaagaagccagccaaaacccaccaaaaccaagatggccatgagagttatctgtggttggtctc

SEQ ID NO: 21501 - DNA, 263 bp, Homo sapiens
  MAP TO AC007336.2; EXPRESSED IN HEART, SIGNAL = 1.1; EXPRESSED IN PLACENTA, SIGNAL = 1.5; EXPRESSED IN LUNG, SIGNAL =   2; SWISSPROT HIT: P33436, EVALUE 2.00e-43; EST_HUMAN HIT: AU133104.1, EVALUE 1.00e-125; NT HIT: M55582.1, EVALUE 0.00e+00
caatacctgaacaccttctatggctgccccaaggagagctgcaacctgtttgtgctgaaggacacactaaagaagatgcagaagttctttggactgccccagacaggtgatcttgaccagaataccatcgagaccatgcggaagccacgctgcggcaacccagatgtggccaactacaacttcttccctcgcaagcccaagtgggacaagaaccagatcacatacaggtgccggggcagggcttggggaggcagggccatggg

SEQ ID NO: 21502 - DNA, 245 bp, Homo sapiens
  MAP TO AF121897.1; EXPRESSED IN PLACENTA, SIGNAL = 2.5; EXPRESSED IN HELA, SIGNAL = 3.1; EXPRESSED IN HEART, SIGNAL = 3.2; EXPRESSED IN ADULT LIVER, SIGNAL = 2.3; EXPRESSED IN BT474, SIGNAL = 2.2; EXPRESSED IN FETAL LIVER, SIGNAL = 2.8; EXPRESSED IN LUNG, SIGNAL = 2.7; EXPRESSED IN BONE MARROW, SIGNAL = 2.4; EXPRESSED IN BRAIN, SIGNAL =   3; EXPRESSED IN HBL100, SIGNAL =   2; SWISSPROT HIT: P17149, EVALUE 3.90e-01; EST_HUMAN HIT: AA928672.1, EVALUE 1.00e-39; NT HIT: AL163280.2, EVALUE 0.00e+00
atgagaactctgtcaggagatagtactaagcggatggtgctaaaccaccacaaaccaccccatgatccaatcacctccctccaggccccacctccaacactcaggatcacaattcaacatgagatttcggtggggacacagagccaaaccatatcagcagagaaggctctacccgttgagaccctgctttccaacactactcgtctctctccatttctgcattatactctatgctgcagccatag

SEQ ID NO: 21503 - DNA, 97 bp, Homo sapiens
  MAP TO AC005095.2; EXPRESSED IN HEART, SIGNAL =   1; EST_HUMAN HIT: AU135927.1, EVALUE 1.00e-22; NT HIT: gi10092626, EVALUE 7.00e-23; SWISSPROT HIT: P33750, EVALUE 1.80e+00
aggtcctgcaagaatgtgtaagagttttaaatgctaccaaactggaaggagtatttgcaaaaccatgcctggcttggctggatggtcacgagatgga

SEQ ID NO: 21504 - DNA, 133 bp, Homo sapiens
  MAP TO AC008070.2; EXPRESSED IN FETAL LIVER, SIGNAL =   2; EXPRESSED IN HEART, SIGNAL = 0.96; EST_HUMAN HIT: AW858844.1, EVALUE 7.60e-02; NT HIT: Z97336.1, EVALUE 4.60e+00
catttttctgagtgttcataatgacaactatatgttatattccagacagctaactcaagaaaggaaaaataactggagtccaacttattttactaaaaaggtgaaataaagtgtacttggtatgctttcacca

SEQ ID NO: 21505 - DNA, 114 bp, Homo sapiens
  MAP TO AC009478.1; EXPRESSED IN HBL100, SIGNAL =   4; EXPRESSED IN HEART, SIGNAL = 1.3; EST_HUMAN HIT: AW206700.1, EVALUE 1.50e+00
aaagctggtcttggtcaaagcatttactttactgagtctcagtttcttgttcacagaaatgaagtgaagaatgtttctcttattgatcttgccatggagaacaaatggaataag

SEQ ID NO: 21506 - DNA, 202 bp, Homo sapiens
  MAP TO AC008125.9; EXPRESSED IN HEART, SIGNAL = 0.99; NT HIT: AJ011628.1, EVALUE 4.80e-01; EST_HUMAN HIT: AI221303.1, EVALUE 4.50e-02; SWISSPROT HIT: P00451, EVALUE 1.30e+00
gtgtcaggcacttgatgcaggctgttggctgtgacatcaactgggatgttgaccagaacatctacacgaggctgaagcttttccacgtgttctgttagtgtgtgccttttgggcttcctcacagtatggagactgggctccaagaatgagtcctctaagagaacaaggagggagtgcatggcatttttatgaactagcctca

SEQ ID NO: 21507 - DNA, 155 bp, Homo sapiens
  MAP TO AF045555.1; EXPRESSED IN BT474, SIGNAL = 2.9; EXPRESSED IN LUNG, SIGNAL = 2.6; EXPRESSED IN BONE MARROW, SIGNAL = 3.2; EXPRESSED IN PLACENTA, SIGNAL = 2.9; EXPRESSED IN HBL100, SIGNAL = 2.8; EXPRESSED IN HELA, SIGNAL = 2.1; EXPRESSED IN ADULT LIVER, SIGNAL = 2.7; EXPRESSED IN FETAL LIVER, SIGNAL = 2.6; EXPRESSED IN BRAIN, SIGNAL = 2.8; EXPRESSED IN HEART, SIGNAL = 3.2; EST_HUMAN HIT: BE387054.1, EVALUE 3.00e-39; NT HIT: AF045555.1, EVALUE 2.00e-82; SWISSPROT HIT: P35250, EVALUE 3.00e-11
agcggttcctctgccaggacggggggaaggaggccaaccttgtaggcttcgtcaatgttggcattcacacagtgctggatcatctcctttaccagcagtgggtggggctcgtcacagacctggccaaagggaaaggaaaggcggtcaggggctag

SEQ ID NO: 21508 - DNA, 88 bp, Homo sapiens
  MAP TO AB020864.1; EXPRESSED IN BT474, SIGNAL =   1; EXPRESSED IN HELA, SIGNAL = 1.2; EXPRESSED IN HEART, SIGNAL = 1.2; EXPRESSED IN LUNG, SIGNAL = 2.2; EST_HUMAN HIT: BE742687.1, EVALUE 2.00e-42; SWISSPROT HIT: P04977, EVALUE 7.10e+00; NT HIT: AB033114.1, EVALUE 1.00e-42
ggcttcaaataaaaggatcctgaggaaccattctgaaatgctggttttggaggtttctcctcatatttgatgacagcggcattaccag

SEQ ID NO: 21509 - DNA, 123 bp, Homo sapiens
  MAP TO AL121587.4; EXPRESSED IN HEART, SIGNAL = 0.88; EXPRESSED IN LUNG, SIGNAL = 1.6; EXPRESSED IN BRAIN, SIGNAL =   1; EXPRESSED IN BONE MARROW, SIGNAL = 0.94; EXPRESSED IN FETAL LIVER, SIGNAL = 0.96; EST_HUMAN HIT: AV729916.1, EVALUE 1.00e-01; NT HIT: AL163282.2, EVALUE 4.30e+00
aaggacctagcaaatatcagcaaaattaaatctgttacccacattaaaaacatcatagtgcaatgtttttatttcaaagaaactttgagactcaaaaaagccattattattgttgtcattatt

SEQ ID NO: 21510 - DNA, 137 bp, Homo sapiens
  MAP TO AL031672.12; EXPRESSED IN BONE MARROW, SIGNAL = 2.9; EXPRESSED IN HELA, SIGNAL = 2.9; EXPRESSED IN HEART, SIGNAL = 2.6; EXPRESSED IN FETAL LIVER, SIGNAL = 3.2; EXPRESSED IN ADULT LIVER, SIGNAL = 3.8; EXPRESSED IN BRAIN, SIGNAL = 3.2; EXPRESSED IN LUNG, SIGNAL = 3.1; EXPRESSED IN PLACENTA, SIGNAL = 3.1; EXPRESSED IN HBL100, SIGNAL =   3; EXPRESSED IN BT474, SIGNAL = 3.1; EST_HUMAN HIT: BE563832.1, EVALUE 3.00e-42; NT HIT: AB023197.1, EVALUE 1.00e-46; SWISSPROT HIT: Q37894, EVALUE 6.70e+00
ctgacctgggcccttgacaacgagctcatgacagtggacagtgccgtccagcaggcagccctggcctgctaccaccaggagctgagctaccagcagtaagaggccacaggggactggggaacgtggcagtgtggctg

SEQ ID NO: 21511 - DNA, 139 bp, Homo sapiens
  MAP TO AL078459.8; EXPRESSED IN FETAL LIVER, SIGNAL =   1; EXPRESSED IN HEART, SIGNAL = 0.89; SWISSPROT HIT: P15215, EVALUE 1.70e+00; EST_HUMAN HIT: BE782830.1, EVALUE 3.00e-02; NT HIT: M96150.1, EVALUE 6.80e-02
aatgatgatgataatgatatttacattatctctttcatccaaagaacccttcagttcttttatcgcatttgccttgaaaatgtcccttcggagttgggaggggaaggtgttattaatctgttcttcaggaaagaaaata

SEQ ID NO: 21512 - DNA, 107 bp, Homo sapiens
  MAP TO AL034408.2; EXPRESSED IN BT474, SIGNAL = 1.5; EXPRESSED IN ADULT LIVER, SIGNAL =   2; EXPRESSED IN BONE MARROW, SIGNAL = 1.2; EXPRESSED IN LUNG, SIGNAL = 1.3; EXPRESSED IN BRAIN, SIGNAL = 1.1; EXPRESSED IN HELA, SIGNAL = 1.7; EXPRESSED IN PLACENTA, SIGNAL =   2; EXPRESSED IN HBL100, SIGNAL = 2.4; EXPRESSED IN HEART, SIGNAL = 1.7; EXPRESSED IN FETAL LIVER, SIGNAL = 1.8; NT HIT: Y09846.1, EVALUE 6.00e-54; SWISSPROT HIT: P98083, EVALUE 4.00e-10; EST_HUMAN HIT: BE731797.1, EVALUE 3.00e-29
caataagcccatgtggggctagctgcatcccaatgacaaagtcacgagacctggggtttcctacttggtttggtacatgggctgtgtggaggtcctgcagtcaatga

SEQ ID NO: 21513 - DNA, 236 bp, Homo sapiens
  MAP TO AL031407.3; EXPRESSED IN BONE MARROW, SIGNAL = 8.1; EXPRESSED IN HEART, SIGNAL = 6.7; EXPRESSED IN FETAL LIVER, SIGNAL = 6.6; EXPRESSED IN ADULT LIVER, SIGNAL = 8.3; EXPRESSED IN BT474, SIGNAL = 6.9; EXPRESSED IN LUNG, SIGNAL =   7; EXPRESSED IN PLACENTA, SIGNAL = 6.2; EXPRESSED IN HELA, SIGNAL = 7.3; EXPRESSED IN HBL100, SIGNAL = 6.6; EXPRESSED IN BRAIN, SIGNAL = 7.2; SWISSPROT HIT: O54951, EVALUE 1.40e+00; EST_HUMAN HIT: BE733142.1, EVALUE 1.40e-02; NT HIT: Z32774.1, EVALUE 1.20e-01
gaagccgggggctgctaacagccatgcctctccttcaggagaaaatgatgatggaggagagaaagaacaggagacaggacatggacatggaggtcctgggggcctggagagccgggttcatgggggcccggagcccactctgcccctgtctcttcagcagtttgattatgtgagccattttcctttttttgtgtcagctaactccagttgggtgtctgtgacttacaggcaaaggg

SEQ ID NO: 21514 - DNA, 427 bp, Homo sapiens; identical to SEQ ID NO: 19296
  MAP TO AL033520.9; EXPRESSED IN BRAIN, SIGNAL = 1.2; EXPRESSED IN BONE MARROW, SIGNAL = 1.2; EXPRESSED IN HELA, SIGNAL = 1.2; EXPRESSED IN PLACENTA, SIGNAL = 1.1; EXPRESSED IN HBL100, SIGNAL = 1.3; EXPRESSED IN HEART, SIGNAL = 0.99; EXPRESSED IN FETAL LIVER, SIGNAL = 0.95; EXPRESSED IN BT474, SIGNAL = 1.3; NT HIT: gi11418534, EVALUE 0.00e+00; EST_HUMAN HIT: AA310876.1, EVALUE 0.00e+00; SWISSPROT HIT: Q15544, EVALUE 7.00e-28

SEQ ID NO: 21515 - DNA, 117 bp, Homo sapiens
  MAP TO AC006546.9; EXPRESSED IN ADULT LIVER, SIGNAL = 0.72; EXPRESSED IN HEART, SIGNAL = 0.81; NT HIT: gi9633622, EVALUE 6.50e-02; EST_HUMAN HIT: R92309.1, EVALUE 1.00e+00
aataaagcacaggctgtgttgagaagaacagaggggaattgggcctttgatcctcttgtaatctgtgtgagaaagatcatggaacacctctgtgacattcaacaatactcatgccag

SEQ ID NO: 21516 - DNA, 159 bp, Homo sapiens
  MAP TO AC012140.1; EXPRESSED IN FETAL LIVER, SIGNAL = 0.96; EXPRESSED IN BONE MARROW, SIGNAL = 1.1; EXPRESSED IN BRAIN, SIGNAL = 0.96; EXPRESSED IN HELA, SIGNAL = 1.1; EXPRESSED IN PLACENTA, SIGNAL = 0.99; EXPRESSED IN HEART, SIGNAL = 1.1; EXPRESSED IN ADULT LIVER, SIGNAL = 1.1; EST_HUMAN HIT: BE734559.1, EVALUE 8.50e+00; NT HIT: gi5901979, EVALUE 9.00e-85; SWISSPROT HIT: O75031, EVALUE 1.00e-21
gatcttccaggagctcctgggctgcggtttgcaggcgggggttgcggctcttggacattgccaggatgcgttgcaggggcagggagctccggaactcagaggccgacttggagaagacttcaggttccagaaccacagactggacaagcctcagtacat

SEQ ID NO: 21517 - DNA, 143 bp, Homo sapiens
  MAP TO AC006560.8; EXPRESSED IN HELA, SIGNAL = 0.89; EXPRESSED IN PLACENTA, SIGNAL = 0.6; EXPRESSED IN FETAL LIVER, SIGNAL = 0.59; EXPRESSED IN ADULT LIVER, SIGNAL = 0.72; EXPRESSED IN HEART, SIGNAL = 0.78
tgctgttgctgatgatgattttaatgatgataatgatgttgatgatgatgatgatattgatgacaaggataatattgatgctgctgatgatttaatgatgatgttgatgatgatgatattgatgacaatgataatattgatgc

SEQ ID NO: 21518 - DNA, 108 bp, Homo sapiens
  MAP TO AF188031.1; EXPRESSED IN HEART, SIGNAL = 1.4; EXPRESSED IN BRAIN, SIGNAL =   1; EXPRESSED IN BONE MARROW, SIGNAL = 0.99; EXPRESSED IN BT474, SIGNAL = 1.2; NT HIT: gi11423305, EVALUE 2.00e-54; EST_HUMAN HIT: BF241946.1, EVALUE 3.40e-01; SWISSPROT HIT: Q9Z184, EVALUE 5.00e-15
caggattcttttgtaagggaaatcctgcagttccccattccttggggagtcaaagaccaccgggagggtcttgtgcggcgcctgaacgtagcccagctccatctcatc

SEQ ID NO: 21519 - DNA, 92 bp, Homo sapiens
  MAP TO AC007558.3; EXPRESSED IN BONE MARROW, SIGNAL = 1.4; EXPRESSED IN LUNG, SIGNAL =   2; EXPRESSED IN HEART, SIGNAL = 0.86; NT HIT: Z28330.1, EVALUE 1.60e-01; EST_HUMAN HIT: AA447295.1, EVALUE 2.00e-01
tttcttctccctgatatcatctgtgtgcacaacttttatttttcctccatatttttgaaagaagaggtaacatagtctatgaagtatttttc

SEQ ID NO: 21520 - DNA, 140 bp, Homo sapiens
  MAP TO AC007270.2; EXPRESSED IN FETAL LIVER, SIGNAL = 0.63; EXPRESSED IN HEART, SIGNAL = 0.81; EXPRESSED IN HELA, SIGNAL = 0.77; EXPRESSED IN PLACENTA, SIGNAL = 0.6; EXPRESSED IN LUNG, SIGNAL = 0.7; EST_HUMAN HIT: AW589572.1, EVALUE 1.90e+00; SWISSPROT HIT: P26992, EVALUE 6.90e+00; NT HIT: AJ131016.1, EVALUE 2.00e-05
ttacagaaactggaagtccaaagtcaagggaccacatttggagaggacctttttgctggtgaagtctctgtgcagagtcccaaggaggcacagggtatccatggtgagggggctgagcatgctaacgtacttgctcaggt

SEQ ID NO: 21521 - DNA, 111 bp, Homo sapiens
  MAP TO AL121587.4; EXPRESSED IN LUNG, SIGNAL = 2.7; EXPRESSED IN BONE MARROW, SIGNAL = 0.97; EXPRESSED IN FETAL LIVER, SIGNAL =   1; EXPRESSED IN ADULT LIVER, SIGNAL = 0.97; EXPRESSED IN HEART, SIGNAL = 0.91; NT HIT: AB009806.1, EVALUE 2.40e-01; EST_HUMAN HIT: BE296613.1, EVALUE 2.00e-32; SWISSPROT HIT: P35875, EVALUE 8.00e-01
tttcagaatttgtttgaatttcagaaaagtaatgaagtgcaaattctgcaaattatgccatagcttcagtggagcctcaggcaacacctgcaatggaacacattcatattt

SEQ ID NO: 21522 - DNA, 124 bp, Homo sapiens
  MAP TO AC007102.4; EXPRESSED IN FETAL LIVER, SIGNAL = 0.62; EXPRESSED IN HEART, SIGNAL = 0.82; EXPRESSED IN LUNG, SIGNAL = 0.82; NT HIT: X52730.1, EVALUE 2.80e-01; EST_HUMAN HIT: BE792894.1, EVALUE 1.60e+00; SWISSPROT HIT: P23323, EVALUE 4.00e+00
ctaaatgtcacatcctcagggaaactgtcccttaccaccaagcatgttgctcctttttctctgaatcttatcacttatcccaatggtggaattggtgattaccgtgtccctctgcctactacag

SEQ ID NO: 21523 - DNA, 113 bp, Homo sapiens
  MAP TO AC007560.3; EXPRESSED IN LUNG, SIGNAL = 0.82; EXPRESSED IN HEART, SIGNAL = 0.85; EXPRESSED IN ADULT LIVER, SIGNAL = 0.77; EXPRESSED IN BRAIN, SIGNAL = 0.95; EXPRESSED IN PLACENTA, SIGNAL = 0.65; EXPRESSED IN HELA, SIGNAL = 0.85; NT HIT: U51023.1, EVALUE 1.30e-02; EST_HUMAN HIT: BF681652.1, EVALUE 9.20e-02
gttgtttctgccctttggctattgcgagtaatgctgcaacgaacacagaagtgcagatgcctcttcagggtcctagttttcagttcctttgggtgaataccagaaatcacatg

SEQ ID NO: 21524 - DNA, 196 bp, Homo sapiens
  MAP TO AL121998.2; EXPRESSED IN PLACENTA, SIGNAL = 2.7; EXPRESSED IN HBL100, SIGNAL = 3.5; EXPRESSED IN HELA, SIGNAL = 2.9; EXPRESSED IN BT474, SIGNAL =   3; EXPRESSED IN LUNG, SIGNAL =   2; EXPRESSED IN BRAIN, SIGNAL = 2.9; EXPRESSED IN BONE MARROW, SIGNAL =   3; EXPRESSED IN HEART, SIGNAL = 2.9; EXPRESSED IN ADULT LIVER, SIGNAL = 3.7; EXPRESSED IN FETAL LIVER, SIGNAL = 2.5; EST_HUMAN HIT: R97452.1, EVALUE 8.00e-80; SWISSPROT HIT: P07358, EVALUE 6.00e-26; NT HIT: gi11427339, EVALUE 9.00e-89
acagaaacaagagggacaccatggtggaggacttggtggtcctggtacgaggaggggcaagtgagcacatcaccaccctggcataccaggagctgccgacggcggacctgatgcaggagtggggagacgctgtgcagtacaacccagccatcatcaaagttaaggtacacaacgctgctctacccatcctttcctc

SEQ ID NO: 21525 - DNA, 924 bp, Homo sapiens
  MAP TO AC007556.2; EXPRESSED IN FETAL LIVER, SIGNAL = 2.9; EXPRESSED IN ADULT LIVER, SIGNAL =   2; EXPRESSED IN HEART, SIGNAL = 0.82; EXPRESSED IN HELA, SIGNAL = 1.6; EXPRESSED IN PLACENTA, SIGNAL = 2.3; EXPRESSED IN BRAIN, SIGNAL =   3; EXPRESSED IN BT474, SIGNAL = 0.6; EXPRESSED IN LUNG, SIGNAL = 2.1; EXPRESSED IN BONE MARROW, SIGNAL = 1.7; EST_HUMAN HIT: AW753924.1, EVALUE 1.50e-01; SWISSPROT HIT: P98164, EVALUE 0.00e+00; NT HIT: gi11430460, EVALUE 0.00e+00
gaaatctttatttcaccaatgcctttgtttctgaaacactgatagaagttctgcggatcaatactacttaccgccgtgttcttcttaaagtcacagtggacatgcctaggcatattgttgtagatcccaagaacagatacctcttctgggctgactatgggcagagaccaaagattgagcgttctttccttgactgtaccaatcgaacagtgcttgtgtcagagggcattgtcacaccacggggcttggcagtggaccgaagtgatggctacgtttattgggttgatgattctttagatataattgcaaggattcgtatcaatggagagaactctgaagtgattcgttatggcagtcgttacccaactccttatggcatcactgtttttgaaaattctatcatatgggtagataggaatttgaaaaagatcttccaagccagcaaggaaccagagaacacagagccacccacagtgataagagacaatatcaactggctaagagatgtgaccatctttgacaagcaagtccagccccggtcaccagcagaggtcaacaacaacccttgcttggaaaacaatggtgggtgctctcatctctgctttgctctgcctggattgcacaccccaaaatgtgactgtgcctttgggaccctgcaaagtgatggcaagaattgtgccatttcaacagaaaatttcctcatctttgccttgtctaattccttgagaagcttacacttggaccctgaaaaccatagcccacctttccaaacaataaatgtggaaagaactgtcatgtctctagactatgacagtgtaagtgatagaatctacttcacacaaaatttagcctctggagttggacagatttcctatgccaccctgtcttcagggatccatactccaactgtcattgcttcaggta

SEQ ID NO: 21526 - DNA, 125 bp, Homo sapiens
  MAP TO AL122020.1; EXPRESSED IN HBL100, SIGNAL = 2.3; EXPRESSED IN HELA, SIGNAL = 2.9; EXPRESSED IN FETAL LIVER, SIGNAL = 2.8; EXPRESSED IN BT474, SIGNAL = 2.5; EXPRESSED IN BRAIN, SIGNAL = 1.9; EXPRESSED IN PLACENTA, SIGNAL = 3.7; EXPRESSED IN HEART, SIGNAL = 1.7; EXPRESSED IN ADULT LIVER, SIGNAL = 3.1; EXPRESSED IN LUNG, SIGNAL = 3.9; EXPRESSED IN BONE MARROW, SIGNAL = 1.7; EST_HUMAN HIT: AI272669.1, EVALUE 2.80e-01; SWISSPROT HIT: Q03133, EVALUE 4.00e+00
gttccccgtgagcatcgccgcagcgaccgcccacagcaccagctgctgatggctcacacctcctggggctgcaaggcctgtccctggctctggcagcgagatgacagggctgttgccccggcagg

SEQ ID NO: 21527 - DNA, 342 bp, Homo sapiens
  MAP TO D84394.1; EXPRESSED IN BONE MARROW, SIGNAL = 1.6; EXPRESSED IN PLACENTA, SIGNAL = 1.2; EXPRESSED IN HBL100, SIGNAL = 3.9; EXPRESSED IN HELA, SIGNAL = 3.3; EXPRESSED IN BT474, SIGNAL = 1.3; EXPRESSED IN BRAIN, SIGNAL = 1.1; EXPRESSED IN LUNG, SIGNAL = 2.4; EXPRESSED IN HEART, SIGNAL = 1.4; EXPRESSED IN ADULT LIVER, SIGNAL = 0.99; NT HIT: AJ250804.1, EVALUE 0.00e+00; EST_HUMAN HIT: BE743982.1, EVALUE 0.00e+00; SWISSPROT HIT: Q30201, EVALUE 1.00e-15
cctctccagggtcaccctaggctcaccagagggcacagggtgagtgctgtgattcccgctgtgttccatgtagcaggtgaacctctgctcctctcctcggcaaatcctggtggccacccaggtctggtaggttccattcccatcaggcaggacatccccccactgctgggtgtcgtggctcaaagataccccatcctgacgccaggtcagtatgatattccggggatagaagctggaagccctgcatgtcacggtgatgttgccctctgaggcctcgctgcgggtgacattcaccatggggggcactggagaagaaagggcagagccagtgaagccctgctc

SEQ ID NO: 21528 - DNA, 157 bp, Homo sapiens
  MAP TO D87675.1; EXPRESSED IN HBL100, SIGNAL = 2.4; EXPRESSED IN BT474, SIGNAL = 1.6; EXPRESSED IN LUNG, SIGNAL = 3.4; EXPRESSED IN BRAIN, SIGNAL = 3.4; EXPRESSED IN PLACENTA, SIGNAL = 2.7; EXPRESSED IN HELA, SIGNAL = 2.7; EXPRESSED IN HEART, SIGNAL = 1.4; SWISSPROT HIT: Q95241, EVALUE 6.00e-27; EST_HUMAN HIT: AL042549.1, EVALUE 2.00e-83; NT HIT: Y00264.1, EVALUE 2.00e-83
tggtaatgctggcctgctggctgaaccccagattgccatgttctgtggcagactgaacatgcacatgaatgtccagaatgggaagtgggattcagatccatcagggaccaaaacctgcattgataccaaggaaggcatcctgcagtattgccaagaa

SEQ ID NO: 21529 - DNA, 152 bp, Homo sapiens
  MAP TO AP000125.1; EXPRESSED IN HEART, SIGNAL = 0.84; EXPRESSED IN BONE MARROW, SIGNAL = 0.7; EXPRESSED IN FETAL LIVER, SIGNAL = 0.57; EXPRESSED IN LUNG, SIGNAL = 0.65; EST_HUMAN HIT: N81203.1, EVALUE 3.50e-01; SWISSPROT HIT: P19751, EVALUE 5.10e+00; NT HIT: L13391.1, EVALUE 5.40e+00
tcagggacaagcagacggcgacagggatcacactgtcacctgtgtgcgccttttcttctaatggccttaaactgccaagtggctgcaactgcagcgtgctgattttaaatgcttttatggaaagcaccatccccttttcgactagcatcact

SEQ ID NO: 21530 - DNA, 1408 bp, Homo sapiens
  MAP TO AC005261.1; EXPRESSED IN FETAL LIVER, SIGNAL = 1.8; EXPRESSED IN LUNG, SIGNAL = 4.7; EXPRESSED IN HBL100, SIGNAL = 1.7; EXPRESSED IN PLACENTA, SIGNAL = 1.3; EXPRESSED IN BT474, SIGNAL = 2.2; EXPRESSED IN BRAIN, SIGNAL = 1.9; EXPRESSED IN BONE MARROW, SIGNAL = 1.3; EXPRESSED IN HEART, SIGNAL =   2; EXPRESSED IN HELA, SIGNAL = 2.4; NT HIT: gi11426566, EVALUE 0.00e+00; EST_HUMAN HIT: AA130717.1, EVALUE 0.00e+00; SWISSPROT HIT: P52742, EVALUE 0.00e+00
gtgacaaaggaaaacccaagagcacagaacctaccacctgtgagctagccttgtctgaaggaatctctttttggggacaactaacacaaggagcttcaggggactcccagttggggcaacccaaggatcaggatgggttttcagaaatgcagggagaacgcttgagaccagggttagattcccaaaaggagaagcttcctggaaaaatgagccccaaacatgatggtttagggacagctgatagtgtgtgttcaaggattatacaggatcgagtctccttaggagatgatgtccatgactgtgactcacatggatcaggtaaaaatccagttattcaggaagaggaaaatatctttaaatgcaatgaatgtgaaaaagtgtttaacaagaaacgcctgcttgctcggcatgagaggattcactctggagtgaagccctatgaatgcacagagtgtggaaaaacctttagcaagagtacatacctcctgcagcaccacatggtccacactggggagaagccctataagtgcatggagtgtgggaaggcttttaatcggaagtcacaccttacccagcaccagcggattcacagtggagagaagccttataagtgcagtgaatgtggaaaggccttcacccaccgctccacttttgtcttgcataacaggagccacactggagaaaaaccctttgtgtgcaaagagtgtggcaaagcctttcgagataggccaggtttcattcgacactacatcatccacagtggtgagaatccctacgagtgcttcgaatgtggcaaggtcttcaaacacagatcatacctcatgtggcaccagcagactcataccggggagaagccctatgagtgcagtgaatgtgggaaggccttctgtgagagcgcagcgctgattcaccactatgtcatccacactggagagaagccctttgagtgcctcgagtgtgggaaggctttcaaccaccgatcctacctcaaaaggcaccagcggattcacactggggagaagccatatgtgtgtagtgaatgcggaaaggccttcacccactgctctactttcatcttgcataaaagggcccacactggagaaaaacctttcgagtgcaaagagtgtgggaaagcctttagcaatagggcagacctcattcgccacttcagcatccacactggagagaagccctatgagtgcatggagtgtggaaaggccttcaaccgcaggtcaggcctcacaaggcaccagcggattcatagtggagagaagccctatgaatgcatcgagtgtgggaaaacattttgctggagcacaaacctcattcgacactctatcatccacactggagagaagccgtatgagtgcagtgaatgtggaaaggccttcagtcgcagctcgtccct

SEQ ID NO: 21531 - DNA, 713 bp, Homo sapiens
  MAP TO AC004414.1; EXPRESSED IN HEART, SIGNAL = 1.2; EXPRESSED IN BT474, SIGNAL =   2; EXPRESSED IN BRAIN, SIGNAL = 1.8; EXPRESSED IN PLACENTA, SIGNAL = 1.4; EXPRESSED IN HELA, SIGNAL = 1.9; EXPRESSED IN HBL100, SIGNAL = 0.92; EXPRESSED IN ADULT LIVER, SIGNAL = 1.8; EXPRESSED IN FETAL LIVER, SIGNAL = 1.3; EXPRESSED IN LUNG, SIGNAL =   2; EXPRESSED IN BONE MARROW, SIGNAL = 1.2; NT HIT: AB014533.1, EVALUE 0.00e+00; SWISSPROT HIT: O61345, EVALUE 2.00e-03; EST_HUMAN HIT: AV724073.1, EVALUE 2.70e+00
atcttaatggctccggtggagagggacacatctctgtcgtaacatcgcatctctgactttggaggaatgattttatacgttgtgaggccgtgcttaagtctgtagcttttccctgggttttggcctcgttggtgccatgatgttggtgccaaggcagcgtttttatcgttgctgtccttttcattcaccggttgggaattcactctctctgtggcttgagtcctctccccgtcagcacagccatacactttgtctttcacttttgcatttaggttgtctgtgtgaagattcgaagcaaaagaagtcaccctgggcgccgtttccattagattcccatctttagagatgttagataaggccacacggattccttttccgacgtcatgggaagcggggtgcagggcaggtacttcctcccttgccttttcatggggctggctgtgctcagcttgaagtggcgccagggagtctctcctgctggcaacaccctccgagtcgaaagacccagcattgttgtttctattggaaaacaaccccgaatccacaggatcatctgaaacttcccctatgaatgttactgggattgcatctgtgtcgccgtgagggatcatggcatcctgtgggcagtggttggatgcaccatggatggagctggtgagggagctggtgtctgtttcatagctgtcttccatttctgcaaagagggacaaaca

SEQ ID NO: 21532 - DNA, 363 bp, Homo sapiens
  MAP TO AL009182.13; EXPRESSED IN HEART, SIGNAL = 1.1; EST_HUMAN HIT: BF376402.1, EVALUE 3.00e-35; NT HIT: AF119668.1, EVALUE 4.00e-18; SWISSPROT HIT: Q28270, EVALUE 7.30e+00
gtccctcctcctctccccctttcaccgggagatgccaatcaaagtgcaccctgccctggaggtgggctgcctcgagtgtggatttctttgtgcatccttccagagtgggtgtttgttggcctggtgctcctgggcgtcttcctcttcttcgtcctggtggggatctgctggtgccagtgctgccctcacagctgctgctgctatgtccgctgcccatgctgcccagattcctgctgctgccctcaagcctgtgagtacagtgaccgctggggagacagagcgatcgagagaaatgtctacctctctacctgacagctgtgtgcgctgggttcctcctccacctcctgtcctgccacccccaag

SEQ ID NO: 21533 - DNA, 1265 bp, Homo sapiens
  MAP TO AC003682.1; EXPRESSED IN FETAL LIVER, SIGNAL = 2.5; EXPRESSED IN HBL100, SIGNAL = 2.3; EXPRESSED IN HEART, SIGNAL = 2.3; EXPRESSED IN PLACENTA, SIGNAL = 2.7; EXPRESSED IN ADULT LIVER, SIGNAL = 2.4; EXPRESSED IN BT474, SIGNAL = 2.4; EXPRESSED IN BRAIN, SIGNAL = 2.2; EXPRESSED IN LUNG, SIGNAL = 2.6; EXPRESSED IN BONE MARROW, SIGNAL = 2.3; EXPRESSED IN HELA, SIGNAL = 2.5; SWISSPROT HIT: P52742, EVALUE 1.00e-111; EST_HUMAN HIT: BF116105.1, EVALUE 0.00e+00; NT HIT: gi6677648, EVALUE 0.00e+00
gttgtggccatggaacagaggatgaagagacaccttctgaccagaatgtttctgtaggagtgtcacagtcaaaggcaggttcatccacacagaagactcaatcctgtgagatgtgtgtcccagtcctgaaagatattttgcatctagctgatctccctgggcagaaaccatacttggttggagaatgtacaaaccatcaccagcaccagaagcatcacagtgcaaagaaatccttgaagagggacatggacagagcctcatatgtgaagtgctgcctattctgtatgtcattgaagccctttcgcaaatgggaggttggaaaggaccttccagccatgttgcggcttctgaggtccctggtctttcctggaggcaagaaacccggcacaattactgaatgtggggaggacattcgcagtcaaaaaagtcattacaagtcaggtgaatgtgggaaggcttccaggcacaaacacactcctgtttaccatccaagagtctacactggaaaaaagctttatgagtgtagcaaatgtgggaaagccttccgtggcaagtactcacttgttcagcaccagagagtccatactggagaaaggccttgggagtgcaatgaatgtggaaaattctttagccaaacctcccacctgaatgatcatcggagaatccacaccggagaaaggccttatgagtgcagcgaatgtggaaaattatttagacaaaactccagccttgttgaccaccagaaaatacacactggagcaaggccttatgagtgtagccagtgtgggaaatcctttagccaaaaagccacccttgttaaacaccaaagagttcacactggagaaaggccttataagtgtggtgaatgtgggaattcctttagtcaaagtgccattcttaatcaacaccgaagaattcacactggagcaaagccttatgagtgtggccagtgtgggaaatcctttagtcaaaaagctaccctcattaaacaccagagagttcacactggagaaaggccttataagtgtggtgactgtgggaaatcctttagtcaaagctccatccttattcaacaccggagaattcatactggagcaaggccttatgagtgtggccagtgtggaaagtcctttagccaaaagtctggtctcattcaacaccaagtggttcacactggagaaaggccttatgagtgcaacaaatgtgggaattcctttagccaatgctccagcctcatacatcaccaaaaatgtcataacacatag

SEQ ID NO: 21534 - DNA, 2351 bp, Homo sapiens
  MAP TO AC005587.1; EXPRESSED IN HBL100, SIGNAL =   1; EXPRESSED IN HEART, SIGNAL = 1.1; EXPRESSED IN PLACENTA, SIGNAL =   1; EXPRESSED IN HELA, SIGNAL = 1.9; EXPRESSED IN BT474, SIGNAL = 1.5; EXPRESSED IN ADULT LIVER, SIGNAL =   1; EXPRESSED IN FETAL LIVER, SIGNAL =   2; EXPRESSED IN LUNG, SIGNAL =   3; EXPRESSED IN BRAIN, SIGNAL = 0.95; EST_HUMAN HIT: BE272325.1, EVALUE 0.00e+00; SWISSPROT HIT: P12883, EVALUE 1.00e-10; NT HIT: gi11433426, EVALUE 0.00e+00
atggaggagcctggtgctacccctcagccctacctggggctggtcctggaggagctaggcagagttgtggcagcactacctgagagtatgagaccagatgagaatccttatggttttccatcggaactggtggtatgtgcagctgttattggattttttgttgttctcctttttttgtggagaagttttagatcggttaggagtcggctttatgtgggaagagagcaaaaacttggtgcaacgctttctggactaattgaagaaaaatgtaaactacttgaaaagtttagccttattcaaaaagagtatgaaggctatgaagtagagtcatctttagaggatgccagctttgagaaggcggcagcagaagaagcacgaagtttggaggcaacctgtgaaaagctgagcaggtccaattctgaacttgaggatgaaatcctctgtctagaaaaagacttaaaagaagagaaatctaaacattctcaacaagatgaattgatggcggatatttcaaaaagtatacagtctctagaagatgagtcaaaatccctcaaatcacaaatagctgaagccaaaatcatctgcaagacatttaaaatgagtgaagaacgacgggctatagcaataaaagatgctttgaatgaaaattctcaacttcagacaagccataaacagctttttcagcaagaagctgaagtatggaaaggacaagtgagtgaacttaataaacagaaaataacatttgaagactccaaagtacacgcagaacaagttctgaatgataaagaaaatcacatcaagaccctgactggacacttgccaatgatgaaagatcaggctgctgtgcttgaagaagacacaacggatgatgataacctggaattaaaagtgaacagtcaatgggaaaatggtgctaacttagatgatcctccgaaaggagctttgaagaaactgattcatgctgctaagttaaatgtttctttaaaaagcttagaaggagaaagaaaccacattattattcagttatctgaagtggacaaaacaaaggaagagcttacagagcatattaaaaatcttcagactcaacaagcatctttgcaatcagaaaacatatattttgaaagtgagaatcagaagcttcaacagaaacttaaaataatgactgaattctatcaagaaaatgaaatgaaactctacaggaaattaacagtggaggaaaattaccgaatagaggaagaagagaagctttctagagtggaagaaaagatcagccatgccactgaagagctggagacctatagaaagctagccaaagatcttgaagaagaattggagagaactgttcatttttatcaaaagcaggttatttcctacgagaaaagaggacatgataattggttggcagctcggactgctgaaagaaacctcagtgatttaaggaaagaaaatgctcacaacaaacaaaaattaactgaaagagagttgaaatttgaacttttagaaaaagatcctaatgcactcgatgtttcaaatacagcatttggcagagagcattccccatgtagtccctcaccattgggtcggccttcatctgaaacgagagcttttccctctcctcaaactttgttggaggatccactcagactctcacctgtgcttccagggggaggaggaagaggcccaagcagcccagggaatcccctggaccatcagattaccaatgaaagaggagaaccaagctatgacaggttaatcgatcctcacagggctccttctgacactgggtccctgtcatctccggtggaacaggaccgtaggatgatgtttcctccaccagggcaatcatatcctgattcaactcttcctccacaaagggaagacagattttattctaattctgaaagactgtctggaccagcagaacccagaagttttaaaatgacttctttggataaaatggataggtcaatgccttcagaaatggaatccagtagaaatgatgccaaagatgatcttggtaatttaaatgtgcctgattcatctctccctgctgaaaatgaagcaactggccctggccttattcctccacctcttgctccaatcagcggtccattgtttccagtggatacaaggggcccattcatgagaagaggacctcctttccccccacctcctccaggaaccatgtttggagcttctcgaggttattttccaccaagggatttcccaggtccaccacatgctccatttgcaatgagaaacatctatccaccgaggggtttacctccttaccttcatccgagacctggattttaccccaaccccacattctgaaggtagaagcgagttcc

SEQ ID NO: 21535 - DNA, 140 bp, Homo sapiens
  MAP TO AP000105.1; EXPRESSED IN HBL100, SIGNAL = 1.1; EXPRESSED IN FETAL LIVER, SIGNAL = 0.98; EXPRESSED IN ADULT LIVER, SIGNAL = 3.2; EXPRESSED IN HEART, SIGNAL = 0.89; EXPRESSED IN BT474, SIGNAL = 0.66; EXPRESSED IN BONE MARROW, SIGNAL = 0.76; EXPRESSED IN LUNG, SIGNAL = 0.7; EXPRESSED IN HELA, SIGNAL = 1.1; SWISSPROT HIT: P08175, EVALUE 8.80e+00; EST_HUMAN HIT: BE906754.1, EVALUE 4.70e-01; NT HIT: L27516.1, EVALUE 2.70e-01
tcggtgggcacggctgagccccggacagtcagcaccaggaatttggaccatgttttgtgttttattaaagtggttatctcccacttatatgtttgctctggggtcagggtggccacagtgacaaccgccacattcaacac

SEQ ID NO: 21536 - DNA, 731 bp, Homo sapiens
  MAP TO AL031058.1; EXPRESSED IN BONE MARROW, SIGNAL = 1.5; EXPRESSED IN BRAIN, SIGNAL = 1.2; EXPRESSED IN PLACENTA, SIGNAL = 4.3; EXPRESSED IN BT474, SIGNAL =  10; EXPRESSED IN FETAL LIVER, SIGNAL = 2.8; EXPRESSED IN LUNG, SIGNAL = 2.9; EXPRESSED IN HEART, SIGNAL = 8.6; EXPRESSED IN HELA, SIGNAL = 6.4; EXPRESSED IN HBL100, SIGNAL = 1.4; EXPRESSED IN ADULT LIVER, SIGNAL = 1.9; NT HIT: gi11418893, EVALUE 0.00e+00; SWISSPROT HIT: P15924, EVALUE 2.00e-55; EST_HUMAN HIT: BF350983.1, EVALUE 0.00e+00
gtttttcttttgacataatctctgatttcattccacagctgaaaaataccaagatcgaagttttggaagaggagctcagactggcccgagatgccaactcggaaaactgtaataagaacaaattcctggatcagaacctgcagaaataccaggcagagtgttcccagttcaaagcgaagcttgcgagcctggaggagctgaagagacaggctgagctggatgggaagtcggctaagcaaaatctagacaagtgctacggccaaataaaagaactcaatgagaagatcacccgactgacttatgagattgaagatgaaaagagaagaagaaaatctgtggaagacagatttgaccaacagaagaatgactatgaccaactgcagaaagcaaggcaatgtgaaaaggagaaccttggttggcagaaattagagtctgagaaagccatcaaggagaaggagtacgagattgaaaggttgagggttctactgcaggaagaaggcacccggaagagagaatatgaaaatgagctggcaaaggtaagaaaccactataatgaggagatgagtaatttaaggaacaagtatgaaacagagattaacattacgaagaccaccatcaaggagatatccatgcaaaaagaggatgattccaaaaatcttagaaaccagcttgatagactttcaagggaaaatcgagatctgaaggatgaaattgtcaggctcaatgacagc

SEQ ID NO: 21537 - DNA, 271 bp, Homo sapiens
  MAP TO AL049839.2; EXPRESSED IN LUNG, SIGNAL = 0.71; EXPRESSED IN HELA, SIGNAL = 0.71; EXPRESSED IN BRAIN, SIGNAL = 0.75; EXPRESSED IN HEART, SIGNAL = 0.85; EXPRESSED IN PLACENTA, SIGNAL = 0.7; EXPRESSED IN FETAL LIVER, SIGNAL = 0.69; EXPRESSED IN ADULT LIVER, SIGNAL = 0.83; EST_HUMAN HIT: AW963142.1, EVALUE 9.80e-01; NT HIT: gi6678963, EVALUE 1.70e-01; SWISSPROT HIT: P29622, EVALUE 3.00e-25
ctgagtggatgaagccctttgactcacgtgccaccagcccaaaggagttctttgtagatgagcacagcgctgtgtgggtgcccatgatgaaggagaaggccagccaccgcttcctgcacgaccgtgagctgcaatgctctgtgctgcggatggaccacgctgggaacaccaccaccttcttcatcttccccaacaggggcaagatgaggcagctggaagatgccctgctgcctgaaacactgattaagtgggacagtctgctcaggaccag

SEQ ID NO: 21538 - DNA, 919 bp, Homo sapiens
  MAP TO AL031664.1; EXPRESSED IN BT474, SIGNAL = 1.3; EXPRESSED IN FETAL LIVER, SIGNAL = 0.98; EXPRESSED IN BONE MARROW, SIGNAL = 0.97; EXPRESSED IN LUNG, SIGNAL = 1.3; EXPRESSED IN HEART, SIGNAL = 1.2; SWISSPROT HIT: Q12934, EVALUE 0.00e+00; EST_HUMAN HIT: BE895400.1, EVALUE 0.00e+00; NT HIT: Y16723.1, EVALUE 0.00e+00
cggtttcttcatatgtctgaatgctctccgtggaaatcttctcgatagattccaccacttccactgtcttataggccaaagccttgggagggcctttttctggcaggcttctgctcctagtcccaagcacctcagctccatcctgatcagccgcaggctttggaggctcaggtatagatggttcctctgcaccgggtgtgaccatggcacagggtctcctggactcttcgtcccgctcctcaccctcacgtttctcttcagggccttccagctctgcaccatctggctcaatctccttgtctataggctgctggtcaattggttgtccatcttctttctcctgcagacccacctgcccattctctaaagggggcttgggtgactcaggagagggctccacctggccgtcataaagcacagagtcttccgcaacagaaacagccaccccacctttagctgtgatggaggagacatagaatctagggtccacgtaattggcatcccctgtgaccagcacgtgccgctctttggtgtagagctcagtgggggtctcaggctctttggggcttctcactttctccttgaccttcctgtatagtttcccaaagcctttgcttatctgccctccatctggcacatcctctggagccccttcttgtgtcaggggacttacttctttactttctgattcaaacttagattcactttcctctttaagtaccacctgtaccagctttgtgtcttccaaaccttttaatggtgcatcttccagagctccgttggttttgtcttttgttataatctcttttctccttggaacattcttggggagggctttttgtcttggttttgctgctgttatatcctgcagagctctggtaagatctggaaaaacacacaggcagaaattcaagtataa

SEQ ID NO: 21539 - DNA, 2837 bp, Homo sapiens
  MAP TO AL031277.1; EXPRESSED IN HEART, SIGNAL = 1.6; EXPRESSED IN BT474, SIGNAL = 1.4; EXPRESSED IN BONE MARROW, SIGNAL = 1.1; EXPRESSED IN LUNG, SIGNAL = 2.6; EXPRESSED IN BRAIN, SIGNAL = 1.8; EXPRESSED IN PLACENTA, SIGNAL = 0.98; NT HIT: gi11423021, EVALUE 0.00e+00; SWISSPROT HIT: Q61116, EVALUE 1.00e-09; EST_HUMAN HIT: BE885438.1, EVALUE 0.00e+00
tagattttatattgaaccggtctgttcttttcttactcgccaaggtggatttgctttgtaaaacagctttgcttttctgtaccctcacgtgcaggctccgtgatgttttgctggaaagctgagcagaatgattcttggccacagctttaggttttttcccctcaacatgagttattttggccattcttatcgggctggagttccttaaagaggaggagcttggttttttggatttcaccgaagctgcaaacttgacgttctgcttggacctgaaggatgaggagggaagtgggacttgggtggggcctgagctgcgggctctggtcttgcccaacggagtctgcatgctttgcattttaatctccgcatccgctgtccgtctgcggtggttgctgttactgtttttgtcactacttgcaggtgatgagtgtccacctttcttagatgaatgagaaactttttttttgggaggagaaaggggttttttgggacagctgaaggcggcgtgtttattcaggcttccaatgtaagtgaactctcgattacagtaagggcagatgtgagaggatgactcacaagcatttttcaagtcggccttctgctttgcagatttgtttttctgaagaattgctttctgtactagctgattttttttcttcaatgcatttaatttgagcttattcgacgacattttgctgagctcaacactaaagttaagccttttgggctgtcccattcgtcggaaggcatttttcccagagttatctaaaaccaccacgccatttttgggttgcacagtttgttttaatggtactgggtttttcttaggcgtgtacctcttcttgtcacttgcagaagcacaagccaggatatgtttgtgcaactccggcatattgtcgacaccttttccacactttgtgcagcgaatggcggtagtgaaagtctgtggaatattgtgtgtagtgaaatttgtggctgtcacaccaatccccatggggttacggtgatggtactgaaatggaggtggtttaaagcttgggtaatgctgattgaggcccaatcgaacatctggatcttttgtctttattccagaagccattatttttatagtcgtgtaaagctcttcagaggaatcatttaactcctcttcttctttagaagtttctaaaggatcttctggcaagctctgcatatgctctacatgggccttgctgggatctgtaaagttctggggcctcagagtcccgctttcaaactcgtgatgtgtgcacaccttatctgggtggagatctcgctggtgctgctgcaaattgcacaaaaaagcaaattcttttttacaaacagaacacacaaagatattcccaactccatgaagcaaaaagcgatgttctgacaagtccgttttatccttaaaaagctgcacacaaaattcacatttgaagggccattcttcagcatgaatagataaatgtttggttagatctttaatggaaagaaaaggtgattcacagacgttgcaaacaaagtttttgttgaatgtttcctgaacaacaacatcctgttcagcagcagactggggctcttccctgggtttcagaccttcattctctaattcctcctgtttgaaagatatcatggggagagaagcctccagattatcaccagaggaaacaacagatgatattgcggagagaggaggtggagaaggagaagaggaggaagatgaagaagaaaacgaagaggaggaggaagatgaagaggaggaagaagaaagtgttggaggcccgggtgaggcggcagacatcaggggctccacgggaggaatgggagagggagagggggacactgttggggacagaattggaagtggggactgtgcggtggcatttgagagtggagaggggcatgggtgtggagatgcactggaagagggggctggaagaggtacggtaggaaggaggggagggggcggagtggcaacagttaataccgggggacagggtggaggggaagagggatctgtggggatcaagagaggaggcagctgaccggatgaaagggagggtgtctgcagggcaggtgatgaaggacaaacatcaggtgtggactcaacagtaggggcagggaaaccagagcccggaccgaggtcaggatctggctgagcttctagggatttacaaggacttgggctcctggtcccatctgcagggttttctacaggtaaatcgatgccattatattcattgagaagaaccttctgcagcatgcaggtggttggtttccttttctttacagcactacacgtaggctgcactgaatgactttctttgaattccttgccttcagagtcactacaatgctttttatgcacactgagatctaagacagattcccactggactggagtcttgcctgtaccctcagccttctgtttgacaccgctggataaatccagtggctgctggttgcacacactgctaaaagcagaactagctgtccactctttagacattttatattcatcaaagcatggagggctcacagtttctctctcatctctcccagacaaactccatgctggtgagtcgctgtgactttctaatttggattttttggaagtcagcccggcatcggtccatgctgctttcccatcacttggctttccaaagtctcgaagggcaggactgtgctgtggagaactgggaggagagctggtccgcctcttaaacctacttgaggtcacaggcaacattgatgcaggagcagacacacaaacaggacctaatttagctatttcagttgctgaaatccctgcaggagttagtttatcttgggtt

SEQ ID NO: 21540 - DNA, 318 bp, Homo sapiens
  MAP TO AF017732.1; EXPRESSED IN LUNG, SIGNAL =  16; EXPRESSED IN HEART, SIGNAL = 1.3; EXPRESSED IN BT474, SIGNAL = 3.3; EXPRESSED IN ADULT LIVER, SIGNAL =   3; EXPRESSED IN BONE MARROW, SIGNAL =  25; SWISSPROT HIT: P01834, EVALUE 9.00e-39; NT HIT: X96754.1, EVALUE 0.00e+00; EST_HUMAN HIT: AW869622.1, EVALUE 0.00e+00
tggaactgcctctgttgtgtgcctgctgaataacttctatcccagagaggccaaagtacagtggaaggtggataacgccctccaatcgggtaactcccaggagagtgtcacagagcaggacagcaaggacagcacctacagcctcagcagcaccctgacgctgagcaaagcagactacgagaaacacaaactctacgcctgcgaagtcacccatcagggcctgagctcgcccgtcacaaagagcttcaacaggggagagtgttagagggagaagtgcccccacctgctcctcagttccagcctgaccccctcccatcc

SEQ ID NO: 21541 - DNA, 268 bp, Homo sapiens
  MAP TO AL049538.8; EXPRESSED IN LUNG, SIGNAL = 0.64; EXPRESSED IN HEART, SIGNAL = 1.2; NT HIT: gi11422225, EVALUE 1.60e-01; EST_HUMAN HIT: AV705701.1, EVALUE 6.20e-02; SWISSPROT HIT: P36225, EVALUE 7.10e+00
ttccctcctctcccctttggctgctgctctgtgccaggctgaattgtggccacagctatgcttttccttgatcttagaaataactgaactggccctcctgacagctccattggacaaaatggagaaattaaaaccaaactcactacttctaaaaaatcagcaagacactccagcacagaagccaaaactgtgtagctttttccccacagcacacagtttccacatcagtcaaatgcaggccctaaagagctttccctcctggaagtgc

SEQ ID NO: 21542 - DNA, 443 bp, Homo sapiens
  MAP TO AL035694.8; EXPRESSED IN ADULT LIVER, SIGNAL = 0.65; EXPRESSED IN HELA, SIGNAL = 0.59; EXPRESSED IN HEART, SIGNAL = 0.78; EXPRESSED IN PLACENTA, SIGNAL = 0.71; EXPRESSED IN HBL100, SIGNAL = 1.7; EXPRESSED IN LUNG, SIGNAL = 0.7; EXPRESSED IN BRAIN, SIGNAL = 1.2; SWISSPROT HIT: O70306, EVALUE 2.00e-12; EST_HUMAN HIT: BE560478.1, EVALUE 1.60e+00; NT HIT: AF156549.1, EVALUE 9.40e-01
atgggtctggttagtggcgaaggcattgctggagggtgatggcatgatatactggagctggggggacattcccgaaatctgcatggataagctggtctgtgggcagctgaaggtgtccccatcagtgccacccatggacatgttcacggaggtgctgctgctcacgcccacataggagggagtcctgggcggggcaaaggtctcaccagcctggttggtgagcctgttgtaggtctctgccaaagatgtgctgtatcggttgagggtgaggcctgagcgggcacaggcagaatagtcagcaggggccagactacacagctggctggtgttgggccccagatggaaggcaggagaggagcaagaggagccagacaaaaggtgagggtgagtggcaggaacgccattcccagtaccttggagcaaggtggaggaacttgcattgc

SEQ ID NO: 21543 - DNA, 160 bp, Homo sapiens
  MAP TO AF053356.1; EXPRESSED IN BT474, SIGNAL = 1.5; EXPRESSED IN HBL100, SIGNAL = 1.5; EXPRESSED IN HELA, SIGNAL = 1.4; EXPRESSED IN ADULT LIVER, SIGNAL = 1.1; EXPRESSED IN BRAIN, SIGNAL = 1.4; EXPRESSED IN LUNG, SIGNAL = 0.93; EXPRESSED IN BONE MARROW, SIGNAL = 1.4; EXPRESSED IN PLACENTA, SIGNAL =   1; EXPRESSED IN HEART, SIGNAL = 1.7; EXPRESSED IN FETAL LIVER, SIGNAL = 1.4; SWISSPROT HIT: O33367, EVALUE 5.00e+00; NT HIT: gi11024695, EVALUE 3.00e-85; EST_HUMAN HIT: AA242997.1, EVALUE 8.50e+00
gcttgacgaaggaggcactccccttgggccagcctgggaggcggcccccagccccacagccgcagcccagcagctccttgctgaactctgagctctggctcagcaccagggagtggttgaggccgcaccacagggtgatgggccgctgcaggtaacaaac

SEQ ID NO: 21544 - DNA, 305 bp, Homo sapiens
  MAP TO AF055066.1; EXPRESSED IN PLACENTA, SIGNAL =  11; EXPRESSED IN HBL100, SIGNAL =  38; EXPRESSED IN HELA, SIGNAL =  33; EXPRESSED IN HEART, SIGNAL =  25; EXPRESSED IN FETAL LIVER, SIGNAL =  16; EXPRESSED IN BT474, SIGNAL = 6.4; EXPRESSED IN ADULT LIVER, SIGNAL = 7.5; EXPRESSED IN LUNG, SIGNAL =  59; EXPRESSED IN BONE MARROW, SIGNAL =  25; EXPRESSED IN BRAIN, SIGNAL =  13; NT HIT: AF055066.1, EVALUE 0.00e+00; EST_HUMAN HIT: BE182173.1, EVALUE 1.00e-113; SWISSPROT HIT: P17693, EVALUE 3.00e-53
agacatgatgcctccatctccctccttactccatctcagcatgaggggctccggcagcccctcatgctgcacatggcacgtgtatctctgctcctctccagaaggcaccaccacagctgcccacttctggaaggttccatcccctgcaggcctggtctccacgagctccacgtcctgggtctggtcctccccatcccgctgccaggtcagtatgatctccgcagggtagaagcccagggcccagcacctcagggtggcctcatagtcaaagacagggtggtgggtcacgtgtgtcttgggggggt

SEQ ID NO: 21545 - DNA, 84 bp, Homo sapiens
  MAP TO AF064860.1; EXPRESSED IN HELA, SIGNAL = 1.7; EXPRESSED IN HEART, SIGNAL = 1.5; EXPRESSED IN FETAL LIVER, SIGNAL = 1.8; EXPRESSED IN BT474, SIGNAL = 1.4; EXPRESSED IN LUNG, SIGNAL = 1.8; EXPRESSED IN BRAIN, SIGNAL = 1.7; EXPRESSED IN PLACENTA, SIGNAL = 1.4; EXPRESSED IN HBL100, SIGNAL = 1.8; EXPRESSED IN ADULT LIVER, SIGNAL = 1.6; EXPRESSED IN BONE MARROW, SIGNAL = 1.7; EST_HUMAN HIT: AW732655.1, EVALUE 6.90e-01; SWISSPROT HIT: P26550, EVALUE 9.30e+00; NT HIT: AL163280.2, EVALUE 2.00e-40
agcgcctggctcgttggtgaccagcaagggtcccagctgagccggggtgctctcctgtggctctggtggaacgtccacaggata

SEQ ID NO: 21546 - DNA, 348 bp, Homo sapiens
  MAP TO AL009181.1; EXPRESSED IN BT474, SIGNAL = 2.1; EXPRESSED IN BRAIN, SIGNAL = 3.5; EXPRESSED IN HBL100, SIGNAL = 2.4; EXPRESSED IN HEART, SIGNAL = 2.4; EXPRESSED IN ADULT LIVER, SIGNAL = 2.2; EXPRESSED IN FETAL LIVER, SIGNAL = 2.9; EXPRESSED IN LUNG, SIGNAL = 2.7; EXPRESSED IN BONE MARROW, SIGNAL =   2; EXPRESSED IN PLACENTA, SIGNAL = 2.5; EXPRESSED IN HELA, SIGNAL = 3.2; EST_HUMAN HIT: BE252309.1, EVALUE 2.10e-02; NT HIT: gi11526121, EVALUE 0.00e+00; SWISSPROT HIT: P41143, EVALUE 6.00e-48
gaggccaggacccagatacagatgttgatcagcttggccttggcaggcgtgcggaagtccagggccttgacagggtggcagacagcgatgtagcggtcaacactcatcatggtgagcgtgaagatgctggtgaacatattgtagtagtcgatggagagcacagccttgcagagcagctcgccgaagggccacgtctccatcaggtacttggcactctggaaaggcagcgtgctggtggccagcgcatcggctaaggccaggttgaagatgtagatgttggtggccgtcttcatcttagtgtaccttagaaagaaatgcatgtgtaattaatcccatttcacagatttc

SEQ ID NO: 21547 - DNA, 459 bp, Homo sapiens
  MAP TO AJ010770.1; EXPRESSED IN PLACENTA, SIGNAL = 2.8; EXPRESSED IN HELA, SIGNAL =   3; EXPRESSED IN HEART, SIGNAL = 2.5; EXPRESSED IN FETAL LIVER, SIGNAL = 3.3; EXPRESSED IN BT474, SIGNAL = 2.4; EXPRESSED IN BRAIN, SIGNAL = 2.4; EXPRESSED IN HBL100, SIGNAL = 2.6; EXPRESSED IN ADULT LIVER, SIGNAL = 3.5; EXPRESSED IN LUNG, SIGNAL = 3.5; EXPRESSED IN BONE MARROW, SIGNAL =   2; EST_HUMAN HIT: BF672826.1, EVALUE 0.00e+00; NT HIT: AJ131693.1, EVALUE 0.00e+00; SWISSPROT HIT: Q61771, EVALUE 1.30e-02
gtaaaagaaacaaatatgacatctcttcagaaagacttaagccaagttagggatcacctcgcagaggcaaaagagaaattgtccattttagaaaaagaagatgagactgaggtacaagaaagcaaaaaggcctgcatgtttgagccacttcctataaaactgagtaagagcattgcatcccagacagatgggactctgaagatcagtagcagcaatcagactccacaaattcttgttaaaaatgcaggaatacaaattaatttacagagtgaatgttcctcagaagaagttactgaaataatcagtcagtttactgaaaaaattgagaagatgcaagaactacatgctgctgaaattttggacatggaatccagacatatttcagaaactgaaaccttaaagagggaacactatgttgccgttcagttactgaaagaggaatgtggtaccttgaaggca

SEQ ID NO: 21548 - DNA, 180 bp, Homo sapiens
  MAP TO AL020990.1; EXPRESSED IN HELA, SIGNAL = 1.7; EXPRESSED IN HEART, SIGNAL = 1.2; EXPRESSED IN FETAL LIVER, SIGNAL = 1.6; EXPRESSED IN BT474, SIGNAL = 1.6; EXPRESSED IN LUNG, SIGNAL =   2; EXPRESSED IN BRAIN, SIGNAL = 1.4; EXPRESSED IN PLACENTA, SIGNAL = 1.7; EXPRESSED IN HBL100, SIGNAL = 1.3; EXPRESSED IN ADULT LIVER, SIGNAL = 1.1; EXPRESSED IN BONE MARROW, SIGNAL = 0.93; EST_HUMAN HIT: AU140489.1, EVALUE 2.00e-74; SWISSPROT HIT: P21397, EVALUE 7.00e-21; NT HIT: X60812.1, EVALUE 5.00e-96
tcatggttcagcgtctctatgatgatgttgtcacttgactggtcaacgtgagtgacaggatggttcagcttcacttggtctccgaggaggtccattatccgttcgctcacttgaccagatccacctacaaacttccgttcctacaggaggaggtaggtaagaaaggaaacattatgaaag

SEQ ID NO: 21549 - DNA, 201 bp, Homo sapiens
  MAP TO AL021154.1; EXPRESSED IN PLACENTA, SIGNAL = 3.9; EXPRESSED IN HELA, SIGNAL =   4; EXPRESSED IN HEART, SIGNAL = 3.7; EXPRESSED IN FETAL LIVER, SIGNAL = 4.7; EXPRESSED IN BT474, SIGNAL = 2.4; EXPRESSED IN BRAIN, SIGNAL = 2.3; EXPRESSED IN HBL100, SIGNAL = 3.6; EXPRESSED IN ADULT LIVER, SIGNAL = 3.9; EXPRESSED IN LUNG, SIGNAL = 4.2; EXPRESSED IN BONE MARROW, SIGNAL = 3.3; NT HIT: L12032.1, EVALUE 2.60e-02; EST_HUMAN HIT: AA916309.1, EVALUE 3.10e-02; SWISSPROT HIT: P45042, EVALUE 3.20e-01
caaagtcccacagtgtccccaggccatactctttgcctggacaatagcaggcacccagtactggtttctggccaaacaatgaagtaatgaatgaatggcggcaacgctggctgcatggacttccccaaggtcacacagtgcactgggagtagtgagttgggtctccctccagactcgcaatccagtgctcattccactcca

SEQ ID NO: 21550 - DNA, 210 bp, Homo sapiens
  MAP TO AJ229041.1; EXPRESSED IN BONE MARROW, SIGNAL = 2.6; EXPRESSED IN HELA, SIGNAL = 3.9; EXPRESSED IN HEART, SIGNAL =   3; EXPRESSED IN FETAL LIVER, SIGNAL = 3.8; EXPRESSED IN BT474, SIGNAL = 2.9; EXPRESSED IN LUNG, SIGNAL =   4; EXPRESSED IN BRAIN, SIGNAL = 3.5; EXPRESSED IN PLACENTA, SIGNAL =   3; EXPRESSED IN HBL100, SIGNAL = 2.9; EXPRESSED IN ADULT LIVER, SIGNAL =   3; SWISSPROT HIT: O25516, EVALUE 1.30e+00; EST_HUMAN HIT: AU118256.1, EVALUE 7.40e-01; NT HIT: AL163268.2, EVALUE 1.00e-115
tgggctaggatcaaggtgttggcagtgctgtgttctttcaggaagctctacaggaggatactttttcttgtcttttccagcttttgctggctgcttgcatgttttagcttgtgcccccgttccatgaggacgtggacatctttgggggctgtcttctgcaagccgcagatactaagcacagagatgacaatcagattcatgtctactcca

SEQ ID NO: 21551 - DNA, 341 bp, Homo sapiens
  MAP TO AC010680.2; EXPRESSED IN BT474, SIGNAL = 1.2; EXPRESSED IN HEART, SIGNAL = 0.86; EXPRESSED IN LUNG, SIGNAL = 4.6; NT HIT: AJ277892.1, EVALUE 0.00e+00; EST_HUMAN HIT: AA214071.1, EVALUE 0.00e+00
ggagaactgtccttgaagaaaaagtatcagttgccttccgccaagaagtagtagtaaaagaaagactagaattagaagtagtagaagcagaagtggaagaaattccggaagaagaagagttccatgaagttgaagaatattttgaagaaggcgagtttcatgaagtagaagaattcatcaaattagaacaacatagagttgaagaagaacacagagttgaaaaagttcatagggtaatagaagtttttgaggctgaagaagtggaagtatttgaaaaaccaaaagctccacctaaaggtatagggaattcttcaaatactacaaattcttatatcttgctc

SEQ ID NO: 21552 - DNA, 134 bp, Homo sapiens
  MAP TO AC009786.1; EXPRESSED IN HBL100, SIGNAL = 1.3; EXPRESSED IN HEART, SIGNAL = 0.88; NT HIT: gi11467432, EVALUE 1.20e+00; EST_HUMAN HIT: BE867719.1, EVALUE 1.80e+00
  unsure 14
tcagtgtaattccnaatgtaattccatccatgggagataagattaatgtgacaattagagcatgtcaacctgcaagtgtgtatagcaatgggtcaagttgtgctgaggggtgagatagatggagagtcacatag

SEQ ID NO: 21553 - DNA, 299 bp, Homo sapiens
  MAP TO AL021332.1; EXPRESSED IN PLACENTA, SIGNAL = 4.9; EXPRESSED IN HELA, SIGNAL = 7.8; EXPRESSED IN BT474, SIGNAL = 5.5; EXPRESSED IN BRAIN, SIGNAL = 6.1; EXPRESSED IN HBL100, SIGNAL = 5.5; EXPRESSED IN HEART, SIGNAL = 7.6; EXPRESSED IN ADULT LIVER, SIGNAL = 5.1; EXPRESSED IN FETAL LIVER, SIGNAL = 6.8; EXPRESSED IN LUNG, SIGNAL = 5.9; EXPRESSED IN BONE MARROW, SIGNAL = 5.3; EST_HUMAN HIT: BF311314.1, EVALUE 4.30e+00; NT HIT: gi4503352, EVALUE 2.40e+00
agaagaagaggaggagaaggaggaagaagaaaagaagaaaaggaagaagaaagaagaagaagaggaggaggaggaggagaaagagaagaagaagaaggaggaggaggaggaagaggaggaggaggaggaagaggaggaggaggaggaggagaaaaagaagaagaagaagaagagaagaagaagaagaagaggaagaagaagaggaagaggaagaagaagaagaagaagaagaagaagaagaagaagaagaagaacttttgaaaatgacttcattggtggctgccaaaaaattgatcatt

SEQ ID NO: 21554 - DNA, 107 bp, Homo sapiens
  MAP TO AC010703.1; EXPRESSED IN HEART, SIGNAL = 0.88; EXPRESSED IN LUNG, SIGNAL =   7; EXPRESSED IN BT474, SIGNAL = 9.1; EST_HUMAN HIT: AA501875.1, EVALUE 3.40e-01
cactaaggacttctttaattcttccaacaggtgataaattgttactaggtttaagagccaaaggatacatattaaattttttgcaagactcaataaatatggtttta

SEQ ID NO: 21555 - DNA, 227 bp, Homo sapiens
  MAP TO AL008627.1; EXPRESSED IN PLACENTA, SIGNAL = 2.3; EXPRESSED IN HELA, SIGNAL =  12; EXPRESSED IN HEART, SIGNAL =   5; EXPRESSED IN FETAL LIVER, SIGNAL = 6.9; EXPRESSED IN BT474, SIGNAL = 3.6; EXPRESSED IN BRAIN, SIGNAL = 3.8; EXPRESSED IN HBL100, SIGNAL = 7.6; EXPRESSED IN LUNG, SIGNAL = 8.1; EXPRESSED IN BONE MARROW, SIGNAL = 3.1; SWISSPROT HIT: P47915, EVALUE 1.00e-10; EST_HUMAN HIT: BE817465.1, EVALUE 3.00e-80; NT HIT: AF116627.1, EVALUE 3.00e-79
atgtcatcaagaaacccctatcacaaagatacaaatctcttaagggggtggaccccaagttcctggggaacatgtgctttaccaagaagcacaagaagaagggcctaaagaagatgcaggccgacagtgccaaggccgtgagtacatgtgccaaggctatcgaggccctcgtaaagcccaaagaggttaagcccaagatcccaaagggtgtcagctgtgagctcaat

SEQ ID NO: 21556 - DNA, 213 bp, Homo sapiens
  MAP TO AC009857.1; EXPRESSED IN HEART, SIGNAL = 1.3; EST_HUMAN HIT: AI493418.1, EVALUE 1.90e-01; SWISSPROT HIT: Q64632, EVALUE 1.90e+00; NT HIT: D90908.1, EVALUE 1.10e-01
  unsure 205
gatcgaagagttacaggacgggaaaatgggacctcagttcaaaccattccagctcctctcacactggcagcagttccagcaaagtaaaatgtttaatgttaccattaaacattctgggcagagcttgaagagcagagagatactaaatagaaacaatgacaaagagaatccgtataggaatttgcttattcctctgaacaagaanggttgctc

SEQ ID NO: 21557 - DNA, 282 bp, Homo sapiens
  MAP TO AJ009617.1; EXPRESSED IN PLACENTA, SIGNAL =  10; EXPRESSED IN HELA, SIGNAL = 9.8; EXPRESSED IN HEART, SIGNAL = 8.3; EXPRESSED IN BT474, SIGNAL =   7; EXPRESSED IN FETAL LIVER, SIGNAL =  11; EXPRESSED IN ADULT LIVER, SIGNAL =  11; EXPRESSED IN BRAIN, SIGNAL = 7.3; EXPRESSED IN BONE MARROW, SIGNAL = 9.2; EXPRESSED IN LUNG, SIGNAL =  11; EXPRESSED IN HBL100, SIGNAL = 8.4; EST_HUMAN HIT: BE243983.1, EVALUE 2.00e-50; NT HIT: gi11434492, EVALUE 2.00e-90; SWISSPROT HIT: Q13588, EVALUE 1.00e-27
atgccaggctgggacggccaccacctgaggtggccccgggtcctttcccctagctatggagaccaggtgcagcacttcaaggtgctgcgtgaggcctcggggaagtacttcctgtgggaggagaagttcaactccctcaacgagctggtcgacttctaccgcaccaccaccatcgccaagaagcggcagatcttcctgcgcgacgaggagcccttgctcaaggtaggggcgggtgggggctggcctgtgggagcctctctgcacctcctgccatctgcagca

SEQ ID NO: 21558 - DNA, 286 bp, Homo sapiens
  MAP TO AC009892.1; EXPRESSED IN HEART, SIGNAL = 0.92; NT HIT: AF110520.1, EVALUE 1.80e-01; EST_HUMAN HIT: AW820281.1, EVALUE 1.10e-02; SWISSPROT HIT: P06792, EVALUE 7.20e-01
aatatataaacaccatgacccaatttttctggcaaaaacaaacaagcaaacacacccacaaacatctttccagacacgtaagcaaaatctgcaattacacgctcttcacgtgtttaggcactataaccttcttcatttccggcaggtccttggtcctgtgtttctctagggggtgtctttccagcagcctctccttatgatgtcctgggattcctgtatccacttctctttcaataaccttgtaactcagcttgggaatcagagtggtcactttaatgtctaacat

SEQ ID NO: 21559 - DNA, 160 bp, Homo sapiens
  MAP TO AJ011929.1; EXPRESSED IN LUNG, SIGNAL = 1.3; EXPRESSED IN BONE MARROW, SIGNAL = 0.93; EXPRESSED IN HBL100, SIGNAL = 0.97; EXPRESSED IN HELA, SIGNAL =   1; EXPRESSED IN HEART, SIGNAL = 1.3; EXPRESSED IN FETAL LIVER, SIGNAL = 1.2; EXPRESSED IN BRAIN, SIGNAL = 0.97; EXPRESSED IN PLACENTA, SIGNAL = 1.2; EXPRESSED IN BT474, SIGNAL = 0.99; EXPRESSED IN ADULT LIVER, SIGNAL = 1.3; SWISSPROT HIT: P05904, EVALUE 3.80e+00; EST_HUMAN HIT: BF036485.1, EVALUE 2.20e+00; NT HIT: AL163284.2, EVALUE 2.00e-85
ttacgccagaaaagatcaacttgcagcatgccagaaggtcttccctagcttttccaagcagcagtttgaatcttatatagaacattccataaccacggaacatttggttcgcgacgccaatttcttgaggatgaggagaaacacaactgcctctgccaag

SEQ ID NO: 21560 - DNA, 1788 bp, Homo sapiens
  MAP TO AC010680.3; EXPRESSED IN ADULT LIVER, SIGNAL = 0.98; EXPRESSED IN BT474, SIGNAL = 0.93; EXPRESSED IN HEART, SIGNAL =  12; NT HIT: gi4507720, EVALUE 0.00e+00; EST_HUMAN HIT: BE835668.1, EVALUE 0.00e+00; SWISSPROT HIT: Q90688, EVALUE 2.00e-52
tgcctccatccgtggagctagatgtgaaattaattgaaggtcttgtggtaaaggctggaaccacagtcagattccctgctattataagaggtgtgcctgttcctactgcaaagtggacaaccgatgggagtgagattaaaaccgatgagcactacacagttgaaacagacaacttctcatcagtacttaccattaagaactgcttaaggagagacactggggaatatcaaatcacagtttccaatgcagccggtagcaaaacagtagccgtacatcttactgttcttgatgttcctgggccaccaacaggtcctattaatattctggatgttactcctgaacacatgactatctcatggcagccacctaaggatgatggaggaagccctgtgataaattatattgttgagaaacaagatacaaggaaagacacgtggggtgttgtctcttccggaagcagtaagacaaagctgaaaatcccacatctgcagaagggctgtgaatatgttttccgagttagagcagagaataagataggtgttggtcctccccttgactccacacctactgttgctaagcataaatttagtcctccgtctcctcctggtaaaccagtggttactgacattactgaaaatgcagcaacagtgtcttggaccctgccaaaatctgatggtggcagtccaataactggctactatatggaacgtcgagaagtaactggcaaatgggtgagggtcaacaaaacacctatcgctgacctgaagttcagagtgactggactctatgaaggaaatacatatgagtttagagtttttgctgaaaatcttgcaggactaagcaaaccatccccaagttctgatccaataaaagcttgccggcccatcaaaccacctggaccacctattaatcctaaactgaaagacaagagcagagaaacagctgatttggtgtggacaaagcctctcagtgatggtggtagccccattctaggatatgtagtggaatgtcagaaacctggcacagcacaatggaacaggattaataaagatgaactcattaggcaatgtgcctttagggtacctggactaattgaaggaaatgagtacagattccgtataaaggcagctaatattgtaggagagggtgagccaagagaactagcagaatctgtgattgcaaaagatatccttcatcctccagaagtagaacttgatgttacttgtcgtgatgttattaccgtgagagtaggccaaactatccgcattctagctcgagtcaaaggcagacctgaaccagacataacttggactaaggaaggcaaagtattggtccgagaaaagagggtggaccttattcaggatctacctcgtgttgagttacaaattaaagaagctgttagagctgatcatggcaagtatatcatctcagctaagaacagcagtggacatgcccaaggttcagccatcgttaacgtccttgacagacctgggccttgccagaatttgaaggttaccaatgtaaccaaagagaactgtacaatttcttgggaaaacccactagataatggtggctcagaaataacaaacttcatagtagaatatcgcaaaccaaaccagaaaggctggtcaattgttgcatcagatgtcactaaacgattaatcaaggccaaccttttagccaacaatgaatactatttccgagtttgtgcagagaataaagtaggtgttgggccaaccatcgaaacaaaaactcccattctggctattaaccctattgacagaccag

SEQ ID NO: 21561 - DNA, 159 bp, Homo sapiens
  MAP TO AJ229042.1; EXPRESSED IN LUNG, SIGNAL = 1.1; EXPRESSED IN BONE MARROW, SIGNAL =   1; EXPRESSED IN HBL100, SIGNAL = 1.1; EXPRESSED IN BT474, SIGNAL = 0.91; EXPRESSED IN ADULT LIVER, SIGNAL = 1.5; EXPRESSED IN FETAL LIVER, SIGNAL =   1; EXPRESSED IN BRAIN, SIGNAL = 1.1; EXPRESSED IN PLACENTA, SIGNAL = 1.2; EXPRESSED IN HEART, SIGNAL =   1; EXPRESSED IN HELA, SIGNAL = 1.2; SWISSPROT HIT: P43129, EVALUE 1.70e+00; EST_HUMAN HIT: AW967966.1, EVALUE 2.40e-02; NT HIT: AJ229042.1, EVALUE 1.00e-84
ctgttgtgttgaatgcttctggtgtggctaaagcccagtgttcctgccactgtgatgacggagtgggctgtgcttttgacagaaccacccagaacaaccagtcgccaatgggagccactttcaaccacctccacaaccctggcctggacacaaaacatc

SEQ ID NO: 21562 - DNA, 168 bp, Homo sapiens
  MAP TO AL049548.6; EXPRESSED IN PLACENTA, SIGNAL = 3.2; EXPRESSED IN FETAL LIVER, SIGNAL = 0.6; EXPRESSED IN LUNG, SIGNAL = 1.2; EXPRESSED IN HEART, SIGNAL = 1.2; EXPRESSED IN HBL100, SIGNAL = 0.66; EXPRESSED IN BT474, SIGNAL = 0.6; EXPRESSED IN BONE MARROW, SIGNAL = 1.6; EXPRESSED IN ADULT LIVER, SIGNAL = 0.72; EXPRESSED IN BRAIN, SIGNAL = 1.3; NT HIT: gi9506510, EVALUE 6.00e-37; SWISSPROT HIT: Q59757, EVALUE 2.90e+00; EST_HUMAN HIT: BF376311.1, EVALUE 2.00e-87
aaggttacagctcatcgaggaactctgtgtgaaactcccagtgcgggacccagtaagggacacacctggaacctgtcacgtgactctcaaagagctcagagctgccattgacagcacctacaggaagctcatggaagacccagacaagtggaaggactacactagcag

SEQ ID NO: 21563 - DNA, 429 bp, Homo sapiens
  MAP TO AL031177.1; EXPRESSED IN HBL100, SIGNAL =   1; EXPRESSED IN ADULT LIVER, SIGNAL = 1.2; EXPRESSED IN HEART, SIGNAL = 0.95; EXPRESSED IN BT474, SIGNAL = 0.95; EXPRESSED IN BRAIN, SIGNAL = 1.1; EXPRESSED IN BONE MARROW, SIGNAL = 0.99; NT HIT: D63562.1, EVALUE 0.00e+00; EST_HUMAN HIT: T28327.1, EVALUE 4.00e-31; SWISSPROT HIT: Q14031, EVALUE 3.00e-55
tcaaactctatgctttctacctggtgtcccttgagcctgggaaccagtccaaggggccctttgcctccaactgggggaggagacagtgcaggaccttaccatgaggaaagagtacccaatccagaggctgcgccagcccagggggcactgcgggatggtgatgtcctggctgtgcacagcaatggcttgcgagggtgcctcacacacagagcagcggctgatgtactggggaatctgggtctggctgacgggcatcatggggataggggcggtagtggagagccagtaagatttatcattgcgcctggcatagtggcacacctcgttgatgttgcagtagatgaagggcatggtgctgaagcggggcagacaggagccagcaaagcctggaaggagagaaagtgggcaagggcaggggaggtctggctg

SEQ ID NO: 21564 - DNA, 149 bp, Homo sapiens
  MAP TO AC010734.1; EXPRESSED IN LUNG, SIGNAL =   1; EXPRESSED IN HEART, SIGNAL = 0.93; SWISSPROT HIT: Q55081, EVALUE 1.70e+00; EST_HUMAN HIT: AW839450.1, EVALUE 5.00e-01
aaagtgttgacagtgttgttcaagagctttctgcgcagccatttcaatgtgttgtaaattttggccggcttcatgcagatacaatcagacagcacttgcttctggcccctattactcaccctttctgcaggacattgtgtggaatgcag

SEQ ID NO: 21565 - DNA, 151 bp, Homo sapiens
  MAP TO AL049594.4; EXPRESSED IN PLACENTA, SIGNAL = 0.91; EXPRESSED IN BT474, SIGNAL = 0.61; EXPRESSED IN LUNG, SIGNAL = 0.63; EXPRESSED IN HEART, SIGNAL = 0.84; NT HIT: AF163864.1, EVALUE 9.00e-42; EST_HUMAN HIT: M78158.1, EVALUE 8.00e-67; SWISSPROT HIT: P11369, EVALUE 1.00e-09
aatgatcttttgtatttctgtggtatcagttgtagtagctcccatttcattgctaattgagcttattaagatcttctttcctgttgtcttggttaatctcactaatggtctattaattttgtttatcttttcaaagaacctgctttttgtt

SEQ ID NO: 21566 - DNA, 103 bp, Homo sapiens
  MAP TO AL022149.2; EXPRESSED IN BT474, SIGNAL =   2; EXPRESSED IN BONE MARROW, SIGNAL = 1.7; EXPRESSED IN HBL100, SIGNAL = 3.7; EXPRESSED IN PLACENTA, SIGNAL =   2; EXPRESSED IN HELA, SIGNAL = 2.7; EXPRESSED IN FETAL LIVER, SIGNAL = 2.7; EXPRESSED IN ADULT LIVER, SIGNAL = 2.3; EXPRESSED IN BRAIN, SIGNAL =   2; EXPRESSED IN LUNG, SIGNAL = 2.4; EXPRESSED IN HEART, SIGNAL =   2; SWISSPROT HIT: P38354, EVALUE 4.10e+00; NT HIT: AF029308.1, EVALUE 8.70e-01; EST_HUMAN HIT: BE150554.1, EVALUE 5.10e+00
tagagaaaacttttattgtgttagagaatacatatatcatcatgaaaataatggttatatgaacattaaaggtgcttctggtgaggtctcagatgaaaatgtg

SEQ ID NO: 21567 - DNA, 467 bp, Homo sapiens
  MAP TO AL022163.1; EXPRESSED IN BONE MARROW, SIGNAL = 1.6; EXPRESSED IN HBL100, SIGNAL =   2; EXPRESSED IN PLACENTA, SIGNAL = 1.5; EXPRESSED IN HELA, SIGNAL = 3.8; EXPRESSED IN HEART, SIGNAL = 1.5; EXPRESSED IN ADULT LIVER, SIGNAL = 1.8; EXPRESSED IN BRAIN, SIGNAL = 1.7; EXPRESSED IN LUNG, SIGNAL = 2.1; EXPRESSED IN BT474, SIGNAL = 1.6; EXPRESSED IN FETAL LIVER, SIGNAL = 2.3; NT HIT: gi11421786, EVALUE 0.00e+00; EST_HUMAN HIT: BE731202.1, EVALUE 0.00e+00; SWISSPROT HIT: P14324, EVALUE 3.00e-62
aaatcctgaccgagcaggaacccacatccaggaacagagccctttgctcctccctcagaatgaatggagaccagaaatcagatgtttatgcccaagaaaagcaggatttcgttcagcacttcccccagatcattagggtgctgagtgaggatgagatggggcactcagagacaggagatgctgttgaccggctcaaggaggtcctggagtacaatgccattggaggcaagtatcaccaggatttgatggtgctagtagcattctgggagctggtggagccgaggaaacaggatgctgatagtctccagcaggccctgaccgtgggctggtgtgtggaactgctgcaagctttcttcctggtggcagatgacatcatggattcatccgtctcccgccggggacagatctggtggtatcagaagccgggcatgggtttggatgccatcaatgatgctatgcttctggaa

SEQ ID NO: 21568 - DNA, 162 bp, Homo sapiens
  MAP TO AC009948.2; EXPRESSED IN HEART, SIGNAL = 1.1; EXPRESSED IN BT474, SIGNAL = 1.3; EXPRESSED IN FETAL LIVER, SIGNAL = 0.9; EXPRESSED IN HELA, SIGNAL = 1.4; EST_HUMAN HIT: AW082138.1, EVALUE 2.00e-86; SWISSPROT HIT: Q14257, EVALUE 7.80e-01; NT HIT: AF100751.1, EVALUE 1.00e-86
ctatagttcatcgtgttggtatacattgtattccttgggagaaatgaagccatcaccatcatggtcattcttcttaaaaatatcttctaaaactgcatcctgatatgacttgtcacgtggcttctcatctttttcaaattccctttgcaagtagaggtttat

SEQ ID NO: 21569 - DNA, 106 bp, Homo sapiens
  MAP TO AL096817.12; EXPRESSED IN HEART, SIGNAL = 0.85; EXPRESSED IN LUNG, SIGNAL = 2.8; SWISSPROT HIT: P23525, EVALUE 7.00e+00; EST_HUMAN HIT: BE069325.1, EVALUE 4.00e-53; NT HIT: D00040.1, EVALUE 3.00e-03
gtttgtaataaaataattccaccagccccttttggaaaaaccttcaaacggatccatgaatacaagccacttaagacacgcttttacactcacaaagacatactag

SEQ ID NO: 21570 - DNA, 162 bp, Homo sapiens
  MAP TO AC009229.1; EXPRESSED IN PLACENTA, SIGNAL = 0.82; EXPRESSED IN LUNG, SIGNAL = 0.62; EXPRESSED IN BT474, SIGNAL = 0.65; EXPRESSED IN HEART, SIGNAL = 0.87; SWISSPROT HIT: Q04891, EVALUE 3.80e+00; NT HIT: M28071.1, EVALUE 8.00e-02
ctgattaatgcttcacgtctagcacaagcactttcattttcaagggattccatactgtattgtctagcccctggctgggttgggatatagttatcttggtggcataggatcagcatgtgtaagagcgggatattattgggcgctgtattgaaaagagtaacc

SEQ ID NO: 21571 - DNA, 138 bp, Homo sapiens
  MAP TO AC009696.2; EXPRESSED IN BT474, SIGNAL = 1.1; EXPRESSED IN HEART, SIGNAL = 0.94; EXPRESSED IN BRAIN, SIGNAL = 0.95; EST_HUMAN HIT: BF438432.1, EVALUE 4.00e-72; SWISSPROT HIT: P30082, EVALUE 2.30e+00
tggttccatctacagcatcaccgaaatgctgttgttactgcttctttctgggatcttcttgcatctttgcttctaaaggggcacaccttttatagaagtacgtccaggaatagaagtgacctgctttttcgcaagtaa

SEQ ID NO: 21572 - DNA, 184 bp, Homo sapiens
  MAP TO AC009297.2; EXPRESSED IN FETAL LIVER, SIGNAL = 0.92; EXPRESSED IN HEART, SIGNAL = 0.91; EXPRESSED IN BRAIN, SIGNAL = 0.98; EST_HUMAN HIT: AA135979.1, EVALUE 3.00e-82; SWISSPROT HIT: Q10473, EVALUE 2.00e-15
aaaggctccagccatcctaacgtgcattcacagtgtgcatcaagaaaagttatgacctgcccttttgaagcagctgctcctcgaagacgggcacgtattaacccagagcgttcttccatcctaataatttttactggcacttctaaatttttcacgtaattctctaatgtcaacttgagaaaat

SEQ ID NO: 21573 - DNA, 172 bp, Homo sapiens
  MAP TO AE000662.1; EXPRESSED IN HBL100, SIGNAL =   2; EXPRESSED IN PLACENTA, SIGNAL = 2.2; EXPRESSED IN HEART, SIGNAL = 2.1; EXPRESSED IN FETAL LIVER, SIGNAL = 2.1; EXPRESSED IN ADULT LIVER, SIGNAL = 2.6; EXPRESSED IN HELA, SIGNAL = 2.2; EXPRESSED IN BT474, SIGNAL = 2.3; EXPRESSED IN BRAIN, SIGNAL = 2.3; EXPRESSED IN LUNG, SIGNAL = 2.3; EXPRESSED IN BONE MARROW, SIGNAL = 2.3; SWISSPROT HIT: P25582, EVALUE 1.70e+00; EST_HUMAN HIT: AA401819.1, EVALUE 1.50e-01; NT HIT: AE004925.1, EVALUE 4.00e-01
ctgcccacctattctcagtgttgttgaagggattgaaagcagtaatgggtgtggaatgcttagtaaactgaaatcccagtgcaaatatgaagtgggaatgcatcagaatgcccaggaagacgaaccatgacccgaacaagatgggctgggccaggtcagatggcactgccat

SEQ ID NO: 21574 - DNA, 237 bp, Homo sapiens
  MAP TO AL022143.1; EXPRESSED IN BONE MARROW, SIGNAL = 0.94; EXPRESSED IN LUNG, SIGNAL = 1.1; EXPRESSED IN HEART, SIGNAL =   1; EXPRESSED IN FETAL LIVER, SIGNAL = 1.1; EXPRESSED IN BT474, SIGNAL = 0.99; EXPRESSED IN ADULT LIVER, SIGNAL = 0.99; EXPRESSED IN BRAIN, SIGNAL = 1.3; EST_HUMAN HIT: R15400.1, EVALUE 1.00e-109; SWISSPROT HIT: P48676, EVALUE 9.70e-02; NT HIT: AE004775.1, EVALUE 1.40e-01
ctgactcttcaaactgccggttgtgagtggcccaggagtcctggatctgcagcaggctgtcctccatggcctggatgtcagcatcagggcagttgcattcagggaaggtggggctgcacttgcaccagcagtcattctccttgcagacgagctcaccctcagagctgcatgtgatgtagctgagtgctgcagctacaaagcgctcacgcagatactcaggcagcagcacctgaaggc

SEQ ID NO: 21575 - DNA, 136 bp, Homo sapiens
  MAP TO AL096763.9; EXPRESSED IN HEART, SIGNAL =   1; EXPRESSED IN FETAL LIVER, SIGNAL = 2.1; SWISSPROT HIT: P13240, EVALUE 3.00e+00; EST_HUMAN HIT: BF673670.1, EVALUE 2.00e-03; NT HIT: AL163279.2, EVALUE 4.00e-06
cattaccataggacccagcaacagcactcttgggcagtatctcagagaaatgaaagcttgtgttcacacaaagcctatatggtatatgagtgttcatagcagctttacttctaatagccaaaaccaggaaacaacc

SEQ ID NO: 21576 - DNA, 193 bp, Homo sapiens
  MAP TO AL049874.2; EXPRESSED IN PLACENTA, SIGNAL = 5.9; EXPRESSED IN BONE MARROW, SIGNAL = 6.1; EXPRESSED IN FETAL LIVER, SIGNAL = 0.74; EXPRESSED IN ADULT LIVER, SIGNAL = 0.82; EXPRESSED IN BRAIN, SIGNAL = 0.92; EXPRESSED IN HEART, SIGNAL = 0.82; EXPRESSED IN BT474, SIGNAL = 0.65; EXPRESSED IN HELA, SIGNAL =  10; EXPRESSED IN LUNG, SIGNAL = 1.1; SWISSPROT HIT: P23964, EVALUE 7.00e-04; NT HIT: AF196779.1, EVALUE 5.00e-10; EST_HUMAN HIT: AW265354.1, EVALUE 3.00e-14
aagactgggcctatttcagagagatgaaagtaatagatgtctatattgtaaatgacaatgtaaatacttgctatggttatagaaatgaaggcggttgcacaggtgggagtcatggtaagtatagcttgtgaaactaaaatacttggttgggtgtggtggctcacacctctaattccaacactttgggaggctg

SEQ ID NO: 21577 - DNA, 117 bp, Homo sapiens
  MAP TO AC005193.2; EXPRESSED IN ADULT LIVER, SIGNAL = 0.88; EXPRESSED IN BRAIN, SIGNAL = 0.71; EXPRESSED IN PLACENTA, SIGNAL = 0.68; EXPRESSED IN HEART, SIGNAL = 0.84; EXPRESSED IN HELA, SIGNAL = 0.85; EXPRESSED IN LUNG, SIGNAL = 0.77; EXPRESSED IN HBL100, SIGNAL = 0.66; EXPRESSED IN BONE MARROW, SIGNAL = 0.69; EST_HUMAN HIT: BF058964.1, EVALUE 4.00e-04; NT HIT: gi9845300, EVALUE 7.00e-05
agacctggagtctttgtcttcctccaccccttgcagtgagggggcagtgctggtggtagcagtgatggcagcagcaggggcttcctctccctctccttctccctcgcctgccatctt

SEQ ID NO: 21578 - DNA, 221 bp, Homo sapiens
  MAP TO AC007282.2; EXPRESSED IN HBL100, SIGNAL = 2.3; EXPRESSED IN LUNG, SIGNAL = 0.9; EXPRESSED IN HELA, SIGNAL = 5.5; EXPRESSED IN HEART, SIGNAL = 1.4; EXPRESSED IN FETAL LIVER, SIGNAL = 0.57; EXPRESSED IN ADULT LIVER, SIGNAL = 0.83; EXPRESSED IN BRAIN, SIGNAL = 0.79; NT HIT: gi5835107, EVALUE 9.00e-06; EST_HUMAN HIT: AW750183.1, EVALUE 2.00e-06; SWISSPROT HIT: P92485, EVALUE 3.00e-15
catcaaattttcatgctcaaccccaaccctatatctttccattaattgggctccttctggaaacaactggctaatctgtccaatttggccttcatttatgattaccatcaacaatagaaggcccagcacctgtctcagacctactccattccagcacagaagttgtagcaggattttcctattaatctgcttttcacctactcatagaaaacaacaaaaca

SEQ ID NO: 21579 - DNA, 222 bp, Homo sapiens
  MAP TO AB020862.1; EXPRESSED IN HEART, SIGNAL = 1.1; EXPRESSED IN BRAIN, SIGNAL = 0.97; EXPRESSED IN BONE MARROW, SIGNAL = 1.2; NT HIT: gi11497602, EVALUE 4.00e-14; SWISSPROT HIT: Q99965, EVALUE 9.00e-14
ctgatattggtgaaattaaagatggcacagagtgtggttcaaaacatgtgtgtacacataggaagtgtgtccctctgccatttgaggaaagtacttgctcacctgagacctgtaatatgagaggcatctgcaacaataaacatcgtcattgcaattataagtgggccccaccctactgcctgttaaaaggcacaggaggaagtgttgacagtggcccatccc

SEQ ID NO: 21580 - DNA, 809 bp, Homo sapiens
  MAP TO AC005877.2; EXPRESSED IN LUNG, SIGNAL = 2.6; EXPRESSED IN PLACENTA, SIGNAL = 1.1; EXPRESSED IN HEART, SIGNAL = 1.3; NT HIT: D15050.1, EVALUE 0.00e+00; SWISSPROT HIT: P37275, EVALUE 1.00e-116; EST_HUMAN HIT: BE883884.1, EVALUE 0.00e+00
ctgatttccatttggctggatcactttcaagggtggttcttggactgcagggctgaccgtagttgagtaggtgtatgccacctggggaatcagaatcgtttgcttattggcagctagcgctcttaagcatggaacactgttctggtcagcaatggccacgattgtgggtaactgggcagtgactgtaggtatagcgatatttatggggttggcacttggtgggattacatttacaactggttctgagtctgtaacacaactgtccttttgtggctccttttttgcgcaagacaagttcaagggttcttcctggacagaataaacactgttctggtaaacactagtgatagttgacctttctaataattctccctgttgctttggtagtgaaagatcaagaggttctacttgtggctcttcttgtgcaccctcagctgtgtacaagtaaccctgtgtatttctggatgaggaaaggtttagaggtgatggggatggtgtactacttctggaaccattggtggttgatcccactggtaaaactggggagttagtcatcttcaaaggactttgtagatttactgtgctgtcctggggttcatttgcatttgcagattgaggctgatcattgttcttggcagggatatttactttgcctggttcaggagaagatggttcagaagactgcactgaaatctgtccagcttgcatcttttcaaaccacttttttactacatccagtggtaggtttactgaatcagcaatttttgagagctcttctgcacttggttgtgcattcaaagcataatatg

SEQ ID NO: 21581 - DNA, 304 bp, Homo sapiens
  MAP TO AL022323.7; EXPRESSED IN BT474, SIGNAL = 7.3; EXPRESSED IN BRAIN, SIGNAL = 7.2; EXPRESSED IN HBL100, SIGNAL = 7.8; EXPRESSED IN HEART, SIGNAL = 7.1; EXPRESSED IN ADULT LIVER, SIGNAL = 9.4; EXPRESSED IN FETAL LIVER, SIGNAL = 9.6; EXPRESSED IN LUNG, SIGNAL = 9.6; EXPRESSED IN BONE MARROW, SIGNAL = 8.4; EXPRESSED IN PLACENTA, SIGNAL =   8; EXPRESSED IN HELA, SIGNAL = 8.2; NT HIT: AB026898.1, EVALUE 7.40e-01; SWISSPROT HIT: O46502, EVALUE 4.10e+00; EST_HUMAN HIT: BF381987.1, EVALUE 7.00e-02
tcactgactgagtggggagggagcgctccagccaggttgtaggcgctgctggccctgcgcatgcccaggcaagaccttctagcttgcttctccctcttttctcatcccttggcacggtttgctccttctccacttccttcttttcctcctcccttttctcttcctccctcttctcttcctcctgttttttctcctccttttcctcttcttcctcttccatttttatctcttcctcccttttctcctccttctgcacttttttttttctttttaaaaatcaagacagggtctggccatgttgcca

SEQ ID NO: 21582 - DNA, 166 bp, Homo sapiens
  MAP TO AL022162.1; EXPRESSED IN BT474, SIGNAL =   4; EXPRESSED IN HEART, SIGNAL = 5.1; EXPRESSED IN FETAL LIVER, SIGNAL = 6.2; EXPRESSED IN ADULT LIVER, SIGNAL = 7.1; EXPRESSED IN BRAIN, SIGNAL = 3.3; EXPRESSED IN LUNG, SIGNAL = 6.4; EXPRESSED IN BONE MARROW, SIGNAL =   4; EXPRESSED IN PLACENTA, SIGNAL = 7.3; EXPRESSED IN HELA, SIGNAL = 6.2; EXPRESSED IN HBL100, SIGNAL = 5.7; NT HIT: gi11420270, EVALUE 7.00e-89; EST_HUMAN HIT: AU131510.1, EVALUE 1.00e-88; SWISSPROT HIT: Q01968, EVALUE 2.00e-28
tttgtgtttgaaaatgtgaagtttcggcaactacaaaaggagaagttccagatcagcaacaatggacaggttccctgccatttttctttcatccctaaacttaatgacagccagtactgcaagccatggcttcgggctgaaccttttgagggctacttggagccaa

SEQ ID NO: 21583 - DNA, 95 bp, Homo sapiens
  MAP TO AF001549.1; EXPRESSED IN LUNG, SIGNAL = 3.1; EXPRESSED IN BONE MARROW, SIGNAL = 3.9; EXPRESSED IN BRAIN, SIGNAL =   3; EXPRESSED IN HBL100, SIGNAL = 2.4; EXPRESSED IN HELA, SIGNAL = 2.1; EXPRESSED IN HEART, SIGNAL = 2.6; EXPRESSED IN BT474, SIGNAL = 3.2; EXPRESSED IN FETAL LIVER, SIGNAL = 2.4; EXPRESSED IN ADULT LIVER, SIGNAL =   3; EXPRESSED IN PLACENTA, SIGNAL =   3; NT HIT: gi11432785, EVALUE 2.00e-44; EST_HUMAN HIT: BF221544.1, EVALUE 1.00e-46
tgcgtgcattagagaatgattttttcaattctcccccaagaaaaactgttcggtttggtggaactgtgacagaagtcttgctgaagtacaaaaag

SEQ ID NO: 21584 - DNA, 176 bp, Homo sapiens
  MAP TO AF001552.1; EXPRESSED IN HELA, SIGNAL = 4.6; EXPRESSED IN PLACENTA, SIGNAL = 4.3; EXPRESSED IN ADULT LIVER, SIGNAL = 4.9; EXPRESSED IN HEART, SIGNAL = 3.8; EXPRESSED IN BT474, SIGNAL = 5.5; EXPRESSED IN FETAL LIVER, SIGNAL = 4.3; EXPRESSED IN LUNG, SIGNAL = 5.2; EXPRESSED IN BONE MARROW, SIGNAL = 6.5; EXPRESSED IN BRAIN, SIGNAL = 4.6; EXPRESSED IN HBL100, SIGNAL = 5.2; SWISSPROT HIT: P78559, EVALUE 6.70e+00; EST_HUMAN HIT: AV700314.1, EVALUE 9.50e+00; NT HIT: M18349.1, EVALUE 3.50e-01
ttactcagtccctctgttgtcaaggaagtccaacgccaccagcactagatccttcaacaatgcagagtcctcccgcaaatgaatctgactttgcctgtaaaccgcggagagtttcaaaaactggaaagcattacaggtggccagtttgtttccatttatataaagtgcagcaaaaa

SEQ ID NO: 21585 - DNA, 225 bp, Homo sapiens
  MAP TO AC012668.1; EXPRESSED IN LUNG, SIGNAL = 1.3; EXPRESSED IN BRAIN, SIGNAL = 1.1; EXPRESSED IN HBL100, SIGNAL = 1.4; EXPRESSED IN PLACENTA, SIGNAL =  15; EXPRESSED IN HEART, SIGNAL = 1.1; EXPRESSED IN ADULT LIVER, SIGNAL = 1.2; EXPRESSED IN FETAL LIVER, SIGNAL = 1.3; EST_HUMAN HIT: AI275042.1, EVALUE 1.00e-121; NT HIT: M18178.1, EVALUE 1.00e-124; SWISSPROT HIT: P11276, EVALUE 7.00e-37
taacgctgatatcatagtcaatgcccggctccagccctgtgactgtgtagtatcctactgaggagtccacaaaatcttcaaaaatagggataccttctcctgccgcaactactgtgatgcggtacccaataatggtggaagagtttagcggggtccacctcaggccgatgcttgaatcggttatatcaacaaagcttaggtcagtgagttggggcacctctattg

SEQ ID NO: 21586 - DNA, 122 bp, Homo sapiens
  MAP TO AC012275.1; EXPRESSED IN HBL100, SIGNAL = 1.8; EXPRESSED IN HELA, SIGNAL = 1.4; EXPRESSED IN PLACENTA, SIGNAL = 1.8; EXPRESSED IN ADULT LIVER, SIGNAL = 1.4; EXPRESSED IN HEART, SIGNAL = 5.5; EXPRESSED IN BT474, SIGNAL = 2.2; EXPRESSED IN FETAL LIVER, SIGNAL = 1.4; EXPRESSED IN LUNG, SIGNAL = 2.4; EXPRESSED IN BONE MARROW, SIGNAL = 2.4; EXPRESSED IN BRAIN, SIGNAL = 1.8; NT HIT: AL163285.2, EVALUE 1.00e-09; EST_HUMAN HIT: BE062558.1, EVALUE 2.00e-11
ataaggctgttcttgcatattacgcctattcccaataagatcctcatttccatctgagacttcttcagcctggactttactgtttctatcagtaccatcattttggcaataaccatttgact

SEQ ID NO: 21587 - DNA, 146 bp, Homo sapiens
  MAP TO AC012330.5; EXPRESSED IN BONE MARROW, SIGNAL = 3.6; EXPRESSED IN BRAIN, SIGNAL =   3; EXPRESSED IN HBL100, SIGNAL = 2.7; EXPRESSED IN PLACENTA, SIGNAL = 3.6; EXPRESSED IN FETAL LIVER, SIGNAL = 2.2; EXPRESSED IN LUNG, SIGNAL = 2.9; EXPRESSED IN HEART, SIGNAL =   2; EXPRESSED IN HELA, SIGNAL = 2.3; EXPRESSED IN ADULT LIVER, SIGNAL = 2.5; EXPRESSED IN BT474, SIGNAL = 2.6; NT HIT: U07000.1, EVALUE 1.00e-74; EST_HUMAN HIT: AL043953.1, EVALUE 5.00e-77; SWISSPROT HIT: P11274, EVALUE 5.00e-20
cgatgccctctgcgaagttggggtagaactcgtcagtgaagaggggctcgggcagctcacggaaatacagcttcagcgtgcctgcgatggcgttcacgtccatctcgctcatcatcaccgacacgtccttgttatctggaaagagc

SEQ ID NO: 21588 - DNA, 470 bp, Homo sapiens
  MAP TO AB026898.1; EXPRESSED IN HEART, SIGNAL = 0.86; EXPRESSED IN LUNG, SIGNAL =   1; EXPRESSED IN BRAIN, SIGNAL = 0.95; EXPRESSED IN BT474, SIGNAL = 1.2; EXPRESSED IN FETAL LIVER, SIGNAL = 0.92; NT HIT: AB026898.1, EVALUE 0.00e+00; EST_HUMAN HIT: AA921998.1, EVALUE 3.00e-01; SWISSPROT HIT: P07801, EVALUE 1.20e+00
cttccaggaacttgaaccagcatgaggtagcaggacatccacattcctggtctctggagatgctgttacgcagattgagggctgtccacaccaagcaggatgacaagtttgccaacctcctggatgcggtgggggagtttggcacattccagcagaggctagtagccctcacctttatccccagcatcatgtcggccttcttcatgtttgctgaccacttcgtgttcacagcccagaagccctattgcaataccagctggatcctggcagtgggcccccacctgtccaaagctgagcagctgaatctgaccataccccaagcacccaatggcagtttcctgacatgcttcatgtaccttcctgtgccttggaatctggattctaccatccagtttggcctcaatgacacagacacatgccaagatgggtggatctatcctgacgctaagaagcgatcgctgatcaatgag

SEQ ID NO: 21589 - DNA, 194 bp, Homo sapiens
  MAP TO AF130248.1; EXPRESSED IN BONE MARROW, SIGNAL =   4; EXPRESSED IN HELA, SIGNAL = 5.2; EXPRESSED IN HBL100, SIGNAL = 4.4; EXPRESSED IN FETAL LIVER, SIGNAL = 4.9; EXPRESSED IN LUNG, SIGNAL = 6.6; EXPRESSED IN PLACENTA, SIGNAL = 5.3; EXPRESSED IN HEART, SIGNAL = 3.7; EXPRESSED IN BT474, SIGNAL = 4.6; EXPRESSED IN ADULT LIVER, SIGNAL = 6.2; EXPRESSED IN BRAIN, SIGNAL = 4.2; NT HIT: AL163208.2, EVALUE 1.00e-105; SWISSPROT HIT: P43578, EVALUE 2.20e+00
ttaggagctcgcttccagattacatgcaccagctactttggaggaagttcataagaattgcaattagtgagaagcgaagcactgatgggaaccaagcaagaaaacagaagagtaatgaaatgaagagagctttaatgaacaagaaaaacaggcaggagcaggcaagtcaggccctgaaaatgaatggtgggaga

SEQ ID NO: 21590 - DNA, 224 bp, Homo sapiens
  MAP TO AF001548.1; EXPRESSED IN BT474, SIGNAL = 3.3; EXPRESSED IN LUNG, SIGNAL =   5; EXPRESSED IN BONE MARROW, SIGNAL =   4; EXPRESSED IN BRAIN, SIGNAL = 3.6; EXPRESSED IN HBL100, SIGNAL = 3.8; EXPRESSED IN FETAL LIVER, SIGNAL = 3.3; EXPRESSED IN PLACENTA, SIGNAL = 5.2; EXPRESSED IN HEART, SIGNAL = 3.4; EXPRESSED IN HELA, SIGNAL = 3.1; EXPRESSED IN ADULT LIVER, SIGNAL = 4.1; NT HIT: AB020673.1, EVALUE 1.00e-117; EST_HUMAN HIT: AI128192.1, EVALUE 1.00e-117; SWISSPROT HIT: P35749, EVALUE 8.00e-34
gcttgacgatgaaatcgctcagaagaacaatgccctgaagaagatccgggagctggagggccacatctcagacctccaggaggacctggactcagagcgggccgccaggaacaaggctgaaaagcagaagcgagacctcggcgaggagctggaggccctaaagacagagctggaagacacactggacagcacagccactcagcaggagctcaggtgaggggccc

SEQ ID NO: 21591 - DNA, 104 bp, Homo sapiens
  MAP TO AF134471.1; EXPRESSED IN HBL100, SIGNAL =   2; EXPRESSED IN FETAL LIVER, SIGNAL = 3.7; EXPRESSED IN BT474, SIGNAL = 2.2; EXPRESSED IN LUNG, SIGNAL = 2.5; EXPRESSED IN PLACENTA, SIGNAL = 2.3; EXPRESSED IN HEART, SIGNAL = 2.1; EXPRESSED IN HELA, SIGNAL = 2.1; EXPRESSED IN ADULT LIVER, SIGNAL = 2.8; EXPRESSED IN BRAIN, SIGNAL = 2.3; EXPRESSED IN BONE MARROW, SIGNAL = 2.2; EST_HUMAN HIT: BF371719.1, EVALUE 1.00e-37; NT HIT: gi9628510, EVALUE 2.20e-01; SWISSPROT HIT: Q92908, EVALUE 8.00e-01
cctggatggaaagcatctcatatgggtggagctggtgctcctggatggaaagcatctcacacggacagggccaggggtgggagcggggaggccttgagaggaga

SEQ ID NO: 21592 - DNA, 152 bp, Homo sapiens
  MAP TO AF002223.1; EXPRESSED IN BT474, SIGNAL = 1.6; EXPRESSED IN BONE MARROW, SIGNAL = 2.5; EXPRESSED IN BRAIN, SIGNAL = 2.1; EXPRESSED IN HBL100, SIGNAL = 1.7; EXPRESSED IN PLACENTA, SIGNAL = 4.4; EXPRESSED IN FETAL LIVER, SIGNAL = 1.7; EXPRESSED IN LUNG, SIGNAL = 1.8; EXPRESSED IN HEART, SIGNAL = 1.7; EXPRESSED IN HELA, SIGNAL = 1.8; EXPRESSED IN ADULT LIVER, SIGNAL = 1.7; NT HIT: gi6678492, EVALUE 7.40e-02; SWISSPROT HIT: P31943, EVALUE 2.30e+00; EST_HUMAN HIT: R47846.1, EVALUE 2.00e+00
cccagcattgctctttctcccctcccttgtgtatacaccccgtgctttggctcccataagcaacttggtcttcctaaacaagccctctgcctcctcacctgtggacttctcgtgcagccattttgtccccctagagcatacattcatcccca

SEQ ID NO: 21593 - DNA, 107 bp, Homo sapiens
  MAP TO AL021395.8; EXPRESSED IN HEART, SIGNAL = 1.1; NT HIT: AF147083.1, EVALUE 2.00e-01
tgtcctggggaccacgcgaaccctctggaacattatctttatgacctcgcagtagctgagctgtgtctggtaagtagtcctcaccccagtgctcccagtagattctg

SEQ ID NO: 21594 - DNA, 141 bp, Homo sapiens
  MAP TO AL109853.3; EXPRESSED IN HEART, SIGNAL = 1.2; EST_HUMAN HIT: AW961061.1, EVALUE 1.30e+00; SWISSPROT HIT: P40578, EVALUE 5.10e+00
ttttatcaaggaggtacctggcagccagaaataaatagcccattttataagcctgaatgacttccaggatgtggagaactgtagaaaagagttttgcaaagacaactatataagctggtgctggtaaaatttttactagtt

SEQ ID NO: 21595 - DNA, 93 bp, Homo sapiens
  MAP TO AF088219.1; EXPRESSED IN FETAL LIVER, SIGNAL = 1.1; EXPRESSED IN ADULT LIVER, SIGNAL = 1.1; EXPRESSED IN LUNG, SIGNAL =   1; EXPRESSED IN HELA, SIGNAL =   1; EXPRESSED IN PLACENTA, SIGNAL = 1.3; EXPRESSED IN HBL100, SIGNAL = 1.1; EXPRESSED IN HEART, SIGNAL =   1; EST_HUMAN HIT: AV661393.1, EVALUE 3.00e-16; NT HIT: AL163252.2, EVALUE 5.00e-11
ttgctatctgcagacggctacttcgtctcagtggagagtcagggtgacagccttttataccctgccctcttggtacccaggtccttgtctgac

SEQ ID NO: 21596 - DNA, 136 bp, Homo sapiens
  MAP TO AF093117.1; EXPRESSED IN BONE MARROW, SIGNAL = 1.1; EXPRESSED IN HBL100, SIGNAL = 1.5; EXPRESSED IN FETAL LIVER, SIGNAL = 1.2; EXPRESSED IN BT474, SIGNAL = 1.2; EXPRESSED IN LUNG, SIGNAL =   1; EXPRESSED IN PLACENTA, SIGNAL = 1.2; EXPRESSED IN HEART, SIGNAL = 0.94; EXPRESSED IN HELA, SIGNAL = 1.2; EXPRESSED IN ADULT LIVER, SIGNAL = 1.3; EXPRESSED IN BRAIN, SIGNAL = 1.1; EST_HUMAN HIT: BE963445.2, EVALUE 4.50e-01
ctctttccagtttctgatggacttgctccagggaatcaaggctgagtacaggaagctgtctctgtggtcctccacagacctccggagtgtttccacgtcttccctgcttaggagcttcgactctaagtcaacaagt

SEQ ID NO: 21597 - DNA, 139 bp, Homo sapiens
  MAP TO AF042091.1; EXPRESSED IN BT474, SIGNAL = 1.8; EXPRESSED IN BRAIN, SIGNAL = 1.4; EXPRESSED IN HBL100, SIGNAL = 1.5; EXPRESSED IN LUNG, SIGNAL = 1.8; EXPRESSED IN BONE MARROW, SIGNAL = 1.7; EXPRESSED IN PLACENTA, SIGNAL = 1.3; EXPRESSED IN HEART, SIGNAL = 1.6; EXPRESSED IN HELA, SIGNAL = 1.3; EXPRESSED IN ADULT LIVER, SIGNAL = 1.6; EXPRESSED IN FETAL LIVER, SIGNAL = 1.6; SWISSPROT HIT: P77775, EVALUE 5.10e+00; EST_HUMAN HIT: AA973631.1, EVALUE 1.20e-01; NT HIT: AL163282.2, EVALUE 7.00e-73
aaggaaagaaatgagcacttttaacaagaatattttcacacatattacctgtacaggagacataatcagtgcaaaatggaaatgtgaagcttctcattcaaaaactaagatttgcaagatgatgacagcagtaaataaa

SEQ ID NO: 21598 - DNA, 160 bp, Homo sapiens
  MAP TO AC007279.3; EXPRESSED IN HEART, SIGNAL = 8.7; EST_HUMAN HIT: N27808.1, EVALUE 7.00e-83; NT HIT: AB046783.1, EVALUE 3.00e-85
tttcctaaataaaaaccaagagctgttgcaagatttgtcagaagtgaatgacgaaaacactcagttgatggaaatactgaatactttgtttttcttgccaatcagacgacttcataattacgcaaaagttttgctaaagcttgctacttgttttgaagtg

SEQ ID NO: 21599 - DNA, 255 bp, Homo sapiens
  MAP TO AH005549.1; EXPRESSED IN BRAIN, SIGNAL = 1.4; EXPRESSED IN BONE MARROW, SIGNAL = 4.4; EXPRESSED IN HELA, SIGNAL = 1.4; EXPRESSED IN HBL100, SIGNAL = 1.5; EXPRESSED IN FETAL LIVER, SIGNAL = 1.5; EXPRESSED IN LUNG, SIGNAL = 1.3; EXPRESSED IN PLACENTA, SIGNAL = 1.4; EXPRESSED IN HEART, SIGNAL = 1.1; EXPRESSED IN BT474, SIGNAL = 1.2; EXPRESSED IN ADULT LIVER, SIGNAL = 1.7; SWISSPROT HIT: P55518, EVALUE 1.30e+00; NT HIT: Z74270.1, EVALUE 6.10e-01
ccatatcctagatgacattgtcttggcccaaaatctcacctatggagatgacatagcttcagaggatattgccccaactcaaaactttactgctgggtatgacattgcctcagacaatatcacccaacccaagacgttggtgttgggaatgactctgcctctgtgctgcagaggacatccccacttgcactaaatctgcactctagtgatgtccatggactgcttctcctaagacacaaatggacacaggacttt

SEQ ID NO: 21600 - DNA, 257 bp, Homo sapiens
  MAP TO AF053356.1; EXPRESSED IN BT474, SIGNAL = 3.8; EXPRESSED IN HBL100, SIGNAL = 4.6; EXPRESSED IN HELA, SIGNAL = 4.5; EXPRESSED IN HEART, SIGNAL = 4.3; EXPRESSED IN FETAL LIVER, SIGNAL = 4.4; EXPRESSED IN BRAIN, SIGNAL =   5; EXPRESSED IN LUNG, SIGNAL = 4.9; EXPRESSED IN BONE MARROW, SIGNAL = 4.8; EXPRESSED IN PLACENTA, SIGNAL = 5.2; EXPRESSED IN ADULT LIVER, SIGNAL = 5.5; NT HIT: U40024.1, EVALUE 5.00e-04; EST_HUMAN HIT: BE777771.1, EVALUE 3.60e+00; SWISSPROT HIT: Q28983, EVALUE 2.00e-20
gcacacggtggcccttctgcagggtgacctgggcatcgtacatgtcaatgtagacctcatgaaggcggaaagcctcagttccaccttcctccttctcatgcttggcactgatcttgaacaagggcaaggccatggcggggtggcacactttcaccaggacaagagtgcaggcgtccgggatagaatggttactaccatcaaagctcacgtagtgggactcccctgggagctgacacactcccacacctgggaggaca

SEQ ID NO: 21601 - DNA, 156 bp, Homo sapiens
  MAP TO AF053356.1; EXPRESSED IN HEART, SIGNAL = 6.3; EXPRESSED IN FETAL LIVER, SIGNAL = 7.3; EXPRESSED IN ADULT LIVER, SIGNAL =   8; EXPRESSED IN BT474, SIGNAL = 5.9; EXPRESSED IN LUNG, SIGNAL = 7.2; EXPRESSED IN PLACENTA, SIGNAL =  11; EXPRESSED IN HELA, SIGNAL = 6.4; EXPRESSED IN HBL100, SIGNAL = 6.3; EXPRESSED IN BRAIN, SIGNAL = 6.2; EXPRESSED IN BONE MARROW, SIGNAL = 7.6; EST_HUMAN HIT: AW879618.1, EVALUE 2.00e-76; SWISSPROT HIT: P14605, EVALUE 4.40e-01; NT HIT: gi11526442, EVALUE 2.00e-76
acctgtcccggaaccggtttcccgaggtgcccgaggcggcgtgccagctggtgtccctggagggcctgagcctctaccacaattgcctgagatgcctgaacccagccttggggaatctcacagccctcacctacctcaacctcaggtagggaggcc

SEQ ID NO: 21602 - DNA, 198 bp, Homo sapiens
  MAP TO AF109907.1; EXPRESSED IN BT474, SIGNAL = 2.7; EXPRESSED IN BRAIN, SIGNAL = 2.8; EXPRESSED IN HELA, SIGNAL = 2.2; EXPRESSED IN HEART, SIGNAL = 2.2; EXPRESSED IN FETAL LIVER, SIGNAL = 2.2; EXPRESSED IN LUNG, SIGNAL = 2.7; EXPRESSED IN BONE MARROW, SIGNAL = 2.6; EXPRESSED IN PLACENTA, SIGNAL = 3.2; EXPRESSED IN HBL100, SIGNAL = 2.9; EXPRESSED IN ADULT LIVER, SIGNAL = 2.2; EST_HUMAN HIT: BE935454.1, EVALUE 5.00e-91; NT HIT: AJ008005.1, EVALUE 1.00e-108; SWISSPROT HIT: P49769, EVALUE 9.00e-12
aatctataccccattcacagaagataccgagactgtgggccagagagccctgcactcaattctgaatgctgccatcatgatcagtgtcattgttgtcatgactatcctcctggtggttctgtataaatacaggtgctataaggtgagcatgagacacagatctttgctttccaccctgttcttcttatggttgggtat

SEQ ID NO: 21603 - DNA, 198 bp, Homo sapiens
  MAP TO AF042089.1; EXPRESSED IN ADULT LIVER, SIGNAL =   2; EXPRESSED IN BT474, SIGNAL = 1.8; EXPRESSED IN HBL100, SIGNAL = 1.7; EXPRESSED IN HELA, SIGNAL = 1.6; EXPRESSED IN HEART, SIGNAL = 1.8; EXPRESSED IN FETAL LIVER, SIGNAL = 1.6; EXPRESSED IN BRAIN, SIGNAL = 1.8; EXPRESSED IN LUNG, SIGNAL = 1.5; EXPRESSED IN BONE MARROW, SIGNAL = 2.2; EXPRESSED IN PLACENTA, SIGNAL = 1.5; EST_HUMAN HIT: AW582547.1, EVALUE 4.70e-01; SWISSPROT HIT: Q15746, EVALUE 2.00e-31; NT HIT: AF069603.1, EVALUE 5.00e-84
ggaatccaccccctgaagtcatctggctgcacaatgggaatgagatccaagagtcagaggacttccactttgaacagagaggcactcagcacagtctttgtatccaggaagtgttcccggaggacacgggcatgtatacctgcgaggcctggaacagcgccgaagaggtccgcacccaggccatgctgatggtacaag

SEQ ID NO: 21604 - DNA, 529 bp, Homo sapiens
  MAP TO AL021920.1; EXPRESSED IN BT474, SIGNAL = 4.7; EXPRESSED IN LUNG, SIGNAL = 4.8; EXPRESSED IN BRAIN, SIGNAL = 3.2; EXPRESSED IN BONE MARROW, SIGNAL = 4.7; EXPRESSED IN HEART, SIGNAL = 3.6; EXPRESSED IN FETAL LIVER, SIGNAL = 4.2; EXPRESSED IN ADULT LIVER, SIGNAL = 6.1; EXPRESSED IN PLACENTA, SIGNAL = 4.3; EXPRESSED IN HELA, SIGNAL = 4.4; EXPRESSED IN HBL100, SIGNAL = 4.5; NT HIT: U43723.1, EVALUE 1.10e+00; SWISSPROT HIT: P42607, EVALUE 3.80e-01; EST_HUMAN HIT: AI240973.1, EVALUE 3.40e-01
atggtcatcttgggacagcttcttagggtcacccaggagcccaggagccaggtatgccactccgtggtgggacagaaacccctgtaaagagcaagcagacactcagtcacccaggaccctccccaacactcccattccctgcaatctatcagcgcatcctatcaatcccgtctggagtagatatctgatcatgccttctctcccttgtgactgccatcacccaagtccaggttcctgctacatccttcctaaaaggccttcccctgcaagcttgcctacctcacatcgactttccccacatagctgcaaaagtggacgtctgagaagaagggggaggaagaggagaagaaggaagagatgaagaaggcgaagatgaagaaaaagaagaagaggaggaagaagaagaaggaggaagagggggaaaagaggaggagatgatgttatgtcatcccttcacccttcccctgcacacacacacacacacacacacacacacacacacacacagacacacacacacacacacaca

SEQ ID NO: 21605 - DNA, 271 bp, Homo sapiens
  MAP TO AF043945.1; EXPRESSED IN BONE MARROW, SIGNAL = 1.9; EXPRESSED IN BRAIN, SIGNAL = 1.4; EXPRESSED IN HEART, SIGNAL = 1.3; EXPRESSED IN FETAL LIVER, SIGNAL = 1.4; EXPRESSED IN ADULT LIVER, SIGNAL = 1.7; EXPRESSED IN BT474, SIGNAL = 1.5; EXPRESSED IN LUNG, SIGNAL = 1.5; EXPRESSED IN PLACENTA, SIGNAL = 1.3; EXPRESSED IN HELA, SIGNAL = 1.3; EXPRESSED IN HBL100, SIGNAL = 1.2; NT HIT: AL163284.2, EVALUE 0.00e+00; SWISSPROT HIT: P10272, EVALUE 2.50e+00
acacttttctgggcatcccaggcagccacatgcacaaagccatccctacccaaaggaaagcctgtgcgatacaggccagcaatgggtgcccacctgcacacagggtcagcctgggtttggccagtgtgcccactccctggacaggcaagctcactctgttcctgttcattccttagcctttcaggagtaccccctgtttgtttcagagcttcgtgcatggcagtggtcctgctgctggtggtgtgatggtggcttttatgtttctgctcat

SEQ ID NO: 21606 - DNA, 151 bp, Homo sapiens
  MAP TO AF051934.1; EXPRESSED IN BT474, SIGNAL = 1.3; EXPRESSED IN BRAIN, SIGNAL = 1.3; EXPRESSED IN HELA, SIGNAL = 1.2; EXPRESSED IN HEART, SIGNAL = 1.7; EXPRESSED IN FETAL LIVER, SIGNAL = 1.3; EXPRESSED IN LUNG, SIGNAL = 1.3; EXPRESSED IN BONE MARROW, SIGNAL = 1.5; EXPRESSED IN PLACENTA, SIGNAL = 1.2; EXPRESSED IN HBL100, SIGNAL = 1.2; EXPRESSED IN ADULT LIVER, SIGNAL = 1.4; NT HIT: AL163268.2, EVALUE 5.00e-80; SWISSPROT HIT: P52719, EVALUE 7.70e-01
atgcatatctgaagttaagatcatggtcctgacggggacagtgaacttggtgtctgggttaaagatgagagtggcagctggctcccaggtggtccagggtgtcagtgaggtgatggaacattccacaccccttttaaccccagcatcagtg

SEQ ID NO: 21607 - DNA, 124 bp, Homo sapiens
  MAP TO AL022101.1; EXPRESSED IN PLACENTA, SIGNAL =   2; EXPRESSED IN HBL100, SIGNAL = 0.95; EXPRESSED IN FETAL LIVER, SIGNAL = 1.1; EXPRESSED IN ADULT LIVER, SIGNAL = 1.7; EXPRESSED IN LUNG, SIGNAL = 1.1; EXPRESSED IN BONE MARROW, SIGNAL = 0.98; EXPRESSED IN HELA, SIGNAL = 1.2; EXPRESSED IN HEART, SIGNAL =   1; NT HIT: X72862.1, EVALUE 2.30e-01; SWISSPROT HIT: O60810, EVALUE 1.80e-02
tgagtttggccataggagaggatgagattgcatgggcttggcccgagagagatgccttttctctgggtttgtcctctggaagttttccctgcagattcatgaagatgagcatctggactccacc

SEQ ID NO: 21608 - DNA, 249 bp, Homo sapiens
  MAP TO AL021706.1; EXPRESSED IN BT474, SIGNAL = 1.2; EXPRESSED IN LUNG, SIGNAL = 1.4; EXPRESSED IN BRAIN, SIGNAL = 1.2; EXPRESSED IN BONE MARROW, SIGNAL = 1.3; EXPRESSED IN HEART, SIGNAL = 1.1; EXPRESSED IN ADULT LIVER, SIGNAL = 1.8; EXPRESSED IN FETAL LIVER, SIGNAL = 1.3; EXPRESSED IN PLACENTA, SIGNAL = 2.6; EXPRESSED IN HELA, SIGNAL = 1.8; EXPRESSED IN HBL100, SIGNAL = 1.7; NT HIT: AL163246.2, EVALUE 1.00e-57; EST_HUMAN HIT: AA601143.1, EVALUE 5.00e-60; SWISSPROT HIT: P30305, EVALUE 3.20e-01
atccaaacaacatccctatctgccactgacaccttaagcaccagtgaatctgccgggtcatatgccccaaatgtcagagcagcttgcacagcagcctggacctggtgcagagccttctcctgttctggacaccactcaaaactggcagccttttgggtcactcgataattggaccagagtaacacacccaaatgagcagtgtgttgcctctgaaatccaaatagccccactagccccattgtgcctctt

SEQ ID NO: 21609 - DNA, 212 bp, Homo sapiens
  MAP TO AL031407.3; EXPRESSED IN LUNG, SIGNAL = 1.1; EXPRESSED IN PLACENTA, SIGNAL =   1; EXPRESSED IN HEART, SIGNAL = 1.1; EXPRESSED IN BT474, SIGNAL = 1.1; EXPRESSED IN BRAIN, SIGNAL = 1.2; EST_HUMAN HIT: AL110391.2, EVALUE 5.10e-01; NT HIT: AL161502.2, EVALUE 4.30e-01; SWISSPROT HIT: P71548, EVALUE 4.40e+00
ccaacctaatagaacatgctaagctcactcctgttctagtctctcatgacctgaagctctctgggcctagtccttccaccatccggatccttcttgtcatccaggtctccgctggaagaccgcccaccctgagcggccaaactgaaggggactctgtcacccttttccacattaccctgttttaccaaattgtcattactttgtattttgat

SEQ ID NO: 21610 - DNA, 381 bp, Homo sapiens
  MAP TO AL008725.1; EXPRESSED IN PLACENTA, SIGNAL = 3.5; EXPRESSED IN HBL100, SIGNAL = 3.4; EXPRESSED IN LUNG, SIGNAL = 3.5; EXPRESSED IN BRAIN, SIGNAL = 2.4; EXPRESSED IN BONE MARROW, SIGNAL =   3; EXPRESSED IN HEART, SIGNAL = 2.9; EXPRESSED IN HELA, SIGNAL = 2.9; EXPRESSED IN BT474, SIGNAL = 2.7; EXPRESSED IN ADULT LIVER, SIGNAL = 4.8; EXPRESSED IN FETAL LIVER, SIGNAL = 3.8; NT HIT: AF220542.1, EVALUE 1.00e-03; EST_HUMAN HIT: AW572881.1, EVALUE 2.00e-08; SWISSPROT HIT: P39188, EVALUE 4.70e-02
agcatgcccagatgaaccaaacatgcaaccacagggggaccataagccctgggaccaaggaacagtgactgaattaagaagctcgggagttcttgaccagcctgggcaacagaataagacttcatctctaccaaaaaatattttgaagaagaagaaggaagaggaagaggaggaggaggaggagaagaagaggaagaagaagaaaagaagaagaagaagaagaagaagaagaagaagaagaagaagaagaagaagaagaagaagaagaagaagaggaagaagaagaaggaggaggaggaggagaagaagaaggggagggggagggggaatgggaagaggaagaggaagaggaagcagctctgaggtgaatgcaggatccaa

SEQ ID NO: 21611 - DNA, 122 bp, Homo sapiens
  MAP TO AL021918.1; EXPRESSED IN BT474, SIGNAL = 8.7; EXPRESSED IN BRAIN, SIGNAL = 5.4; EXPRESSED IN BONE MARROW, SIGNAL = 8.6; EXPRESSED IN HEART, SIGNAL = 4.6; EXPRESSED IN PLACENTA, SIGNAL =  11; EXPRESSED IN ADULT LIVER, SIGNAL = 2.7; EXPRESSED IN FETAL LIVER, SIGNAL = 9.2; EXPRESSED IN LUNG, SIGNAL = 6.2; EXPRESSED IN HELA, SIGNAL =  24; EXPRESSED IN HBL100, SIGNAL =  18; SWISSPROT HIT: P49312, EVALUE 9.00e-11; NT HIT: gi4504444, EVALUE 3.00e-34; EST_HUMAN HIT: AW880376.1, EVALUE 2.00e-36
cgaggcagtggcaagaacaggggctttgccttgtaacttttgatgaccatgactccatggaaaggattgtcattcagaaataccacactgtgaatggccacaactgtgactttaggagtgct

SEQ ID NO: 21612 - DNA, 120 bp, Homo sapiens
  MAP TO AJ010598.1; EXPRESSED IN HEART, SIGNAL = 0.85; EXPRESSED IN PLACENTA, SIGNAL = 0.62; EXPRESSED IN HELA, SIGNAL = 0.79; EXPRESSED IN BRAIN, SIGNAL = 0.75; SWISSPROT HIT: P57080, EVALUE 2.00e-16; EST_HUMAN HIT: AA482201.1, EVALUE 1.00e-61; NT HIT: AF170562.1, EVALUE 1.00e-61
tttatgcgtgagctgaggtatctatttgcacttcttgttggtaccaaaaggaagtatgttgatccatcaagagcagttgaaattcttaaggatgctttcaaatcaaatgactcacagcag

SEQ ID NO: 21613 - DNA, 350 bp, Homo sapiens
  MAP TO AL031577.1; EXPRESSED IN HELA, SIGNAL = 1.2; EXPRESSED IN HEART, SIGNAL = 1.5; EXPRESSED IN LUNG, SIGNAL = 1.6; EXPRESSED IN BRAIN, SIGNAL =   1; EST_HUMAN HIT: BF115182.1, EVALUE 0.00e+00; NT HIT: L00649.1, EVALUE 1.90e-01; SWISSPROT HIT: Q01102, EVALUE 4.00e+00
atgtcatctgggtgattctcagtgtggaggtgggtggacttttaggagtaacgcagcagctgtcatcttttgaaacggagttcaacacacagccgcatcgtaaggtagaaggaaacttcaacccttttgcctctccccaaaagaaccgacaatcagatgaaaacaacttaaaagaccctgggggctccgagttcgactcgatcagcaaaaacacatgggctcctgctcctgacacatgggctcctgctcctgaccaaactgagcaagaccagaatagactgtcacagaactctgtaaatctgtctcccagcagtcacgcaaacaacttatcagtagtgacttacagtaag

SEQ ID NO: 21614 - DNA, 214 bp, Homo sapiens
  MAP TO AP000275.1; EXPRESSED IN PLACENTA, SIGNAL = 0.8; EXPRESSED IN LUNG, SIGNAL = 0.71; EXPRESSED IN ADULT LIVER, SIGNAL = 0.73; EXPRESSED IN BONE MARROW, SIGNAL = 0.68; EXPRESSED IN BRAIN, SIGNAL = 1.5; EXPRESSED IN HEART, SIGNAL = 0.8; EXPRESSED IN BT474, SIGNAL = 1.4; EST_HUMAN HIT: BE175478.1, EVALUE 2.00e-87; NT HIT: AF164347.1, EVALUE 7.90e+00; SWISSPROT HIT: O86576, EVALUE 3.50e+00
tcatagggaagcgcaaatcaaaccaataatgtgataccacacattaggatggatatgataaacaagcattggtgagactagagggaagtaggaatgctcgaatatgattgcagggaatgtaaaaccgtgaagcaacagtgaaaatagtatggcgtgtactggaaaaattagaaacagaattatcagatgttcctgcagttgcatttgtgggtac

SEQ ID NO: 21615 - DNA, 133 bp, Homo sapiens
  MAP TO AC007653.1; EXPRESSED IN BRAIN, SIGNAL = 1.2; EXPRESSED IN HEART, SIGNAL = 2.1; EXPRESSED IN HBL100, SIGNAL = 0.86; EXPRESSED IN LUNG, SIGNAL = 0.61; EST_HUMAN HIT: AI284874.1, EVALUE 1.00e-66; NT HIT: gi4507848, EVALUE 6.00e-67; SWISSPROT HIT: Q92995, EVALUE 6.00e-10
attggatctttagccaccctgagtttgaagaagacagtgattttgtgattgagatggagaataatgccaatgcaaacattatttctgaggccaagcccgaaggacctagagtcaaggatggatctggaagtaa

SEQ ID NO: 21616 - DNA, 82 bp, Homo sapiens
  MAP TO AC007678.1; EXPRESSED IN HELA, SIGNAL =   1; EXPRESSED IN HEART, SIGNAL = 0.85; EXPRESSED IN BONE MARROW, SIGNAL = 0.97; EXPRESSED IN ADULT LIVER, SIGNAL = 1.1; EXPRESSED IN BT474, SIGNAL =   1; EXPRESSED IN FETAL LIVER, SIGNAL = 0.96; NT HIT: Z35490.1, EVALUE 2.60e+00
aaaattggggttcaaagggctgatgttggtatcaaagaactcagttcctgtaatgttccagatgatcttgggatgtgtactc

SEQ ID NO: 21617 - DNA, 119 bp, Homo sapiens
  MAP TO AC008164.2; EXPRESSED IN LUNG, SIGNAL = 0.59; EXPRESSED IN HEART, SIGNAL = 4.5; EXPRESSED IN HELA, SIGNAL = 0.67; EXPRESSED IN ADULT LIVER, SIGNAL = 0.7; EXPRESSED IN PLACENTA, SIGNAL = 0.86; SWISSPROT HIT: O20672, EVALUE 3.10e+00; NT HIT: AL163246.2, EVALUE 1.00e-05; EST_HUMAN HIT: AI337261.1, EVALUE 6.80e-02
tgctacttcaacaccttctggagcagcctcgcatgtggatctgcaaatttcctcttcctttttctggatgtatcttgttgttgattcattcgtatgggactcagtcaacagcactgtaa

SEQ ID NO: 21618 - DNA, 220 bp, Homo sapiens
  MAP TO AL049739.1; EXPRESSED IN ADULT LIVER, SIGNAL =   1; EXPRESSED IN HEART, SIGNAL = 0.94; EXPRESSED IN HBL100, SIGNAL =   1; EXPRESSED IN HELA, SIGNAL =   1; EXPRESSED IN PLACENTA, SIGNAL = 0.91; NT HIT: gi11526387, EVALUE 4.00e-85; EST_HUMAN HIT: R80288.1, EVALUE 1.30e-01; SWISSPROT HIT: P23265, EVALUE 3.00e-18
catctacttcatcagtgtggctgggaatggagccattctgatgattgtcatctctgatcctagactccattcccctatgtatttcttcctgggaaacctgtcctgcctggacatctgctactccagcgtaacactgccaaaaatgctgcagaacttcctctctgcacacaaagcaatttctttcttgggatgcataagccaactccatttcttccacttc

SEQ ID NO: 21619 - DNA, 93 bp, Homo sapiens
  MAP TO AL109956.13; EXPRESSED IN LUNG, SIGNAL = 1.1; EXPRESSED IN PLACENTA, SIGNAL = 1.6; EXPRESSED IN HEART, SIGNAL = 1.1; NT HIT: gi11545796, EVALUE 1.00e-45; EST_HUMAN HIT: AU123146.1, EVALUE 2.00e-45; SWISSPROT HIT: P46466, EVALUE 9.20e+00
gttctacttcagtgcgcacgtgattgcagaaagccacagagtactgacgactgtagtagggactgaagtttttgatggcagcctcagttttcc

SEQ ID NO: 21620 - DNA, 648 bp, Homo sapiens
  MAP TO AL031665.18; EXPRESSED IN PLACENTA, SIGNAL = 1.2; EXPRESSED IN BT474, SIGNAL = 1.5; EXPRESSED IN LUNG, SIGNAL = 1.8; EXPRESSED IN BRAIN, SIGNAL = 1.6; EXPRESSED IN HEART, SIGNAL = 1.2; SWISSPROT HIT: Q09442, EVALUE 1.30e-01; NT HIT: gi11421558, EVALUE 0.00e+00; EST_HUMAN HIT: R12311.1, EVALUE 0.00e+00
ctgccaaggggccaagggatgagctggggccctccttcccaatggcatctccccctggtctggaactgaagacactgagcaatggtccccaagccccaaggagatcagctcccctgggcccagtggccccaaccagggagggtgtggagaatgcctgcttctcctcagaggagcatgagacccatttccagaaccctgggaacacgagactgggcagctcacccagtccccctgggggtgtctcctcactgccccgatcccagcgggatgatctgtcccttcattcagaggaggggccagccctggagcccgtgagccgcccggtggattatggctttgtttccgccctcgttttcctggtgagtgggattcttctggtggtgacagcatacgccatcccccgtgaggctcgagtcaatccggacacagtgacagcgcgggagatggaacgactggagatgtactacgcccgcctaggctcccacctggacaggtgcatcatcgcaggcctcgggctgctcacggtgggcggcatgctcttgtcggtgctgctcatggtctccctgtgcaagggcgagctgtaccgccggaggaccttcgtccccggcaagggctccaggaagacctacggctccattaacctgcgca

SEQ ID NO: 21621 - DNA, 127 bp, Homo sapiens
  MAP TO AL096864.6; EXPRESSED IN HEART, SIGNAL = 1.1; EST_HUMAN HIT: BF110113.1, EVALUE 2.70e-02; NT HIT: D00845.1, EVALUE 2.80e-01
tgactttcttcaaaggctttttgacttccgtaggagacatatttacgtaaaactatgaggggaattgagagtgataatgaaaaatccatctattaatagcaagcacaagcaggagatgcttgttatt

SEQ ID NO: 21622 - DNA, 1095 bp, Homo sapiens; identical to SEQ ID NO: 19027
  MAP TO AC010680.3; EXPRESSED IN HEART, SIGNAL = 2.8; EXPRESSED IN ADULT LIVER, SIGNAL = 1.3; EST_HUMAN HIT: AA247925.1, EVALUE 2.00e-38; SWISSPROT HIT: P11799, EVALUE 3.00e-06; NT HIT: AF058332.1, EVALUE 0.00e+00

SEQ ID NO: 21623 - DNA, 305 bp, Homo sapiens
  MAP TO AL009178.4; EXPRESSED IN HBL100, SIGNAL = 1.2; EXPRESSED IN HELA, SIGNAL = 1.3; EXPRESSED IN PLACENTA, SIGNAL = 1.8; EXPRESSED IN ADULT LIVER, SIGNAL = 1.4; EXPRESSED IN HEART, SIGNAL = 1.9; EXPRESSED IN BT474, SIGNAL = 1.5; EXPRESSED IN FETAL LIVER, SIGNAL = 1.3; EXPRESSED IN LUNG, SIGNAL =   1; EXPRESSED IN BONE MARROW, SIGNAL = 1.9; EXPRESSED IN BRAIN, SIGNAL = 1.5; SWISSPROT HIT: P14119, EVALUE 2.80e-01; EST_HUMAN HIT: AW297584.1, EVALUE 4.30e+00
aggcctgaggctccccagaggcgcaggaacggggcagcatgaggagacgcccctggtgctgcaaggaatagacaccaaggccaaggagaaaggaggggggaaggagccacagcactcatgcaggcacccgggtgaggatagaggagctgggctgggtcccaggccactgggaaaggcagagacgggtatggacggagtcagcctggaggagagagttgaagtttggaaaacaaaacagagggagattctattagaagccacactttcaccatcagggaacataaaactgctggccaaggtctggc

SEQ ID NO: 21624 - DNA, 107 bp, Homo sapiens
  MAP TO AC008119.6; EXPRESSED IN LUNG, SIGNAL = 1.8; EXPRESSED IN ADULT LIVER, SIGNAL = 0.91; EXPRESSED IN FETAL LIVER, SIGNAL = 1.1; EXPRESSED IN HEART, SIGNAL = 0.88; EST_HUMAN HIT: AW504643.1, EVALUE 6.00e-02; NT HIT: AB028954.1, EVALUE 5.90e-02
ccctccttattctatgtgcttctagtggagctgtcaatcacagcttctataacaacaagtgtggtctattagagaaccctaccctccaggccaggctggttcagagg

SEQ ID NO: 21625 - DNA, 116 bp, Homo sapiens
  MAP TO AC010183.6; EXPRESSED IN HEART, SIGNAL = 1.2; EXPRESSED IN ADULT LIVER, SIGNAL = 1.1; EXPRESSED IN LUNG, SIGNAL =   1; NT HIT: M86524.1, EVALUE 2.20e-01; EST_HUMAN HIT: AW139328.1, EVALUE 2.60e-01; SWISSPROT HIT: Q9ZHG4, EVALUE 9.00e+00
aaacagccccatggatctacctgccattttccttcttcagttggctagtctacttccagaagcttgcatcctgctatctcaaagacagctacttaaactgctcagcagcctgctga

SEQ ID NO: 21626 - DNA, 182 bp, Homo sapiens
  MAP TO AC011457.1; EXPRESSED IN HEART, SIGNAL = 0.88; SWISSPROT HIT: Q9Y375, EVALUE 1.00e-19; EST_HUMAN HIT: AW051746.1, EVALUE 3.00e-40; NT HIT: gi7705778, EVALUE 1.00e-40
tcataggcaaattctgtgtgggctggaacagtaagcactccaataaaatctatctccaggaagaatggaccacccactttatcagccaaggtgaatgctatagaagagatcttgtcaagcagaagctgactctgaacatcctgcactcttccttgattagggaaaaaaatttggaaaaaggg

SEQ ID NO: 21627 - DNA, 126 bp, Homo sapiens
  MAP TO AC007251.1; EXPRESSED IN FETAL LIVER, SIGNAL = 0.95; EXPRESSED IN ADULT LIVER, SIGNAL = 2.4; EXPRESSED IN LUNG, SIGNAL = 1.1; EXPRESSED IN HEART, SIGNAL = 1.2; NT HIT: Z67739.2, EVALUE 6.00e-02; SWISSPROT HIT: P04505, EVALUE 9.20e+00
cacttcagttgcaagaagccaataatccgatccaaaagccaccaaaaagagtaacacccccaaagcaccaaagagagctccaaagaagatagcgatatttagtctcattttcaattcactggtttc

SEQ ID NO: 21628 - DNA, 454 bp, Homo sapiens
  MAP TO AC010680.3; EXPRESSED IN HEART, SIGNAL = 2.9; SWISSPROT HIT: P54296, EVALUE 3.00e-17; EST_HUMAN HIT: BF693700.1, EVALUE 0.00e+00; NT HIT: gi4507720, EVALUE 0.00e+00
atctggaaacttatccccaatggtcagtatgagttccgagtcagggcagtgaataaatatggaatcagtgatgagtgcaaatcagataaagtagtcattcaagatccttatcgccttcctggacctccaggaaaaccaaaagttttggcacgcaccaaaggatcaatgctagtgagctggactcctcctttggacaatggtggctctccaattactggctactggctggagaaaagagaagagggaagtccttattggtcacgtgttagccgagcaccaataaccaaagtgggattgaaaggcgtggaatttaatgttcctcgtttgcttgaaggcgttaaataccagttcagagccatggcaataaatgctgcaggaattggtcctcccagtgaaccatcagatccagaggttgcaggagatcccatatgtaagtatgcttccgtttctgggg

SEQ ID NO: 21629 - DNA, 115 bp, Homo sapiens
  MAP TO AL022144.1; EXPRESSED IN HELA, SIGNAL = 5.9; EXPRESSED IN HBL100, SIGNAL = 5.7; EXPRESSED IN FETAL LIVER, SIGNAL = 6.6; EXPRESSED IN ADULT LIVER, SIGNAL =   9; EXPRESSED IN BRAIN, SIGNAL = 4.7; EXPRESSED IN LUNG, SIGNAL = 5.6; EXPRESSED IN BONE MARROW, SIGNAL = 5.2; EXPRESSED IN PLACENTA, SIGNAL = 7.1; EXPRESSED IN HEART, SIGNAL = 4.9; EXPRESSED IN BT474, SIGNAL =   5; NT HIT: L78833.1, EVALUE 3.90e+00; EST_HUMAN HIT: AI141063.1, EVALUE 1.00e-58
tcacttcacactgtgatggctggatgcagggatgctcttgttctgttgccttggtaacaacttctgtttgttgataacgaagtttactgtgtatttgtcattgttttccctctgc

SEQ ID NO: 21630 - DNA, 115 bp, Homo sapiens
  MAP TO AL021307.1; EXPRESSED IN PLACENTA, SIGNAL = 3.6; EXPRESSED IN HEART, SIGNAL = 3.6; EXPRESSED IN ADULT LIVER, SIGNAL =   5; EXPRESSED IN BT474, SIGNAL = 3.8; EXPRESSED IN FETAL LIVER, SIGNAL = 3.6; EXPRESSED IN LUNG, SIGNAL = 3.8; EXPRESSED IN BONE MARROW, SIGNAL = 4.4; EXPRESSED IN BRAIN, SIGNAL = 3.6; EXPRESSED IN HBL100, SIGNAL = 3.7; EXPRESSED IN HELA, SIGNAL =   4; NT HIT: AF156540.1, EVALUE 8.50e-01; EST_HUMAN HIT: H04858.1, EVALUE 2.60e-01
gaatctctttcagattggtccttgtgacctttcaacattcctgacccatccttttgttgttgttgttgttgttgagcatttctttttacattcatcaccacaagatgcatcaggt

SEQ ID NO: 21631 - DNA, 521 bp, Homo sapiens
  MAP TO AL024509.1; EXPRESSED IN PLACENTA, SIGNAL = 7.7; EXPRESSED IN HBL100, SIGNAL = 6.7; EXPRESSED IN FETAL LIVER, SIGNAL = 7.3; EXPRESSED IN ADULT LIVER, SIGNAL =   6; EXPRESSED IN BT474, SIGNAL =   5; EXPRESSED IN BRAIN, SIGNAL = 4.7; EXPRESSED IN BONE MARROW, SIGNAL =   6; EXPRESSED IN LUNG, SIGNAL = 6.9; EXPRESSED IN HELA, SIGNAL =  11; EXPRESSED IN HEART, SIGNAL = 4.3; NT HIT: gi11432694, EVALUE 0.00e+00; SWISSPROT HIT: P46778, EVALUE 2.00e-63; EST_HUMAN HIT: BF207753.1, EVALUE 0.00e+00
atacaaccttcaccatgtccatcatctaatccaagattctaacgcagagaagcaagaaaatgtgacccaaaaacaaaaccagccttttggccagaaccgtcatcttccagtaatttgccaaaatgatgaatacaaaggcaaaaaggaaaggcactggatatatgttctctaggcctttacaaaaacatggagttgttcctttggccacatatatgctaatctataagaaaggtgatattgcagacatcaagggaaggggtactgttcaaaaaggaatgccccacaggtgttaccatggcaaaactggaagagtctacaattttacccagcatgcttttggcattgttttaaacaaacaagttaagggcaagattcttgccaagagaattaatgtgcatattgagcacattaaacactctaagagccgaggtagcttcctgaaatgcgtgaaggaaaatgatcagaaaaagaaggaagccaaagagaaaagtacctgggttcaactgaagcaccagcctgct

SEQ ID NO: 21632 - DNA, 445 bp, Homo sapiens; identical to SEQ ID NO: 4898
  MAP TO AL021330.1; EXPRESSED IN LUNG, SIGNAL =   2; EXPRESSED IN BONE MARROW, SIGNAL = 1.9; EXPRESSED IN BRAIN, SIGNAL = 2.7; EXPRESSED IN HBL100, SIGNAL = 2.3; EXPRESSED IN HELA, SIGNAL = 1.5; EXPRESSED IN PLACENTA, SIGNAL = 2.3; EXPRESSED IN ADULT LIVER, SIGNAL = 2.3; EXPRESSED IN HEART, SIGNAL = 2.3; EXPRESSED IN BT474, SIGNAL = 2.3; EXPRESSED IN FETAL LIVER, SIGNAL = 1.8; NT HIT: gi7662441, EVALUE 1.00e-110; EST_HUMAN HIT: BE063405.1, EVALUE 3.00e-53; SWISSPROT HIT: Q15032, EVALUE 1.00e-18

SEQ ID NO: 21633 - DNA, 166 bp, Homo sapiens
  MAP TO AL022344.1; EXPRESSED IN HBL100, SIGNAL = 1.3; EXPRESSED IN FETAL LIVER, SIGNAL = 1.2; EXPRESSED IN BT474, SIGNAL = 1.1; EXPRESSED IN LUNG, SIGNAL =   1; EXPRESSED IN PLACENTA, SIGNAL = 1.3; EXPRESSED IN HEART, SIGNAL = 1.1; EXPRESSED IN HELA, SIGNAL = 1.4; EXPRESSED IN ADULT LIVER, SIGNAL = 1.7; EXPRESSED IN BRAIN, SIGNAL = 1.2; EXPRESSED IN BONE MARROW, SIGNAL = 1.1; NT HIT: L12535.1, EVALUE 9.00e-36; EST_HUMAN HIT: AA399286.1, EVALUE 2.00e-46; SWISSPROT HIT: Q15404, EVALUE 7.00e-16
gagttccattcccagattcacactcagcatttatgtttccatggtggtaccaccaaacatagcagaactgaagaatttggaagtgctcaactttttaaataaccagatcgagaagctgccaacacagatcagcaggcttcaaaaactcaaacacctgaaccttggg

SEQ ID NO: 21634 - DNA, 605 bp, Homo sapiens
  MAP TO AL021368.1; EXPRESSED IN ADULT LIVER, SIGNAL = 2.7; EXPRESSED IN BT474, SIGNAL =  20; EXPRESSED IN LUNG, SIGNAL = 4.9; EXPRESSED IN BONE MARROW, SIGNAL = 7.6; EXPRESSED IN BRAIN, SIGNAL = 9.5; EXPRESSED IN HBL100, SIGNAL =  16; EXPRESSED IN FETAL LIVER, SIGNAL = 8.6; EXPRESSED IN PLACENTA, SIGNAL = 7.1; EXPRESSED IN HEART, SIGNAL =  17; EXPRESSED IN HELA, SIGNAL =  14; NT HIT: AF017079.1, EVALUE 3.00e-60; SWISSPROT HIT: P04406, EVALUE 4.00e-68; EST_HUMAN HIT: BF527010.1, EVALUE 3.00e-58
atggtctagggggctcttactccttggaggccatgtgtaccataaagtctatcaccctgttgctgtagccaaattccttgtcatatcagaatatgagcttgacagagtgatcactgaggacaatgccagccccaacgtcgaaagtggaagggtcgatgtcactgttaaagttggaggagacaacttggtgctcagtgtagccccacgatgttcttgaggggcccttccgtgcctccttcattaccttcttggtgttaccatatttggcaggtttctttatatggcaggtcaggtccacaaccaacatgttggcagtggggacacagaaggccatgccagtgaggttctcattcagtgtggggatgactttgccttggtaacactagttaattgcaggggtgatgttctgtagagttccatagctgtcatcccagtttcccagagaggttgtcttcgtcttctgggtggcagtgatggcatggactgtggtcatgaatccctccatgatgccaaagttatcatggatgaccttggctgggggtgctaagcagttggtagaacaggaagcattgctgatgattgtgaagttgtttttgtttttctca

SEQ ID NO: 21635 - DNA, 283 bp, Homo sapiens
  MAP TO AL031005.1; EXPRESSED IN FETAL LIVER, SIGNAL = 3.5; EXPRESSED IN ADULT LIVER, SIGNAL = 4.3; EXPRESSED IN BT474, SIGNAL = 2.7; EXPRESSED IN BRAIN, SIGNAL = 3.2; EXPRESSED IN BONE MARROW, SIGNAL = 3.4; EXPRESSED IN LUNG, SIGNAL = 3.4; EXPRESSED IN HELA, SIGNAL = 3.4; EXPRESSED IN PLACENTA, SIGNAL = 3.4; EXPRESSED IN HBL100, SIGNAL = 3.4; EXPRESSED IN HEART, SIGNAL = 2.6; NT HIT: X91937.1, EVALUE 1.00e-121; EST_HUMAN HIT: BE535389.1, EVALUE 1.00e-104; SWISSPROT HIT: P42892, EVALUE 3.00e-34
ccgataggccgccttgagacccccgttgtcggcgatgttctcccccagggtgtgccgcccgttcaccggctccccgttcacgctgtagttgctgtactgctctaccatgcactcggtctgacgcttgaaggcctccacggatgagttcttccaccatggccggaggttcccgtccttgtcatactcccgtcctgtgggtcagagggaggcgtcatgtcaagggagggaggggcacagcagggacctgctgctcctccctgctcctggtgagaagcggttcatc

SEQ ID NO: 21636 - DNA, 180 bp, Homo sapiens
  MAP TO AL031055.1; EXPRESSED IN BONE MARROW, SIGNAL = 3.3; EXPRESSED IN HBL100, SIGNAL = 3.2; EXPRESSED IN FETAL LIVER, SIGNAL = 3.5; EXPRESSED IN BT474, SIGNAL = 4.2; EXPRESSED IN LUNG, SIGNAL = 3.4; EXPRESSED IN PLACENTA, SIGNAL = 3.4; EXPRESSED IN HEART, SIGNAL = 2.7; EXPRESSED IN HELA, SIGNAL =   4; EXPRESSED IN ADULT LIVER, SIGNAL = 4.5; EXPRESSED IN BRAIN, SIGNAL = 2.1; EST_HUMAN HIT: BF328407.1, EVALUE 3.00e-52; NT HIT: AL137188.3, EVALUE 2.00e-52; SWISSPROT HIT: P87110, EVALUE 3.00e-03
cgagatctaccctgtggagatacgaggaagagccttcgccttctgcaacagcttcaactgggcggccaacctcttcatcagcctctccttcctcgatctcattggtgagtccttcccagacaagtccgttttttttctgtggcccaagctccctactctaaagcagaaatttttggattt

SEQ ID NO: 21637 - DNA, 149 bp, Homo sapiens
  MAP TO AC009508.2; EXPRESSED IN BONE MARROW, SIGNAL = 0.91; EXPRESSED IN ADULT LIVER, SIGNAL =   1; EXPRESSED IN HEART, SIGNAL = 0.86; EST_HUMAN HIT: AU136619.1, EVALUE 1.30e-01; SWISSPROT HIT: P75613, EVALUE 5.10e+00; NT HIT: AF143318.1, EVALUE 3.40e-01
gtggttgaagtgcagatggggtcccagtgccccattgactacactttcttccttcacccaaacagtgggtcccaaaggggttctctggagcttccactgaagtttctttagaacactgagaaccactgaggtagaggctaaaattgaga

SEQ ID NO: 21638 - DNA, 292 bp, Homo sapiens
  MAP TO AL022575.1; EXPRESSED IN BRAIN, SIGNAL =   7; EXPRESSED IN BONE MARROW, SIGNAL = 9.2; EXPRESSED IN HELA, SIGNAL =  12; EXPRESSED IN HBL100, SIGNAL =  10; EXPRESSED IN FETAL LIVER, SIGNAL =  11; EXPRESSED IN LUNG, SIGNAL =  12; EXPRESSED IN PLACENTA, SIGNAL =  12; EXPRESSED IN HEART, SIGNAL = 8.4; EXPRESSED IN BT474, SIGNAL = 9.8; EXPRESSED IN ADULT LIVER, SIGNAL =  13; EST_HUMAN HIT: AA192492.1, EVALUE 4.20e+00; SWISSPROT HIT: Q61703, EVALUE 6.60e-02
ctgtagcggtgtcggaggactaggaactcaaggtagggcccaaggcggagggtaaggcgggctgcagcagccacatagagctccagctggggcctcttcagcagggcaggttggtcccaggacaggcgcaaggtaccctcgcctcgcaaagatatagaactgcggctgatggtgatagtataggcccggggtttgtctgtagtgactgtgatgatctggaagtaggtgcgagtctggtccttgtggcccggccttggtggtgcgccaagcagcttcccactcacatgcagcc

SEQ ID NO: 21639 - DNA, 170 bp, Homo sapiens
  MAP TO AJ011929.1; EXPRESSED IN BONE MARROW, SIGNAL = 1.3; EXPRESSED IN LUNG, SIGNAL = 1.2; EXPRESSED IN PLACENTA, SIGNAL = 1.5; EXPRESSED IN HBL100, SIGNAL = 1.2; EXPRESSED IN HELA, SIGNAL = 3.3; EXPRESSED IN ADULT LIVER, SIGNAL = 1.3; EXPRESSED IN HEART, SIGNAL = 1.2; EXPRESSED IN BT474, SIGNAL = 1.1; EXPRESSED IN FETAL LIVER, SIGNAL = 1.2; NT HIT: AF050171.1, EVALUE 3.00e-91; EST_HUMAN HIT: AW083766.1, EVALUE 5.00e-91; SWISSPROT HIT: Q9Y5Z0, EVALUE 2.00e-13
ctcatgagcgtctgtggagccatcctccttgtcttaatcgtcctgctgctgctgccgttccggtgtcagcgtcgcccccgtgaccctgaggtcgtcaatgatgagtcctctctggtcagacatcgctggaaatgaatagccaggcctgacctcaagcaaccatgaactca

SEQ ID NO: 21640 - DNA, 154 bp, Homo sapiens
  MAP TO AL031114.1; EXPRESSED IN HELA, SIGNAL = 6.4; EXPRESSED IN HEART, SIGNAL = 4.4; EXPRESSED IN PLACENTA, SIGNAL = 6.2; EXPRESSED IN HBL100, SIGNAL =   5; EXPRESSED IN FETAL LIVER, SIGNAL = 5.4; EXPRESSED IN ADULT LIVER, SIGNAL = 9.4; EXPRESSED IN BT474, SIGNAL =   5; EXPRESSED IN BRAIN, SIGNAL = 3.1; EXPRESSED IN BONE MARROW, SIGNAL = 5.4; EXPRESSED IN LUNG, SIGNAL = 5.2; NT HIT: AJ243213.1, EVALUE 2.00e-05; EST_HUMAN HIT: BE169421.1, EVALUE 6.00e-09; SWISSPROT HIT: P48430, EVALUE 3.00e+00
tggcagcctgaccctgcctctgggagctccatcccagggaagtacagacctgttgacagcctgaacacaccagcaaaggtggttgtggacctaggcctggagattctgcccagtgggggactacttctgtccctagtcaccttggacttgaacc

SEQ ID NO: 21641 - DNA, 115 bp, Homo sapiens
  MAP TO AL035250.17; EXPRESSED IN HEART, SIGNAL = 0.92; EXPRESSED IN FETAL LIVER, SIGNAL = 2.5; NT HIT: U53528.1, EVALUE 5.40e-02; EST_HUMAN HIT: BF334457.1, EVALUE 1.50e+00; SWISSPROT HIT: P78563, EVALUE 9.00e+00
tggtgccctgccagtgccggatccaagaggaaggactgaggctgcccaaggtgctgacaccagcgcggccctgcttgtgagtgagctcgcccatctccgctttcatctcagagat

SEQ ID NO: 21642 - DNA, 99 bp, Homo sapiens
  MAP TO AL031177.1; EXPRESSED IN HELA, SIGNAL = 2.4; EXPRESSED IN PLACENTA, SIGNAL = 2.7; EXPRESSED IN HBL100, SIGNAL = 2.5; EXPRESSED IN HEART, SIGNAL = 2.1; EXPRESSED IN FETAL LIVER, SIGNAL = 2.3; EXPRESSED IN ADULT LIVER, SIGNAL = 2.7; EXPRESSED IN BT474, SIGNAL = 2.3; EXPRESSED IN BRAIN, SIGNAL = 2.3; EXPRESSED IN BONE MARROW, SIGNAL = 2.1; EXPRESSED IN LUNG, SIGNAL = 2.3; SWISSPROT HIT: Q14031, EVALUE 6.00e-14; EST_HUMAN HIT: AA926629.1, EVALUE 3.10e-01; NT HIT: U04845.1, EVALUE 4.00e-49
ctcttggccctgccttccccttcattccgggaaatcctgggtctccaggtggcccaaccttgcctggagtccccatgaagccaggctcacctctcatgc

SEQ ID NO: 21643 - DNA, 368 bp, Homo sapiens
  MAP TO AL022334.1; EXPRESSED IN BONE MARROW, SIGNAL = 2.8; EXPRESSED IN LUNG, SIGNAL = 3.2; EXPRESSED IN HELA, SIGNAL =   3; EXPRESSED IN HEART, SIGNAL = 2.6; EXPRESSED IN PLACENTA, SIGNAL =   3; EXPRESSED IN HBL100, SIGNAL =   3; EXPRESSED IN FETAL LIVER, SIGNAL = 2.9; EXPRESSED IN ADULT LIVER, SIGNAL = 3.9; EXPRESSED IN BT474, SIGNAL = 2.7; EXPRESSED IN BRAIN, SIGNAL =   3; NT HIT: gi11418034, EVALUE 0.00e+00; SWISSPROT HIT: P13856, EVALUE 8.00e-12; EST_HUMAN HIT: BE389944.1, EVALUE 0.00e+00
agtcctagacagaggcctagaggaggccaagaggtggtggggccaggtcgggggggccctgatgcctgcttctctcgctttgttgcagccccgagccatgatgaagactttgtccagcgggaactgcacgctcagtgtgcccgccaaaaactcataccgcatggtggtgctgggtgcctctcgggtgggcaagagctccatcgtgtctcgcttcctcaatggccgctttgaggaccagtacacacccaccatcgaggacttccaccgtaaggtatacaacatccgcggcgacatgtaccagctcgacatcctggatacctctggcaaccaccccttccccgccatgcgcaggctgtccatcctcacag

SEQ ID NO: 21644 - DNA, 113 bp, Homo sapiens
  MAP TO AL030996.1; EXPRESSED IN BRAIN, SIGNAL =  29; EXPRESSED IN BONE MARROW, SIGNAL = 9.8; EXPRESSED IN HBL100, SIGNAL =  31; EXPRESSED IN FETAL LIVER, SIGNAL =  12; EXPRESSED IN BT474, SIGNAL =  15; EXPRESSED IN LUNG, SIGNAL = 5.4; EXPRESSED IN PLACENTA, SIGNAL = 8.6; EXPRESSED IN HEART, SIGNAL = 5.1; EXPRESSED IN HELA, SIGNAL =  26; EXPRESSED IN ADULT LIVER, SIGNAL = 2.2; SWISSPROT HIT: P13602, EVALUE 2.00e-11; NT HIT: gi5174736, EVALUE 3.00e-31; EST_HUMAN HIT: AA626683.1, EVALUE 2.00e-33
gttcaagtgcatctctgcgcagttcacggccatgttgtggtgcaaggcgttcctgcactggtacacaggcgagggcatggacgagatggagttcaccgagactgacagcaaca

SEQ ID NO: 21645 - DNA, 89 bp, Homo sapiens
  MAP TO AB020876.1; EXPRESSED IN HEART, SIGNAL = 0.86; EXPRESSED IN LUNG, SIGNAL = 3.4; SWISSPROT HIT: P11369, EVALUE 2.10e-01; EST_HUMAN HIT: AW849203.1, EVALUE 1.90e-01
tgaaaatgttattcttttctccaccaaattgccttacacctctgtcaaaattcatatgaccataaatacaagggttttctttgggactt

SEQ ID NO: 21646 - DNA, 136 bp, Homo sapiens
  MAP TO AL031003.1; EXPRESSED IN PLACENTA, SIGNAL = 4.6; EXPRESSED IN HEART, SIGNAL =   5; EXPRESSED IN HBL100, SIGNAL = 6.1; EXPRESSED IN BT474, SIGNAL = 5.8; EXPRESSED IN FETAL LIVER, SIGNAL = 6.5; EXPRESSED IN ADULT LIVER, SIGNAL =   7; EXPRESSED IN BRAIN, SIGNAL = 5.6; EXPRESSED IN BONE MARROW, SIGNAL =   6; EXPRESSED IN LUNG, SIGNAL = 7.8; EXPRESSED IN HELA, SIGNAL =   6; NT HIT: gi11418572, EVALUE 5.00e-71; EST_HUMAN HIT: BE397418.1, EVALUE 5.00e-71; SWISSPROT HIT: P29508, EVALUE 2.30e+00
ctttctcgtttttgccttgaatgtagctgttcagtttcgtaaagcccgtctggatggctgaatcccagtccatagactccacggacgtgctgacccacttggctggtccatagtgtcggatctcataacttccggg

SEQ ID NO: 21647 - DNA, 231 bp, Homo sapiens
  MAP TO AL035457.13; EXPRESSED IN BT474, SIGNAL = 1.1; EXPRESSED IN BRAIN, SIGNAL =   1; EXPRESSED IN LUNG, SIGNAL =   1; EXPRESSED IN HELA, SIGNAL = 1.1; EXPRESSED IN HBL100, SIGNAL =   1; EXPRESSED IN HEART, SIGNAL = 1.2; NT HIT: AF037352.1, EVALUE 1.40e-01; EST_HUMAN HIT: BE047949.1, EVALUE 9.00e-03; SWISSPROT HIT: P73540, EVALUE 1.00e+00
gagatctgtctctctctgtctctgggttctgctgtcatctgtgctggcttcattctcaggcaggctgtccccatgctgtgaggagatggctgtcacctcctggcttatatctacctcacttggtgttgctaacagaaagacagcatctctgctaattaacttgccacaaaagtcctgggattcaatgtccatggccccagctggagtcacatggccattgctgaccagtcc

SEQ ID NO: 21648 - DNA, 318 bp, Homo sapiens
  MAP TO AL031058.1; EXPRESSED IN ADULT LIVER, SIGNAL = 4.6; EXPRESSED IN LUNG, SIGNAL = 3.1; EXPRESSED IN BRAIN, SIGNAL = 3.2; EXPRESSED IN BONE MARROW, SIGNAL = 3.2; EXPRESSED IN HELA, SIGNAL = 5.9; EXPRESSED IN BT474, SIGNAL = 6.2; EXPRESSED IN FETAL LIVER, SIGNAL = 3.8; EXPRESSED IN PLACENTA, SIGNAL = 4.8; EXPRESSED IN HEART, SIGNAL = 5.4; EXPRESSED IN HBL100, SIGNAL = 3.5; SWISSPROT HIT: P15924, EVALUE 2.00e-53; NT HIT: gi11418893, EVALUE 0.00e+00; EST_HUMAN HIT: AW177933.1, EVALUE 0.00e+00
aagaaataaagaggctgaagaacactctaacccagaccacagagaatctcaggagggtggaagaagacatccaacagcaaaaggccactggctctgaggtgtctcagaggaaacagcagctggaggttgagctgagacaagtcactcagatgcgaacagaggagagcgtaagatataagcaatctcttgatgatgctgccaaaaccatccaggataaaaacaaggagatagaaaggttaaaacaactgatcgacaaagaaacaaatgaccggaaatgcctggaagatgaaaacgcgagattacaaagggtccagtatg

SEQ ID NO: 21649 - DNA, 217 bp, Homo sapiens
  MAP TO AL031076.1; EXPRESSED IN BONE MARROW, SIGNAL = 1.8; EXPRESSED IN PLACENTA, SIGNAL = 6.5; EXPRESSED IN HEART, SIGNAL = 1.8; EXPRESSED IN ADULT LIVER, SIGNAL =   2; EXPRESSED IN LUNG, SIGNAL = 1.8; EXPRESSED IN HELA, SIGNAL = 2.5; EXPRESSED IN HBL100, SIGNAL = 2.7; EXPRESSED IN BT474, SIGNAL = 2.2; EXPRESSED IN FETAL LIVER, SIGNAL = 2.1; EXPRESSED IN BRAIN, SIGNAL = 2.2; NT HIT: AL163278.2, EVALUE 7.00e-03; SWISSPROT HIT: P03186, EVALUE 1.50e+00
cgtagcccaggaggcaaaggcagtggctgcctgagtgcagcaggtcccagggcccccatgcctaatgctggccgccacctcgtggggcgtggcctgagcacctggcgtgtcatgctgggccccaaaagcgacgccaggggcgtgtttctggtgtttccgaactgggggctttattgaggtaactgcagattcacacgcacctagagggaccacgcag

SEQ ID NO: 21650 - DNA, 113 bp, Homo sapiens
  MAP TO AL078602.10; EXPRESSED IN HEART, SIGNAL = 1.1; NT HIT: gi9507008, EVALUE 9.80e-01; SWISSPROT HIT: O29516, EVALUE 9.00e+00
ggccagtaaagaggactcagaaacttcatgggtcaggttgcggcccgactggcctgacagtcaacgaggtggaaaccgtgacaaattcagacgccagggctttatccagttgg

SEQ ID NO: 21651 - DNA, 353 bp, Homo sapiens
  MAP TO AL031133.1; EXPRESSED IN PLACENTA, SIGNAL = 1.4; EXPRESSED IN HBL100, SIGNAL = 1.5; EXPRESSED IN ADULT LIVER, SIGNAL = 1.5; EXPRESSED IN LUNG, SIGNAL = 1.2; EXPRESSED IN BRAIN, SIGNAL = 1.5; EXPRESSED IN HEART, SIGNAL = 1.2; EXPRESSED IN HELA, SIGNAL = 1.3; EXPRESSED IN BT474, SIGNAL = 1.3; EXPRESSED IN FETAL LIVER, SIGNAL = 1.3; EXPRESSED IN BONE MARROW, SIGNAL = 1.4; EST_HUMAN HIT: AW504645.1, EVALUE 1.00e-122; SWISSPROT HIT: P53530, EVALUE 3.20e-02
agctcatgtctgcagggctctgagaggaggaagcctggggcaggacctgcgccagtggccgctgggcacagcatggagcaccccagcaagatggaattcttccagaagctgggctatgaccgggaggatgtgctccgggtgttgggcaagctgggcgagggcgccctggtcaacgacgtgctgcaggagcttatccgcacgggcagccgcccgggtgccctggagcacccggctgcacccaggctagtgcctcggggctcctgtggggtcccggactctgcccagcgtggcccggggacagccctggaagaggacttcagaaccctggccagttctctgcgacccatagtgat

SEQ ID NO: 21652 - DNA, 121 bp, Homo sapiens
  MAP TO AC012458.2; EXPRESSED IN PLACENTA, SIGNAL = 1.5; EXPRESSED IN HELA, SIGNAL = 2.1; EXPRESSED IN HEART, SIGNAL = 1.5; EXPRESSED IN BT474, SIGNAL = 1.7; EXPRESSED IN FETAL LIVER, SIGNAL = 1.9; EXPRESSED IN ADULT LIVER, SIGNAL = 1.6; EXPRESSED IN BONE MARROW, SIGNAL = 1.7; EXPRESSED IN LUNG, SIGNAL = 1.9; EXPRESSED IN BRAIN, SIGNAL = 1.7; SWISSPROT HIT: Q08142, EVALUE 4.00e+00; EST_HUMAN HIT: BE728667.1, EVALUE 3.90e-01
ctgcacagcctctgaactcgttcttttgggatatttccgtggtgtaggttttggagacgttggattctgcttccacaagaactctaaaaggagccattttcctttccctttccgtattctt

SEQ ID NO: 21653 - DNA, 144 bp, Homo sapiens
  MAP TO AC007922.1; EXPRESSED IN HEART, SIGNAL = 0.86; NT HIT: Z22216.1, EVALUE 5.00e-03; EST_HUMAN HIT: AW845706.1, EVALUE 1.00e-34
  unsure 54
atcttagcagaagtaattgaacttgatcagcagaaaaaagtagggctgtacacnattggggatgtacgtggaagaacaggtttagcatacgatgagaaactcaggtgtgtcctggtattctcttgtccaatttttatggtaaat

SEQ ID NO: 21654 - DNA, 147 bp, Homo sapiens
  MAP TO AL033504.3; EXPRESSED IN PLACENTA, SIGNAL = 3.5; EXPRESSED IN HBL100, SIGNAL = 4.3; EXPRESSED IN LUNG, SIGNAL = 3.2; EXPRESSED IN BRAIN, SIGNAL = 3.4; EXPRESSED IN BONE MARROW, SIGNAL = 3.2; EXPRESSED IN HEART, SIGNAL = 2.9; EXPRESSED IN HELA, SIGNAL = 3.6; EXPRESSED IN BT474, SIGNAL = 3.5; EXPRESSED IN ADULT LIVER, SIGNAL =   5; EXPRESSED IN FETAL LIVER, SIGNAL = 3.5; SWISSPROT HIT: Q09630, EVALUE 6.70e+00
taaaggtaaagcacaggccaatgcggctacaggaggcctgaagcatgtgcaacaagtcagggcaacaactgagcattttggggtcaaaggcaaggccatctggggcctggaataaatcacagtttttggtattcacctccgacattt

SEQ ID NO: 21655 - DNA, 172 bp, Homo sapiens
  MAP TO AL031447.4; EXPRESSED IN BONE MARROW, SIGNAL = 2.4; EXPRESSED IN PLACENTA, SIGNAL = 4.1; EXPRESSED IN HBL100, SIGNAL = 2.8; EXPRESSED IN ADULT LIVER, SIGNAL = 5.3; EXPRESSED IN LUNG, SIGNAL = 3.7; EXPRESSED IN BRAIN, SIGNAL = 2.5; EXPRESSED IN HEART, SIGNAL = 2.5; EXPRESSED IN HELA, SIGNAL = 3.7; EXPRESSED IN BT474, SIGNAL = 2.3; EXPRESSED IN FETAL LIVER, SIGNAL = 4.9; EST_HUMAN HIT: AL040437.1, EVALUE 2.00e-92; NT HIT: AE004214.1, EVALUE 4.00e-01; SWISSPROT HIT: P46591, EVALUE 1.30e+00
ttctcaccttctgacccagagctgcctgccctaggtctaggagtttcagagtgagccactcgggtagcagagctgtcagggtgcccactcccttcctttccaggccctgagcaagtatgttgacgtggacaagactgcctgcctgtggccctctcaccagaggtggaacagg

SEQ ID NO: 21656 - DNA, 385 bp, Homo sapiens
  MAP TO AL035452.6; EXPRESSED IN HEART, SIGNAL = 1.1; EXPRESSED IN BT474, SIGNAL = 1.6; EXPRESSED IN BRAIN, SIGNAL = 1.4; EXPRESSED IN LUNG, SIGNAL = 1.5; EXPRESSED IN HELA, SIGNAL = 1.2; EXPRESSED IN PLACENTA, SIGNAL = 0.92; SWISSPROT HIT: P16283, EVALUE 8.00e+00; EST_HUMAN HIT: AV707597.1, EVALUE 5.00e-22; NT HIT: AF101475.1, EVALUE 9.00e-50
aaaaagaaagaaaaaaagaaacacaaaacttgaaaaagaccctggtcccttaagcgaatggggtggtggcagtcaggcttctccacacggaaaccttttagtttcactggccgtggcgagaaacctgaagtttcttccatatttaggcactgcccacgaagggtcccaagttggaaaaggggagagagagggagagggagggggagggggagggggcttctatggagcagaaaggaaagggagaaaaatgaatcttaaactttgggcttacctctttctcctggctagctcaccaaaatatgttagcagtgtaggatgtccaggttcttggcatcttgaacaaagaattggacaaaatgcacaagcaaacacagcaaggaaagaa

SEQ ID NO: 21657 - DNA, 186 bp, Homo sapiens
  MAP TO AL009050.9; EXPRESSED IN HEART, SIGNAL = 0.93; EXPRESSED IN FETAL LIVER, SIGNAL = 2.1; EST_HUMAN HIT: BE141396.1, EVALUE 4.40e-01; NT HIT: gi7709979, EVALUE 1.50e+00; SWISSPROT HIT: P43606, EVALUE 9.70e-01
ataataaaggcagtgaaaactacaagcaagagtgatatcatctcatgggtaaggctttgttacccatggaaggtgaaggacagcaagtgctgtactatgtgtcagcaccttagcatcatgggaaatgatcactttccaccgaggaagcagaaatggtggagtgtaagtgtggggatgccaatggca

SEQ ID NO: 21658 - DNA, 413 bp, Homo sapiens
  MAP TO AL033538.1; EXPRESSED IN PLACENTA, SIGNAL = 1.4; EXPRESSED IN HBL100, SIGNAL = 2.2; EXPRESSED IN HELA, SIGNAL = 2.1; EXPRESSED IN BT474, SIGNAL = 1.1; EXPRESSED IN LUNG, SIGNAL = 0.97; EXPRESSED IN BRAIN, SIGNAL =   1; EXPRESSED IN BONE MARROW, SIGNAL = 1.2; EXPRESSED IN HEART, SIGNAL = 0.99; EXPRESSED IN ADULT LIVER, SIGNAL = 1.3; EXPRESSED IN FETAL LIVER, SIGNAL = 1.2; NT HIT: AB028966.1, EVALUE 0.00e+00; EST_HUMAN HIT: AW594319.1, EVALUE 2.60e-01; SWISSPROT HIT: Q02294, EVALUE 1.60e-01
ctggccgccgctcctctgaagacgctccaccgcaatgagatgactctgtgtctcctccagaattttctgggctaactcttgtggatccagttttgggttgctttcttcttgggatttcacggtactgtccgtttctgtgctagactggtctgattctcctgtatctgagcttgctagttttcccaccttttggaagggtgagttggggctgggaatcagagtcattttcactggagaatttggagtgctgatgctccctttggagctcaccgagactctcatgcctccggctgtcccaggttggggttgtttgtggtctggtgagaagcatgtgtttcggttttcttggtaggtcgccaagggctcgttactgatgatagaaaacccttcatattcttcttcatctttgttgc

SEQ ID NO: 21659 - DNA, 206 bp, Homo sapiens
  MAP TO AL031622.1; EXPRESSED IN PLACENTA, SIGNAL = 2.7; EXPRESSED IN HBL100, SIGNAL = 3.2; EXPRESSED IN LUNG, SIGNAL = 2.8; EXPRESSED IN BRAIN, SIGNAL = 2.3; EXPRESSED IN BONE MARROW, SIGNAL = 2.8; EXPRESSED IN HEART, SIGNAL = 2.3; EXPRESSED IN HELA, SIGNAL = 3.4; EXPRESSED IN BT474, SIGNAL = 3.3; EXPRESSED IN ADULT LIVER, SIGNAL =   5; EXPRESSED IN FETAL LIVER, SIGNAL =   3; NT HIT: J00098.1, EVALUE 2.00e-19; SWISSPROT HIT: P53114, EVALUE 1.10e-01; EST_HUMAN HIT: AI151091.1, EVALUE 2.00e-23
ctgtctataagacagtgttctccaacatttttggcaccagggacaggttttgtggaagacaatttttccacatactcaggggatgaggtggatgattccaggatgaaactgttccacctcagatcatcatgcattggattctcataaggagagtgcaacttagattcctcccatgtgcagttcacaatagggttcacattgcactc

SEQ ID NO: 21660 - DNA, 149 bp, Homo sapiens
  MAP TO AL031661.17; EXPRESSED IN BT474, SIGNAL = 1.1; EXPRESSED IN FETAL LIVER, SIGNAL = 1.1; EXPRESSED IN BONE MARROW, SIGNAL = 1.1; EXPRESSED IN PLACENTA, SIGNAL =   1; EXPRESSED IN ADULT LIVER, SIGNAL = 1.6; EXPRESSED IN LUNG, SIGNAL = 0.97; EXPRESSED IN HEART, SIGNAL =   1; EXPRESSED IN HELA, SIGNAL = 1.3; EXPRESSED IN HBL100, SIGNAL = 1.1; EST_HUMAN HIT: BF363002.1, EVALUE 1.30e-01; NT HIT: U12283.1, EVALUE 7.30e-02; SWISSPROT HIT: Q98943, EVALUE 8.70e+00
tctctcctttccaggatctggagtttctccatctgcttcccaggaggctcagccctgtgtgccatgagcttagaaccacaagaagaaagttccttgacctcagctcccacttcctggtttgcctactgagactaaaacacagaggcaaa

SEQ ID NO: 21661 - DNA, 88 bp, Homo sapiens
  MAP TO AL034369.1; EXPRESSED IN BT474, SIGNAL = 1.3; EXPRESSED IN BONE MARROW, SIGNAL = 1.3; EXPRESSED IN HEART, SIGNAL = 0.98; EXPRESSED IN PLACENTA, SIGNAL = 2.4; EXPRESSED IN ADULT LIVER, SIGNAL = 1.2; EXPRESSED IN FETAL LIVER, SIGNAL =   1; EXPRESSED IN LUNG, SIGNAL =   1; EXPRESSED IN HELA, SIGNAL = 1.8; EXPRESSED IN HBL100, SIGNAL = 1.4; EST_HUMAN HIT: AI216352.1, EVALUE 7.00e-29; NT HIT: AL163246.2, EVALUE 9.00e-22; SWISSPROT HIT: P10401, EVALUE 1.40e+00
aatgttcagtttccgccaaagcccagtaacaggccaagagctgtctctcaaaaggagagtagttttttgcagaggatggcagggtctt

SEQ ID NO: 21662 - DNA, 87 bp, Homo sapiens
  MAP TO AL034399.6; EXPRESSED IN BONE MARROW, SIGNAL = 1.2; EXPRESSED IN PLACENTA, SIGNAL = 1.5; EXPRESSED IN HELA, SIGNAL = 1.3; EXPRESSED IN HEART, SIGNAL = 1.3; EXPRESSED IN HBL100, SIGNAL = 1.7; EXPRESSED IN BT474, SIGNAL = 1.2; EXPRESSED IN FETAL LIVER, SIGNAL = 1.6; EXPRESSED IN ADULT LIVER, SIGNAL = 2.4; EXPRESSED IN LUNG, SIGNAL = 1.7; EST_HUMAN HIT: BF337932.1, EVALUE 2.70e-01; NT HIT: AL161560.2, EVALUE 1.50e-01
gacagatgaggggaggggctaaggaggaggaaagaaacctattggctgctccatccacacagggctagtgaaaccgttaagccccta

SEQ ID NO: 21663 - DNA, 88 bp, Homo sapiens
  MAP TO AF152364.1; EXPRESSED IN FETAL LIVER, SIGNAL = 1.1; EXPRESSED IN HEART, SIGNAL = 0.99; EXPRESSED IN LUNG, SIGNAL =   4; NT HIT: gi9506504, EVALUE 7.20e-01; EST_HUMAN HIT: BE970003.1, EVALUE 4.20e+00
ttggtggccatatccaagtcacagggctcaggatcacctggagtgccctgggtccaaactcaccctcaagaactgacttaccaggtag

SEQ ID NO: 21664 - DNA, 162 bp, Homo sapiens
  MAP TO AL031679.1; EXPRESSED IN PLACENTA, SIGNAL = 0.95; EXPRESSED IN HBL100, SIGNAL = 1.2; EXPRESSED IN HELA, SIGNAL = 0.99; EXPRESSED IN FETAL LIVER, SIGNAL =   1; EXPRESSED IN BT474, SIGNAL = 1.3; EXPRESSED IN BRAIN, SIGNAL = 0.99; EXPRESSED IN HEART, SIGNAL = 0.94; EXPRESSED IN ADULT LIVER, SIGNAL = 1.5; EXPRESSED IN LUNG, SIGNAL = 1.2; EXPRESSED IN BONE MARROW, SIGNAL = 1.2; NT HIT: U04714.1, EVALUE 3.70e-01; EST_HUMAN HIT: AA705339.1, EVALUE 1.40e-01; SWISSPROT HIT: Q50327, EVALUE 2.90e+00
atccacatggcagatatgctatactatttcatgaattacacattcctggtcaccagtctcaatagttccattttcctggccattttgttacgatttatggtcatcttattctttttactcttcatgagggtcatttcaaatagctccactcttctcagtgtc

SEQ ID NO: 21665 - DNA, 153 bp, Homo sapiens
  MAP TO AF165176.1; EXPRESSED IN FETAL LIVER, SIGNAL = 2.9; EXPRESSED IN HEART, SIGNAL = 0.87; EXPRESSED IN LUNG, SIGNAL = 2.5; NT HIT: AL163283.2, EVALUE 3.00e-81; SWISSPROT HIT: P53246, EVALUE 1.30e+00
accactggaaacaaagtggttagggaactctacaaaacagaccactgcaggggaaaaaacaatgattttgagagtatgaattttcctgtgaggaacaaaaatgaaaacaatggtacgtttgtcccttccaagttcttcacggatgccagtaac

SEQ ID NO: 21666 - DNA, 164 bp, Homo sapiens
  MAP TO AP000498.1; EXPRESSED IN BONE MARROW, SIGNAL =   1; EXPRESSED IN BRAIN, SIGNAL = 1.1; EXPRESSED IN FETAL LIVER, SIGNAL = 1.1; EXPRESSED IN ADULT LIVER, SIGNAL = 0.97; EXPRESSED IN BT474, SIGNAL =   1; EXPRESSED IN HELA, SIGNAL =   1; EXPRESSED IN HEART, SIGNAL = 1.2; NT HIT: AB026898.1, EVALUE 9.00e-88; SWISSPROT HIT: P79023, EVALUE 1.70e+00; EST_HUMAN HIT: BF346467.1, EVALUE 1.40e-01
cctctgtgccccaagataatgaccttcaaggattacatcaacaggctccccttgcccactggtttcctgttgggcttggccagtaggaggcaccagtgggagatcagagagcagaaagagaatgaagtgaggatatttattcccttggctctcttcttgtggga

SEQ ID NO: 21667 - DNA, 145 bp, Homo sapiens
  MAP TO AC011493.2; EXPRESSED IN HEART, SIGNAL = 0.96; EXPRESSED IN BT474, SIGNAL =   1; EST_HUMAN HIT: BE783649.1, EVALUE 4.00e-57; NT HIT: gi4758513, EVALUE 8.00e-48; SWISSPROT HIT: Q05481, EVALUE 5.00e-15
ggactgttgacatttagggatgtggccatagaattctctctggaggagtggcagtacctggacactgcacagaagaatttatataggaagatgatgttagagaactacataaacctggccttcctgggtgaggataactttaata

SEQ ID NO: 21668 - DNA, 97 bp, Homo sapiens
  MAP TO AC012134.1; EXPRESSED IN BONE MARROW, SIGNAL = 1.5; EXPRESSED IN HEART, SIGNAL =   1; EXPRESSED IN BT474, SIGNAL = 1.6; NT HIT: AF226044.1, EVALUE 2.10e-01; EST_HUMAN HIT: AI284770.1, EVALUE 6.00e-42; SWISSPROT HIT: P23414, EVALUE 3.60e-01
catgaagcccacagaagggagactcatcatcattttcaatgtcgtcattaccaaaagcctttcttatgcgattcattgtgcaaggctgtgtacagaa

SEQ ID NO: 21669 - DNA, 249 bp, Homo sapiens
  MAP TO AL031595.4; EXPRESSED IN BONE MARROW, SIGNAL = 3.7; EXPRESSED IN HBL100, SIGNAL = 2.8; EXPRESSED IN FETAL LIVER, SIGNAL =   3; EXPRESSED IN BT474, SIGNAL = 2.7; EXPRESSED IN LUNG, SIGNAL = 2.8; EXPRESSED IN PLACENTA, SIGNAL = 2.5; EXPRESSED IN HEART, SIGNAL =   2; EXPRESSED IN HELA, SIGNAL = 2.5; EXPRESSED IN ADULT LIVER, SIGNAL = 3.3; EXPRESSED IN BRAIN, SIGNAL = 2.4; EST_HUMAN HIT: AW962090.1, EVALUE 3.00e-58; SWISSPROT HIT: P29966, EVALUE 3.70e-02; NT HIT: AF237772.1, EVALUE 2.00e-74
agaggctggcggcgctcaagctggaagcagaggacatcgccctgacagccacaagccagaagcacaagctcacagtggtgctggaggccgtgaaccggagtctgcagctggaggagtggcaggccaagtggagcgtggagagtacgtgggccacaacctggctacccctggggagtgtggggccgctggggtccttctgcttcaggcttctcacccaccaggaaggcgcactcatccttctcccagcag

SEQ ID NO: 21670 - DNA, 412 bp, Homo sapiens; identical to SEQ ID NO: 4938
  MAP TO AL034349.3; EXPRESSED IN PLACENTA, SIGNAL = 4.1; EXPRESSED IN HBL100, SIGNAL =   4; EXPRESSED IN HEART, SIGNAL = 2.5; EXPRESSED IN FETAL LIVER, SIGNAL = 3.1; EXPRESSED IN ADULT LIVER, SIGNAL = 3.5; EXPRESSED IN BT474, SIGNAL = 3.4; EXPRESSED IN BRAIN, SIGNAL = 3.2; EXPRESSED IN BONE MARROW, SIGNAL = 2.8; EXPRESSED IN LUNG, SIGNAL = 3.3; EXPRESSED IN HELA, SIGNAL = 2.8; EST_HUMAN HIT: BE465027.1, EVALUE 1.00e+00; NT HIT: AF121970.1, EVALUE 8.70e-01

SEQ ID NO: 21671 - DNA, 432 bp, Homo sapiens; identical to SEQ ID NO: 19432
  MAP TO AL034380.22; EXPRESSED IN BONE MARROW, SIGNAL =   2; EXPRESSED IN HBL100, SIGNAL = 2.5; EXPRESSED IN FETAL LIVER, SIGNAL = 1.9; EXPRESSED IN BT474, SIGNAL =   2; EXPRESSED IN LUNG, SIGNAL = 1.9; EXPRESSED IN PLACENTA, SIGNAL = 2.3; EXPRESSED IN HEART, SIGNAL = 1.7; EXPRESSED IN HELA, SIGNAL = 2.3; EXPRESSED IN ADULT LIVER, SIGNAL =   2; EXPRESSED IN BRAIN, SIGNAL = 2.3; NT HIT: gi8923441, EVALUE 0.00e+00; EST_HUMAN HIT: N98886.1, EVALUE 0.00e+00; SWISSPROT HIT: Q09712, EVALUE 4.00e-08

SEQ ID NO: 21672 - DNA, 102 bp, Homo sapiens
  MAP TO AC007103.4; EXPRESSED IN PLACENTA, SIGNAL = 0.74; EXPRESSED IN BT474, SIGNAL = 0.63; EXPRESSED IN HEART, SIGNAL = 0.78; NT HIT: gi6981261, EVALUE 4.70e-02; SWISSPROT HIT: Q58783, EVALUE 9.10e+00; EST_HUMAN HIT: BE143830.1, EVALUE 3.20e-01
agtgggcttgaggtaatgatcagtagggttctggtttagctttctgtattttcttctctgccctcttccatatgttgacttcattcttaggctgtcttttct

SEQ ID NO: 21673 - DNA, 155 bp, Homo sapiens
  MAP TO AL034400.2; EXPRESSED IN BT474, SIGNAL = 2.4; EXPRESSED IN BRAIN, SIGNAL = 2.4; EXPRESSED IN HELA, SIGNAL = 2.6; EXPRESSED IN HBL100, SIGNAL = 2.8; EXPRESSED IN ADULT LIVER, SIGNAL = 3.8; EXPRESSED IN FETAL LIVER, SIGNAL = 2.3; EXPRESSED IN LUNG, SIGNAL = 2.7; EXPRESSED IN BONE MARROW, SIGNAL = 2.6; EXPRESSED IN PLACENTA, SIGNAL = 3.2; EXPRESSED IN HEART, SIGNAL =   2; SWISSPROT HIT: Q46398, EVALUE 3.90e+00; EST_HUMAN HIT: AW339393.1, EVALUE 3.60e-01
agaaccctgactcagagactaagagatatgaactcatacacaagaaagaagcagttaccactaaagacaggaagagtttgattctttagtctaaagacccaagacaacaccatggacctaaaatcctgactttctcacctgttgttttggttgat

SEQ ID NO: 21674 - DNA, 191 bp, Homo sapiens
  MAP TO AL034412.1; EXPRESSED IN BONE MARROW, SIGNAL = 0.93; EXPRESSED IN LUNG, SIGNAL = 1.5; EXPRESSED IN HELA, SIGNAL =   5; EXPRESSED IN HEART, SIGNAL = 1.9; EXPRESSED IN HBL100, SIGNAL =   4; EXPRESSED IN FETAL LIVER, SIGNAL = 3.9; EXPRESSED IN ADULT LIVER, SIGNAL = 4.8; EXPRESSED IN BRAIN, SIGNAL = 1.1; NT HIT: J02963.1, EVALUE 2.00e-74; EST_HUMAN HIT: BE069375.1, EVALUE 1.00e-53; SWISSPROT HIT: P35579, EVALUE 3.70e+00
gtaggatcagtattatcctcgtttgctttggcagcaaactgagacccagagaagccaagctacttggccaggaatacagagcccccatcttcttgctcagaaatcaccattctaactactacactttgcttcttcctcaaactattgtcattgagtgtttggctaagactcttcactcaccaatttgtcag

SEQ ID NO: 21675 - DNA, 351 bp, Homo sapiens; identical to SEQ ID NO: 4943
  MAP TO AL031683.1; EXPRESSED IN BRAIN, SIGNAL = 1.1; EXPRESSED IN BONE MARROW, SIGNAL = 1.2; EXPRESSED IN HBL100, SIGNAL = 1.1; EXPRESSED IN FETAL LIVER, SIGNAL = 1.1; EXPRESSED IN BT474, SIGNAL = 0.98; EXPRESSED IN LUNG, SIGNAL = 0.94; EXPRESSED IN PLACENTA, SIGNAL = 1.1; EXPRESSED IN HEART, SIGNAL =   1; EXPRESSED IN HELA, SIGNAL = 1.1; EXPRESSED IN ADULT LIVER, SIGNAL = 1.2; SWISSPROT HIT: Q17758, EVALUE 5.30e+00; NT HIT: AB021914.1, EVALUE 8.60e-01; EST_HUMAN HIT: BE172487.1, EVALUE 2.20e-01

SEQ ID NO: 21676 - DNA, 121 bp, Homo sapiens
  MAP TO AC007652.1; EXPRESSED IN ADULT LIVER, SIGNAL = 0.83; EXPRESSED IN PLACENTA, SIGNAL =  13; EXPRESSED IN BT474, SIGNAL = 0.6; EXPRESSED IN HEART, SIGNAL = 0.82; EST_HUMAN HIT: BF570533.1, EVALUE 6.20e+00; NT HIT: Z12836.1, EVALUE 4.20e+00; SWISSPROT HIT: Q9Y2G5, EVALUE 9.30e+00
ccccaaatctgtcatacaccaagtgattacaaaatgtagaatccaaatccaagtactcatgccacacataattaatgtcatgcactgtggaggatgcataatggaatcaacaatcagcaaa

SEQ ID NO: 21677 - DNA, 165 bp, Homo sapiens
  MAP TO AL079303.2; EXPRESSED IN HEART, SIGNAL = 1.3; EXPRESSED IN FETAL LIVER, SIGNAL = 2.2; NT HIT: Y08722.1, EVALUE 5.90e+00; EST_HUMAN HIT: BF210869.1, EVALUE 4.00e-79; SWISSPROT HIT: Q99297, EVALUE 2.00e-04
cttattgacaggaatcatgtttttgacattgtagtagaagccaaaataaaccatgttgaaaactccatgtcgtcccaaagttgcagttaatcctttgttgaggccctggagtccccagccttccttcttaatgatttgtcttgcataacccacagtggatggttg

SEQ ID NO: 21678 - DNA, 154 bp, Homo sapiens
  MAP TO AC011390.1; EXPRESSED IN HELA, SIGNAL = 0.96; EXPRESSED IN HEART, SIGNAL =   2; SWISSPROT HIT: P04973, EVALUE 9.00e+00; NT HIT: AJ243213.1, EVALUE 4.00e-62; EST_HUMAN HIT: BF432402.1, EVALUE 2.10e+00
cctacatggaagtggagctctaagtccgtgtttttttttttgaattgtggttcaaggattcccctccatccccccatccctgccatgctgaatcaaactcacctgaggaagcctttttaaaatgcagatcccaaggatctcctgaatcagagcc

SEQ ID NO: 21679 - DNA, 156 bp, Homo sapiens
  MAP TO AL078462.9; EXPRESSED IN ADULT LIVER, SIGNAL = 0.92; EXPRESSED IN HEART, SIGNAL =   1; EST_HUMAN HIT: AI760110.1, EVALUE 3.40e-02
actatatcctcaccttgtggagcttaaaatccatccacagagcaaccaccaccaccacaataataataacttaaacaacagaaaatcatgagaaagaaataaaaatgaaatgtgcaagatctttataaagcaaatcctaacattcagctgtagtac

SEQ ID NO: 21680 - DNA, 253 bp, Homo sapiens
  MAP TO AL031681.13; EXPRESSED IN FETAL LIVER, SIGNAL = 0.87; EXPRESSED IN HEART, SIGNAL = 1.3; EXPRESSED IN LUNG, SIGNAL = 1.1; EXPRESSED IN BRAIN, SIGNAL =   1; NT HIT: gi7106444, EVALUE 5.20e-01; SWISSPROT HIT: P24181, EVALUE 1.10e+00
acctcattcatggcctcctttgggcagacaggaagagcttcttggattctccctgcaagctgtggtgtgtccactcacatcagtggctccagcagacatgatagtggctctttgtctggccctctgatttccacctctaagttatcccacatctgcgtgagttcttgttccaatatgaaatctgattcccacagtgcttgtagaggctctgtttttgtgactgcccctgatggatcctccaaggctacgacca

SEQ ID NO: 21681 - DNA, 818 bp, Homo sapiens
  MAP TO AL096710.8; EXPRESSED IN ADULT LIVER, SIGNAL = 0.91; EXPRESSED IN HBL100, SIGNAL = 1.8; EXPRESSED IN HEART, SIGNAL = 1.3; SWISSPROT HIT: P56455, EVALUE 1.70e-01; NT HIT: X65137.1, EVALUE 2.90e-02
ctctttagaccctgaagtacattccaaatggcttgggaaatcattacacagatccttgagcttctcatctcttggcaatgttgatgcccacacagtagagctttctagtccaatttcttttacagtttctaaattaggagaatagtagtttccttctttgcttttaatatcaccaagaatatgtggcttttcttccatcatctcagatgtagaacatgctttttgattaaagtctccaacatgttctattttctctgaatatccatcagcaagcagtttgtagaaaatattttcaagctgcagtggaagtactttagacgtaatgcctcttttctctaggtcatactccatatgagttaattctctcatcaattcaaatactcctgtaattttttggctatgttgatcttgcttcaatatattaaggagaagctcagacttaagatttccaatacagaaaggatcatctctactttctggctttagttctgatgagttagtcatgggggaaactccagaagagtcactcatttgagagtcgctgggcacagtagatgcctcatttaccaactgtgatgtggtaatccttttaattaaattttgaattaaaattttagtgtctgcacaggctgaaggttcttcaacctcttgagggttcatatgaccttctttcaacctgctttttaagatatcctttacatcctccacaaatacctgagacaattcaggaatctgaacctccttttcttgggatcttggagacaaggcttgttcttttggtagctgttgctcaattctttctttcttattattaattt

SEQ ID NO: 21682 - DNA, 135 bp, Homo sapiens
  MAP TO AC007458.13; EXPRESSED IN FETAL LIVER, SIGNAL =  17; EXPRESSED IN HELA, SIGNAL = 2.4; EXPRESSED IN LUNG, SIGNAL = 1.5; EXPRESSED IN PLACENTA, SIGNAL = 1.5; EXPRESSED IN ADULT LIVER, SIGNAL = 1.7; EXPRESSED IN HBL100, SIGNAL = 0.93; EXPRESSED IN HEART, SIGNAL = 0.88; EXPRESSED IN BONE MARROW, SIGNAL = 0.9; EXPRESSED IN BRAIN, SIGNAL = 0.93; EST_HUMAN HIT: AV758196.1, EVALUE 1.80e+00; NT HIT: M37310.1, EVALUE 1.20e+00; SWISSPROT HIT: P77728, EVALUE 8.90e+00
ttgagactcatgatcatttttcctcttagaattacgctgatcactttcctactgctgtggttgctgcaacatctggccaggatgctttctctcatcacttcaggggcacttccaggaagctgtaggcttcaggag

SEQ ID NO: 21683 - DNA, 201 bp, Homo sapiens
  MAP TO AC005002.2; EXPRESSED IN HBL100, SIGNAL = 1.4; EXPRESSED IN HELA, SIGNAL =   1; EXPRESSED IN HEART, SIGNAL = 1.1; EXPRESSED IN BRAIN, SIGNAL =   1; EXPRESSED IN BONE MARROW, SIGNAL = 1.3; EXPRESSED IN ADULT LIVER, SIGNAL = 0.92; EXPRESSED IN BT474, SIGNAL =   1; SWISSPROT HIT: P11260, EVALUE 3.00e-05; EST_HUMAN HIT: AV731583.1, EVALUE 3.00e-12; NT HIT: AJ271735.1, EVALUE 3.00e-11
gtctgatgtcgatgaaatccatcagcttttgtctggggaagtctttatttctccttcctgcttgaagtgtaattttgtcagaaatactattctagggttaaaggtttttccatttagcactttaaatatatcatgccactctctcctggcttttaagatttccactgaaaagttggctgccagacctagtggagctctatt

SEQ ID NO: 21684 - DNA, 920 bp, Homo sapiens
  MAP TO AF002994.1; EXPRESSED IN PLACENTA, SIGNAL = 2.1; EXPRESSED IN HELA, SIGNAL = 3.3; EXPRESSED IN HEART, SIGNAL = 1.1; NT HIT: U82671.2, EVALUE 0.00e+00; SWISSPROT HIT: P43356, EVALUE 0.00e+00; EST_HUMAN HIT: BE795782.1, EVALUE 0.00e+00
gctcctgcccgcactcctgcctgctgccctgaccagagtcatcatgcctcttgagcagaggagtcagcactgcaagcctgaagaaggccttgaggcccgaggagaggccctgggcctggtgggtgcgcaggctcctgctactgaggagcagcagaccgcttcttcctcttctactctagtggaagttaccctgggggaggtgcctgctgccgactcaccgagtcctccccacagtcctcagggagcctccagcttctcgactaccatcaactacactctttggagacaatccgatgagggctccagcaaccaagaagaggaggggccaagaatgtttcccgacctggagtccgagttccaagcagcaatcagtaggaagatggttgagttggttcattttctgctcctcaagtatcgagccagggagccggtcacaaaggcagaaatgctggagagtgtcctcagaaattgccaggacttctttcccgtgatcttcagcaaagcctccgagtacttgcagctggtctttggcatcgaggtggtggaagtggtccccatcagccacttgtacatccttgtcacctgcctgggcctctcctacgatggcctgctgggcgacaatcaggtcatgcccaagacaggcctcctgataatcgtcctggccataatcgcaatagagggcgactgtgcccctgaggagaaaatctgggaggagctgagtatgttggaggtgtttgaggggagggaggacagtgtcttcgcacatcccaggaagctgctcatgcaagatctggtgcaggaaaactacctggagtaccggcaggtgcccggcagtgatcctgcatgctacgagttcctgtggggtccaagggccctcattgaaaccagctatgtgaaagtcctgcaccatacactaaaga

SEQ ID NO: 21685 - DNA, 169 bp, Homo sapiens
  MAP TO AC007392.3; EXPRESSED IN ADULT LIVER, SIGNAL = 0.81; EXPRESSED IN FETAL LIVER, SIGNAL = 0.66; EXPRESSED IN LUNG, SIGNAL = 1.1; EXPRESSED IN HELA, SIGNAL = 0.64; EXPRESSED IN HEART, SIGNAL = 0.98; EXPRESSED IN PLACENTA, SIGNAL = 0.71; EXPRESSED IN BONE MARROW, SIGNAL = 0.69; EXPRESSED IN BRAIN, SIGNAL = 0.92; EST_HUMAN HIT: AA897343.1, EVALUE 1.00e-68; SWISSPROT HIT: P39145, EVALUE 2.90e+00
aaacaaagggggtgtaagctatttcatttattttgataatcctcctcttgcacgggagcattttgctgtctttgtcaaagtgaatgacaacaatttggccaactctctctgagctgcactcaacagtgacaggcaaattatcagaggccctgcacttcttattatcaga

SEQ ID NO: 21686 - DNA, 82 bp, Homo sapiens
  MAP TO AC005072.2; EXPRESSED IN LUNG, SIGNAL = 0.73; EXPRESSED IN HELA, SIGNAL = 4.6; EXPRESSED IN ADULT LIVER, SIGNAL = 0.72; EXPRESSED IN PLACENTA, SIGNAL = 0.67; EXPRESSED IN FETAL LIVER, SIGNAL = 0.72; EXPRESSED IN HEART, SIGNAL = 0.88; EXPRESSED IN BONE MARROW, SIGNAL = 0.67; NT HIT: AJ276553.1, EVALUE 3.60e-02; EST_HUMAN HIT: AA078097.1, EVALUE 3.00e-15
cagagccagggctggtggtgttcctgctggtgtgacaccaagggtgttgatcttgatggaaacgcccacgtctctctttgtt

SEQ ID NO: 21687 - DNA, 78 bp, Homo sapiens
  MAP TO AC010799.1; EXPRESSED IN BONE MARROW, SIGNAL = 1.2; EXPRESSED IN ADULT LIVER, SIGNAL = 0.95; EXPRESSED IN HEART, SIGNAL = 1.1; NT HIT: M77804.1, EVALUE 6.20e-01
tggagttgcatgatacttgattcatatctctgtgtaatgatggcatgcaataccctgactgctcctttcgaattcttc

SEQ ID NO: 21688 - DNA, 300 bp, Homo sapiens
  MAP TO AC010680.3; EXPRESSED IN HEART, SIGNAL = 3.5; EXPRESSED IN LUNG, SIGNAL = 0.99; NT HIT: gi4507720, EVALUE 0.00e+00; EST_HUMAN HIT: Z17362.1, EVALUE 0.00e+00; SWISSPROT HIT: Q00872, EVALUE 4.00e-06
ctccaagtgtcagctttgcagggtatctttttccttcaatttccactgcatactcagcaatatcttctggcatagcattcttaattttgaggtacagatgatttccatctctcagtatttcagtcttatcatttggttccgcagggatttcatcatatcctttgaaccacttaatgtttggagtatcttttgctatatcacaggcaaaaatagctgtccccttgggtttcacatgctggtctcgtataggtttcaccagccaatctctaatgacttctatatgaaaataagatcagaaaa

SEQ ID NO: 21689 - DNA, 620 bp, Homo sapiens
  MAP TO AC010680.3; EXPRESSED IN HEART, SIGNAL = 7.8; NT HIT: gi4507720, EVALUE 0.00e+00; EST_HUMAN HIT: AA677345.1, EVALUE 0.00e+00; SWISSPROT HIT: Q14324, EVALUE 3.00e-24
aggcaccaacaattgtccttgatcccacaataaaagatgggctaacaattaaagcaggggataccattgttttgaatgccattagcattcttggcaaaccccttccaaaatcaagttggtccaaggcaggaaaagacattagaccatcagatatcactcagataacttcaaccccaacatcttccatgcttactatcaagtatgccactagaaaagatgcgggtgaatataccatcactgctaccaatccttttggcacgaaggtggaacatgtgaaggtaacagtccttgatgtacctggtcccccaggtcctgttgaaatcagtaatgtttctgctgaaaaagcaacacttacatggacacctcccttggaagatggcggctcaccaattaagtcctatatacttgaaaagagagaaaccagccgacttttgtggacagtggtttctgaagatattcagtcttgcaggcatgtggcaaccaaacttatccaaggaaatgagtacatcttccgggtctcagctgtaaaccactatggcaaaggagaacctgtacagtctgaacctgtcaaaatggtagacagatttggtatgtagagcatgtgagggaattgacatgga

SEQ ID NO: 21690 - DNA, 122 bp, Homo sapiens
  MAP TO AC006581.16; EXPRESSED IN BT474, SIGNAL = 0.62; EXPRESSED IN ADULT LIVER, SIGNAL = 2.4; EXPRESSED IN PLACENTA, SIGNAL = 0.82; EXPRESSED IN LUNG, SIGNAL = 1.1; EXPRESSED IN HEART, SIGNAL = 1.3; SWISSPROT HIT: P01023, EVALUE 4.00e-06; NT HIT: AF260826.1, EVALUE 5.80e-02; EST_HUMAN HIT: AA307331.1, EVALUE 2.00e-11
gtcacattaactttactattagtacaaagattctggacagcaatgaaccatgtgggggccagaaggggtttgttccccaaaagggccgaagtgacacgctcatcaagccagttctcgtcaaa

SEQ ID NO: 21691 - DNA, 197 bp, Homo sapiens
  MAP TO AC012119.1; EXPRESSED IN HEART, SIGNAL = 1.1; EXPRESSED IN LUNG, SIGNAL = 0.94; SWISSPROT HIT: O95239, EVALUE 1.90e-01; NT HIT: AF091838.1, EVALUE 7.20e+00
gtgaaataggtgctgtgaatggcttgtcacagggaggggtagatttactgagaatgagctgtgctttgctgcagaattctgtgactattgccaaaaagggtttgctacatgacaaagaatccaaattgtactgtctgtggaccctgagggctgtggaaggtggggagggagaatcctctatgtaccctattattagg

SEQ ID NO: 21692 - DNA, 148 bp, Homo sapiens
  MAP TO AL022143.1; EXPRESSED IN BRAIN, SIGNAL = 0.99; EXPRESSED IN BONE MARROW, SIGNAL = 1.2; EXPRESSED IN PLACENTA, SIGNAL = 1.4; EXPRESSED IN HEART, SIGNAL = 1.5; EXPRESSED IN BT474, SIGNAL =   1; SWISSPROT HIT: Q41819, EVALUE 2.30e+00; NT HIT: AF026276.1, EVALUE 7.20e-02; EST_HUMAN HIT: AI905162.1, EVALUE 1.00e-56
atgaagtaggaggcggccagctggtgcagggtctccagggacacagctgtgctgttcccactgcccccgattatagaggcacctcctgttgtctctgtctttcttcccagtttctgcttgtccacaaaaatggtcagggactcttctc

SEQ ID NO: 21693 - DNA, 166 bp, Homo sapiens
  MAP TO AP000359.1; EXPRESSED IN HEART, SIGNAL = 0.98; EXPRESSED IN LUNG, SIGNAL = 1.5; EXPRESSED IN FETAL LIVER, SIGNAL = 0.92; EST_HUMAN HIT: BE515069.1, EVALUE 2.20e+00
ggaaatctggcttggttatgttacttctgttcttcaatacgaaaacagcattaccctctgtgccgatgtgagccacaaactgctccgaatagaaactgcttatgatttcataaagagaacatctgcccaggcccagacaggaaacatccgagaggaagtaactaat

SEQ ID NO: 21694 - DNA, 282 bp, Homo sapiens
  MAP TO AL021917.1; EXPRESSED IN LUNG, SIGNAL = 1.5; EXPRESSED IN BONE MARROW, SIGNAL = 1.5; EXPRESSED IN HBL100, SIGNAL = 1.6; EXPRESSED IN HELA, SIGNAL = 1.2; EXPRESSED IN HEART, SIGNAL = 1.7; EXPRESSED IN BT474, SIGNAL = 1.6; EXPRESSED IN FETAL LIVER, SIGNAL = 1.4; EXPRESSED IN ADULT LIVER, SIGNAL = 1.2; EXPRESSED IN BRAIN, SIGNAL = 1.2; EXPRESSED IN PLACENTA, SIGNAL = 1.1; NT HIT: gi11418862, EVALUE 1.00e-101; EST_HUMAN HIT: BE247480.1, EVALUE 1.00e-67; SWISSPROT HIT: P18892, EVALUE 2.00e-21
ctggaataaaaatgacactttctttcttctggccgagcagggtgtcattgatagagcaggacacgttcctcacagacttgtctctgatgatcacagctgtggtgaccatgaagaggctgtctgcgtcaggggtggagacctccttcagggcaggcacgacctcaccgtaggggtccctccacactgtgaggggctttgggtaccaccctccagatatgcactccagctggatgcccccgtcctcgtggtctctcatttcaatgacgggctcagagtccagtc

SEQ ID NO: 21695 - DNA, 105 bp, Homo sapiens
  MAP TO AC006364.3; EXPRESSED IN FETAL LIVER, SIGNAL = 0.91; EXPRESSED IN HEART, SIGNAL = 0.93; EXPRESSED IN LUNG, SIGNAL =  17; NT HIT: gi11421184, EVALUE 1.00e-52; EST_HUMAN HIT: AW999103.1, EVALUE 2.00e-52; SWISSPROT HIT: Q92520, EVALUE 2.00e-05
gtgctgcaaagttggtggtagctgtggcagtgtttttactgacattttatgttatttctcaagtatttgaaataaaaatggatgcaagtttaggaaatctatttg

SEQ ID NO: 21696 - DNA, 139 bp, Homo sapiens
  MAP TO AC006972.2; EXPRESSED IN HEART, SIGNAL = 5.5; SWISSPROT HIT: P34888, EVALUE 2.30e+00; EST_HUMAN HIT: BF672674.1, EVALUE 4.60e-01; NT HIT: gi9629553, EVALUE 2.00e-02
gcctttcaaggaaaactcatatggggctcactgacgaaacaaagcgagtttgcaaaaaaagatttgacatagtcaattctttgtactcttcagtgatggcagctgccttagtggaaaatgtgggaaattacagattggg

SEQ ID NO: 21697 - DNA, 340 bp, Homo sapiens
  MAP TO AL021154.1; EXPRESSED IN PLACENTA, SIGNAL = 1.1; EXPRESSED IN BT474, SIGNAL = 0.94; EXPRESSED IN FETAL LIVER, SIGNAL = 1.7; EXPRESSED IN BONE MARROW, SIGNAL = 1.3; EXPRESSED IN HBL100, SIGNAL = 0.92; EXPRESSED IN HELA, SIGNAL = 1.1; EXPRESSED IN HEART, SIGNAL = 1.2; EXPRESSED IN ADULT LIVER, SIGNAL =   1; NT HIT: gi11423036, EVALUE 0.00e+00; EST_HUMAN HIT: AI419844.1, EVALUE 1.00e-111; SWISSPROT HIT: Q14209, EVALUE 3.00e-33
gagtcgggggcaggctgctgggggcaggcagggccactcaattaatcaacaggtccccaaggtcgtaggagtcgaagagatcgctgatgccctcacccgcctccaagccccacaggtagtcgtcctggtccaaggatggggagaagctgatcagaggggagctgcacgccagggtcggggacaggaactggtcctcagtctgctgcaggagtgggtgcggcagctccagcaggctgtcagtagcctccaaggggaccagggatggaggcggtggggcctgctggggggttggcgctggtgctggcactggagacaaacagacaaaggttacgcctggccc

SEQ ID NO: 21698 - DNA, 84 bp, Homo sapiens
  MAP TO AL022146.1; EXPRESSED IN PLACENTA, SIGNAL = 0.91; EXPRESSED IN HEART, SIGNAL = 1.2; EXPRESSED IN BT474, SIGNAL = 1.1; EXPRESSED IN FETAL LIVER, SIGNAL = 1.1; EXPRESSED IN LUNG, SIGNAL = 0.94; EXPRESSED IN BRAIN, SIGNAL = 0.99; EXPRESSED IN BONE MARROW, SIGNAL = 0.97; EXPRESSED IN HBL100, SIGNAL = 0.98; EXPRESSED IN HELA, SIGNAL =   1; NT HIT: AB008681.1, EVALUE 7.00e-22; EST_HUMAN HIT: AA663213.1, EVALUE 6.00e-20
gtcaacaaatgtttatgactccagtccccatgatcggagtcaaggtcccagtggggatccatactggggatggcttgctgacca

SEQ ID NO: 21699 - DNA, 172 bp, Homo sapiens
  MAP TO AC007358.2; EXPRESSED IN HEART, SIGNAL = 1.2; SWISSPROT HIT: Q62179, EVALUE 3.80e+00
tcaggttgctcttggaacctgggaagtcttcgttggtgtgtcaagttgagggtagggatccctctcagacgtgccccaacttttctatgtatgtactcatctgtctgcctcagggacagtttcctcttgttctttgctgaatctccattgtctaccccaatgtctagaacta

SEQ ID NO: 21700 - DNA, 215 bp, Homo sapiens
  MAP TO AL022344.1; EXPRESSED IN BT474, SIGNAL = 2.8; EXPRESSED IN BONE MARROW, SIGNAL = 2.9; EXPRESSED IN HBL100, SIGNAL = 2.7; EXPRESSED IN PLACENTA, SIGNAL = 3.5; EXPRESSED IN FETAL LIVER, SIGNAL = 3.2; EXPRESSED IN BRAIN, SIGNAL = 2.7; EXPRESSED IN LUNG, SIGNAL =   3; EXPRESSED IN HEART, SIGNAL = 2.6; EXPRESSED IN HELA, SIGNAL = 3.4; EXPRESSED IN ADULT LIVER, SIGNAL = 3.1; NT HIT: gi7661979, EVALUE 2.00e-95; SWISSPROT HIT: O35704, EVALUE 2.80e+00; EST_HUMAN HIT: AA161513.1, EVALUE 3.00e-95
aatgaagatatagagaaagaagttaaggaagaaattgaccccgacgaagaagaaagtgccaagaaaaagcatttggataagaagagaaaattgaaggagatgtttgatgcagaatatgatgaaggagaaagcacatattttgatgatcttaaaggagaaatgcagaaacaagcacaggtgagaaacctcagttcctctcagccccttgtcaagac

SEQ ID NO: 21701 - DNA, 109 bp, Homo sapiens
  MAP TO AL031010.1; EXPRESSED IN BONE MARROW, SIGNAL = 7.1; EXPRESSED IN BRAIN, SIGNAL = 5.3; EXPRESSED IN HBL100, SIGNAL = 7.3; EXPRESSED IN HELA, SIGNAL = 5.7; EXPRESSED IN PLACENTA, SIGNAL = 6.4; EXPRESSED IN ADULT LIVER, SIGNAL = 8.1; EXPRESSED IN HEART, SIGNAL = 6.1; EXPRESSED IN BT474, SIGNAL = 5.6; EXPRESSED IN FETAL LIVER, SIGNAL = 7.1; EXPRESSED IN LUNG, SIGNAL = 7.5; NT HIT: AJ131017.1, EVALUE 3.70e+00
attacataaaatttctcattatgtctgcctgcttctgccacttcttctgttttccccattaccctcctgttcagaaagttctgcaagctcattatcagtagttgaagat

SEQ ID NO: 21702 - DNA, 420 bp, Homo sapiens; identical to SEQ ID NO: 4973
  MAP TO AL022476.2; EXPRESSED IN BONE MARROW, SIGNAL = 4.1; EXPRESSED IN HBL100, SIGNAL = 4.3; EXPRESSED IN PLACENTA, SIGNAL = 4.5; EXPRESSED IN HEART, SIGNAL = 3.5; EXPRESSED IN BRAIN, SIGNAL = 2.8; EXPRESSED IN LUNG, SIGNAL = 3.5; EXPRESSED IN HELA, SIGNAL =   3; EXPRESSED IN ADULT LIVER, SIGNAL = 4.3; EXPRESSED IN BT474, SIGNAL = 3.3; EXPRESSED IN FETAL LIVER, SIGNAL = 3.8; NT HIT: AE004544.1, EVALUE 4.10e+00; EST_HUMAN HIT: AW856131.1, EVALUE 2.70e-01; SWISSPROT HIT: P35446, EVALUE 1.40e+00

SEQ ID NO: 21703 - DNA, 355 bp, Homo sapiens; identical to SEQ ID NO: 4974
  MAP TO AL031056.1; EXPRESSED IN BT474, SIGNAL = 1.3; EXPRESSED IN BONE MARROW, SIGNAL = 1.5; EXPRESSED IN HBL100, SIGNAL = 1.5; EXPRESSED IN PLACENTA, SIGNAL =   2; EXPRESSED IN FETAL LIVER, SIGNAL = 1.6; EXPRESSED IN BRAIN, SIGNAL = 1.1; EXPRESSED IN LUNG, SIGNAL = 1.3; EXPRESSED IN HEART, SIGNAL = 1.7; EXPRESSED IN HELA, SIGNAL = 1.3; EXPRESSED IN ADULT LIVER, SIGNAL = 1.6; NT HIT: AB019786.1, EVALUE 1.20e-02; EST_HUMAN HIT: AA495851.1, EVALUE 2.20e-01

SEQ ID NO: 21704 - DNA, 409 bp, Homo sapiens; identical to SEQ ID NO: 4975
  MAP TO AL022578.1; EXPRESSED IN HELA, SIGNAL = 1.2; EXPRESSED IN HEART, SIGNAL = 1.2; EXPRESSED IN ADULT LIVER, SIGNAL = 1.2; EXPRESSED IN BT474, SIGNAL = 1.4; EXPRESSED IN LUNG, SIGNAL = 1.9; EXPRESSED IN BONE MARROW, SIGNAL = 1.3; EXPRESSED IN PLACENTA, SIGNAL = 1.6; EXPRESSED IN HBL100, SIGNAL = 1.2; EXPRESSED IN FETAL LIVER, SIGNAL = 1.3; EXPRESSED IN BRAIN, SIGNAL = 1.1; NT HIT: L13299.1, EVALUE 2.20e-01; SWISSPROT HIT: O88888, EVALUE 5.10e+00

SEQ ID NO: 21705 - DNA, 189 bp, Homo sapiens
  MAP TO AL031076.1; EXPRESSED IN HEART, SIGNAL = 5.1; EXPRESSED IN ADULT LIVER, SIGNAL = 5.5; EXPRESSED IN LUNG, SIGNAL = 5.8; EXPRESSED IN BONE MARROW, SIGNAL =   6; EXPRESSED IN PLACENTA, SIGNAL = 5.1; EXPRESSED IN HELA, SIGNAL = 5.2; EXPRESSED IN HBL100, SIGNAL = 4.1; EXPRESSED IN BT474, SIGNAL = 5.9; EXPRESSED IN FETAL LIVER, SIGNAL = 5.9; EXPRESSED IN BRAIN, SIGNAL = 5.4
taccataatcaccaccatcatcaccatgattaccattatcatcgccatcattaccatcaccattatcaccatatcattaccatcaccatcatcaccattgccatcattaccatcaccattatcaccatcaacaccaccatcaacaccgtgatcaccattatcatcaccaccatcatcaccgttatcact

SEQ ID NO: 21706 - DNA, 87 bp, Homo sapiens
  MAP TO AL023281.1; EXPRESSED IN BONE MARROW, SIGNAL =   2; EXPRESSED IN BRAIN, SIGNAL =   2; EXPRESSED IN HELA, SIGNAL = 2.4; EXPRESSED IN HEART, SIGNAL = 1.8; EXPRESSED IN FETAL LIVER, SIGNAL = 2.2; EXPRESSED IN ADULT LIVER, SIGNAL = 1.8; EXPRESSED IN LUNG, SIGNAL = 2.1; EXPRESSED IN PLACENTA, SIGNAL = 1.8; EXPRESSED IN HBL100, SIGNAL = 2.8; EXPRESSED IN BT474, SIGNAL = 1.8; NT HIT: AF076920.1, EVALUE 7.10e-01; SWISSPROT HIT: P33324, EVALUE 5.40e+00
tataaggacctatctgattacattgggcccacacacataggcccccaacttgagattccgaatcacattgacaaagtcctttatcat

SEQ ID NO: 21707 - DNA, 1190 bp, Homo sapiens
  MAP TO AC004600.2; EXPRESSED IN BRAIN, SIGNAL = 1.6; EXPRESSED IN HELA, SIGNAL = 1.2; EXPRESSED IN HBL100, SIGNAL = 1.3; EXPRESSED IN HEART, SIGNAL = 1.4; EXPRESSED IN BT474, SIGNAL = 1.4; EXPRESSED IN FETAL LIVER, SIGNAL = 0.94; EXPRESSED IN LUNG, SIGNAL = 1.7; SWISSPROT HIT: Q05086, EVALUE 0.00e+00; NT HIT: gi11433063, EVALUE 0.00e+00; EST_HUMAN HIT: BE886203.1, EVALUE 0.00e+00
attcaactgctgtccttgaactaagctgtagagaacagtgattcttcgttcactgtacatgcgaattctattgtcataatataatcccaaattctttgtgacagcattcaatataaagggacatgtcataaaagagaatttgttctctgtttctactttgaaaaaagtataatctttatccatttctagaacctcattcagtggttcattaataaactcttcaaaagggataagtggttttcgacaatccagggttttaacaccaagttcagtttccagggggtccactcgaggacctttcttgtttcttctttcttctcccaaaagttcctgaagtgtcagctcgctggactcagggatgggctcttcatcatcttcttcattgtgatttgtgtccacttcccctcccactacatttgcatagtaaaccattttcaagcacttcgaagcagcaacaatggcatcatcatcattcactagatttcgactgttaaattcattgcttatgactttataagtaataagttgctgaaatgtctccatcattctccgaatctggtctgcattgtatttagaccacagtctgatcagttttccttgggctgcaaggggtagcttgctcatcgctttgcaaaataatggcaaagccatttccagatattcaggactgtggagatttctattctccattacgataatgaacaaattcagataattaggatctcgagagtatacattgtgatacgtcaagtcacattccacgttaggtgacaaatatacaagtgcattgagaaaggcagtttcaattttttcattagagagcaatctggtgtagacccttctaatggcatcaatatccacagacacatcatcagggcctaatttttgcaaattgttgtctccctgtgagctatcacctatccttgaggaagatgcttctgagtcttcttccatagcagcagcagaacatgcagctttttccttttcatcttcatctttgtcttcatcttttgcttgaagagatttcagttcttccttggtgtgttgtttaactttccggaagctctgtaccaatgcctcagcactagaaaaaactcttccaataacacggattaaaggggaataatcctctctttctctacataattcaagaatttcatataccttctcttctgttaagtaagtcacat

SEQ ID NO: 21708 - DNA, 223 bp, Homo sapiens
  MAP TO AC007156.2; EXPRESSED IN ADULT LIVER, SIGNAL = 1.1; EXPRESSED IN FETAL LIVER, SIGNAL = 1.1; EXPRESSED IN PLACENTA, SIGNAL = 0.89; EXPRESSED IN HELA, SIGNAL = 1.1; EXPRESSED IN HEART, SIGNAL = 1.1; NT HIT: Z83335.1, EVALUE 1.10e-01; SWISSPROT HIT: Q60787, EVALUE 1.70e+00; EST_HUMAN HIT: BE957423.2, EVALUE 5.10e-02
ggaggtgatcatgaagaaatggttgagaaacattgcaaggggggatctacccagaattgaaaggcccctgagaatgcccccagtcctacctccacacacatttctccctgaacctgctcagtgtgagctgctaactggcggtgggcaccttcccatcagtcctgaggtccccaaagatgttcttcatatatacatgttccaaaaagtgagtattttgggacag

SEQ ID NO: 21709 - DNA, 187 bp, Homo sapiens
  MAP TO AC008163.1; EXPRESSED IN ADULT LIVER, SIGNAL = 0.71; EXPRESSED IN HEART, SIGNAL = 0.89; EXPRESSED IN HELA, SIGNAL = 0.7; EST_HUMAN HIT: AA853346.1, EVALUE 1.60e-01; NT HIT: gi6753517, EVALUE 9.40e-02; SWISSPROT HIT: P16410, EVALUE 1.70e+00
ctccaagctgtgttccacaggaggacccacagaaactgcacttactaaatcaataagaaattcattggtgagagtggcatcaccattgagaacctcagtggtagctgttttctgtaggccagggctgatagtaggaggggtcattatagaaactgggcacaatgattgcaatggtgatattaagatg

SEQ ID NO: 21710 - DNA, 126 bp, Homo sapiens
  MAP TO AC010904.1; EXPRESSED IN BONE MARROW, SIGNAL = 0.95; EXPRESSED IN HEART, SIGNAL =  50; EXPRESSED IN BRAIN, SIGNAL = 0.96; EST_HUMAN HIT: AI028360.1, EVALUE 4.10e-01; NT HIT: D00944.1, EVALUE 2.40e-01; SWISSPROT HIT: P34761, EVALUE 1.00e+00
gaacccaccttccccctgcgcacatacacccagttggcccagcgcgtttggggcacagcaggtgtctgcgatggcatcaggctcatgtgtccaatggcccatcctacatcacctgtatctggggag

SEQ ID NO: 21711 - DNA, 176 bp, Homo sapiens
  MAP TO NM_006902.1; EXPRESSED IN ADULT LIVER, SIGNAL =   1; EXPRESSED IN HEART, SIGNAL =   1; EXPRESSED IN BONE MARROW, SIGNAL =   1; NT HIT: M95929.1, EVALUE 7.00e-95; EST_HUMAN HIT: AW169994.1, EVALUE 8.00e-95; SWISSPROT HIT: P43271, EVALUE 7.00e-29
tttcagaaccgaagagccaagttccgcaggaatgagagagccatgctagccaataaaaacgcttccctcctcaaatcctactcaggagacgtgactgctgtggagcagcccatcgtacctcgtcctgctccgagacccaccgattatctctcctgggggacagcgtctccgtacag

SEQ ID NO: 21712 - DNA, 202 bp, Homo sapiens
  MAP TO AL022344.1; EXPRESSED IN HEART, SIGNAL =   6; EXPRESSED IN FETAL LIVER, SIGNAL = 7.5; EXPRESSED IN ADULT LIVER, SIGNAL = 8.9; EXPRESSED IN BT474, SIGNAL = 6.6; EXPRESSED IN LUNG, SIGNAL = 8.8; EXPRESSED IN BRAIN, SIGNAL = 5.8; EXPRESSED IN PLACENTA, SIGNAL = 8.2; EXPRESSED IN HELA, SIGNAL = 7.5; EXPRESSED IN HBL100, SIGNAL = 7.1; EXPRESSED IN BONE MARROW, SIGNAL = 7.4; NT HIT: AF281074.1, EVALUE 3.00e-02; SWISSPROT HIT: P52416, EVALUE 9.50e-01
tcgaggctctgtccaccttcagcccaccggacagtcaattttcccagccgctggtgagtttctggtttgccaagacccagaggctgggggaagccagacagcaggtggcagctcttccggccgaggagaggagagggacagggctggctcctctagatgaagaggtgagagagctgtgctaggatcaggcggacagtgttcc

SEQ ID NO: 21713 - DNA, 200 bp, Homo sapiens
  MAP TO AL031431.8; EXPRESSED IN BRAIN, SIGNAL = 1.4; EXPRESSED IN PLACENTA, SIGNAL = 0.72; EXPRESSED IN BT474, SIGNAL = 0.63; EXPRESSED IN LUNG, SIGNAL = 0.6; EXPRESSED IN HELA, SIGNAL = 0.72; EXPRESSED IN HEART, SIGNAL = 0.86; EST_HUMAN HIT: BE250123.1, EVALUE 1.00e-109; SWISSPROT HIT: P34009, EVALUE 2.50e-01; NT HIT: gi11422946, EVALUE 1.00e-109
gtatgcagaacatgcacgataaagggatgactgtccagcctgaacttaaagcttctttttcctatggggctctggaaaacaatgacaacatttctgagatctacgctcctgccaccctgccagtcatgcaagaagagcacggctccagaagtgcctctggggtcccctaccgagtcctagagcacaccaagaaggaatga

SEQ ID NO: 21714 - DNA, 84 bp, Homo sapiens
  MAP TO AL023279.1; EXPRESSED IN BONE MARROW, SIGNAL = 1.4; EXPRESSED IN HEART, SIGNAL = 1.1; EXPRESSED IN FETAL LIVER, SIGNAL = 1.5; EXPRESSED IN ADULT LIVER, SIGNAL = 1.1; EXPRESSED IN BT474, SIGNAL = 1.4; EXPRESSED IN BRAIN, SIGNAL = 1.4; EXPRESSED IN LUNG, SIGNAL = 1.1; EXPRESSED IN PLACENTA, SIGNAL = 1.3; EXPRESSED IN HELA, SIGNAL = 1.2; EXPRESSED IN HBL100, SIGNAL = 1.5; NT HIT: AL163301.2, EVALUE 1.00e-11; EST_HUMAN HIT: AW073791.1, EVALUE 5.00e-14; SWISSPROT HIT: P11369, EVALUE 3.00e-04
gaaggaaaaaaaacatatgatcatttcaattgatgctgaaaaaacatttcataaaattcaacatcacttgttggtgaaaaccct

SEQ ID NO: 21715 - DNA, 94 bp, Homo sapiens
  MAP TO AC004852.2; EXPRESSED IN FETAL LIVER, SIGNAL = 0.88; EXPRESSED IN HEART, SIGNAL = 1.2; EXPRESSED IN LUNG, SIGNAL = 6.2; EST_HUMAN HIT: N44697.1, EVALUE 1.10e+00; SWISSPROT HIT: Q07833, EVALUE 4.70e-01; NT HIT: U28376.1, EVALUE 1.70e-01
atggaaccaggactggaaccccaggtcttacgtcacttgtcttgctttgagttcttcgtatcaagccaatgggcatcacattgatcgccatgtt

SEQ ID NO: 21716 - DNA, 849 bp, Homo sapiens
  MAP TO AL031229.1; EXPRESSED IN PLACENTA, SIGNAL = 1.7; EXPRESSED IN ADULT LIVER, SIGNAL = 1.6; EXPRESSED IN BT474, SIGNAL = 1.2; EXPRESSED IN BRAIN, SIGNAL = 1.3; EXPRESSED IN HELA, SIGNAL = 1.5; EXPRESSED IN HBL100, SIGNAL = 1.1; EXPRESSED IN HEART, SIGNAL = 1.3; EXPRESSED IN FETAL LIVER, SIGNAL = 1.3; EXPRESSED IN LUNG, SIGNAL = 1.6; EXPRESSED IN BONE MARROW, SIGNAL = 1.3; NT HIT: AL163209.2, EVALUE 0.00e+00; SWISSPROT HIT: P27766, EVALUE 5.30e-01; EST_HUMAN HIT: AI989639.1, EVALUE 2.00e-97
aggtggcaggggccaagtggcagcactcaactatcaaaggcaaggtggacattgctaccataatggacagcagagtcaaagcagcaatcagaatagtctgacttgtgtagagctctggcattggctaattaatcacagtgttcctagaagtgaaattgataggaagcctactgcattcctatttaatttatacaagcagaaaacttctaagtcgaatggacaaaagattaatttgaattataaaaaccagaatcatggcccctcaatcaatttccagacttgagccagtttacagacccagaaccttttgaatgaaggtcccctcgaggaaggaccccactacattactgacaaattatgcagtgaatctttctcccatccttcctcaagaagacccctcgccttttaccagggcaactgtgcattggggaaaggaaaatgatcagacattttgggggctactggacattggctctgagctgatgttgattccaggggacccaaatcgtcattgtggtcctccagttaaagtaggggcatacggaggccaggtaattaatggagttttagctcagatccgacttacagtgggtccctggactcatcttatggtcatttccccagtgccagaatgcataattggcatagacacacttagcagctggcagaaccctcacattggctccatgactggtagggtgagggctgctatggtgggaaagaccaaatggaagccattagagctgcctctatctagaaaaatagtaaatctaaaacactcagtcatcaaaggaaaggtgagtgtagtgaccctgatgaactgaggagtcaaagcagcaattagaatag

SEQ ID NO: 21717 - DNA, 157 bp, Homo sapiens
  MAP TO AL031407.3; EXPRESSED IN BONE MARROW, SIGNAL = 1.4; EXPRESSED IN LUNG, SIGNAL = 1.1; EXPRESSED IN PLACENTA, SIGNAL = 1.2; EXPRESSED IN HEART, SIGNAL = 2.1; EXPRESSED IN FETAL LIVER, SIGNAL = 1.3; EXPRESSED IN ADULT LIVER, SIGNAL = 1.1; EXPRESSED IN BT474, SIGNAL = 1.5; EXPRESSED IN BRAIN, SIGNAL = 1.3; EXPRESSED IN HBL100, SIGNAL = 1.3
ttattcctcttcttcctcctcttcctcctcttcttctccttcttctccttcttcctcttcttcttcttcttcttcttcttcttcttcttcttcttcttcttcttcttcttcttcctcttcttcttcttcttgttcttctccttctcctccttctcct

SEQ ID NO: 21718 - DNA, 98 bp, Homo sapiens
  MAP TO AL033520.9; EXPRESSED IN BONE MARROW, SIGNAL = 2.1; EXPRESSED IN HEART, SIGNAL =   2; EXPRESSED IN FETAL LIVER, SIGNAL =   2; EXPRESSED IN ADULT LIVER, SIGNAL = 2.5; EXPRESSED IN BT474, SIGNAL = 1.5; EXPRESSED IN BRAIN, SIGNAL = 1.8; EXPRESSED IN LUNG, SIGNAL = 1.8; EXPRESSED IN PLACENTA, SIGNAL = 2.3; EXPRESSED IN HELA, SIGNAL = 2.1; EXPRESSED IN HBL100, SIGNAL = 1.8; EST_HUMAN HIT: H75649.1, EVALUE 4.80e+00; NT HIT: AL163301.2, EVALUE 7.00e-01
atagaaacagcccactctatttggtgaaggagccaaatgaggtcctgtttatggagctactcacgcatgtactcagcagacacgtgaagtgcgccttc

SEQ ID NO: 21719 - DNA, 412 bp, Homo sapiens
  MAP TO AL031665.18; EXPRESSED IN BONE MARROW, SIGNAL =  25; EXPRESSED IN HBL100, SIGNAL =  27; EXPRESSED IN PLACENTA, SIGNAL =  19; EXPRESSED IN FETAL LIVER, SIGNAL =  30; EXPRESSED IN BRAIN, SIGNAL =  26; EXPRESSED IN LUNG, SIGNAL =  45; EXPRESSED IN HEART, SIGNAL =  38; EXPRESSED IN HELA, SIGNAL =  33; EXPRESSED IN ADULT LIVER, SIGNAL =  11; EXPRESSED IN BT474, SIGNAL =  44; NT HIT: D50657.1, EVALUE 0.00e+00; SWISSPROT HIT: P53506, EVALUE 2.00e-52; EST_HUMAN HIT: BE616766.1, EVALUE 5.00e-93
gacatggaggggcccgacttgtcatactcctgcttgctaatccacatctgctggaaggtggacaatgaggccaggatggagctgctgatccacacggagtacttgcgctctgggagcacgatgatcttgatcttccttgtgctggcaccagggcagtgatctctttctgcatcctgttggagatgcttgggtacatggtggtgccactggccagcaccgtgttggcatacaggtccttgtggatgcccacatcacaccttatgatagagctgaaggtggtctcatggatgctgcaaaattccacacccagaaagaagggctggaacaacacctccaaacactggaactgcatgttgccaatggtgatcacctggctgtcaggcagtttgtagcttttctccagggagaagga

SEQ ID NO: 21720 - DNA, 112 bp, Homo sapiens
  MAP TO AL034412.1; EXPRESSED IN HBL100, SIGNAL = 1.9; EXPRESSED IN HELA, SIGNAL = 1.3; EXPRESSED IN PLACENTA, SIGNAL = 1.5; EXPRESSED IN ADULT LIVER, SIGNAL = 1.8; EXPRESSED IN HEART, SIGNAL = 1.7; EXPRESSED IN BT474, SIGNAL = 1.7; EXPRESSED IN FETAL LIVER, SIGNAL = 1.4; EXPRESSED IN LUNG, SIGNAL = 1.5; EXPRESSED IN BONE MARROW, SIGNAL = 1.8; EXPRESSED IN BRAIN, SIGNAL = 1.1; NT HIT: AB037997.1, EVALUE 2.00e-04; SWISSPROT HIT: P98164, EVALUE 6.90e+00
ctacctcatttccatcattgtccttgcccaaatgcctggccttcaagttgtctttgctgctgttttttattcttttctgttatcgctagatgagaaccacgtcatgtcagca

SEQ ID NO: 21721 - DNA, 241 bp, Homo sapiens
  MAP TO AL031683.1; EXPRESSED IN BONE MARROW, SIGNAL = 2.5; EXPRESSED IN HBL100, SIGNAL = 2.8; EXPRESSED IN PLACENTA, SIGNAL = 1.9; EXPRESSED IN HEART, SIGNAL = 3.4; EXPRESSED IN BRAIN, SIGNAL = 3.6; EXPRESSED IN LUNG, SIGNAL = 2.6; EXPRESSED IN HELA, SIGNAL = 2.4; EXPRESSED IN ADULT LIVER, SIGNAL =   3; EXPRESSED IN BT474, SIGNAL = 2.2; EXPRESSED IN FETAL LIVER, SIGNAL = 2.6; NT HIT: Z97335.2, EVALUE 9.00e+00; SWISSPROT HIT: Q26457, EVALUE 3.40e-02
agataataggaccacgggaaaacagtgtagtgagaagcagaaatggaaaaaaaaatgtttccaaagtgggaataatagtctgagtgcaagagagaaaatccagattaaaaaggaagccaaatttgccaatagagaaacaaaatggagaaagaggaagaagacaatatggaagaatgagatttatgtcaggaagagagagcacaatgatggagaaattaataccagaggaaggcagaaagga

SEQ ID NO: 21722 - DNA, 160 bp, Homo sapiens
  MAP TO AL031584.1; EXPRESSED IN BONE MARROW, SIGNAL = 4.7; EXPRESSED IN BRAIN, SIGNAL = 3.6; EXPRESSED IN HBL100, SIGNAL =   5; EXPRESSED IN HELA, SIGNAL = 4.4; EXPRESSED IN PLACENTA, SIGNAL = 5.2; EXPRESSED IN ADULT LIVER, SIGNAL = 5.7; EXPRESSED IN HEART, SIGNAL =   4; EXPRESSED IN BT474, SIGNAL = 4.3; EXPRESSED IN FETAL LIVER, SIGNAL = 5.8; EXPRESSED IN LUNG, SIGNAL = 4.5; NT HIT: U30828.1, EVALUE 6.00e-34; EST_HUMAN HIT: AU120210.1, EVALUE 5.00e-32; SWISSPROT HIT: Q13247, EVALUE 7.00e-16
cttcaataagcctaatatttctgcaccatccagtttgtccaaagcaagcttcatgtcaaaataggagtgaaactcaacgccctcacttgtgcattccttgtgagcatcaacataggttacttcatctgcttgttgcataaaatcctttaaatcttgccaa

SEQ ID NO: 21723 - DNA, 315 bp, Homo sapiens
  MAP TO AL033533.5; EXPRESSED IN BONE MARROW, SIGNAL = 3.7; EXPRESSED IN HBL100, SIGNAL = 2.3; EXPRESSED IN PLACENTA, SIGNAL = 2.9; EXPRESSED IN HEART, SIGNAL = 2.3; EXPRESSED IN BRAIN, SIGNAL = 2.6; EXPRESSED IN LUNG, SIGNAL = 2.5; EXPRESSED IN HELA, SIGNAL = 1.8; EXPRESSED IN ADULT LIVER, SIGNAL = 2.9; EXPRESSED IN BT474, SIGNAL = 2.6; EXPRESSED IN FETAL LIVER, SIGNAL = 2.4; NT HIT: U28921.1, EVALUE 6.50e-01
aaaagctcctcctgctgcagactgaaatgggaaggccagagggagctcagaaccgaggtttgagaaaacaaaaaaaaagaagaaaaaaaaaatgccagagacagagaacaagaacaagaagaagaggaagaggcggaagagaaagaagaggaagaagaagaagaagaagaagaagaagaaggagaaggagaaggagaaggagaaggagaaggagaagaagaagaagaagaagaagaagaagaagaagaagaagaagaagaagaagaagaaatactaataatgaaacaggagagtaagtctaagagaagggaggat

SEQ ID NO: 21724 - DNA, 306 bp, Homo sapiens
  MAP TO AL031687.14; EXPRESSED IN FETAL LIVER, SIGNAL =   1; EXPRESSED IN HEART, SIGNAL = 0.85; NT HIT: AF218910.1, EVALUE 1.00e-02; SWISSPROT HIT: P15939, EVALUE 5.50e+00; EST_HUMAN HIT: AV709832.1, EVALUE 1.10e+00
ggatgagagatgccaagcatgacttccagccttctggcctggaacacttgacagatgagggtgtcattcacgaagatggaaaaccccagagaagagtcagttttagggaagaggaatatgttgagtttgaagttttttggaggcatctaagtggaggcatgagagagcagctctatgtttatccttgggcttcagaggagaggttaggactgaggatactaagcttgggagtcattatagtattgatggtaatggaaaccatcagcatggatgagattgcccagggaaagagtgaggagtctgcag

SEQ ID NO: 21725 - DNA, 130 bp, Homo sapiens
  MAP TO AL031664.1; EXPRESSED IN BT474, SIGNAL = 1.3; EXPRESSED IN FETAL LIVER, SIGNAL = 1.8; EXPRESSED IN BONE MARROW, SIGNAL =   2; EXPRESSED IN HBL100, SIGNAL = 1.6; EXPRESSED IN PLACENTA, SIGNAL = 1.4; EXPRESSED IN HEART, SIGNAL = 1.5; EXPRESSED IN BRAIN, SIGNAL = 1.3; EXPRESSED IN LUNG, SIGNAL = 1.5; EXPRESSED IN HELA, SIGNAL = 1.4; EXPRESSED IN ADULT LIVER, SIGNAL = 1.7; EST_HUMAN HIT: T57850.1, EVALUE 3.00e-07; NT HIT: AF003529.1, EVALUE 7.00e-05
atggatgtggctgtgttccgatacaactttacttacaaaaacaggccatgggctgatttagctggtgggccatattttgtgacctttgctgtcggtgatcaaagaaagaggacacaacaggagaagtcag

SEQ ID NO: 21726 - DNA, 147 bp, Homo sapiens
  MAP TO AC009396.3; EXPRESSED IN FETAL LIVER, SIGNAL = 0.89; EXPRESSED IN HEART, SIGNAL = 0.94; EXPRESSED IN LUNG, SIGNAL = 6.6; EST_HUMAN HIT: BF055948.1, EVALUE 5.00e-01; NT HIT: AB001562.1, EVALUE 7.20e-02; SWISSPROT HIT: P47691, EVALUE 7.70e-01
aagagtttccacaagttgattgtggatatctgaaatcaaatttaattacatgtgatggatcaacttcttgaactcccatatttctttcattgtcttcttcggattccatgcctcacctttgtggaaactgaactatagagaaatgat

SEQ ID NO: 21727 - DNA, 204 bp, Homo sapiens
  MAP TO AL034423.16; EXPRESSED IN HELA, SIGNAL = 1.6; EXPRESSED IN HEART, SIGNAL = 1.7; EXPRESSED IN FETAL LIVER, SIGNAL = 1.6; EXPRESSED IN ADULT LIVER, SIGNAL = 1.3; EXPRESSED IN BT474, SIGNAL = 1.7; EXPRESSED IN LUNG, SIGNAL = 1.4; EXPRESSED IN PLACENTA, SIGNAL = 1.2; EXPRESSED IN HBL100, SIGNAL = 1.7; EXPRESSED IN BRAIN, SIGNAL = 1.6; EXPRESSED IN BONE MARROW, SIGNAL = 1.8; NT HIT: AE002014.1, EVALUE 2.60e-02; EST_HUMAN HIT: R73964.1, EVALUE 7.20e-01; SWISSPROT HIT: P08120, EVALUE 1.40e-01
gtccttctccttcctgggcttcacggtcttcttctgcacaaaaggagccaagggcatgtaaccctggtgtgttccgttccccttctgagccttggtcttttcaaggggcaggggagggcagctgtcctggttctgggtcagggtaggtcaggagcagcttgctgttgtgtgacctggagaaggccttctctctccctgagcctc

SEQ ID NO: 21728 - DNA, 144 bp, Homo sapiens
  MAP TO AL049833.3; EXPRESSED IN ADULT LIVER, SIGNAL =   1; EXPRESSED IN FETAL LIVER, SIGNAL = 0.96; EXPRESSED IN BONE MARROW, SIGNAL =   1; EXPRESSED IN HBL100, SIGNAL = 1.1; EXPRESSED IN HEART, SIGNAL = 1.2; EXPRESSED IN HELA, SIGNAL = 1.1; EXPRESSED IN PLACENTA, SIGNAL = 2.1; EST_HUMAN HIT: BF367891.1, EVALUE 1.90e+00; SWISSPROT HIT: P45779, EVALUE 3.00e+00
cacgatggtcacatggaggttcttggagggctgctgaccaaccacagcatagagtcgcttctgaaccagtacccaagaattccaggttccatgtttaagaacagccaaggtcagggactcagtccaaaattctgcaacagcttc

SEQ ID NO: 21729 - DNA, 268 bp, Homo sapiens
  MAP TO AC010680.3; EXPRESSED IN HEART, SIGNAL = 2.3; SWISSPROT HIT: Q14896, EVALUE 4.00e-05; EST_HUMAN HIT: BF355447.1, EVALUE 0.00e+00; NT HIT: AJ277892.1, EVALUE 0.00e+00
cctgtcactctgatcaaggacattgaaaatcagacagttttgaaagataatgatgctgtctttgaaattgacattaaaattaattatccagaaatcaagctttcgtggtacaaaggaactgaaaaactggaacccagtgataaatttgaaataagcattgatggtgaccgacatacactcagagtcaaaaactgtcaacttaaagaccagggcaattatcgattggtttgtggtccacacatcgctagcgctaaactaactgtaattg

SEQ ID NO: 21730 - DNA, 714 bp, Homo sapiens
  MAP TO AC010680.3; EXPRESSED IN HEART, SIGNAL =   3; NT HIT: gi4507720, EVALUE 0.00e+00; EST_HUMAN HIT: AW293420.1, EVALUE 0.00e+00; SWISSPROT HIT: Q02173, EVALUE 6.00e-26
agtctgtttgaagtttgcatctatgtctaactcaggagctgttaaccggtcaactgctttaattgtgccagtcacttcacagctgtcgccttttccagcaccattgatagcactaactcggaatttgtattcttcacctgcttgtagatcagtgactgtatatcttgttttcacacatgcctctgcattcaccttgtgccagtctcctaagtcggccttacacatttcaataatatacccaattatttccctgccaccatcaaacactggtttggaccattctaagctcacagttgtctttgatgtgtctgttactttgaccactgtgggaggacctggtgggttgacgggctctctacatttaatgagtcttgagatgccacttgcaggtccaactcctgcagcattttcagccatgacatggaattcatactcattgccttctgtcagaccagtgactttgaatcttgtttcagagattggtcgtttgctgatcacttttacccatcttgtgcttttcttttctcttctttcaaggatatactgttgaatttcactgccaccatctgattctggccttgcccatgtcagggtaatgctgttgcctgttatgttgctaggttctggaatgccaggggcatcaggaacagctgtaaaacaaaaacaaaaccccaaatcaattagatgcatttgcttggaaggttaaacttttga

SEQ ID NO: 21731 - DNA, 77 bp, Homo sapiens
  MAP TO AL050342.36; EXPRESSED IN BT474, SIGNAL = 0.91; EXPRESSED IN HEART, SIGNAL = 0.95; EST_HUMAN HIT: BF316135.1, EVALUE 2.30e-01
atggcggctccatttgggggctttttgttgttgcttttttttttcccttggctgctgttactactcagttcaatatt

SEQ ID NO: 21732 - DNA, 333 bp, Homo sapiens
  MAP TO AC010680.3; EXPRESSED IN PLACENTA, SIGNAL = 0.92; EXPRESSED IN HEART, SIGNAL = 4.2; NT HIT: gi4507720, EVALUE 0.00e+00; EST_HUMAN HIT: F00912.1, EVALUE 4.00e-92; SWISSPROT HIT: Q05623, EVALUE 2.00e-15
ctaaaccaagtccacctgttaatcctgaagcaatagatacaacatgcaattcagtcgatctaacttggcagccaccacgtcatgatggtgggagcaagattctgggttatattgttgagtaccagaaagttggagatgaagagtggagaagagccaatcacacccctgagtcatgtcctgaaactaaatataaagtcaccggtcttcgggacggtcaaacctataagtttagagtgttagcagtcaatgcagctggtgaatcagatccagctcatgttccggagccagtcctagtaaaagacaggcttggtgagtaaaatgctctcacttgtg

SEQ ID NO: 21733 - DNA, 102 bp, Homo sapiens
  MAP TO AL078591.17; EXPRESSED IN PLACENTA, SIGNAL =   1; EXPRESSED IN BT474, SIGNAL = 1.4; EXPRESSED IN LUNG, SIGNAL = 1.6; EXPRESSED IN HBL100, SIGNAL = 1.5; EXPRESSED IN HELA, SIGNAL = 2.3; EXPRESSED IN HEART, SIGNAL = 2.3; EXPRESSED IN ADULT LIVER, SIGNAL = 1.5; EXPRESSED IN FETAL LIVER, SIGNAL = 1.7; EST_HUMAN HIT: AI868501.1, EVALUE 8.10e-02; NT HIT: AB037832.1, EVALUE 5.00e-51
taacatcatttaaaacaacctcttcatttttgtacaaaatttgaaatgttttactgcaaattagagaatcatgaactgaggctggaaaggctaaagtcatac

SEQ ID NO: 21734 - DNA, 141 bp, Homo sapiens
  MAP TO AC010896.2; EXPRESSED IN PLACENTA, SIGNAL = 1.1; EXPRESSED IN HBL100, SIGNAL =   1; EXPRESSED IN HEART, SIGNAL = 3.8; EXPRESSED IN BT474, SIGNAL = 1.2; EXPRESSED IN BRAIN, SIGNAL = 0.96; NT HIT: gi4504326, EVALUE 4.00e-74; SWISSPROT HIT: P55084, EVALUE 1.00e-19; EST_HUMAN HIT: AV693445.1, EVALUE 7.00e-74
gccactctgcagaccgactggccgctgcctttgctgtttctcggctggaacaggatgaatatgcactgcgctctcacagtctagccaagaaggcacaggatgaaggactcctttctgatgtggtacccttcaaagtaccag

SEQ ID NO: 21735 - DNA, 442 bp, Homo sapiens
  MAP TO AL035458.32; EXPRESSED IN ADULT LIVER, SIGNAL = 3.4; EXPRESSED IN BT474, SIGNAL =   3; EXPRESSED IN BRAIN, SIGNAL = 2.7; EXPRESSED IN HBL100, SIGNAL = 3.3; EXPRESSED IN HELA, SIGNAL = 2.9; EXPRESSED IN HEART, SIGNAL = 2.8; EXPRESSED IN FETAL LIVER, SIGNAL = 2.7; EXPRESSED IN LUNG, SIGNAL = 2.7; EXPRESSED IN BONE MARROW, SIGNAL = 3.4; EXPRESSED IN PLACENTA, SIGNAL = 3.4; EST_HUMAN HIT: AU132928.1, EVALUE 1.00e-81; NT HIT: Y16414.1, EVALUE 3.00e-10
tctccatgagactgctggcgccagcgcccgcccgcgcggcacctactcggagagggcgcttcgcgctgactcagcggcgacggcggcggcggcgttagctggccctcgcgctctttcccttcttggggcgctgaccccgcccgcttgcttgcttgcttgcctgccactcaagagaaggtgccaggggacgcggagcgacgagaggcgtgcagtcccggccaactccgtctctggcgttggcgctgcggtcgtggcagaggactacggcgacaaggacgagggccgctgtcccagctctctgcgagctgcgccgctcggctccgttccgctggctgaccatggagttcaggctgggaggcgggctggagtgatagggaagatgtttataaattcttctgtgggatcagagggcaagcctattataaccagaaaactccaagta

SEQ ID NO: 21736 - DNA, 156 bp, Homo sapiens
  MAP TO AL078591.17; EXPRESSED IN PLACENTA, SIGNAL = 2.4; EXPRESSED IN HEART, SIGNAL = 2.6; EXPRESSED IN FETAL LIVER, SIGNAL = 2.4; EXPRESSED IN ADULT LIVER, SIGNAL = 3.1; EXPRESSED IN BT474, SIGNAL = 2.5; EXPRESSED IN BRAIN, SIGNAL =   2; EXPRESSED IN HELA, SIGNAL = 2.5; EXPRESSED IN HBL100, SIGNAL = 3.2; EXPRESSED IN LUNG, SIGNAL = 2.6; EXPRESSED IN BONE MARROW, SIGNAL = 2.6; EST_HUMAN HIT: AW813906.1, EVALUE 1.00e-47; NT HIT: AB013139.1, EVALUE 7.70e-02; SWISSPROT HIT: Q14957, EVALUE 1.70e+00
ttatgcacagcatagcaagcagcatgagcttcctgttcatgttagtttcccttgtattcactcttccaagtcccatgggagtgacatggaggcaggccaggtggataccatgtatgtggtgggtttttggtcacaattgaggaaccctaagcttag

SEQ ID NO: 21737 - DNA, 114 bp, Homo sapiens
  MAP TO AL035467.21; EXPRESSED IN BONE MARROW, SIGNAL = 9.5; EXPRESSED IN HEART, SIGNAL =  17; EXPRESSED IN FETAL LIVER, SIGNAL =  11; EXPRESSED IN ADULT LIVER, SIGNAL =  22; EXPRESSED IN BT474, SIGNAL =  11; EXPRESSED IN LUNG, SIGNAL =  11; EXPRESSED IN BRAIN, SIGNAL = 7.2; EXPRESSED IN PLACENTA, SIGNAL =  15; EXPRESSED IN HELA, SIGNAL = 7.8; EXPRESSED IN HBL100, SIGNAL = 8.4; EST_HUMAN HIT: AI791957.1, EVALUE 1.50e+00; NT HIT: AJ006274.1, EVALUE 1.40e-02; SWISSPROT HIT: O46409, EVALUE 1.00e-03
gggaagctgaagccctttgccacagagctgcacatgttggtgcagaagtcacagaagctgtgggaagaggtccagcaagagtcacaggagctctgggaccagctgctgccccag

SEQ ID NO: 21738 - DNA, 78 bp, Homo sapiens
  MAP TO AL078623.24; EXPRESSED IN BONE MARROW, SIGNAL = 1.9; EXPRESSED IN HELA, SIGNAL = 1.2; EXPRESSED IN HEART, SIGNAL = 1.3; EXPRESSED IN FETAL LIVER, SIGNAL = 1.5; EXPRESSED IN ADULT LIVER, SIGNAL = 1.8; EXPRESSED IN BRAIN, SIGNAL = 1.2; EXPRESSED IN LUNG, SIGNAL = 1.8; EXPRESSED IN PLACENTA, SIGNAL = 1.8; EXPRESSED IN HBL100, SIGNAL = 1.6; EXPRESSED IN BT474, SIGNAL = 1.5; NT HIT: AJ012469.1, EVALUE 3.40e-02
ttgtgagtcatcaagctgaccccaacatattactgtgtgctcttcaatgacattttcaccccataagacactaagttc

SEQ ID NO: 21739 - DNA, 156 bp, Homo sapiens
  MAP TO AL035554.1; EXPRESSED IN BT474, SIGNAL =  12; EXPRESSED IN HELA, SIGNAL =  12; EXPRESSED IN HEART, SIGNAL =  11; EXPRESSED IN FETAL LIVER, SIGNAL =  13; EXPRESSED IN BRAIN, SIGNAL =  12; EXPRESSED IN LUNG, SIGNAL =  14; EXPRESSED IN BONE MARROW, SIGNAL =  14; EXPRESSED IN PLACENTA, SIGNAL =  14; EXPRESSED IN HBL100, SIGNAL =  14; EXPRESSED IN ADULT LIVER, SIGNAL =  17; EST_HUMAN HIT: AA379242.1, EVALUE 9.00e-83; NT HIT: K02400.1, EVALUE 6.00e-83; SWISSPROT HIT: P04040, EVALUE 3.00e-25
tgcctgattaaatgtcatgacctggatgtaaaaagtccaggaggggtactttcctgtggcaatggcgttaaaaagatcccggatgccatagtcaggatcttcctgggaaagtctcgccgcatcttcaacagaaaggtttttgatgccctggtcagt

SEQ ID NO: 21740 - DNA, 133 bp, Homo sapiens
  MAP TO AL009176.1; EXPRESSED IN HEART, SIGNAL =   1; EXPRESSED IN BT474, SIGNAL =   1; EXPRESSED IN ADULT LIVER, SIGNAL = 0.97; EXPRESSED IN BONE MARROW, SIGNAL =   1; EXPRESSED IN LUNG, SIGNAL =   1; EST_HUMAN HIT: AW086022.1, EVALUE 1.70e+00; NT HIT: X15122.1, EVALUE 2.50e-01; SWISSPROT HIT: P16466, EVALUE 1.20e-01
aaaaatgacctcactctgcaggtaaccaaagtcacagggaccaaaaatgacctcactctgaagacaaccaaagccacagggaacgaaaatgacctcactctgcaggtaaccaaagtcacagggaccgaaaatg

SEQ ID NO: 21741 - DNA, 155 bp, Homo sapiens
  MAP TO AL035662.23; EXPRESSED IN PLACENTA, SIGNAL = 1.6; EXPRESSED IN HEART, SIGNAL = 1.7; EXPRESSED IN FETAL LIVER, SIGNAL = 1.4; EXPRESSED IN ADULT LIVER, SIGNAL = 1.4; EXPRESSED IN BT474, SIGNAL = 1.4; EXPRESSED IN BRAIN, SIGNAL = 1.5; EXPRESSED IN HELA, SIGNAL = 1.2; EXPRESSED IN HBL100, SIGNAL = 1.6; EXPRESSED IN LUNG, SIGNAL = 1.5; EXPRESSED IN BONE MARROW, SIGNAL = 1.5; NT HIT: gi4507580, EVALUE 2.00e-82; EST_HUMAN HIT: AA147464.1, EVALUE 2.00e-82; SWISSPROT HIT: P25942, EVALUE 2.00e-25
tgtctctcctgcactgagatgcgactctctttgccatcctcctgggtgaccggttggcatccatgtaaagtctcctgcactggagcagcagtgttggagccaggaagatcgtcgggaaaattgatctcctggggttcctgcttggggtggggggc

SEQ ID NO: 21742 - DNA, 166 bp, Homo sapiens
  MAP TO AL078645.18; EXPRESSED IN BONE MARROW, SIGNAL = 4.1; EXPRESSED IN HEART, SIGNAL = 2.8; EXPRESSED IN FETAL LIVER, SIGNAL = 3.5; EXPRESSED IN ADULT LIVER, SIGNAL = 3.2; EXPRESSED IN BT474, SIGNAL = 3.1; EXPRESSED IN BRAIN, SIGNAL = 2.4; EXPRESSED IN LUNG, SIGNAL = 3.6; EXPRESSED IN PLACENTA, SIGNAL = 3.4; EXPRESSED IN HELA, SIGNAL =   3; EXPRESSED IN HBL100, SIGNAL = 3.3; NT HIT: U76009.1, EVALUE 8.20e-02; SWISSPROT HIT: Q12717, EVALUE 5.00e+00
ccaatgctgttgctacttctgcttttgctgttgttgttgttgttattgctgctgctattgctgctgttttggattcccagccagcaccttctcaggggcagcatccatccccctgcttcctcatccccagcattatcacgtaaggtaacaggcgtgggctcccaga

SEQ ID NO: 21743 - DNA, 152 bp, Homo sapiens; identical to SEQ ID NO: 19207
  MAP TO AL079341.13; EXPRESSED IN ADULT LIVER, SIGNAL =  11; EXPRESSED IN BT474, SIGNAL = 7.6; EXPRESSED IN HELA, SIGNAL =   8; EXPRESSED IN HEART, SIGNAL = 7.5; EXPRESSED IN FETAL LIVER, SIGNAL = 7.1; EXPRESSED IN BRAIN, SIGNAL = 6.4; EXPRESSED IN LUNG, SIGNAL = 8.5; EXPRESSED IN BONE MARROW, SIGNAL = 8.7; EXPRESSED IN PLACENTA, SIGNAL = 9.6; EXPRESSED IN HBL100, SIGNAL = 8.5; NT HIT: gi5174718, EVALUE 8.00e-45; EST_HUMAN HIT: BF690696.1, EVALUE 1.00e-44

SEQ ID NO: 21744 - DNA, 201 bp, Homo sapiens
  MAP TO AL035704.9; EXPRESSED IN PLACENTA, SIGNAL = 2.8; EXPRESSED IN ADULT LIVER, SIGNAL = 3.1; EXPRESSED IN BT474, SIGNAL = 2.6; EXPRESSED IN BRAIN, SIGNAL = 2.9; EXPRESSED IN HELA, SIGNAL =   2; EXPRESSED IN HBL100, SIGNAL = 2.8; EXPRESSED IN HEART, SIGNAL = 3.1; EXPRESSED IN FETAL LIVER, SIGNAL = 2.2; EXPRESSED IN LUNG, SIGNAL = 2.6; EXPRESSED IN BONE MARROW, SIGNAL =   3; NT HIT: Y11344.1, EVALUE 1.60e+00; EST_HUMAN HIT: AI421706.1, EVALUE 1.90e+00
tttatgtaaaacatttgaaactgttcctggcctgcaggtgcaagctctagagatgatgatgatgatgatgatgatgatgatgatgatgatgatgatgatgatgaaggtaacgtgggggggatttagcccaatatttgaagccagaaggacggtggcatggtcagacatgtgtcagaagctgacacatggtgacagcttctt

SEQ ID NO: 21745 - DNA, 212 bp, Homo sapiens
  MAP TO AL080274.13; EXPRESSED IN BONE MARROW, SIGNAL = 2.1; EXPRESSED IN LUNG, SIGNAL = 1.7; EXPRESSED IN PLACENTA, SIGNAL = 1.3; EXPRESSED IN HEART, SIGNAL = 2.1; EXPRESSED IN FETAL LIVER, SIGNAL =   2; EXPRESSED IN ADULT LIVER, SIGNAL = 2.1; EXPRESSED IN BT474, SIGNAL = 1.8; EXPRESSED IN BRAIN, SIGNAL = 1.4; EXPRESSED IN HELA, SIGNAL = 1.5; EXPRESSED IN HBL100, SIGNAL = 2.4; EST_HUMAN HIT: AV731704.1, EVALUE 1.20e-02; NT HIT: Y15839.1, EVALUE 4.30e-01
gagaagaaggagaagttgaagaaggaggagaaggagaaggatgagaagaaaaacaagaagaggaaggagaaggaggaggaaaatgagaaggagaagaagagaaggaacagcagcagttgcaggaggaggagaaagaggaggaggaggaggagggagtgtgcagaagctggggggtaaatgcaatcttgagaaattcagcacagttccaacag

SEQ ID NO: 21746 - DNA, 368 bp, Homo sapiens
  MAP TO AL035452.6; EXPRESSED IN PLACENTA, SIGNAL = 3.5; EXPRESSED IN HBL100, SIGNAL = 3.6; EXPRESSED IN ADULT LIVER, SIGNAL =   4; EXPRESSED IN BT474, SIGNAL = 3.6; EXPRESSED IN HELA, SIGNAL =   3; EXPRESSED IN HEART, SIGNAL = 2.4; EXPRESSED IN FETAL LIVER, SIGNAL = 3.4; EXPRESSED IN BRAIN, SIGNAL =   3; EXPRESSED IN LUNG, SIGNAL = 3.3; EXPRESSED IN BONE MARROW, SIGNAL = 3.5; NT HIT: X52988.1, EVALUE 0.00e+00; SWISSPROT HIT: P21130, EVALUE 1.00e-64; EST_HUMAN HIT: BF219305.1, EVALUE 4.00e-07
  unsure 332
  unsure 355
  unsure 356
  unsure 357
  unsure 358
  unsure 359
  unsure 360
  unsure 361
  unsure 362
  unsure 363
  unsure 364
  unsure 365
  unsure 366
  unsure 367
  unsure 368
accaaaaagcatacaaagaaacgtacggcgtctctcatattacacgccatgatatgctgcagatccctaaacagcagcaaaacgaaaaataccaagtgcctcaattcgatcaatcaacgattaaaaatattgagtctgcaaaaggacttgatgtgtgggacagctggccgctgcaaaacgctgacggaacagtagctgaatacaacggctatcacgttgtgtttgctcttgcgggaagcccgaaagacgctgatgacacatcaatctacatgttttatcaaaaggtcggcgacaactcaatcgacagctggaaaaacgcgggccgtgtcttntaagacagcgataagttcgacgnnnnnnnnnnnnnn

SEQ ID NO: 21747 - DNA, 124 bp, Homo sapiens
  MAP TO AL079336.5; EXPRESSED IN PLACENTA, SIGNAL = 3.6; EXPRESSED IN LUNG, SIGNAL =   3; EXPRESSED IN BONE MARROW, SIGNAL = 4.4; EXPRESSED IN HBL100, SIGNAL = 3.4; EXPRESSED IN HELA, SIGNAL =   3; EXPRESSED IN HEART, SIGNAL = 3.7; EXPRESSED IN BT474, SIGNAL = 3.4; EXPRESSED IN ADULT LIVER, SIGNAL = 3.9; EXPRESSED IN FETAL LIVER, SIGNAL =   6; EXPRESSED IN BRAIN, SIGNAL = 3.1; SWISSPROT HIT: P14589, EVALUE 2.30e+00; EST_HUMAN HIT: BE560660.1, EVALUE 4.00e-04
atacacaagcacactgtctcggtgtgcaggacaaagctgcctcctgcccgctggcgccaagcatgagcggcaccagttgccaaagcctccggttctcttgacggctctgccagcagctccagtg

SEQ ID NO: 21748 - DNA, 113 bp, Homo sapiens
  MAP TO AL035703.19; EXPRESSED IN HBL100, SIGNAL = 9.2; EXPRESSED IN HELA, SIGNAL = 8.2; EXPRESSED IN PLACENTA, SIGNAL =   8; EXPRESSED IN ADULT LIVER, SIGNAL = 9.9; EXPRESSED IN HEART, SIGNAL = 7.3; EXPRESSED IN BT474, SIGNAL =  11; EXPRESSED IN FETAL LIVER, SIGNAL = 8.3; EXPRESSED IN LUNG, SIGNAL =  10; EXPRESSED IN BONE MARROW, SIGNAL = 8.4; EXPRESSED IN BRAIN, SIGNAL = 6.3; NT HIT: X56979.1, EVALUE 3.90e+00; EST_HUMAN HIT: AA099322.1, EVALUE 5.70e+00
atgtcacctcctggtggtcctggatcgccatccacacttcagaagcagcctcttggcccacccggcctccagctcgctggctctatggagaggtttcagagaagggtttctga

SEQ ID NO: 21749 - DNA, 197 bp, Homo sapiens
  MAP TO AF172274.1; EXPRESSED IN HELA, SIGNAL = 1.7; EXPRESSED IN HBL100, SIGNAL = 0.92; EXPRESSED IN HEART, SIGNAL = 0.98; EXPRESSED IN LUNG, SIGNAL =  11; EXPRESSED IN FETAL LIVER, SIGNAL = 1.7; EST_HUMAN HIT: BF672179.1, EVALUE 4.00e-95; NT HIT: M21334.1, EVALUE 2.00e-03; SWISSPROT HIT: P35384, EVALUE 5.60e-01
ctgcaaagttcatcaggcccagctttaaatgcggggtctctgtaccagcatacgcgttaatttcattcaccaggaggtctgctttgtctctcagcctggcagttttccgcacataggcagcgaaaatttggcacagttctccaaaatgcttctccacatttgaaacagctgtttgcagttgtttcgtttgagcgttc

SEQ ID NO: 21750 - DNA, 495 bp, Homo sapiens
  MAP TO AL049176.3; EXPRESSED IN BT474, SIGNAL = 2.3; EXPRESSED IN BONE MARROW, SIGNAL =   2; EXPRESSED IN HBL100, SIGNAL = 2.5; EXPRESSED IN PLACENTA, SIGNAL = 2.2; EXPRESSED IN FETAL LIVER, SIGNAL = 2.7; EXPRESSED IN BRAIN, SIGNAL = 2.2; EXPRESSED IN LUNG, SIGNAL = 2.6; EXPRESSED IN HEART, SIGNAL = 2.1; EXPRESSED IN HELA, SIGNAL = 2.4; EXPRESSED IN ADULT LIVER, SIGNAL = 2.5; EST_HUMAN HIT: AW629172.1, EVALUE 7.00e-27; NT HIT: AL163248.2, EVALUE 6.00e-15
ggggtttttgatgtatgtaaatgtaatacagacatatctcagaaatattgtaggttcagttccacaccacttcaatgaagcaaatatcacaaattgttttgtttcccagcatatataaaagttacttttctattatactgtagtctattaagtgtgcaatataattatgcctaaaacataccttcatttaaaaatactttattgttaaaaaatgctaacaatcacctgagccctcaccaagtcatttgctttttgctgatggagggtcttccctcaatgctgatggctgctaactgatcagggtggtggttgattaaggctggggtgactatggccatgacaacaatgaaatttgctgcatcaatggactctttcacaaaagatttctttgtgagtgtaatgctgttttgtagcattttacccacagtagaacttcttccaaaattggagtcaattctctcaagccctgctgctgctttatcaattaagtttata

SEQ ID NO: 21751 - DNA, 185 bp, Homo sapiens
  MAP TO AL049542.5; EXPRESSED IN PLACENTA, SIGNAL =   3; EXPRESSED IN HEART, SIGNAL = 3.1; EXPRESSED IN ADULT LIVER, SIGNAL = 3.7; EXPRESSED IN LUNG, SIGNAL =   3; EXPRESSED IN BONE MARROW, SIGNAL = 3.6; EXPRESSED IN HELA, SIGNAL = 3.2; EXPRESSED IN HBL100, SIGNAL = 3.8; EXPRESSED IN BT474, SIGNAL = 3.3; EXPRESSED IN FETAL LIVER, SIGNAL = 3.2; EXPRESSED IN BRAIN, SIGNAL = 2.7; EST_HUMAN HIT: BE906556.1, EVALUE 3.00e-86; NT HIT: gi11431210, EVALUE 1.00e-100; SWISSPROT HIT: P27398, EVALUE 7.00e-16
gcgctggccaagctgcacggctcctactttgcgctccaggcgggccgcgccatcgaaggcctggccacgctcaccggcgccccctgtgagagcctggcgctgcagctcagctccactaacccccgcgaggagcccgttgacactgacctcatctgggccaaaatgctgagttctaaggaggctgg

SEQ ID NO: 21752 - DNA, 172 bp, Homo sapiens
  MAP TO AL117375.4; EXPRESSED IN BT474, SIGNAL =   2; EXPRESSED IN BONE MARROW, SIGNAL = 3.1; EXPRESSED IN HBL100, SIGNAL = 2.6; EXPRESSED IN PLACENTA, SIGNAL = 2.5; EXPRESSED IN FETAL LIVER, SIGNAL = 2.3; EXPRESSED IN BRAIN, SIGNAL = 2.4; EXPRESSED IN LUNG, SIGNAL = 1.9; EXPRESSED IN HEART, SIGNAL = 2.1; EXPRESSED IN HELA, SIGNAL = 1.9; EXPRESSED IN ADULT LIVER, SIGNAL = 2.5; EST_HUMAN HIT: AV756381.1, EVALUE 3.80e-02; SWISSPROT HIT: P04701, EVALUE 2.20e+00
gtactttcacaagcaaatggtgcagctcacttacagaaacaccagctcctacccttcaatccaattcagcaggtttgctttggataaacagcagtactcacctcacgcagcaaaatcctacaaactgcatcaaggtgagagcttgcaatgggatgaagctggggtctgggat

SEQ ID NO: 21753 - DNA, 166 bp, Homo sapiens
  MAP TO AL109809.14; EXPRESSED IN PLACENTA, SIGNAL = 1.6; EXPRESSED IN HELA, SIGNAL = 1.4; EXPRESSED IN HEART, SIGNAL = 1.7; EXPRESSED IN ADULT LIVER, SIGNAL = 1.8; EXPRESSED IN BT474, SIGNAL = 1.4; EXPRESSED IN LUNG, SIGNAL = 2.2; EXPRESSED IN BONE MARROW, SIGNAL = 2.6; EXPRESSED IN HBL100, SIGNAL = 2.2; EXPRESSED IN FETAL LIVER, SIGNAL = 1.9; EXPRESSED IN BRAIN, SIGNAL = 2.8; EST_HUMAN HIT: BE514786.1, EVALUE 2.00e-22; NT HIT: gi11421332, EVALUE 2.00e-33; SWISSPROT HIT: O70361, EVALUE 9.90e-01
atggaaggcacctacgactggacaagctggctcctggtgaacatatctgcccacagggatgatgtgctcacctaccagatggcgcatgatgggcagctggtggtcagcaaaagccttgccctagaggtctcagcccaccaggagcagagctcagaggccacccttg

SEQ ID NO: 21754 - DNA, 98 bp, Homo sapiens
  MAP TO AL109838.8; EXPRESSED IN ADULT LIVER, SIGNAL =   1; EXPRESSED IN BT474, SIGNAL =  10; EXPRESSED IN BONE MARROW, SIGNAL =   3; EXPRESSED IN HBL100, SIGNAL = 6.4; EXPRESSED IN PLACENTA, SIGNAL = 2.6; EXPRESSED IN FETAL LIVER, SIGNAL = 1.5; EXPRESSED IN BRAIN, SIGNAL = 4.7; EXPRESSED IN LUNG, SIGNAL = 2.5; EXPRESSED IN HEART, SIGNAL = 4.2; EXPRESSED IN HELA, SIGNAL = 7.5; NT HIT: AF181258.1, EVALUE 1.80e-01; SWISSPROT HIT: Q9X807, EVALUE 1.10e+00
ccaggcttcctcagtgggattaagctccaggtgcctgcattggtaaccctgataatacatctcctaccagctgctctccctttgctgccttgcttcct

SEQ ID NO: 21755 - DNA, 219 bp, Homo sapiens
  MAP TO AL118522.7; EXPRESSED IN LUNG, SIGNAL = 0.93; EXPRESSED IN BONE MARROW, SIGNAL = 1.9; EXPRESSED IN BRAIN, SIGNAL = 1.3; EXPRESSED IN HBL100, SIGNAL = 1.6; EXPRESSED IN PLACENTA, SIGNAL = 1.2; EXPRESSED IN ADULT LIVER, SIGNAL = 1.1; EXPRESSED IN HEART, SIGNAL = 1.6; EXPRESSED IN BT474, SIGNAL = 1.5; NT HIT: gi7662015, EVALUE 1.00e-04; EST_HUMAN HIT: AW204463.1, EVALUE 1.00e-04; SWISSPROT HIT: P39061, EVALUE 2.80e-02
ctaagatcgttctccgcagggccccacggtgctctcgagggacaactgggatgcctgccggagcagggggcctgtggctgggtccaccatggaggaggtggggaagagcttgtaccagcccacggccagggtggtcaagtccagctcctccagcagcacgcgagccacacccatgaactgcttccgctccatccgcccgtagttcccccacacgatcac

SEQ ID NO: 21756 - DNA, 239 bp, Homo sapiens
  MAP TO AL121575.6; EXPRESSED IN HELA, SIGNAL = 1.2; EXPRESSED IN HEART, SIGNAL = 1.1; EXPRESSED IN ADULT LIVER, SIGNAL = 1.3; EXPRESSED IN BT474, SIGNAL = 1.3; EXPRESSED IN BONE MARROW, SIGNAL = 1.5; EXPRESSED IN HBL100, SIGNAL = 1.3; EXPRESSED IN PLACENTA, SIGNAL = 1.5; EXPRESSED IN FETAL LIVER, SIGNAL = 1.1; EXPRESSED IN BRAIN, SIGNAL = 1.1; EXPRESSED IN LUNG, SIGNAL = 1.4; EST_HUMAN HIT: AW363299.1, EVALUE 1.00e-130; SWISSPROT HIT: P03379, EVALUE 2.60e+00; NT HIT: AF135022.1, EVALUE 1.00e-111
cttctgatgaagagaaagcaccatatgtggaaaacttgcaaactggaaaagcacaaagaaaatgagctgacttgagagatgctgccacaggagttggcttgttcccccatcgtcaaacttctcctcggtctcagatcgctccatggcataaacaaccagatccaccaactggtcctccagcacagggcagcgctgcttgtgctgtagggcagagattaaatacagtattccaaaagcct

SEQ ID NO: 21757 - DNA, 93 bp, Homo sapiens
  MAP TO AC011334.1; EXPRESSED IN HEART, SIGNAL =   1; EXPRESSED IN LUNG, SIGNAL = 5.8; NT HIT: AJ251176.1, EVALUE 1.90e-01; EST_HUMAN HIT: BF213270.1, EVALUE 1.10e+00
gtcctacagcaaataatggtggagccagcccaagaagagacagcaaagcccttcacacctcaggccagagtcatatccacacagatgaactga

SEQ ID NO: 21758 - DNA, 234 bp, Homo sapiens
  MAP TO AL109935.13; EXPRESSED IN HEART, SIGNAL = 0.91; EXPRESSED IN LUNG, SIGNAL = 5.7; SWISSPROT HIT: P56431, EVALUE 9.60e+00; EST_HUMAN HIT: BE926497.1, EVALUE 2.10e-01; NT HIT: AF249273.1, EVALUE 5.60e-01
gtggcaattcctaaggtagttctggtggacctcagtgcatcagtggggaagagagagtttttagggtggtacaaagtatataaggaagaaactcctgagccacttaaggatgagtctgaatgtgtggtgttggctagatgtgggaagagctgcaaacacagtgaagtgaatgctgcaaggactggtcatactgaccacccagctgtgcaaggagaagagcaaccctggttgatg

SEQ ID NO: 21759 - DNA, 163 bp, Homo sapiens
  MAP TO AC011589.2; EXPRESSED IN BONE MARROW, SIGNAL = 0.92; EXPRESSED IN HEART, SIGNAL = 0.99; EXPRESSED IN BT474, SIGNAL = 0.92; EXPRESSED IN FETAL LIVER, SIGNAL = 0.95; EST_HUMAN HIT: AV756944.1, EVALUE 1.00e-04; SWISSPROT HIT: Q02759, EVALUE 2.90e+00; NT HIT: gi11419685, EVALUE 6.00e-03
ccatatcatgaactgccctacagtgagatccatgtggcagggaactgatgcctctggccaacagccatcgaggacctgaagcctgccaatggccacatgaatgagtctgaaagaccactgttgagcctgagatgactgcatccctggctgacaccttatttgt

SEQ ID NO: 21760 - DNA, 634 bp, Homo sapiens
  MAP TO AL121782.4; EXPRESSED IN FETAL LIVER, SIGNAL = 1.2; EXPRESSED IN BONE MARROW, SIGNAL =   1; EXPRESSED IN LUNG, SIGNAL = 1.2; EXPRESSED IN HBL100, SIGNAL = 1.1; EXPRESSED IN HEART, SIGNAL = 1.1; EXPRESSED IN PLACENTA, SIGNAL = 1.1; NT HIT: AE000895.1, EVALUE 8.70e-02; SWISSPROT HIT: P41164, EVALUE 5.50e+00
gatagccctaaatttggagttcagaggctttcattcacatctcaatttttccacttcctctctgaccataagcaaaccacattatcattctgtctcattttttttttcatctgaaaaaaataggtatagtatacatctttctgtctgacatggtattttgagggatctcattgatgcaaaagtgctatggaaactaaagcattatgcaaatatagggacttattgttaagatttcacaaagaactagtttctgcatcctgcaaagacataattgcacttagagcgagatccatgtttcattcttctgttcccccataataacttgcagaataaatatttgttaaataatggagcacttttatcacctgtagcaagagggaatattcatgataattctccatgtgagtggtgaaataatagttactgtggggcttgccatgtttatgtgagtatcttcactgggcttttaacctaaaaataggagggaactcttgtctgatgttgcctctgactgaagtgtggtgtcagtgagcctggtgatagtaagaaccaaagtggcctgtaggctggaagaatatgctgttctcatcagacagcattttaatcttattttaaggctccttagacatgatat

SEQ ID NO: 21761 - DNA, 225 bp, Homo sapiens
  MAP TO AP000021.2; EXPRESSED IN HEART, SIGNAL = 0.95; NT HIT: M21535.1, EVALUE 1.00e-113; EST_HUMAN HIT: AW948986.1, EVALUE 1.00e-108; SWISSPROT HIT: P11308, EVALUE 3.00e-37
tctctctgaggtagtggagatgtgagagaaggatgtcggcgttgtagctgggggtgagcctctggaagtcgtccttggtcatcttgcacagttccttcccatcgatgttctggaataacaagatgttgacgtctggaaggccatattctttcaccgcccactccagccactgccgcacatggtctgtactccatagcgtaggatctgaaaggggtgggaacacat

SEQ ID NO: 21762 - DNA, 115 bp, Homo sapiens
  MAP TO AL121748.2; EXPRESSED IN HEART, SIGNAL = 1.4; EST_HUMAN HIT: AL048873.1, EVALUE 5.80e+00
ctctctccgtaagtgcaattagacagttgcccatttcaatctgaatatatacagcttgactaactgactcgcagccatgccgtccattcatttccacttgaatatgtaccatccc

SEQ ID NO: 21763 - DNA, 2526 bp, Homo sapiens
  MAP TO AC005740.1; EXPRESSED IN BONE MARROW, SIGNAL = 0.98; EXPRESSED IN BRAIN, SIGNAL =   1; EXPRESSED IN LUNG, SIGNAL = 5.6; EXPRESSED IN HELA, SIGNAL = 0.99; EXPRESSED IN PLACENTA, SIGNAL = 1.8; EXPRESSED IN HEART, SIGNAL = 1.8; EXPRESSED IN FETAL LIVER, SIGNAL = 1.2; NT HIT: gi11416223, EVALUE 0.00e+00; EST_HUMAN HIT: AU140396.1, EVALUE 0.00e+00; SWISSPROT HIT: P33450, EVALUE 2.00e-57
atccatgtggagatccaagtgctggacatcaatgaccaccagccacggtttcccaaaggcgagcaggagctggaaatctctgagagcgcctctctgcgaacccggatccccctggacagagctcttgacccagacacaggccctaacaccctgcacacctacactctgtctcccagtgagcactttgccttggatgtcattgtgggccctgatgagaccaaacatgcagaactcatagtggtgaaggagctggacagggaaatccattcattttttgatctggtgttaactgcctatgacaatgggaacccccccaagtcaggtaccagcttggtcaaggtcaacgtcttggactccaatgacaatagccctgcgtttgctgagagttcactggcactggaaatccaagaagatgctgcacctggtacgcttctcataaaactgaccgccacagaccctgaccaaggccccaatggggaggtggagttcttcctcagtaagcacatgcctccagaggtgctggacaccttcagtattgatgccaagacaggccaggtcattctgcgtcgacctctagactatgaaaagaaccctgcctacgaggtggatgttcaggcaagggacctgggtcccaatcctatcccagcccattgcaaagttctcatcaaggttctggatgtcaatgacaacatcccaagcatccacgtcacatgggcctcccagccatcactggtgtcagaagctcttcccaaggacagttttattgctcttgtcatggcagatgacttggattcaggacacaatggtttggtccactgctggctgagccaagagctgggccacttcaggctgaaaagaactaatggcaacacatacatgttgctaaccaatgccacactggacagagagcagtggcccaaatataccctcactctgttagcccaagaccaaggactccagcccttatcagccaagaaacagctcagcattcagatcagtgacatcaacgacaatgcacctgtgtttgagaaaagcaggtatgaagtctccacgcgggaaaacaacttaccctctcttcacctcattaccatcaaggctcatgatgcagacttgggcattaatggaaaagtctcataccgcatccaggactccccagttgctcacttagtagctattgactccaacacaggagaggtcactgctcagaggtcactgaactatgaagagatggccggctttgagttccaggtgatcgcagaggacagcgggcaacccatgcttgcatccagtgtctctgtgtgggtcagcctcttggatgccaatgataatgccccagaggtggtccagcctgtgctcagcgatggaaaagccagcctctccgtgcttgtgaatgcctccacaggccacctgctggtgcccatcgagactcccaatggcttgggcccagcgggcactgacacacctccactggccactcacagctcccggccattccttttgacaaccattgtggcaagagatgcagactcgggggcaaatggagagcccctctacagcatccgcagtggaaatgaagcccacctcttcatcctcaaccctcatacggggcagctgttcgtcaatgtcaccaatgccagcagcctcattgggagtgagtgggagctggagatagtagtagaggaccagggaagcccccccttacagacccgagccctgttgagggtcatgtttgtcaccagtgtggaccacctgagggactcagcccgcaagcctggggccttgagcatgtcgatgctgacggtgatctgcctggctgtactgttgggcatcttcgggttgatcctggctttgttcatgtccatctgccggacagaaaagaaggacaacagggcctacaactgtcgggaggccgagtccacctaccgccagcagcccaagaggccccagaaacacattcagaaggcagacatccacctcgtgcctgtgctcaggggtcaggcaggtgagccttgtgaagtcgggcagtcccacaaagatgtggacaaggaggcgatgatggaagcaggctgggacccctgcctgcaggcccccttccacctcaccccgaccctgtacaggacgctgcgtaatcaaggcaaccagggagcaccggcggagagccgagaggtgctgcaagacacggtcaacctccttttcaaccatcccaggcagaggaatgcctcccgggagaacctgaaccttcccgagccccagcctgccacaggccagccacgttccaggcctctgaaggttgcaggcagccccacagggaggctggctggagaccagggcagtgaggaagccccacagaggccaccagcctcctctgcaaccctgagacggcagcgacatctcaatggcaaagtgtcccctgagaaagaatcagggccccgtcagatcctgcggagcctggtccggctgtctgtggctgccttcgccgagcggaaccccgtggaggagctcactgtggattctcctcctgttcag

SEQ ID NO: 21764 - DNA, 171 bp, Homo sapiens
  MAP TO AL109809.14; EXPRESSED IN BT474, SIGNAL =   1; EXPRESSED IN HEART, SIGNAL = 1.1; NT HIT: gi6978893, EVALUE 3.40e-01; EST_HUMAN HIT: BE044191.1, EVALUE 7.00e-03; SWISSPROT HIT: P17097, EVALUE 8.50e+00
tgcacaggtgagcactgccttgggctagaaccctttctctctgcttgcagccctgaaatccctgcccctgggctttcagggattccagacaaacacaagtgctcccaaggtaggtcaaggactgggcattgtctgagagcagaagatcagggagctgagcactttctctgt

SEQ ID NO: 21765 - DNA, 1576 bp, Homo sapiens
  MAP TO AL021331.1; EXPRESSED IN HEART, SIGNAL = 2.7; EST_HUMAN HIT: AI204535.1, EVALUE 1.00e-124; SWISSPROT HIT: P38584, EVALUE 3.00e-19
gaaaaaacctcatttgatggcggaagatgaaccttcaggggccctcttgaagccgctggtttttcgcgttgacgagaccaccccggctgtggtgcaaagcgtcctcctggagagggggtggaataagtttgataagcaggagcagaacgcggaggactggaacctgtactggaggacatcctctttccgaatgaccgaacacaacagtgttaaaccgtggcagcagctaaaccaccaccctggaaccaccaagcttaccaggaaagactgtttggccaaacacctgaagcacatgaggaggatgtatggcacttccctgtaccagttcatccccctgacgttcgtcatgcccaatgactataccaagttcgtggctgaatactttcaggagaggcagatgctgggcaccaagcatagctattggatttgcaagcctgctgagttatctcgtgggagggggatactaattttcagtgactttaaagacttcatctttgatgatatgtacatagtgcagaaatatatctccaatcctttacttattggcagatataaatgtgatctccgcatctatgtttgtgttactggctttaagcctttgaccatttatgtttatcaggaagggttggttcggtttgccacggaaaagtttgacctcagtaatttgcaaaacaattatgcccatttgaccaacagcagcatcaataaatccggggcctcttatgagaagatcaaagaagtgattggtcatggttgtaaatggacgctcagcagatttttttcctaccttcgtagctgggatgtggacgatctgcttttgtggaagaaaatccaccgcatggttattctcaccattctcgccattgcaccatctgtcccctttgctgccaattgctttgagctctttgggtttgatattttgattgatgacaacttgaaaccatggcttttagaggtcaactacagcccagccttgaccttggattgttcaacagatgtgttggtgaagagaaaacttgtccatgatattattgacctgatttacttaaatggtctaagaaatgaggggagagaagccagtaatgccacacatggaaattccaacatcgacgctgcaaaaagtgacagaggtgggcttgatgctcctgactgtcttccttatgattctctttcgttcacaagcagaatgtacaacgaggatgactctgtggtggagaaagctgtgagtgtgcgtcctgaagctgcacctgcctcccagctggaaggagagatgagtgggcaggattttcatctgtcaacaagggagatgccacaaagcaagcccaagttacggagcaggcacacgcctcacaagacactcatgccctacgcgtccctcttccagtcgcactcctgcaagaccaagacctccccgtgtgtcctgtcagaccgtggcaaagctccagatccccaagcaggcaactttgttcttgtttttcctttcaatgaagcaactctcggagcttccaggaatggattaaatgtcaaaagaataatccaagagctccagaaactaatgaataagcaacattcctaa

SEQ ID NO: 21766 - DNA, 419 bp, Homo sapiens
  MAP TO AL030995.1; EXPRESSED IN LUNG, SIGNAL = 1.1; EXPRESSED IN BONE MARROW, SIGNAL = 0.95; EXPRESSED IN HBL100, SIGNAL = 1.1; EXPRESSED IN HELA, SIGNAL = 1.2; EXPRESSED IN PLACENTA, SIGNAL = 1.2; EXPRESSED IN ADULT LIVER, SIGNAL =   1; EXPRESSED IN HEART, SIGNAL =   1; EXPRESSED IN FETAL LIVER, SIGNAL = 0.96; SWISSPROT HIT: P52018, EVALUE 8.00e-50; NT HIT: AF036331.1, EVALUE 0.00e+00; EST_HUMAN HIT: AW406511.1, EVALUE 0.00e+00
acacagctgagaactttgggcagttctgcactggagaattcagagaagatcgggttccaataggatacaaagggagcacctttcacagggtcataaaggatttcatgattcagggtggagattttgttaatggagatgttactggagtcaccagcatttaccagggaccatttgcagatgaaaattttaaaatcagatacccagctccggtcctgctttccatggtgaacagcagtcccagtacaaatggctgtcagttctttatcacccgctctaagtgcaatggcctggatgggaagcatgtagtgtttggaaaaatcactgatggacttctactgataagaaagattgaaaatgttcccacaggcaccaataataaggccaaggtacatatggtgatctcacggtgtggggagatg

SEQ ID NO: 21767 - DNA, 110 bp, Homo sapiens
  MAP TO AL078624.22; EXPRESSED IN ADULT LIVER, SIGNAL = 0.95; EXPRESSED IN BT474, SIGNAL = 0.98; EXPRESSED IN LUNG, SIGNAL = 1.2; EXPRESSED IN BONE MARROW, SIGNAL = 0.97; EXPRESSED IN HELA, SIGNAL =   1; EXPRESSED IN HEART, SIGNAL = 1.1; EXPRESSED IN HBL100, SIGNAL = 0.93; NT HIT: AF209747.1, EVALUE 2.40e-01; EST_HUMAN HIT: AW242967.1, EVALUE 5.50e+00
ctgcccctggcgggatacatccccagggagttgacatatttaacgagtaaagcagctcatttcatcagattagtttacacagaagagaaaggagacttcagaagcagtag

SEQ ID NO: 21768 - DNA, 191 bp, Homo sapiens
  MAP TO AL078645.18; EXPRESSED IN HELA, SIGNAL = 0.99; EXPRESSED IN HEART, SIGNAL = 1.3; EXPRESSED IN ADULT LIVER, SIGNAL =   1; EXPRESSED IN BONE MARROW, SIGNAL = 0.93; EXPRESSED IN LUNG, SIGNAL = 0.94; NT HIT: U82695.2, EVALUE 9.60e-02; EST_HUMAN HIT: BE901407.1, EVALUE 6.00e-35; SWISSPROT HIT: P01267, EVALUE 7.40e-01
ttcactgcactcagcttccctacaatccaatacagcatctctgcaccagcagtgttaatctggaaaaaggcatctggagagatgcagaccttcaagcccaggagatctttaaagatatgaggttccccaaacaagagctggtaggtggactgatgatggctgaaacaggtcctgctttcctggaagtcagg

SEQ ID NO: 21769 - DNA, 131 bp, Homo sapiens
  MAP TO AL033530.1; EXPRESSED IN PLACENTA, SIGNAL = 1.2; EXPRESSED IN HBL100, SIGNAL = 1.2; EXPRESSED IN ADULT LIVER, SIGNAL = 1.1; EXPRESSED IN HEART, SIGNAL = 1.4; EXPRESSED IN BT474, SIGNAL =   1; EXPRESSED IN FETAL LIVER, SIGNAL = 0.99; EXPRESSED IN BONE MARROW, SIGNAL = 1.2; EXPRESSED IN LUNG, SIGNAL = 0.98; EST_HUMAN HIT: AW821312.1, EVALUE 1.00e-03; NT HIT: AL163285.2, EVALUE 1.00e-06
ggggactcacagtgttttggatctcttctggagtttgcagtggcaagccacatttttcaaagggtctgtgaaagggtcactcagtttttccagtatgttcttgtggtggttctagagcaaaagttcacaat

SEQ ID NO: 21770 - DNA, 193 bp, Homo sapiens
  MAP TO AL078582.7; EXPRESSED IN BT474, SIGNAL = 0.91; EXPRESSED IN LUNG, SIGNAL = 1.4; EXPRESSED IN BRAIN, SIGNAL = 1.2; EXPRESSED IN BONE MARROW, SIGNAL = 1.2; EXPRESSED IN HEART, SIGNAL = 0.95; EXPRESSED IN ADULT LIVER, SIGNAL = 1.1; EXPRESSED IN HELA, SIGNAL = 0.98; EXPRESSED IN HBL100, SIGNAL = 0.92; NT HIT: AB018339.1, EVALUE 1.00e-105; EST_HUMAN HIT: AW961883.1, EVALUE 1.00e-105; SWISSPROT HIT: P11532, EVALUE 4.90e-02
aggcaggcggatcagtttcttatggtatctttccacacgcccgaagacctcctggcagtaccgtcggagctcatctagttcctcctcgatgatcgctgcatccaagggctcactcttttctatcagctgttctccttgggcaattatctgctcaatcttattgtggttcagtgaaatttcctgctggaaggcc

SEQ ID NO: 21771 - DNA, 98 bp, Homo sapiens; identical to SEQ ID NO: 18752
  MAP TO AL033539.17; EXPRESSED IN LUNG, SIGNAL = 1.1; EXPRESSED IN HBL100, SIGNAL = 0.99; EXPRESSED IN PLACENTA, SIGNAL = 1.2; EXPRESSED IN HEART, SIGNAL =   1; EXPRESSED IN FETAL LIVER, SIGNAL = 1.1; EXPRESSED IN ADULT LIVER, SIGNAL = 0.98; EST_HUMAN HIT: BF681239.1, EVALUE 1.20e+00; NT HIT: AB000489.1, EVALUE 8.20e-01

SEQ ID NO: 21772 - DNA, 116 bp, Homo sapiens
  MAP TO AC007968.2; EXPRESSED IN FETAL LIVER, SIGNAL = 0.99; EXPRESSED IN HEART, SIGNAL = 0.98; EXPRESSED IN LUNG, SIGNAL = 4.8; EST_HUMAN HIT: BE544653.1, EVALUE 3.80e-01; SWISSPROT HIT: Q62270, EVALUE 4.00e+00
gttccactgtccctggcagggctttcagaacaatgaagagcaaaaacaatcaaaccagccctataggattccagaccatgccaagaaccaaggtagaagcttgcgttagaggagtt

SEQ ID NO: 21773 - DNA, 151 bp, Homo sapiens
  MAP TO AC006445.10; EXPRESSED IN BT474, SIGNAL = 1.1; EXPRESSED IN HEART, SIGNAL = 0.85; EXPRESSED IN BONE MARROW, SIGNAL = 1.1; EXPRESSED IN LUNG, SIGNAL = 1.1; EXPRESSED IN FETAL LIVER, SIGNAL =   1; NT HIT: AB037748.1, EVALUE 3.00e-41; SWISSPROT HIT: O83683, EVALUE 1.00e+00
ggcttatgtgccttcagaggaagagaaaaatggtgaaattctggcaccaccagaaagtctgtgtgggggaaagccaagtggaataggtgagctctttagaatggttgttcacattgtttttgtttttgccttgcatgtggttttacctttc

SEQ ID NO: 21774 - DNA, 88 bp, Homo sapiens
  MAP TO AC010731.1; EXPRESSED IN FETAL LIVER, SIGNAL = 1.5; EXPRESSED IN HEART, SIGNAL = 0.98; EXPRESSED IN BRAIN, SIGNAL = 1.1; SWISSPROT HIT: P31695, EVALUE 4.30e+00; NT HIT: gi11430579, EVALUE 1.00e-42; EST_HUMAN HIT: AL135156.1, EVALUE 3.00e-40
ggtgaaggttcctaactggatcccggatactgcaatctgtccctgcccaggtgaaatcacaaatgcaggtggcttcattactacacac

SEQ ID NO: 21775 - DNA, 181 bp, Homo sapiens
  MAP TO AL078476.2; EXPRESSED IN HEART, SIGNAL = 0.88; EXPRESSED IN FETAL LIVER, SIGNAL = 1.4; NT HIT: AL163201.2, EVALUE 8.00e-98; SWISSPROT HIT: O77811, EVALUE 2.20e+00
ctaataaaaacccatttgtgaccttcactgtaataattaacaatgtttcaggtgttaattgagatgggaccactgaagcccttttggtggccatctctgtggagtggcttcctgagctgaacactagcttaccatccttgaacagagcatccaacattagggcaaccagctgcccctgtag

SEQ ID NO: 21776 - DNA, 471 bp, Homo sapiens
  MAP TO AC008132.19; EXPRESSED IN HELA, SIGNAL = 1.2; EXPRESSED IN HEART, SIGNAL =   1; NT HIT: AF089838.1, EVALUE 1.20e+00; EST_HUMAN HIT: AI904151.1, EVALUE 1.00e-121; SWISSPROT HIT: Q04503, EVALUE 8.00e-04
catataagacatcaccaatgaggatgctgtatatgacatcgctaatgacacccacaaggcatgctaacgaggacgctgtagacgacattgcttataaggacaccgtacaagacatcactaacgaggacgctgtatacgacatcgctaatgaggacgttgtatatgacatcgctaatgaggatgctttacaagacatagcgaatgaggttgctgtatatgacatcgctaatgaggacattgtatatgacatcgctaatgaggacgctctatacgacatcactaatgaggacgctgtatacaacatcgctaatgaggacgctgtatatggcatcgctaatgaggatgctgtatacgaattcgctaataaggacgctgtatatgacattgctaatgaggacactgtacaagacatctgtaaaaaagaagatgctgccaatgtaagacacttttctttgtcttgaacagaaatgt

SEQ ID NO: 21777 - DNA, 344 bp, Homo sapiens
  MAP TO AL034384.1; EXPRESSED IN ADULT LIVER, SIGNAL =   1; EXPRESSED IN HEART, SIGNAL = 0.86; NT HIT: AB016811.1, EVALUE 7.20e-01; EST_HUMAN HIT: BE870250.1, EVALUE 3.20e-01; SWISSPROT HIT: P08503, EVALUE 2.60e-01
ggttcctattcctgatcaggccagtttggagcaaactcagggggctcagagccagaagagcccttagaggccacctattgtgtttggctctgtctattccagctccctggctagactgtcagcccctgaatgcaaggacacaaactagtcttgttcactgcttaatgctcacctccataccacctcagcacagagaatggacagagtcagcacttggtacatctgtgccaatttcatgttgtggaatgaacttgaagacactaaatagatgcctcctgaccctcaaaattcactatcccccaccccgtttaaaaagagtagcaactggtttatctgtttcgttt

SEQ ID NO: 21778 - DNA, 570 bp, Homo sapiens
  MAP TO AC005691.1; EXPRESSED IN HEART, SIGNAL = 1.3; NT HIT: Y11204.1, EVALUE 3.00e-04
ggcattacattttgtttttgtgaacacaatcaccatcatcactattgtcttcctcatctcaactctcatcaccaccatcaccattgtcaccattattaccagcatcaccaccaccatcacaaacatcaccattatcaccaccatcaccaccaacattaccatcatcataactctcatcactatcatcaccaccatcacagctctcacccccatcatcacgagcatcatcattgtccccatcatcataactctcattaccaacatcgccattatcactgccatcatcactaacattatcattaccctctcataataactctcatcaccctcgttactgtcatcaccaacatctccactatcatcacagctcttgtcactaacatcaccatcatcagtaccatcaataaccttaacatcaacatcatcataactgtcaccaccatcatcgcaactctcatcaccagcatcatcattctcattaccaccaccactgtcatcattaccactctcattgctatcactaccatcattatcatcatcattatcagtcatcagttattgtccttgtcc

SEQ ID NO: 21779 - DNA, 87 bp, Homo sapiens
  MAP TO AC007336.2; EXPRESSED IN PLACENTA, SIGNAL = 0.89; EXPRESSED IN HBL100, SIGNAL =   1; EXPRESSED IN HELA, SIGNAL = 1.3; EXPRESSED IN HEART, SIGNAL = 1.3; EXPRESSED IN FETAL LIVER, SIGNAL = 1.1; EXPRESSED IN BT474, SIGNAL = 0.91; EXPRESSED IN ADULT LIVER, SIGNAL = 1.2; EXPRESSED IN LUNG, SIGNAL =   1; NT HIT: X58629.1, EVALUE 6.00e-01; EST_HUMAN HIT: BE793545.1, EVALUE 2.70e-01
gggggcaaaaccgtaggtgtctattaccagggtgactcaggaaaccctttcatttcagcagagcagacaatgaaactaagagaggag

SEQ ID NO: 21780 - DNA, 732 bp, Homo sapiens
  MAP TO AL033532.15; EXPRESSED IN HEART, SIGNAL = 1.2; EXPRESSED IN FETAL LIVER, SIGNAL = 0.95; EXPRESSED IN LUNG, SIGNAL = 0.94; EST_HUMAN HIT: BE744017.1, EVALUE 0.00e+00; SWISSPROT HIT: P18130, EVALUE 6.00e-15; NT HIT: gi11425524, EVALUE 0.00e+00
ctgtgatcctgttggaaatgctgaagagcctggaagtcctctgtcgttgcacaaatggttcccgataataccggtccccaaagcacatgcccagtagttctttgcgaactgtcttgttccagagtccatagatcagggggtggcagacagcgctggcaaaggacagccatgtggcccaagtctccaggctcggggagacggagcttttcccccagagggcctcagaggcgatgacaaccatgtaggggccccaggtgaccatgaaggcaccgaggaccaccaggatggtgatgagggctttgcactggttggccgagtagaccacaccctgaaaggcattcctcctgctgcctgaagaggaggtggaggtgctggagttcttcctcccggtcctctgagcatcctcctccacgatgacgactgtgccacagtgcaccttgcgtgccttgaccctggccacgcggaagatgaagccatagcacaccagcatgaccagaaaggggaagagggcacaccagatctgccagaaggccgtgtagccaggctcccggtgccaagcagccacacacatccatttgaactcgtcaaactccacggatgaccaaccaaacaggggtggcaggcagccgatgagcgagtgaagccagatgtagacaagtgccatcacagcccggttccctgtgatcttcatggggtacaccatggggtacaggacagcatagtagctagaaa

SEQ ID NO: 21781 - DNA, 900 bp, Homo sapiens
  MAP TO AE000658.1; EXPRESSED IN FETAL LIVER, SIGNAL = 1.1; EXPRESSED IN ADULT LIVER, SIGNAL = 0.98; EXPRESSED IN BONE MARROW, SIGNAL =   2; EXPRESSED IN HEART, SIGNAL =   1; SWISSPROT HIT: P23274, EVALUE 3.00e-54; EST_HUMAN HIT: BF369686.1, EVALUE 8.60e-01; NT HIT: U50949.1, EVALUE 1.00e-87
cacctcttggttccgcagagtgtagataagggggttgaggaaaggagtgatggccgtggggactagggcagctgccccatccagggggctgttggtttcaggcctcaggtagatgaaggcacagggcacatagtacacggtgaccacggttacatgggctccacaagttgaaaaagcccggcgccgcccatcagctgtgtggattctcaggatggcctgaatgatctgtatgtaggagaggaggatcagggagaagcaactggcaaccaccaccccaatgtctacaaacgtcaccagctcgttgactgttgtgtcagcacaggccagtctcaacactgcagggatgtcacagaagaagtaatccacctgattgggcccacagtagggcaggcggaaggttaggatggcctggagagccccatggatggatcctgccatccaggctccagccacaagcaaggcgctcagcttagcagtcatgagcacagggtagcgcaggggctgacatattgccaggtacctgtcataggccattagggtgtagaggaagcactgggtgctgcccaggaagtgatagaaatagagttgagcaacacagccaccaaatgggatgggtttgacacctaaagtgaagttcatcatgaggcgagggacaatgatggaggagatgctcatatcaatgactgagagaacaccaagaaagatgtacatggggcgggcatggagccttgggtctgcccagacagtgattaaaataagcaggtttcccagctgagtcaggatgtagattagaaaaaagaacacaaaaaagagtgtccttagcctgagtggatacggaattcctgtcaggataaacgcagtcaacagtgtgctgttgattctttccatatcccagagaat

SEQ ID NO: 21782 - DNA, 383 bp, Homo sapiens
  MAP TO AC009819.2; EXPRESSED IN HEART, SIGNAL = 1.8; EXPRESSED IN FETAL LIVER, SIGNAL = 0.94; EXPRESSED IN BRAIN, SIGNAL = 0.98; SWISSPROT HIT: P29228, EVALUE 7.30e-01; EST_HUMAN HIT: D61517.1, EVALUE 5.00e-18
cagcccatgggcccagcgctcagcagtgtccaacgggtctttttgctttcagatcactgggtcggggtctgctgctgacctctttaccaaaacagccagcccgctcaccacctcgcgaggacgttcccaggagtacgactcaggaaatgacacgtcctcgccaccctccacgcaaaccagctcagccaggtctcggggccaggagaaggggagccccagtgggggcttgagcaagagccgggagctcaacagtggcaacacctctgattcagggaactccttcaccacctcctcaccccagaacaagggggccatgttggagaatctctcccccaccagcaggggcagagagtcaaggtcagtgcaccacacagggtcggggg

SEQ ID NO: 21783 - DNA, 184 bp, Homo sapiens
  MAP TO AL034377.1; EXPRESSED IN BONE MARROW, SIGNAL = 1.2; EXPRESSED IN HBL100, SIGNAL = 1.1; EXPRESSED IN PLACENTA, SIGNAL = 0.94; EXPRESSED IN ADULT LIVER, SIGNAL = 1.1; EXPRESSED IN HEART, SIGNAL = 1.1; EXPRESSED IN BT474, SIGNAL = 0.99; EXPRESSED IN LUNG, SIGNAL = 0.93; SWISSPROT HIT: P47033, EVALUE 1.70e+00; NT HIT: gi9635250, EVALUE 4.30e-01; EST_HUMAN HIT: AA747059.1, EVALUE 1.70e+00
gatttgctttatatgactgggagcatcagaactgcttgttcactacagtgttacaatagcaccatccaatgccaacaatgctgtccgtagtccagttattctaaaagaagtgaggagaagttcacatgtaggacctacttgctttgttgaagaataggatcaagatccagtaactgctatagtg

SEQ ID NO: 21784 - DNA, 162 bp, Homo sapiens
  MAP TO AF069291.1; EXPRESSED IN HEART, SIGNAL = 1.3; NT HIT: U94982.1, EVALUE 4.00e-84; SWISSPROT HIT: Q16698, EVALUE 9.00e-12; EST_HUMAN HIT: BE564473.1, EVALUE 1.00e-41
gttcatgcaattcagtgtgatgtgagggatcctgatatggttcaaaacactgtgtcagaactgatcaaagttgcaggacatcctaatgtaagtgtagcaatgatgaagccaaagtgcaagacacttgatgttgataacacccaccaacatgtacaaaggaaa

SEQ ID NO: 21785 - DNA, 225 bp, Homo sapiens
  MAP TO AC007640.1; EXPRESSED IN BT474, SIGNAL = 0.9; EXPRESSED IN BRAIN, SIGNAL =   1; EXPRESSED IN PLACENTA, SIGNAL = 0.68; EXPRESSED IN HBL100, SIGNAL = 0.76; EXPRESSED IN LUNG, SIGNAL = 0.64; EXPRESSED IN BONE MARROW, SIGNAL = 0.64; EXPRESSED IN HEART, SIGNAL = 0.81; NT HIT: M29724.1, EVALUE 8.00e-31; EST_HUMAN HIT: AA984050.1, EVALUE 1.00e-41
ttgcagattctatagaagcagtgtttcaaaactgctcaatcaaaagaaagtttcaactctgtgagatgaaagcgcacatccaaagaagtttctcagaatgcttctgtgtcgttttaagtgaagatatttccttttcagctataggcctcaaagcacctcaaatatccatttgcagttactacacaaagagtgtttcaaaactgctgaatcaaaacattcagctcg

SEQ ID NO: 21786 - DNA, 189 bp, Homo sapiens
  MAP TO AC009576.2; EXPRESSED IN FETAL LIVER, SIGNAL = 1.1; EXPRESSED IN HBL100, SIGNAL = 0.93; EXPRESSED IN HEART, SIGNAL = 0.87; EXPRESSED IN LUNG, SIGNAL =  10; EST_HUMAN HIT: BE617547.1, EVALUE 2.60e+00; SWISSPROT HIT: Q58850, EVALUE 2.90e+00; NT HIT: U63374.1, EVALUE 9.50e-02
  unsure 182
atcctaccacatactccaaagaacaaggcccagaaacatcagggaatggtgctaatggtgaccatatcacaacttgtgttctttggcaactttcttatggtacatttccagttttatctgtccttctacagcatagcctccttggagtcagagtgagttcactaccctgtctgccacgtagntgatcag

SEQ ID NO: 21787 - DNA, 199 bp, Homo sapiens
  MAP TO AL078634.20; EXPRESSED IN PLACENTA, SIGNAL = 1.3; EXPRESSED IN ADULT LIVER, SIGNAL = 1.6; EXPRESSED IN BT474, SIGNAL =   1; EXPRESSED IN HBL100, SIGNAL = 1.2; EXPRESSED IN HELA, SIGNAL = 0.97; EXPRESSED IN HEART, SIGNAL = 1.1; EXPRESSED IN FETAL LIVER, SIGNAL = 1.2; EXPRESSED IN LUNG, SIGNAL = 1.4; EXPRESSED IN BONE MARROW, SIGNAL =   1; NT HIT: AF171223.1, EVALUE 1.80e+00; EST_HUMAN HIT: R66488.1, EVALUE 1.00e-102; SWISSPROT HIT: O58698, EVALUE 7.30e-01
tatccagaggtaggtttgtcatctcaactccataaacggttcttgcaagcactgctgtcaaggagtccataatgttggcccactcgtttataagttcctcccattccgtgagggaggacagcacaccaagaaagtcatcccagagctctcgagaaatgtacacacagaggtttgctcggatccaagctaccatgagcgt

SEQ ID NO: 21788 - DNA, 101 bp, Homo sapiens
  MAP TO AL035685.17; EXPRESSED IN BT474, SIGNAL = 1.1; EXPRESSED IN LUNG, SIGNAL =   9; EXPRESSED IN BONE MARROW, SIGNAL = 1.6; EXPRESSED IN PLACENTA, SIGNAL = 1.1; EXPRESSED IN HBL100, SIGNAL = 1.4; EXPRESSED IN HEART, SIGNAL = 1.2; EXPRESSED IN ADULT LIVER, SIGNAL = 1.3; SWISSPROT HIT: Q02374, EVALUE 3.10e+00
acgcagctcctggcctaattggcatgattccattacatctgctggttctttcccataacggaacccagcctggtggtccagacccgactgctgggccacag

SEQ ID NO: 21789 - DNA, 294 bp, Homo sapiens
  MAP TO AL022067.1; EXPRESSED IN HBL100, SIGNAL = 0.95; EXPRESSED IN HEART, SIGNAL = 1.3; EXPRESSED IN BT474, SIGNAL = 1.2; EXPRESSED IN BRAIN, SIGNAL =   1; SWISSPROT HIT: P57071, EVALUE 2.00e-09; NT HIT: gi4557362, EVALUE 0.00e+00; EST_HUMAN HIT: AW085715.1, EVALUE 0.00e+00
atctattccagaggggagcttcaccacttcattgacggctttaatgaagagaaaagcaactggatgcgctatgtgaatccagcacactctccccgggagcaaaacctggctgcgtgtcagaacgggatgaacatctacttctacaccattaagcccatccctgccaaccaggaacttcttgtgtggtattgtcgggactttgcagaaaggcttcactacccttatcccggagagctgacaatgatgaatctcagtaagtggattacagaacaaaaaaataaaaaatgccagtaa

SEQ ID NO: 21790 - DNA, 183 bp, Homo sapiens
  MAP TO AC008417.2; EXPRESSED IN HEART, SIGNAL = 2.5; NT HIT: gi11417146, EVALUE 6.00e-99; EST_HUMAN HIT: AU132708.1, EVALUE 8.00e-93; SWISSPROT HIT: Q16706, EVALUE 8.00e-30
ctggtaccataatccacaaccacccagtcttttgcagttcctgtgatagcatcatgatgttgaaacagtcccaaattccttctggcttctgtcagtgccgtgtaaagtgatgatgagagaaatttatttatcttgtatttgtgagcttgtctcagggcgaaatagtaaagaatttcagcagcc

SEQ ID NO: 21791 - DNA, 331 bp, Homo sapiens
  MAP TO AL008627.1; EXPRESSED IN HELA, SIGNAL = 1.5; EXPRESSED IN PLACENTA, SIGNAL = 1.1; EXPRESSED IN HEART, SIGNAL = 1.2; EXPRESSED IN BT474, SIGNAL = 1.2; EXPRESSED IN FETAL LIVER, SIGNAL = 1.1; EXPRESSED IN BONE MARROW, SIGNAL = 0.92; EXPRESSED IN BRAIN, SIGNAL = 1.1; SWISSPROT HIT: O17583, EVALUE 3.20e-01; NT HIT: AF072725.1, EVALUE 1.70e-01
aaaacacacacacacacacacgcacacacacacacacagaaaagatagttatcattattctcttctcttaggtctaaccagctgtgccagaaatgaggctggagatggaagaaggaatttagaagtagttatgatgctggtcccagtgacggtcagcctggctctggttttagttctcaacacagacctcaaggcccttagtgtcattgatctctgtcactcacgaattagttcccacacaattaaaaccattagtttcttacaggtacaccctcactttgtttgtctttttcttctccactgggttcccatccagttggcgacgggagaa

SEQ ID NO: 21792 - DNA, 145 bp, Homo sapiens
  MAP TO AC008430.2; EXPRESSED IN BRAIN, SIGNAL = 1.5; EXPRESSED IN HELA, SIGNAL =   1; EXPRESSED IN HEART, SIGNAL = 1.2; SWISSPROT HIT: P21956, EVALUE 3.00e-12; NT HIT: gi5031660, EVALUE 2.00e-76; EST_HUMAN HIT: W01171.1, EVALUE 1.00e-46
gtgtttcgtggaaacattgataacaacactccatatgctaactctttcacaccccccataaaagctcagtatgtaagactctatccccaagtttgtcgaagacattgcactttgcgaatggaacttcttggctgtgaactgtcgg

SEQ ID NO: 21793 - DNA, 186 bp, Homo sapiens
  MAP TO AC010740.3; EXPRESSED IN HEART, SIGNAL = 6.4; EST_HUMAN HIT: AA169522.1, EVALUE 6.50e-01; NT HIT: AF176832.1, EVALUE 2.00e-98; SWISSPROT HIT: P98157, EVALUE 9.00e-16
attcattctcctgctggttgtaacggaaatgaatttcagtgccaccctgatggtaattgcgttcctgatttgtggcgctgtgatggagaaaaagactgtgaagatggtagtgatgaaaaaggttgcaatggtaccatacgattgtgtgaccacaaaaccaagttttcctgttggagtacaggtaag

SEQ ID NO: 21794 - DNA, 246 bp, Homo sapiens
  MAP TO AC012668.1; EXPRESSED IN LUNG, SIGNAL = 2.2; EXPRESSED IN HEART, SIGNAL =   1; EXPRESSED IN PLACENTA, SIGNAL = 4.6; EXPRESSED IN FETAL LIVER, SIGNAL =   1; NT HIT: X02761.1, EVALUE 0.00e+00; EST_HUMAN HIT: BF369753.1, EVALUE 0.00e+00; SWISSPROT HIT: P02751, EVALUE 2.00e-42
cattcactgatgtggatgtcgattccatcaaaattgcttgggaaagcccacaggggcaagtttccaggtacagggtgacctactcgagccctgaggatggaatccatgagctattccctgcacctgatggtgaagaagacactgcagagctgcaaggcctcagaccgggttctgagtacacagtcagtgtggttgccttgcacgatgatatggagagccagcccctgattggaacccagtccacag

SEQ ID NO: 21795 - DNA, 411 bp, Homo sapiens
  MAP TO AC012145.1; EXPRESSED IN FETAL LIVER, SIGNAL = 0.93; EXPRESSED IN HEART, SIGNAL = 1.1; NT HIT: U91328.1, EVALUE 0.00e+00; SWISSPROT HIT: P43276, EVALUE 3.00e-26; EST_HUMAN HIT: AI283902.1, EVALUE 1.00e-118
gtttttgtagccacctttgaggcgccgggcttggtttccacggaggacgccttcttgttgagcttgaaggaacccgaggctccggtaccctttatctgcaccaacgttcccttgcttaccaggctcttaatgcccagcttaatgcggctgttgttcttctccacgtcgtagcctgcggccgccagcgcctttttaagagctgccaacgacacaccaccacgctccttagaggaggaagcagcctgcacgatcagctctgacacggaagggccagcgggttttttcttggaggctgctgcagccttagcaggtttctttgccttcttgccagctaaaggtttctcaggagcagcagaagcggcgggggcgggaggcactgtttcagacatggtgactaacacagcacaccaa

SEQ ID NO: 21796 - DNA, 84 bp, Homo sapiens
  MAP TO AL031132.1; EXPRESSED IN HEART, SIGNAL = 0.94; NT HIT: AF003105.1, EVALUE 1.50e-01; EST_HUMAN HIT: AW298815.1, EVALUE 4.00e+00; SWISSPROT HIT: O22478, EVALUE 5.40e+00
acaaccttcctgtggtcatcttgagcgacctggtgttggggaaaatgggctgctttcagactgcacaaaatctggaaatggttt

SEQ ID NO: 21797 - DNA, 137 bp, Homo sapiens
  MAP TO AL031407.3; EXPRESSED IN HEART, SIGNAL = 0.99; EST_HUMAN HIT: AA576308.1, EVALUE 3.10e-01; SWISSPROT HIT: P98181, EVALUE 5.10e+00; NT HIT: AE005134.1, EVALUE 3.10e-01
gaattggagatgtagatttgtgagtatttgctgtatatgtggtttatgttatgggaaaacacgagatcaccagggaagagcaccgtgatggtgataggacaagaggtcctaggataaaactggtgaagatcagtgtg

SEQ ID NO: 21798 - DNA, 77 bp, Homo sapiens
  MAP TO AC010904.1; EXPRESSED IN HEART, SIGNAL = 1.2; EXPRESSED IN LUNG, SIGNAL = 2.6; EST_HUMAN HIT: Z41245.1, EVALUE 9.00e-01; NT HIT: gi9838361, EVALUE 1.50e-01
ttggtgtgttggtgcatgtcagactgccattcaacaaaaggcaagactctgcctccactctgggtattctggaaaat

SEQ ID NO: 21799 - DNA, 108 bp, Homo sapiens
  MAP TO AL049692.11; EXPRESSED IN HEART, SIGNAL = 0.84; EXPRESSED IN PLACENTA, SIGNAL = 0.93; EXPRESSED IN LUNG, SIGNAL = 8.6; NT HIT: Z47210.1, EVALUE 7.90e-01; EST_HUMAN HIT: AW857648.1, EVALUE 3.70e+00
ggcaaacgtcagcgagtcggaaagagccaggtcttacaacaaaagtacagccacattgattgtttcaactgcacagggaagaacagagattctcagacgaccctgtaa

SEQ ID NO: 21800 - DNA, 104 bp, Homo sapiens
  MAP TO AC007253.2; EXPRESSED IN BT474, SIGNAL = 0.61; EXPRESSED IN BONE MARROW, SIGNAL = 0.63; EXPRESSED IN HEART, SIGNAL = 1.3; EXPRESSED IN PLACENTA, SIGNAL = 0.98; EXPRESSED IN FETAL LIVER, SIGNAL = 0.67; EXPRESSED IN LUNG, SIGNAL = 0.71; EXPRESSED IN HELA, SIGNAL = 0.63; EXPRESSED IN ADULT LIVER, SIGNAL = 0.86; NT HIT: U91914.1, EVALUE 4.80e-02; SWISSPROT HIT: P26640, EVALUE 4.10e+00; EST_HUMAN HIT: BE838130.1, EVALUE 8.30e-02
acttgcatgtgggagatgaaaatatacttgataattggctttcaaatatgattttcttcctttcatctctcctatgggcatagctccagaaagagtcttcatat

SEQ ID NO: 21801 - DNA, 224 bp, Homo sapiens
  MAP TO AC004032.7; EXPRESSED IN FETAL LIVER, SIGNAL =   9; EXPRESSED IN PLACENTA, SIGNAL = 4.9; EXPRESSED IN BRAIN, SIGNAL = 9.4; EXPRESSED IN HELA, SIGNAL = 4.2; EXPRESSED IN ADULT LIVER, SIGNAL = 0.71; EXPRESSED IN HEART, SIGNAL = 0.82; EXPRESSED IN BONE MARROW, SIGNAL =  12; EXPRESSED IN LUNG, SIGNAL = 0.59; EST_HUMAN HIT: F00355.1, EVALUE 2.00e-03; NT HIT: AF000604.1, EVALUE 2.00e-03; SWISSPROT HIT: P25894, EVALUE 2.20e+00
aagcgcccttcatccccatttgacagacgagaagactgaggctctaaggggcaggagctacccaggggtcacccacggccatgtcaccagctctggtggtgtggctctctcctctcagcccaggattcccagctgctcaggccagggtggaatcccaaatgccctgtatctgggcagctcctgtctgcagagccacagtttcctcatctgcaacttgggggtgg

SEQ ID NO: 21802 - DNA, 254 bp, Homo sapiens
  MAP TO AL049759.10; EXPRESSED IN LUNG, SIGNAL = 0.66; EXPRESSED IN BRAIN, SIGNAL = 0.84; EXPRESSED IN HEART, SIGNAL = 0.97; NT HIT: AB007857.2, EVALUE 9.00e-06; EST_HUMAN HIT: AW070995.1, EVALUE 2.00e-07; SWISSPROT HIT: P09379, EVALUE 1.00e-06
ggggggcttcccaaggcagggcaacactgtgagccccgtcaccaattctctccccatgtgtgttggtgtcttggcagaactcgtctatgatgacgtcttcttggtctgggagaccatctgggcagccaaacacgtctcctctgcgcactacgtcctgttcattgcgctggctctggtggaagtctaccgtgacatcattttggagaacaacatggatttcacagacatcatcaaattctttaatggtacccaca

SEQ ID NO: 21803 - DNA, 161 bp, Homo sapiens
  MAP TO AC010906.2; EXPRESSED IN HEART, SIGNAL = 0.99; EXPRESSED IN BONE MARROW, SIGNAL = 0.94; NT HIT: AL163278.2, EVALUE 2.00e-02; SWISSPROT HIT: O01975, EVALUE 7.60e-01; EST_HUMAN HIT: BF507377.1, EVALUE 3.50e-02
ctctgctcccataccttctgcggtatgtgcagcctgcctgcaagggcagcagcaggatggaatcggaagccccgggaagcctccaggaggaatctccaagcactctgcaggtgctgctggagtatgcgcaggggttggaggcagggacacacaggggtcag

SEQ ID NO: 21804 - DNA, 324 bp, Homo sapiens
  MAP TO AC010680.3; EXPRESSED IN HEART, SIGNAL =   3; EXPRESSED IN BONE MARROW, SIGNAL = 1.3; EST_HUMAN HIT: BE783731.1, EVALUE 8.00e-79; NT HIT: gi4507720, EVALUE 0.00e+00; SWISSPROT HIT: Q00872, EVALUE 3.00e-13
caaatgcgttcttggctacaacggaatcagattccagtggctcgccaattccatatttgttcacggctcggacccggaagatgtattcatttcctttgataattttggtggttgtaatgatgcactcttccaaatgttcagacaccatagaccacacaacgcggcttgtctcacgcttttccacaatgtagtgagtgatttttgcaccaccatcatcagctggaggccgccagagaagggtgatcttctcagcagttacagtcttaaattcaattggtccaccaggtgggcctggtttgtctatcagtgaaaggacaaaacacg

SEQ ID NO: 21805 - DNA, 110 bp, Homo sapiens
  MAP TO AL034408.2; EXPRESSED IN BONE MARROW, SIGNAL = 1.3; EXPRESSED IN HBL100, SIGNAL = 1.1; EXPRESSED IN HELA, SIGNAL = 0.97; EXPRESSED IN HEART, SIGNAL = 1.2; EXPRESSED IN BT474, SIGNAL = 1.1; EXPRESSED IN FETAL LIVER, SIGNAL =   1; EST_HUMAN HIT: AI923031.1, EVALUE 2.00e-45; SWISSPROT HIT: Q9Y216, EVALUE 5.00e-12; NT HIT: gi10863890, EVALUE 1.00e-55
ctttgtaatgaaaattccagcatccataatagctttaatgtgtcttaaccaccctgagctctccaggccgctaagaaattcactcattgttggagttttcaattcacaaa

SEQ ID NO: 21806 - DNA, 319 bp, Homo sapiens
  MAP TO AF042089.1; EXPRESSED IN HEART, SIGNAL = 1.1; EXPRESSED IN BT474, SIGNAL = 1.2; EXPRESSED IN FETAL LIVER, SIGNAL = 1.4; EXPRESSED IN LUNG, SIGNAL = 1.4; EXPRESSED IN BRAIN, SIGNAL = 1.6; EXPRESSED IN HBL100, SIGNAL = 0.91; EXPRESSED IN PLACENTA, SIGNAL = 1.1; EXPRESSED IN HELA, SIGNAL = 1.3; NT HIT: M10976.1, EVALUE 1.00e-48; SWISSPROT HIT: P26808, EVALUE 2.00e-16; EST_HUMAN HIT: AW853949.1, EVALUE 1.00e-37
caagtaccaaactgctctgcgaaaatccccgtataaccattgaagtttgcaacaccctacaccccgccaccttgctcccggtatcagagagccctgtcgaacctgattgtgtagaagtgttggactcaattgactctagcagacctgacctccgggaccaggcttgggcatcagtagactgggaactatacgtggatgggagcagcttcttcaacccccaaggagagagaggtgcagggtatgcagtgggaaccctggacactgttgttgaaaccagatcgttgccccaggccacttcagcccagaaagctgaactcat

SEQ ID NO: 21807 - DNA, 128 bp, Homo sapiens
  MAP TO AC009786.1; EXPRESSED IN HEART, SIGNAL = 0.92; EXPRESSED IN BONE MARROW, SIGNAL = 0.9; EST_HUMAN HIT: AW361175.1, EVALUE 1.10e+00; NT HIT: gi7662375, EVALUE 9.60e-01
aatggcagacaattctggactttctgacagacaatccccgactttctgagcttcatgaagctcaacgaatagctaatgtcacctcttttgatatgtattaccccctaccaatatcagccactgtgtga

SEQ ID NO: 21808 - DNA, 108 bp, Homo sapiens
  MAP TO AC004948.2; EXPRESSED IN HEART, SIGNAL =   1; EXPRESSED IN FETAL LIVER, SIGNAL = 5.8; NT HIT: AJ400878.1, EVALUE 3.70e+00
tacctttaatgctgtccctccccaacactttattataaccttcactgagatcttggttaatgtatagtcagatttgttgtactcaggaaccagcagaatccccatatt

SEQ ID NO: 21809 - DNA, 136 bp, Homo sapiens
  MAP TO AP000123.1; EXPRESSED IN HELA, SIGNAL = 1.4; EXPRESSED IN ADULT LIVER, SIGNAL = 0.65; EXPRESSED IN HEART, SIGNAL = 0.99; EXPRESSED IN PLACENTA, SIGNAL = 1.8; EXPRESSED IN BONE MARROW, SIGNAL =   3; EXPRESSED IN FETAL LIVER, SIGNAL = 1.9; EXPRESSED IN LUNG, SIGNAL = 0.64; EXPRESSED IN BRAIN, SIGNAL = 1.9; NT HIT: AL445065.1, EVALUE 1.20e+00; EST_HUMAN HIT: AA456538.1, EVALUE 2.00e-02
ttgccagatgatccatggagggcaaaatcaccccttgttgaaagccacttctcaaacccatgaccacagatctgtttcatcaggtcaacatccttcaccataaatttcagggatctggaggagtggagggtggaga

SEQ ID NO: 21810 - DNA, 116 bp, Homo sapiens
  MAP TO AF189005.1; EXPRESSED IN HBL100, SIGNAL = 0.93; EXPRESSED IN HEART, SIGNAL = 1.2; EXPRESSED IN BONE MARROW, SIGNAL = 1.1; EXPRESSED IN LUNG, SIGNAL = 3.3; NT HIT: gi11466344, EVALUE 1.00e+00; SWISSPROT HIT: P39706, EVALUE 4.10e+00; EST_HUMAN HIT: AI984928.1, EVALUE 1.00e-15
attactctattgccaatgcccagaacagtgcccagaacacataccatgaatcagggcatgaaaagctgcattaaatacagaataactgtgtatactccacagggctcaaattgctt

SEQ ID NO: 21811 - DNA, 228 bp, Homo sapiens
  MAP TO AL080248.7; EXPRESSED IN BT474, SIGNAL = 1.1; EXPRESSED IN FETAL LIVER, SIGNAL =   1; EXPRESSED IN HEART, SIGNAL = 0.97; EXPRESSED IN BONE MARROW, SIGNAL = 0.93; EXPRESSED IN LUNG, SIGNAL = 8.3; NT HIT: AF297185.1, EVALUE 5.40e-01; SWISSPROT HIT: Q01617, EVALUE 2.30e+00
ggacttcaaccactctactcagaagagtaattcgcttttctgcctgttggttcagtgacacaagaagtccaaggtggtggtggggagaggagactgttaattcattagaacccatgaccatatgcctggaggaagcattgtcttcgtggccactgggacttccaaacatctgagtccaaagttgataagagacaggaagcaaaagttatttatgtgcattttatatat

SEQ ID NO: 21812 - DNA, 212 bp, Homo sapiens
  MAP TO AL049652.16; EXPRESSED IN HBL100, SIGNAL =   1; EXPRESSED IN HELA, SIGNAL = 0.97; EXPRESSED IN PLACENTA, SIGNAL = 1.2; EXPRESSED IN HEART, SIGNAL =   1; SWISSPROT HIT: P53914, EVALUE 8.00e-12; EST_HUMAN HIT: BE252982.1, EVALUE 2.00e-93
ccctgagccgggaggagctggaagcactcttcctcccctatgacctgaagcggctggagatgtattcacggaatatggtggactatcacctcatcatggacatgatcccggccatctctcgcatctatttcctgaaccagctgggggacctggccctgtctgcggctcagtcggtatgctatctgttgcttgcgtggaggagaagcgaggat

SEQ ID NO: 21813 - DNA, 334 bp, Homo sapiens
  MAP TO AL121580.6; EXPRESSED IN BT474, SIGNAL =   1; EXPRESSED IN PLACENTA, SIGNAL = 0.9; EXPRESSED IN HBL100, SIGNAL = 0.92; EXPRESSED IN HEART, SIGNAL = 1.1; EXPRESSED IN ADULT LIVER, SIGNAL = 1.1; NT HIT: gi11424571, EVALUE 3.00e-03; SWISSPROT HIT: P08638, EVALUE 4.90e+00; EST_HUMAN HIT: N44071.1, EVALUE 5.00e-03
gagccaggccctcctcgcctgtcacctgaactgttcatcctgttatggcccctctgcctgactgccttcattctctctccctccaacccgtctttttccctgcagccaatgtggtttttcttaactgtgcatccagcccaccacacctcaactttaaatactccaggagcttcttttctaaagaatggttcaaactccatttgcttactgtgcaaaacacttagagcccaggctgcattcccgcagctgcctacaaacctcatcccttcacggatctgctgtgtgactctgggcaagccaccaagccatgcccactctgctggtacttgtcgcc

SEQ ID NO: 21814 - DNA, 103 bp, Homo sapiens
  MAP TO AL021407.1; EXPRESSED IN LUNG, SIGNAL = 1.3; EXPRESSED IN BRAIN, SIGNAL =   6; EXPRESSED IN HBL100, SIGNAL = 1.7; EXPRESSED IN PLACENTA, SIGNAL = 0.9; EXPRESSED IN HELA, SIGNAL = 2.3; EXPRESSED IN HEART, SIGNAL =  11; EXPRESSED IN BT474, SIGNAL = 1.2; EXPRESSED IN FETAL LIVER, SIGNAL = 1.4; SWISSPROT HIT: P40925, EVALUE 1.00e-06; NT HIT: gi11429139, EVALUE 2.00e-20; EST_HUMAN HIT: AI133080.1, EVALUE 3.00e-20
gaaggcaacttctttgtttgtttggatgacatctgtcaggaggggaagggcacagtcttgctgttccattaggacactgttcaggacaacaagcatgggggtg

SEQ ID NO: 21815 - DNA, 106 bp, Homo sapiens
  MAP TO AF064862.1; EXPRESSED IN HEART, SIGNAL = 1.1; EXPRESSED IN BONE MARROW, SIGNAL = 0.96; EST_HUMAN HIT: BE395040.1, EVALUE 2.30e-01; SWISSPROT HIT: P16621, EVALUE 1.00e-03; NT HIT: AF023449.1, EVALUE 3.00e-53
gacgggctggaaaagtacaccaactacagcatccaggtgctggccttcacccgcgcaggagacggggtcaggagtgagcagatcttcacccggaccaaagaggatg

SEQ ID NO: 21816 - DNA, 295 bp, Homo sapiens
  MAP TO AL109654.16; EXPRESSED IN PLACENTA, SIGNAL = 0.91; EXPRESSED IN HEART, SIGNAL =   1; EXPRESSED IN ADULT LIVER, SIGNAL = 1.1; SWISSPROT HIT: P08548, EVALUE 4.00e-16; NT HIT: AL163301.2, EVALUE 8.00e-07; EST_HUMAN HIT: BF542064.1, EVALUE 1.00e-06
ccttaatctgatgaatgtcatctatgaaaaccctaaagctcatatcatacttaatggtgaaagactgaatgccttcatcctgtggtcaggaagaaggcaaggatgtctgctctcatcaattctattcaacattgtactgaagtatctagccagttcaataaggcaagaaaaagacatacagattggaaaagaagtaaaaccatatttcttagtaaataacataatcatttctgtagaaaatgcaatgaattctacaaaagttttagagctaatacgtgaatgtatcaaagttata

SEQ ID NO: 21817 - DNA, 162 bp, Homo sapiens
  MAP TO AC007642.4; EXPRESSED IN HBL100, SIGNAL = 0.97; EXPRESSED IN HEART, SIGNAL = 0.8; EXPRESSED IN ADULT LIVER, SIGNAL = 0.74; SWISSPROT HIT: Q14738, EVALUE 2.30e+00; NT HIT: X13660.1, EVALUE 3.70e-01
agcttgtggaaatggcattaacatacagaaaatctcctaagccagaaatctgggacaatttcttcttcattatcaccacatcatataccatgaggctctcaggccatagagccttgggtttttcctgtggatgataggatgcccctgtagggttttcaagca

SEQ ID NO: 21818 - DNA, 156 bp, Homo sapiens
  MAP TO AC008283.3; EXPRESSED IN LUNG, SIGNAL = 1.1; EXPRESSED IN HEART, SIGNAL = 0.86; SWISSPROT HIT: P13806, EVALUE 2.00e-24; NT HIT: gi11421527, EVALUE 6.00e-83; EST_HUMAN HIT: AL134437.1, EVALUE 6.00e-83
aagcagctgttcaaaagcaaaactaaagcccttcttataatctgtaattcctttggctgtgatattattcaccgcgtctttcaacacttttttatttcttacatttgcttggacaaggtgctgaaaacagcttacatcctgagcattgctgttaaa

SEQ ID NO: 21819 - DNA, 205 bp, Homo sapiens
  MAP TO AF001548.1; EXPRESSED IN BT474, SIGNAL = 1.4; EXPRESSED IN LUNG, SIGNAL = 2.7; EXPRESSED IN PLACENTA, SIGNAL = 1.1; EXPRESSED IN HBL100, SIGNAL = 1.1; EXPRESSED IN HEART, SIGNAL = 2.2; EST_HUMAN HIT: BE836549.1, EVALUE 1.00e-105; NT HIT: AB020673.1, EVALUE 1.00e-105; SWISSPROT HIT: P35749, EVALUE 1.00e-31
tggaccgcatcgtgggcctggaccagatggccaagatgacggagagctcgctgcccagcgcctccaagaccaagaagggcatgttccgcacagtggggcagctgtacaaggagcagctgggcaagctgatgaccacgctacgcaacaccacgcccaacttcgtgcgctgcatcatccccaaccacgagaagagggtgaggcccgc

SEQ ID NO: 21820 - DNA, 648 bp, Homo sapiens
  MAP TO AL080312.8; EXPRESSED IN FETAL LIVER, SIGNAL = 0.93; EXPRESSED IN HEART, SIGNAL = 1.3; SWISSPROT HIT: P13993, EVALUE 2.00e-15
ctgcacgccctggtggtgcttcctgcaaacgcctgtaaatgggatttttggcctgagagcccacaagctcacgtggcagctaggagtgccagagagtgaatgcctggccctcaggtgcacatccctcatccctcaggtggacgcccctcagagggacaaccttcaggtgggactcccctcaggtggattcccctcagatggattctcctcaggtggatgcccctcaggtggattcccctcaggtggatgcccctcaggtggattcccctcaggtggattcccctcaggtggatgcccctcaggtggattcccctcaggtggatgcccctcaggtggattcccctcaggtgaatgctcctcaggtgtgtgtccctcaggtggatgcccctcaggtggactcccctcaggtggactcccctcaggtggattcccctcaggtggattcccctcaggtggactcccatcaggtggacacccctcaggtggattcccctcaggtctgtgcccctcaggtggattcccctcaggtggagtcccctcaggtggagtcccctcaggtggacactcatcaggtggattcccatcaggtgtctgtccctcaggtggacgcccctcaggtggacactcatcaggtggacacccctcagg

SEQ ID NO: 21821 - DNA, 822 bp, Homo sapiens
  MAP TO AL031983.1; EXPRESSED IN HEART, SIGNAL = 1.3; EXPRESSED IN FETAL LIVER, SIGNAL = 1.1; NT HIT: AF211942.1, EVALUE 0.00e+00; EST_HUMAN HIT: AI023490.1, EVALUE 1.00e-115; SWISSPROT HIT: Q15062, EVALUE 1.00e-130
gtagacagcaatgactgagctgtagaagagggtgaccacagtgagatgggaggagcaggtcccaaaagctttcctccgcccttttgcagagttaatcctcagcactgcccaggtaatggctccgtaagagacaaggatgaggctgagaggcacaaccaagatgaagacactggcaacagccacctggatctcattgtaggaggtgtcttcacaggagagtcgaattagagctgggacctcacagacaaaatcatccacctgccgatcggggcagaagggcaggtgcagggtggatggtgtctggaccactgactccactagcccaatgacccaggccacagatgccagctgccagcacaggcgggggtggatgatggtggcatagtggaggggctggcagacagccacgtagcgatcaaaagccatcactgtcaagaggatgcactcagttgtccccagggacaggaagatgaagatctggacagagcagtccaggaagctgatggtcttctttgggccccagaggttgaccagcatttggggaacacaactcgtggtgaaacagaggtccaagaaggagaggttggagaggaaaaagtacattggagagtggagcttggggtccagcgcagacagcaggatgatgagtgtgttgcccactagggttaggaggtaggaagtgaagacaaccacgaagagagtcctttccagccctgggtgttcagagaagcccagaaggaggaagcccggtgtggagctttggttaaccatggcctgttcttgtttgtacctggagggatgaggctgtcaccccagtgtgat

SEQ ID NO: 21822 - DNA, 142 bp, Homo sapiens
  MAP TO AL121588.6; EXPRESSED IN HELA, SIGNAL = 0.91; EXPRESSED IN HEART, SIGNAL =   1; NT HIT: AF079906.1, EVALUE 6.90e-02; EST_HUMAN HIT: AA974620.1, EVALUE 3.30e-01; SWISSPROT HIT: P96329, EVALUE 9.10e+00
ccttcagcctctgtctcagcttctgagggtcacctcccctgaagtcatgtcctttatagagaagccaataacagagcaaagcaaaattgtaaaagcccagccttaggagcttaccctaggatgactctgatgattgatattc

SEQ ID NO: 21823 - DNA, 108 bp, Homo sapiens
  MAP TO AL109853.3; EXPRESSED IN BONE MARROW, SIGNAL = 0.91; EXPRESSED IN HEART, SIGNAL = 0.98; EST_HUMAN HIT: AI302019.1, EVALUE 2.40e-01; NT HIT: U91328.1, EVALUE 2.30e-01
cctgattcagggtctggttatcagtgtgttcacactgcccctgcccttcacattcatcctcatctcctaattttgcatttttgttgtgctgtggaggctaggcgtgaa

SEQ ID NO: 21824 - DNA, 151 bp, Homo sapiens
  MAP TO AL022171.1; EXPRESSED IN HEART, SIGNAL =   1; EXPRESSED IN BONE MARROW, SIGNAL = 0.91; NT HIT: gi6912385, EVALUE 1.20e+00; SWISSPROT HIT: P53258, EVALUE 1.70e+00; EST_HUMAN HIT: BE841305.1, EVALUE 5.00e-75
gcacagtaaccttggtgcacgaccgaaagggctgtctactctggtgaagagtggtgtccctgaagcattgagggcagaggtatggcagttattggcaggctgccatgacaaccaggcaatgctggatagataccgaattcttatcacaaag

SEQ ID NO: 21825 - DNA, 79 bp, Homo sapiens
  MAP TO AC009946.1; EXPRESSED IN BONE MARROW, SIGNAL =   1; EXPRESSED IN HEART, SIGNAL = 0.93; EST_HUMAN HIT: AV685870.1, EVALUE 1.00e-03; NT HIT: Z73419.1, EVALUE 1.30e-01
ttatgtaagcttgtgatggcctttagtccaaggttgtggttttcgtagtctttttctgttatcgggcatacatgataac

SEQ ID NO: 21826 - DNA, 151 bp, Homo sapiens
  MAP TO AL030999.2; EXPRESSED IN HEART, SIGNAL = 1.2; NT HIT: AL163249.2, EVALUE 9.00e-08; EST_HUMAN HIT: AW805284.1, EVALUE 6.00e-10
tgcagataaagcctccaggtagcaggcttcagagagaatagactatcaatgtgtttttgttgttgttgttgttgttgttgttgttgttgtttaaatcaggcttaaagtctgtgttgatgttaaatgctggttgacttttcctgaattccaa

SEQ ID NO: 21827 - DNA, 298 bp, Homo sapiens
  MAP TO AL050342.36; EXPRESSED IN HELA, SIGNAL =   1; EXPRESSED IN PLACENTA, SIGNAL = 0.9; EXPRESSED IN HEART, SIGNAL = 0.98; EXPRESSED IN BT474, SIGNAL =   1; EXPRESSED IN FETAL LIVER, SIGNAL = 1.1; EXPRESSED IN LUNG, SIGNAL = 0.97; NT HIT: gi8924019, EVALUE 3.90e-02; EST_HUMAN HIT: AF074689.1, EVALUE 4.70e-02; SWISSPROT HIT: P39941, EVALUE 3.00e+00
ctgagagccgatgacctgcctgaggtcacacagtcctgggaggtagagcagagtgtggtgagccccacccgtccagcaccaaaagtccccttgcagtgtgaagatagaactgagaaagatgtggctcaaacatggcccagtgtgagtcaagagttgtcccctcgttctcacccttcaaggtcagcaggaggaaatggccaaggagctaaggcagctgggccgccaacgatcaggccaatttaagagacgtctatggcaggggtggagcctgagaggggtcccaggctccctgaagcgg

SEQ ID NO: 21828 - DNA, 385 bp, Homo sapiens
  MAP TO AL031542.1; EXPRESSED IN HEART, SIGNAL =   1; EST_HUMAN HIT: AA256425.1, EVALUE 5.60e+00
agttgatttgtctaattaaaacatgaatatgggcatttaaattttattgattccatgttgtttttatttatttctgctcttgaattcttctctttccatttactttctctgcatttattatacttttccctattttcttgagatgggcagttagctcactagttttcagcccttccgtctcttctacaaaaattaacaggaaccaattagttttaatttttatttttattatcactcggttctatgaattttaaccatccattttgaattcatctttgatccacaaattatttactttagtcaagtttttactattgattctagcttgttacaaatttaagagtatttccctaataataccaaatatgtgaaatgtattgacatt

SEQ ID NO: 21829 - DNA, 112 bp, Homo sapiens
  MAP TO AC011456.2; EXPRESSED IN HEART, SIGNAL = 0.96; EST_HUMAN HIT: AA971001.1, EVALUE 8.00e-57; SWISSPROT HIT: Q63014, EVALUE 5.30e+00
tttcccatcaacagccctgcagtaaaaattcagggcttcagagacaaatatttcatgagtacagactgtgatgaggaaaagcaagccattccctctctatcaggatccagag

SEQ ID NO: 21830 - DNA, 114 bp, Homo sapiens
  MAP TO AC011561.2; EXPRESSED IN HEART, SIGNAL =   1; SWISSPROT HIT: Q05815, EVALUE 5.30e+00; NT HIT: M96761.1, EVALUE 5.40e-02
cagtagccagcgcctgcctgtgtttctctgcctgagggctctctccggctgccaaagcccgtgtccacgcacagcagtaccagagaattaccaggtcccaggagcagcactcgg

SEQ ID NO: 21831 - DNA, 132 bp, Homo sapiens
  MAP TO AC012127.1; EXPRESSED IN HEART, SIGNAL = 0.95; NT HIT: D87675.1, EVALUE 5.00e-21; EST_HUMAN HIT: T89598.1, EVALUE 6.00e-18
tctcacctcagtgttaatagttgctaattgatcagggtggtggttgctgaagtttggggtagccatggcaatttcttcaaataagacgataatgaagtttgctgcattcattgactcttcctttcacaaaag

SEQ ID NO: 21832 - DNA, 171 bp, Homo sapiens
  MAP TO AC011700.3; EXPRESSED IN HEART, SIGNAL = 1.4; EXPRESSED IN FETAL LIVER, SIGNAL = 1.1; EXPRESSED IN ADULT LIVER, SIGNAL =   1; EXPRESSED IN HELA, SIGNAL = 0.95; EXPRESSED IN PLACENTA, SIGNAL = 0.98; NT HIT: gi11426673, EVALUE 8.00e-92; SWISSPROT HIT: P48437, EVALUE 6.00e-29; EST_HUMAN HIT: BE062951.1, EVALUE 2.00e-03
ctcaaagtcatttgctttattgtagtgcatgttcagagccctgtacagctcacagtctctggttatagacagctcttcagtactggtgaccccatcgttgatggcttgacgtgcgtacttctccatctgaatgtagtaaaactcacggaaattgctaaaccacttgatgag

SEQ ID NO: 21833 - DNA, 285 bp, Homo sapiens
  MAP TO AC005481.2; EXPRESSED IN HEART, SIGNAL = 0.95; EST_HUMAN HIT: AA077394.1, EVALUE 1.00e-119; SWISSPROT HIT: P14590, EVALUE 1.00e-04
acccagtatgcatgggtagatggtgagggctctgctaagatccagtatgcatgggtagatggtgagggctctgccaagacccagtatgcatgagtagatggtgagggctctgccaagacccagtatgcatgagtagatggtgagggctctgccaagatccagtatgcatgggtagacagtgagggctctgcgaagacccagtatgcatgggtagatggtgagggctctgccaagatccagtatgcatgggtagacggtgagggctctgccaagacccagtatgca

SEQ ID NO: 21834 - DNA, 142 bp, Homo sapiens
  MAP TO AP000009.2; EXPRESSED IN BONE MARROW, SIGNAL = 1.4; EXPRESSED IN HEART, SIGNAL = 1.2; EXPRESSED IN FETAL LIVER, SIGNAL = 1.7; NT HIT: D83077.1, EVALUE 1.00e-74; SWISSPROT HIT: P53804, EVALUE 1.00e-21; EST_HUMAN HIT: AU143698.1, EVALUE 2.00e-74
gctctttctatgctgggggaatatgactgggccctgcaagcaaacataaaagctcaaaaactctgtaaaaatgaccctgagggaatcaaggatctaattcagcagcatgtaaagttacaaaaacaaatagaagacctacaag

SEQ ID NO: 21835 - DNA, 102 bp, Homo sapiens
  MAP TO AC012109.1; EXPRESSED IN HEART, SIGNAL = 0.99; NT HIT: Z70296.1, EVALUE 1.90e-01; EST_HUMAN HIT: BE252112.1, EVALUE 3.20e-01
cttaggactcttcctcaggcagcttggtcggagtgagatattgccagcattcattctccccttcactctgattccactctgattgagagtgcattgtttaat

SEQ ID NO: 21836 - DNA, 108 bp, Homo sapiens
  MAP TO AC012443.1; EXPRESSED IN HEART, SIGNAL =   1; NT HIT: AF151059.1, EVALUE 7.00e-14; EST_HUMAN HIT: BF692131.1, EVALUE 1.00e-13
aggcgatttgtgttttgattctgatctttgtctagttctgtctttttcactttcccgatctttttcttttttatccttctctcgctcagcatcggattctggagagtc

SEQ ID NO: 21837 - DNA, 181 bp, Homo sapiens
  MAP TO AL109838.8; EXPRESSED IN HEART, SIGNAL = 1.8; NT HIT: AL163281.2, EVALUE 6.00e-03; SWISSPROT HIT: P70096, EVALUE 2.90e+00; EST_HUMAN HIT: AI971316.1, EVALUE 6.30e-01
aatgggcattattaacacttccctgatgatgcactttgcatttcctaagaccatgaaagagaaaaagaaccagaggcaaaaatgtggtattagtaataatgaattggagagcatggaggcaggggaagatggaaatattccgggttgggagaagtttcctgagagggtttcaaggaagtga

SEQ ID NO: 21838 - DNA, 81 bp, Homo sapiens
  MAP TO AP000075.1; EXPRESSED IN HEART, SIGNAL =   1; NT HIT: AL163284.2, EVALUE 1.40e-01
gtcatcagagagacgttgggtcagaattttgtttttcatgctattcaagaagtgtttcttccaggtctgtttaggcataac

SEQ ID NO: 21839 - DNA, 98 bp, Homo sapiens
  MAP TO AL121973.1; EXPRESSED IN HEART, SIGNAL =   1; EST_HUMAN HIT: AW169482.1, EVALUE 3.10e-01
tgcaacctgctactagcttcagtattctgagaaccattgccattgaaataaatgatagttgtggcaataataaactttccaaattaatgataatttgt

SEQ ID NO: 21840 - DNA, 249 bp, Homo sapiens
  MAP TO AL122003.7; EXPRESSED IN BT474, SIGNAL = 1.6; EXPRESSED IN HEART, SIGNAL = 1.2; SWISSPROT HIT: Q55637, EVALUE 1.60e+00; NT HIT: AL163280.2, EVALUE 3.00e-21; EST_HUMAN HIT: AI590115.1, EVALUE 9.00e-28
tggcctcatttttggctccatcctctgaaacagcatttgggcttttacaacaggaccaccatgcctccaggtgtttcctatgcaagcctgggtagtcggaatgccctctgctccgtccaactttgcctgaccacctcctgctctgctcactcaggttcagctttgacatcacctcctgggatactgatatggtttggctgtgtccccacccaaatctcatcttgaattcccatgtgttgagggagggac

SEQ ID NO: 21841 - DNA, 186 bp, Homo sapiens
  MAP TO AC009705.2; EXPRESSED IN HELA, SIGNAL =   1; EXPRESSED IN HEART, SIGNAL =  12; EXPRESSED IN BONE MARROW, SIGNAL = 0.9; SWISSPROT HIT: Q49416, EVALUE 9.70e-01; EST_HUMAN HIT: BF035999.1, EVALUE 2.60e+00; NT HIT: AL161595.2, EVALUE 2.40e-02
tccatacagccttgttcatagattcattatcatatttatcacatattcttgtcgttatggctttacacatctttttcttacagtagaagtcccttgtggtgtgagaaagggtataaactgtgttccccttgattgtaatctgcagtgtcctgcattcagtaggggcttaacaattgttggtttgat

SEQ ID NO: 21842 - DNA, 496 bp, Homo sapiens
  MAP TO AL008726.1; EXPRESSED IN BONE MARROW, SIGNAL = 0.99; EXPRESSED IN HEART, SIGNAL = 1.2; EXPRESSED IN FETAL LIVER, SIGNAL = 0.93; EST_HUMAN HIT: AA194468.1, EVALUE 1.00e-114; NT HIT: M29866.1, EVALUE 4.90e+00; SWISSPROT HIT: P25307, EVALUE 1.00e+00
agcaggtttgctaactccctgcttaggtcctgaatcatgtcgttccgtccttgcttctcaggctggcctgtgtttgggaccataccacgatcctggagctccccattgggcccaaggaggtactggtacttcttctgccaccggcggcacaccatggcttcaccaaccggctgctggctggtgtgcagcagagccaaaatgtgtcggcatggcaggtggtaccattgttgaaaggaacagctgcagctacagccatctttgctaacctggtgagagtcctctagcagctgaacgtccactgaagagccagccatgtccaccaggtgggtggagttctgtaccacctcccactcattgtggcacagcttgtaggctagttcagagccactctggtgcaaggtgtccagcatgccaacctgcgagggcggcacttgtgactgctgctgtacctgtacctgctgtgcgtctggcttggtctcttctgcagggaggctgg

SEQ ID NO: 21843 - DNA, 209 bp, Homo sapiens
  MAP TO AL122015.1; EXPRESSED IN HELA, SIGNAL = 0.94; EXPRESSED IN LUNG, SIGNAL = 2.3; EXPRESSED IN HEART, SIGNAL = 2.3; EST_HUMAN HIT: AI435196.1, EVALUE 1.00e-106; SWISSPROT HIT: P97367, EVALUE 1.90e-01; NT HIT: AF004849.1, EVALUE 1.00e-114
agggtggctgatgatgggtatggaagtagagtaggctgtcctccgaggtgtgtatttccagccaggtgggcatgcactgctgtgtgattgggacttccatgagaaagagtgaatggattactggtaacactagtaggaatataagcttgctgtcttctgtgcccaaagtttccattccactcttgatgcccagatccaaagtgctgaac

SEQ ID NO: 21844 - DNA, 212 bp, Homo sapiens
  MAP TO AC011390.1; EXPRESSED IN FETAL LIVER, SIGNAL = 0.88; EXPRESSED IN HBL100, SIGNAL = 0.95; EXPRESSED IN HEART, SIGNAL = 1.2; EXPRESSED IN BONE MARROW, SIGNAL = 0.92; NT HIT: AJ243213.1, EVALUE 1.00e-116; SWISSPROT HIT: O70528, EVALUE 8.00e-27
gaaaaatcgatgccgttgtgagcaggacgtccagagatgtccgaacaagacaaaacacctccccataaatccagatgtcttgaaccagctcaatggcaccaaagggcatcaccagcaccgaaaccagcagatccgcaaaagcaagagatacaatgaaataatttgtttttattttcctgtgagtgaaaaagtgtaagagaggaggcaggggg

SEQ ID NO: 21845 - DNA, 90 bp, Homo sapiens
  MAP TO AF152364.1; EXPRESSED IN BONE MARROW, SIGNAL =   1; EXPRESSED IN HEART, SIGNAL = 1.2; EST_HUMAN HIT: AI631199.1, EVALUE 1.90e-01; NT HIT: U67519.1, EVALUE 6.30e-01; SWISSPROT HIT: P33515, EVALUE 3.10e+00
aatgtaaataaaattatagaacaaataactgactttgggaatgccaattgcgctgatgttcaggagattctagatatgtaacccaaggaa

SEQ ID NO: 21846 - DNA, 924 bp, Homo sapiens
  MAP TO AC006530.4; EXPRESSED IN BT474, SIGNAL = 0.98; EXPRESSED IN LUNG, SIGNAL = 1.7; EXPRESSED IN HELA, SIGNAL = 1.2; EXPRESSED IN HEART, SIGNAL = 0.94; EST_HUMAN HIT: AU121422.1, EVALUE 0.00e+00; SWISSPROT HIT: P15312, EVALUE 1.00e+00
cattctcaagtacaacatccacagccacagttgtcaggtctttagtacaagcagcctgaatgtcctcagttggggcaatgaatgtgctgagtccagtcattttgttgacataaaccattcttcccagggctacatcgaaatgccgctgccaatctgaacaacacgtgtttgactcttcagtttcagaacaagctcttgctttagattcctcactctgaaaacaaattccattttggtcacctgtggcatcttctaccggattcattaacattccactgggagagtcaagacttcctatctgttgttctgaggctctgataagaacatctgaatctttaccggtaactttagaattattatagggcaataccaaaggagtttctgatatcacacagttctctgttgtattgctgttagaatgtgttttactatttttattaaaggaattatcctgtgtggcagaatctgatgttgggatgacaccattctctgttttttcatgcttgttgttaaataacatacaaaaatcttgtgttaacacactgcacaacttgctgtctttcctactggaatctgaatttggaagttcattaaaacgactcatcatccccattgtttgagtttctctttcggaacccttcagtctggataatttagaggctagtgattcagatgacttctcaaggtccaaaggttttctattaaagagagataactccttcagggtcataggactttctctcaaactaagcatctgttgttctaaacaatcttcatccttggagaatggaaacttctctgagtcaaggatgtggcttgctggttgacaactactatctgaatcactatgctccatagtagtgattttacaaacatcagagttctctaagcggttcttgtccttcagcagaatgtcaggttcaa

SEQ ID NO: 21847 - DNA, 701 bp, Homo sapiens
  MAP TO AL009174.1; EXPRESSED IN LUNG, SIGNAL = 2.1; EXPRESSED IN HEART, SIGNAL = 1.4; EXPRESSED IN PLACENTA, SIGNAL =  24; EXPRESSED IN FETAL LIVER, SIGNAL =  11; NT HIT: gi11421297, EVALUE 0.00e+00; EST_HUMAN HIT: AU119297.1, EVALUE 0.00e+00; SWISSPROT HIT: P51654, EVALUE 1.00e-128
tggatagaatcatggattgttgaaaagagaccaagcagtacgttctccatgtcatagattctgtacatgccattcacaagttcttcaagggacagaatgtattctctccagtacttgtcaatctccaccacacctgccatacagccttgcatgaccacattgcagtaaccgccacagggtttaaccatcatcagtccctggcagtaagagcagtaccacattctggtgagcattcggccacagtccttactgaacttcaggtgatcagttgtgttgatcacttcaattccaagattcagagcctgaaggaagatcctagtgacttgcagtgacttggaaacctgggtcataataagcttggggaaattcccaaatactttcaggtcacgtcttgctcctcggaggcactcattgatgtccaaggctgaatcaggcaggcctgggttcattagctgggtatagatgactggaaacaggctgtcaaacaattcattgaccatgtcatctacattgatgtcagaacccaagatgtagagagacacatctgtgaaaaattcacccacaaactcaaaagcttgtggagtcaggcttgggtagttgttcttgaacatggcattggtgtagttcttggcatggcgaacaacaatttcaaaggcctctgtaaaaaaaaaaaaaaaagagacacaaaaatgtgtacaaat

SEQ ID NO: 21848 - DNA, 102 bp, Homo sapiens
  MAP TO AC011084.1; EXPRESSED IN HEART, SIGNAL = 1.1; NT HIT: AF288992.1, EVALUE 8.60e-01
tgttaatgttattacccattatcttggtgatggtcacaccactgtttccaggaaaaatatagcccattaactgaacagaaggattaaaataggaacaaagtg

SEQ ID NO: 21849 - DNA, 242 bp, Homo sapiens
  MAP TO AC009491.2; EXPRESSED IN FETAL LIVER, SIGNAL =   1; EXPRESSED IN HEART, SIGNAL = 0.86; SWISSPROT HIT: P38159, EVALUE 2.00e-11; NT HIT: AF026564.1, EVALUE 9.00e-49; EST_HUMAN HIT: AA789285.1, EVALUE 6.00e-75
agggccttggatgtcttatggtggaagcagctgccatgattataacaatacatgagatagatacggcagaagtcaggaaagttgctcaaggagctatggcgatttttattcttgtggtcatgagaacattggcagaaaagaccaaaggaatccaccttctctggatagggtgcactctgctcctcttgaagcatatggtagttcaagttatgtgccatctacaggagatggtggggaaagtc

SEQ ID NO: 21850 - DNA, 158 bp, Homo sapiens
  MAP TO AC007394.2; EXPRESSED IN LUNG, SIGNAL = 0.71; EXPRESSED IN PLACENTA, SIGNAL = 0.6; EXPRESSED IN ADULT LIVER, SIGNAL = 0.86; EXPRESSED IN HEART, SIGNAL = 0.89; NT HIT: D16255.1, EVALUE 7.80e-02; EST_HUMAN HIT: AA889972.1, EVALUE 6.00e-03; SWISSPROT HIT: Q03330, EVALUE 2.20e+00
aaggttacaaacacaatgcctccttaccccttaatacttcagcatttcctaagaacaaagatattctctatcataaccagaatgcagttacaaaaatcaagaaatttaacatagacacaacagcttattatccatattctaattctaagacaagcatt

SEQ ID NO: 21851 - DNA, 360 bp, Homo sapiens
  MAP TO AC006111.2; EXPRESSED IN ADULT LIVER, SIGNAL =   1; EXPRESSED IN HEART, SIGNAL = 0.8; EXPRESSED IN FETAL LIVER, SIGNAL = 0.68; NT HIT: AE000327.1, EVALUE 0.00e+00; EST_HUMAN HIT: BF207423.1, EVALUE 1.30e+00; SWISSPROT HIT: P08409, EVALUE 2.00e-68
cgcaatccagcccgcgcagaaaacccatcatgtcaaagcgcattccttctgcagttaaccagcgcaatcctcgccagtgaacccggacgatataatcagcttctccaaaagcaagtgagcggatacattcgggacgcgaaccgaatccccggtcagcaatgcgtatctcgtctgccgtttgcgcaaatcggtccagccgttcagcgtctctgctgtcggttagctcaaaatcagtgaactgacaggtatgaggatcatatcccatatgtagtcgccattcagcgctgccgcccccgggcgcactgattgctgttccatcgacaagacgcaatctctttccgcttgtacaacccgtaactg

SEQ ID NO: 21852 - DNA, 116 bp, Homo sapiens
  MAP TO AL049744.7; EXPRESSED IN HELA, SIGNAL = 1.3; EXPRESSED IN ADULT LIVER, SIGNAL =   2; EXPRESSED IN HEART, SIGNAL = 0.81; NT HIT: AL163278.2, EVALUE 6.40e-02; EST_HUMAN HIT: AA345240.1, EVALUE 9.50e-02
cttctgtaaatttgaatttcttagattccacatatcaataagatcatgcaggatttttctttgtgttgactttattttagatagcataatgtccactagattcatccacgttttcc

SEQ ID NO: 21853 - DNA, 152 bp, Homo sapiens
  MAP TO AC009941.2; EXPRESSED IN HBL100, SIGNAL =   1; EXPRESSED IN HEART, SIGNAL = 0.9; NT HIT: M55298.1, EVALUE 1.40e+00; EST_HUMAN HIT: N48313.1, EVALUE 4.00e-04
aaaaaatattttacatagaactttaccacagtaaagttttaaaagttttaaaatttcttaaaactttgtattacctacttgggcaaccaatgttggcattgatgatgacaagcaagcgtttaaaaagatcatcattaaaagttcttcaccag

SEQ ID NO: 21854 - DNA, 143 bp, Homo sapiens
  MAP TO AC006441.13; EXPRESSED IN HEART, SIGNAL = 0.98; EXPRESSED IN BONE MARROW, SIGNAL = 0.96; EXPRESSED IN FETAL LIVER, SIGNAL = 0.93; NT HIT: AY008847.1, EVALUE 3.20e-01; EST_HUMAN HIT: W30992.1, EVALUE 3.30e-01
tggttccccgtgagtggcttctagagaataatgcacgtctcctaatgctaagtggaaacaacatctgtttcagtttcatggctagtaaagctgtgaatggacgcaccattgaactggcaaggctcgtagtctttttggctttg

SEQ ID NO: 21855 - DNA, 1503 bp, Homo sapiens
  MAP TO AC008174.1; EXPRESSED IN HEART, SIGNAL = 0.99; SWISSPROT HIT: O51883, EVALUE 1.30e+00; EST_HUMAN HIT: AW959874.1, EVALUE 5.70e+00
aaaatggttgaagatgattttcgataatctcttggatgataaagctggctatttggtcaatcataattgggcttcggcttactatacttttttgtattgaaacaagagagtcagacatttgcaaaatattacaatatacagaatccaccatcttttggaggttttttccagtatatagatattgattatcatatatagtgaaccagattttatgttttgaaatggctgacataaccttatttattatacaagtggacatttcattaaaatcagaactcattaaatatttttttcctaaagaggaacatgtaatgggtggaggaattagctgagataaaagccttcttatgacatcttctaaaaatgaatgtgataacatggtactatagtctgatgaagacctgggtagagaagtaaattctgttaggttactttgaagcttttgcaatataatttcaggtttgagagggtaatatgaatggggtatgagatgttccttgaagcaagatggcagtttgtagtctaaaatctctaacaatatgccatttgttatttgttctgctattgaggcattgtcgtataccggattattaccacaggccacttttaattcatactgctgtaaaacatcataataaactgagtcaacaattttgctaacagtttctgtatgaactggtggaaaacacagcctttcttcagcattccgtagaacagtgacttgagcattattaaattcattcactacattgttgacaaataatgtattcatctcattgagccaggacacagtgatgtttttatttttgccccacaatgacatagagagattaaaaaacaattctgaaattattccttccaaaaatgtggctgaataaacaccagcatatataccttcctgatgtagcttattatgaatggctaccttatccatttcctttgttctctgtctttcaaaaggtgacacagaagaggattttactgcacaatgcttgttaaatggtgcttgtattttggagctaaccacactgggattattcagggatactgtcaaagaattactatcatagctcctgagttctaaagaacttttactctgtcctaattctattaattctgactttcttgcttttatgaaactagactgtatttctcttgttctgtagttcaaatgcttatttgcaaaaggtagactttccggagcttgttgtatgctgtgagataatttgtccatcaatgatttaaccaagctgtgggaaataatagtaagcatagagtctgatgtcaataagtcttgatcaatttctgccacattctccaaaaggtctgacatgtaatctacttgaaggcattcacagtccattcctcccttacgataatcagattttccatcttctacactttgaagcatttttaaaagttgacattcttctgctgatgtttcctctgaaacagaccctttatcaggaaaagcagtgcttgtgcattcttccaaaagtattc

SEQ ID NO: 21856 - DNA, 277 bp, Homo sapiens
  MAP TO AC006455.2; EXPRESSED IN PLACENTA, SIGNAL = 0.67; EXPRESSED IN BONE MARROW, SIGNAL = 2.3; EXPRESSED IN HEART, SIGNAL = 0.84; EST_HUMAN HIT: BE872805.1, EVALUE 2.50e-01; NT HIT: AL096810.1, EVALUE 3.60e-02; SWISSPROT HIT: Q60707, EVALUE 3.00e-01
gtacatggaaacagatgtttggcagagcttgccaacaaattcttttctgcatcaagaaggcatgcctctcagcatgacactcttaagaggcagaaatgtgacaaaagaaggatgcgatctgctcctggtgaagagccacctgactctccctcagctgcacatagtggccttaacgtgcatcttgctagaaggggcatgcaagccaggggctgccagccaagccatacaggccaaggacagtttcaagtctgccttttatttcatcgaactgttgttc

SEQ ID NO: 21857 - DNA, 160 bp, Homo sapiens
  MAP TO AC007313.3; EXPRESSED IN HEART, SIGNAL = 0.85; EST_HUMAN HIT: R16220.1, EVALUE 7.00e-18; NT HIT: AL163208.2, EVALUE 9.00e-14; SWISSPROT HIT: P08547, EVALUE 9.00e-08
agttctaatagtatttttagtggattccttaggattttctctctatataagatcatgtcatctgcaaatagagatacttttacttcttgcttttcaatctggttgccctttatttcatttacttgcccaaatgccctggctagaacctttggtacaatgt

SEQ ID NO: 21858 - DNA, 237 bp, Homo sapiens
  MAP TO AC007033.3; EXPRESSED IN PLACENTA, SIGNAL = 0.94; EXPRESSED IN HEART, SIGNAL = 0.8; NT HIT: AJ298627.1, EVALUE 8.80e+00; SWISSPROT HIT: Q07869, EVALUE 1.40e+00
ggaaccttcacaagttccccggaaggtgaaaaaaatatctgcaaaagaagtgaatccagcccaagtttcataaccttaggcaaatccaggaagagtgacggcacaattacaaagagtaactgcatagaatatctgttcagttaccactcttacctggcttgtaaaacaacagcagaaggtgttaacaaatgcttgtttaccaataagtccatactgcagcaaaattcctggccctac

SEQ ID NO: 21859 - DNA, 135 bp, Homo sapiens
  MAP TO AC010740.3; EXPRESSED IN HEART, SIGNAL = 0.95; EXPRESSED IN BT474, SIGNAL = 0.92; EXPRESSED IN BRAIN, SIGNAL =   1; SWISSPROT HIT: P98157, EVALUE 4.00e-17; NT HIT: AF176832.1, EVALUE 4.00e-65; EST_HUMAN HIT: AA347238.1, EVALUE 2.00e-02
ctgtgcaagtttgattggattcatcttcattgctcccacagtcattagctccatcacaaagccatctcttggggatgcagcgattattctggcatttaaactgatcatcaggacagctatgattgactgggaggg

SEQ ID NO: 21860 - DNA, 133 bp, Homo sapiens
  MAP TO AC007653.1; EXPRESSED IN HEART, SIGNAL = 0.87; NT HIT: AJ223978.1, EVALUE 1.00e+00; SWISSPROT HIT: P70490, EVALUE 1.00e+00
  unsure 121
  unsure 127
ctctgacaccttctgccttcaggtctacactggcatcgtcataatcagttcccagaatgggtcctgtaatccttctcctagcttttacatatgctgttcctcctactggaaattttctttncctcgntgccat

SEQ ID NO: 21861 - DNA, 829 bp, Homo sapiens
  MAP TO AL022152.1; EXPRESSED IN HEART, SIGNAL = 1.1; EXPRESSED IN FETAL LIVER, SIGNAL =   1; NT HIT: gi11420096, EVALUE 0.00e+00; SWISSPROT HIT: P43361, EVALUE 2.00e-11; EST_HUMAN HIT: BE728581.1, EVALUE 0.00e+00
agtcctgagagtgctcctgagggggaggattccctgtctcctctccaaattcctcagagtcctcttgagggagaggactccctgtcttctctccattttcctcagagtcctcctgagtgggaggactccctctctcctctccactttcctcagtttcctcctcagggggaggacttccagtcttctctccagagtcctgtgagtatctgctcctcctccacttctttgagtcttccccagagtttccctgagagtcctcagagtcctcctgaggggcctgctcagtctcctctccagagacctgtcagctccttcttctcctacactttagcgagtcttctccaaagttcccatgagagtcctcagagtcctcctgaggggcctgcccagtctcctctccagagtcctgtgagctccttcccctcctccacttcatcgagtctttcccagagttctcctgtgagctccttcccctcctccacttcatcgagtctttccaagagttcccctgagagtcctctccagagtcctgtgatctccttctcctcctccacttcattgagcccattcagtgaagagtccagcagcccagtagatgaatatacaagttcctcagacaccttgctagagagtgattccttgacagacagcgagtccttgatagagagcgagcccttgttcacttatacactggatgaaaaggtggacgagttggcgcggtttcttctcctcaaatatcaagtgaagcagcctatcacaaaggcagagatgctgacgaatgtcatcagcaggtacacgggctactttcctgtgatcttcaggaaagccc

SEQ ID NO: 21862 - DNA, 95 bp, Homo sapiens
  MAP TO AF152365.1; EXPRESSED IN HEART, SIGNAL = 0.92; SWISSPROT HIT: P20036, EVALUE 9.20e+00
gtttgggtattcaagaaaacaagaataaaagtcatggcatcctgcagaccaaagcaagacctaacccttgtgtgaggtataatcagtatcttgag

SEQ ID NO: 21863 - DNA, 139 bp, Homo sapiens
  MAP TO AF152364.1; EXPRESSED IN FETAL LIVER, SIGNAL = 1.1; EXPRESSED IN HBL100, SIGNAL =   1; EXPRESSED IN HEART, SIGNAL = 1.1; EXPRESSED IN BONE MARROW, SIGNAL = 0.93; SWISSPROT HIT: P09956, EVALUE 9.20e-02; NT HIT: AL163252.2, EVALUE 4.90e+00; EST_HUMAN HIT: AL043656.1, EVALUE 4.60e-01
agggcactatttggcatgatgagagtgaggggaatgatctgaatgttttcagtgccaagcaccatgttggcctcaatcggtagcaattctaattctttttcctgtggatttgtatcagttgctggttcatttaaatcag

SEQ ID NO: 21864 - DNA, 78 bp, Homo sapiens
  MAP TO AC010085.1; EXPRESSED IN HEART, SIGNAL = 1.4; SWISSPROT HIT: P34413, EVALUE 3.20e-02; EST_HUMAN HIT: AV753940.1, EVALUE 8.00e-29; NT HIT: AB020684.1, EVALUE 8.00e-37
cgctgcacaggtatacaataaagtatcaaaatccttataactaaagaattttgatgttagtaagttgccaatatgagc

SEQ ID NO: 21865 - DNA, 156 bp, Homo sapiens
  MAP TO AC007773.1; EXPRESSED IN HEART, SIGNAL = 3.2; SWISSPROT HIT: P34413, EVALUE 1.00e+00; NT HIT: X96983.1, EVALUE 3.60e-01; EST_HUMAN HIT: AA419566.1, EVALUE 8.00e-71
aggctgacacttcttgccattttcatatcaacttttctctttagtctgacatggcaatttaatcaatttatgatgctgatgcaagcattagtgctgttcacactggactccctggacatgctgccagcagtgaaggtgagctttgctttcttttct

SEQ ID NO: 21866 - DNA, 174 bp, Homo sapiens
  MAP TO AC007841.1; EXPRESSED IN PLACENTA, SIGNAL = 1.8; EXPRESSED IN HELA, SIGNAL = 1.5; EXPRESSED IN BRAIN, SIGNAL = 1.7; EXPRESSED IN HEART, SIGNAL = 0.93; EXPRESSED IN BONE MARROW, SIGNAL = 2.5; EXPRESSED IN LUNG, SIGNAL = 1.5; EXPRESSED IN FETAL LIVER, SIGNAL = 1.6; NT HIT: X87344.1, EVALUE 1.00e-10; SWISSPROT HIT: P28931, EVALUE 1.70e+00; EST_HUMAN HIT: AA732936.1, EVALUE 4.00e-05
agccctcaccagaagctgaccatgcttgcaccctggtctcaaacttccagcctccaaaactgtgagaataaatatctgttgtttgaaagccacccagagtaccatagtactctgttacagcagctcaaactgactgagaccctctttaacaatgacaataaaactaagaatggc

SEQ ID NO: 21867 - DNA, 122 bp, Homo sapiens
  MAP TO AC009421.1; EXPRESSED IN FETAL LIVER, SIGNAL = 0.9; EXPRESSED IN BT474, SIGNAL =   1; EXPRESSED IN HEART, SIGNAL =  27; SWISSPROT HIT: P20717, EVALUE 5.20e+00
  unsure 40
ttatttggctccacaggcctgactgcaccatctccagctnctctgcttcgggttgctgacctctatgtccataccagccagggtccctttccctttgactcctggttggtaaggcaatgatg

SEQ ID NO: 21868 - DNA, 82 bp, Homo sapiens
  MAP TO AC009223.1; EXPRESSED IN PLACENTA, SIGNAL = 0.62; EXPRESSED IN HEART, SIGNAL = 0.81; NT HIT: AJ005180.1, EVALUE 1.40e-01
caagagccaataaaaaaagatgcagatgagattccccagtcagccttggacatttgtaggtccttttcctcgatggtgaagt

SEQ ID NO: 21869 - DNA, 264 bp, Homo sapiens
  MAP TO AC008283.2; EXPRESSED IN HEART, SIGNAL = 0.9; SWISSPROT HIT: O70361, EVALUE 1.90e+00; NT HIT: Z72560.1, EVALUE 1.00e-04
attgaagtctgtagtttgtgagcaagtgagccataaaaatcacctgtgtaagaaggctgtggccatggaaacagaaaactcaaagatcttcaggcaggagcatggtgggctcataatcagcagggagaccattgtggccagagcagagttagcaagcgaacggggagcaggggtagcagcagacgccatgtcagccacagccctatggacgattgcaaagactctgatatttactttgagattgtcttaattatctcagacaga

SEQ ID NO: 21870 - DNA, 175 bp, Homo sapiens
  MAP TO AC008272.1; EXPRESSED IN HEART, SIGNAL = 0.82; EST_HUMAN HIT: BE876539.1, EVALUE 1.00e-02; NT HIT: X83518.1, EVALUE 4.10e-01; SWISSPROT HIT: P03764, EVALUE 3.90e+00
ttccaaccctttatctctttctcttcttttgataacagaatccgtatttcctgtggggaatctattccacttagctgaccctctcctaaccctacccctataacaagtggtagctgctgctcttgtttcttcttcatcactatgaccagcactaccactattgttatcattatga

SEQ ID NO: 21871 - DNA, 127 bp, Homo sapiens
  MAP TO AC007563.1; EXPRESSED IN HEART, SIGNAL =   1; NT HIT: AB040897.1, EVALUE 6.10e-02; EST_HUMAN HIT: BF240113.1, EVALUE 1.10e-01
gcctcctctgttggggtgccagagcagcttctcactgtcaccaccacagtcatctttctcaacagaaagcatcccatggtacacagcaatctgggcttttaccctgggaggatggacaacttctatc

SEQ ID NO: 21872 - DNA, 154 bp, Homo sapiens
  MAP TO AC007631.3; EXPRESSED IN HEART, SIGNAL = 0.97; SWISSPROT HIT: P48324, EVALUE 7.70e-01; EST_HUMAN HIT: AV726630.1, EVALUE 3.00e-05
accccttcatgtcggacttagctctgatgtgttcctcaacgcactggctcttcataatcatggcatcatttcaaaattttctaggatgtctaaaagtgcttttattcatattagcccaaatgagaaaggaagttggagagattttattctggta

SEQ ID NO: 21873 - DNA, 146 bp, Homo sapiens
  MAP TO AP000130.1; EXPRESSED IN HEART, SIGNAL = 0.8; EST_HUMAN HIT: AW088304.1, EVALUE 3.40e-01; SWISSPROT HIT: Q13009, EVALUE 1.00e-12; NT HIT: gi11526176, EVALUE 1.00e-53
cagctcatagatgtcttcctcgggctgtggaacatagagctgcattttgttttctattagaaatttcaggcgcaggtaatgagcagaatgatccagttgatgtgtctgggacaaaaaagaaagaaagaaagaaaatgtctgttcaa

SEQ ID NO: 21874 - DNA, 104 bp, Homo sapiens
  MAP TO AP000207.1; EXPRESSED IN HEART, SIGNAL = 0.99; NT HIT: AF149774.1, EVALUE 3.50e+00
ccttctcctctggcactggtgatcccaatggattcacagccagggcttggcctggcttcttctgcagagactgtgataatgtgccctgggacctggattttata

SEQ ID NO: 21875 - DNA, 244 bp, Homo sapiens
  MAP TO AL121654.1; EXPRESSED IN BT474, SIGNAL = 0.97; EXPRESSED IN HEART, SIGNAL = 0.84; EXPRESSED IN BONE MARROW, SIGNAL =   1; SWISSPROT HIT: P47144, EVALUE 3.50e-02
aattcatgccctggccttctgtgccctggctgtgtctctagctctctttagaagtcactgctggcctttatcctgcctctgcagcagcttcttcccagtctgctccgtcctttttcttttcaaccagatgtacattcttgtctgtaacctaagggcattcttgttcattttctttatttacaacaaagtttactttaaaagaaagaaaatgttttttcaatatattccattgttcagatttttt

SEQ ID NO: 21876 - DNA, 439 bp, Homo sapiens; identical to SEQ ID NO: 5155
  MAP TO AL021919.4; EXPRESSED IN HEART, SIGNAL = 1.5; EST_HUMAN HIT: AW337854.1, EVALUE 1.10e+00; NT HIT: AF075615.1, EVALUE 9.30e-01

SEQ ID NO: 21877 - DNA, 108 bp, Homo sapiens
  MAP TO AC008283.2; EXPRESSED IN HEART, SIGNAL = 0.84; NT HIT: gi11421527, EVALUE 2.00e-54; EST_HUMAN HIT: AW051755.1, EVALUE 2.00e-54; SWISSPROT HIT: P54289, EVALUE 2.00e-15
actggacaagtgccttagatgaagttttcaaaaagaatcgcgaggaagacccttcattattgtggcaggtttttggcagtgccactggcctagctcgatattatccag

SEQ ID NO: 21878 - DNA, 598 bp, Homo sapiens
  MAP TO AL008628.1; EXPRESSED IN HEART, SIGNAL = 1.5; SWISSPROT HIT: P02894, EVALUE 3.00e-14
tcccagatggctgcaggacatatcctatccctttcccccagatggctgccagatgtgacccttattattttacccagatagctgcagtacattcccctcatttcctttctctcatggctgcagaacatgcccctcattcccttctcctgatggctgcagaacatgtctctcatttcctttccctgatggctacagaacatgcccttcctttccttcccctgatggctgtgggacatgcccctcatttccttcccctgatggctgcaggacatgttcctcatttccttcccctgatggctgcagaacatgcccctcactcccttcccctgatggctgcagaacatgtcccttatttcctttccttgatggctgcgggacatgcccctactttccttcccctgatggctgcaggacatgttcctcatttccttcccctgatggctgcagaacatgcccctcattcccttctcctgatggctgcacaacatgtccctcatttcctccccctgatggctgcagaacatgcccctcattcccttctcctgatggctgcacaacatgtccctcatttcctccccctgatggctgcaggacatgc

SEQ ID NO: 21879 - DNA, 202 bp, Homo sapiens
  MAP TO AC009301.1; EXPRESSED IN HEART, SIGNAL = 0.87; SWISSPROT HIT: P22544, EVALUE 1.60e+00; NT HIT: D49683.1, EVALUE 1.00e-01
gtggcatcatgtactccttgtcccacaccttcctgcccctgcctctcaaggtagcaaacaccctctttgctcccgtctgcttcatctcaggccgggtgccaccacccttcagactttcacccaagccctgatctgtggcatcatcctgctctccccccactcccattttgttgtctcctctgagatatctcttgctccctga

SEQ ID NO: 21880 - DNA, 1091 bp, Homo sapiens
  MAP TO AL023279.1; EXPRESSED IN HEART, SIGNAL = 0.96; NT HIT: gi11420096, EVALUE 0.00e+00; EST_HUMAN HIT: BE728581.1, EVALUE 0.00e+00; SWISSPROT HIT: P43361, EVALUE 9.00e-18
atgtgtttacaaagacataggagtcatcagggtccacttctctcagggaaatgccaaaaagtatctctatgaactcacgggctttcctgaagatcacaggaaagtagcccgtgtacctgctgatgacattcgtcagcatctctgcctttgtgataggctgcttcacttgatatttgaggagaagaaaccgcgccaactcgtccaccttttcatccagtgtataagtgaacaagggctcgctctctatcaaggactcgctgtctgtcaaggaatcactctctagcaaggtgtctgaggaacttgtatattcatctactgggctgctggactcttcactgaatgggctcaatgaagtggaggaggagaaggagatcacaggactctggagaggactctcaggggaactcttggaaagactcgatgaagtggaggaggggaaggagctcacaggagaactctgggaaagactcgatgaagtggaggaggggaaggagctcacaggactctggagaggagactgggcaggcccctcaggaggactctgaggactctcatgggaactttggagaagactcgctaaagtgtaggagaagaaggagctgacaggtctctggagaggagactgagcaggcccctcaggaggactctgaggactctcagggaaactctggggaagactcaaagaagtggaggaggagcagatactcacaggactctggagagaagactggaagtcctccccctgaggaggaaactgaggaaagtggagaggagagagggagtcctcccactcaggaggactctgaggaaaatggagagaagacagggagtcctctccctcaagaggactctgaggaatttggagaggagacagggaatcctccccctcaggagcactctcaggactctggagaggagattgggagtgcatcccctcaggagggctctgaggactatggagaggagactggacaggcccctcaggaggactctgagaactctcagggaaactctggggaagactggatggagtggaggaggagcagatgctcacagggctctggagagaagactggaattcctccccctga

SEQ ID NO: 21881 - DNA, 106 bp, Homo sapiens
  MAP TO AC004902.2; EXPRESSED IN HEART, SIGNAL = 1.1; EXPRESSED IN BONE MARROW, SIGNAL = 0.93; EXPRESSED IN HBL100, SIGNAL = 0.91; EST_HUMAN HIT: N62051.1, EVALUE 4.00e-37; SWISSPROT HIT: P15563, EVALUE 1.10e+00
tcgctacctactggatagtgttgcacagcctgtgacaaaggataagtttgctttggaatctgaagtagagtactgtctcgtgaaattaattttctcattctgaatc

SEQ ID NO: 21882 - DNA, 255 bp, Homo sapiens
  MAP TO AC008417.2; EXPRESSED IN HEART, SIGNAL = 1.6; NT HIT: gi4758697, EVALUE 0.00e+00; EST_HUMAN HIT: AA332304.1, EVALUE 0.00e+00; SWISSPROT HIT: Q16706, EVALUE 3.00e-42
ctgcacatctgaattgtgacttccactttgtgaagcaaacagacagtctgcagtgtcaactgagagggataattgtgagggcagaagatgtgagccagcaccttggctgaaattgctttgtgaacttttcggaccatcctccacagactcactcaaattgatgactgagtctctaatatttgagatgatctcattattctcagctagcaaacgctccaaatggtctattttttcttgcaacattgagagctggcc

SEQ ID NO: 21883 - DNA, 216 bp, Homo sapiens
  MAP TO AC010856.2; EXPRESSED IN LUNG, SIGNAL = 1.4; EXPRESSED IN BRAIN, SIGNAL = 1.4; EXPRESSED IN HEART, SIGNAL = 1.1; NT HIT: gi11424199, EVALUE 3.00e-98; EST_HUMAN HIT: AI056615.1, EVALUE 3.00e-98; SWISSPROT HIT: Q14289, EVALUE 2.00e-31
gagatcatcacctccatcctgctgagcgggcggatcgggcccaacatccggttggctgagtgctatgggctgaggctgaagcacatgaagtccgatgagatccactggctgcacccacagatgacggtgggtgaggtgcaggacaagtatgagtgtctgcacgtggaagccgagtggaggtaggagtggattcctgggctctggaagtgggaagga

SEQ ID NO: 21884 - DNA, 142 bp, Homo sapiens
  MAP TO AC009232.1; EXPRESSED IN HEART, SIGNAL =  13; EXPRESSED IN BONE MARROW, SIGNAL = 0.93; SWISSPROT HIT: P52037, EVALUE 2.30e+00; NT HIT: K03342.1, EVALUE 5.00e-03; EST_HUMAN HIT: BE563288.1, EVALUE 1.90e+00
gacacttcaagaacgggtgccacctcctgctgccccagggcaccatgcgtccctctagtaaagagaagctggtggatggtctcggcctggagacaccatacagtgcactgcgtcaggagtaagccttgcctctttgtgggca

SEQ ID NO: 21885 - DNA, 3123 bp, Homo sapiens
  MAP TO AC005859.1; EXPRESSED IN HEART, SIGNAL = 1.1; EXPRESSED IN PLACENTA, SIGNAL = 0.96; EXPRESSED IN LUNG, SIGNAL = 1.3; NT HIT: gi11421045, EVALUE 0.00e+00; SWISSPROT HIT: P35858, EVALUE 5.00e-21; EST_HUMAN HIT: H65666.1, EVALUE 4.00e-54
gaaaacatgttccttcagtcgtcaatgctgacctgcattttcctgctaatatctggttcctgtgagttatgcgccgaagaaaatttttctagaagctatccttgtgatgagaaaaagcaaaatgactcagttattgcagagtgcagcaatcgtcgactacaggaagttccccaaacggtgggcaaatatgtgacagaactagacctgtctgataatttcatcacacacataacgaatgaatcatttcaagggctgcaaaatctcactaaaataaatctaaaccacaaccccaatgtacagcaccagaacggaaatcccggtatacaatcaaatggcttgaatatcacagacggggcattcctcaacctaaaaaacctaagggagttactgcttgaagacaaccagttaccccaaataccctctggtttgccagagtctttgacagaacttagtctaattcaaaacaatatatacaacataactaaagagggcatttcaagacttataaacttgaaaaatctctatttggcctggaactgctattttaacaaagtttgcgagaaaactaacatagaagatggagtatttgaaacgctgacaaatttggagttgctatcactatctttcaattctctttcacacgtgccacccaaactgccaagctccctacgcaaactttttctgagcaacacccagatcaaatacattagtgaagaagatttcaagggattgataaatttaacattactagatttaagcgggaactgtccgaggtgcttcaatgccccatttccatgcgtgccttgtgatggtggtgcttcaattaatatagatcgttttgcttttcaaaacttgacccaacttcgatacctaaacctctctagcacttccctcaggaagattaatgctgcctggtttaaaaatatgcctcatctgaaggtgctggatcttgaattcaactatttagtgggagaaatagcctctggggcatttttaacgatgctgccccgcttagaaatacttgacttgtcttttaactatataaaggggagttatccacagcatattaatatttccagaaacttctctaaacttttgtctctacgggcattgcatttaagaggttatgtgttccaggaactcagagaagatgatttccagcccctgatgcagcttccaaacttatcgactatcaacttgggtattaattttattaagcaaatcgatttcaaacttttccaaaatttctccaatctggaaattatttacttgtcagaaaacagaatatcaccgttggtaaaagatacccggcagagttatgcaaatagttcctcttttcaacgtcatatccggaaacgacgctcaacagattttgagtttgacccacattcgaacttttatcatttcacccgtcctttaataaagccacaatgtgctgcttatggaaaagccttagatttaagcctcaacagtattttcttcattgggccaaaccaatttgaaaatcttcctgacattgcctgtttaaatctgtctgcaaatagcaatgctcaagtgttaagtggaactgaattttcagccattcctcatgtcaaatatttggatttgacaaacaatagactagactttgataatgctagtgctcttactgaattgtccgacttggaagttctagatctcagctataattcacactatttcagaatagcaggcgtaacacatcatctagaatttattcaaaatttcacaaatctaaaagttttaaacttgagccacaacaacatttatactttaacagataagtataacctggaaagcaagtccctggtagaattagttttcagtggcaatcgccttgacattttgtggaatgatgatgacaacaggtatatctccattttcaaaggtctcaagaatctgacacgtctggatttatcccttaataggctgaagcacatcccaaatgaagcattccttaatttgccagcgagtctcactgaactacatataaatgataatatgttaaagttttttaactggacattactccagcagtttcctcgtctcgagttgcttgacttacgtggaaacaaactactctttttaactgatagcctatctgactttacatcttcccttcggacactgctgctgagtcataacaggatttcccacctaccctctggctttctttctgaagtcagtagtctgaagcacctcgatttaagttccaatctgctaaaaacaatcaacaaatccgcacttgaaactaagaccaccaccaaattatctatgttggaactacacggaaacccctttgaatgcacctgtgacattggagatttccgaagatggatggatgaacatctgaatgtcaaaattcccagactggtagatgtcatttgtgccagtcctggggatcaaagagggaagagtattgtgagtctggagctaacaacttgtgtttcagatgtcactgcagtgatattatttttcttcacgttctttatcaccaccatggttatgttggctgccctggctcaccatttgttttactgggatgtttggtttatatataatgtgtgtttagctaaggtaaaaggctacaggtctctttccacatcccaaactttctatgatgcttacatttcttatgacaccaaagatgcctctgttactgactgggtgataaatgagctgcgctaccaccttgaagagagccgagacaaaaacgttctcctttgtctagaggagagggattgggatccgggattggccatcatcgacaacctcatgcagagcatcaaccaaagcaagaaaacagtatttgttttaaccaaaaaatatgcaaaaagctggaactttaaaacagctttttacttggctttgcagaggctaatggatgagaacatggatgtgattatatttatcctgctggagccagtgttacagcattctcagtatttgaggctacggcagcggatctgtaagagctccatcctccagtggcctgacaacccgaaggcagaaggcttgttttggcaaactctgagaaatgtggtcttgactgaaaatgattcacggtataacaatatgtatgtcgattccattaagcaatactaa

SEQ ID NO: 21886 - DNA, 154 bp, Homo sapiens
  MAP TO AL121675.8; EXPRESSED IN HEART, SIGNAL = 0.95; EST_HUMAN HIT: AW838171.1, EVALUE 5.00e-25; SWISSPROT HIT: P51531, EVALUE 8.80e-02
agcgaggtggggaccatcggatttggccacgtgggaggtgctggaaaaggaagctggcctgcagtgggctgggaaggaaggagctggggatgggaaggacccacaagccttgaagaaggtttgctgtgaatatcacggaggaggggcgtggtcg

SEQ ID NO: 21887 - DNA, 136 bp, Homo sapiens
  MAP TO AC009576.2; EXPRESSED IN HEART, SIGNAL = 1.3; SWISSPROT HIT: O15481, EVALUE 3.00e+00; NT HIT: AF204882.1, EVALUE 6.60e-02
catcttcatcacaatggtcttcatcattatcatcaagagaagaacttattacaaacgtaatttcccagatatctttcctatgtgctctcaagaaaattacataagcttgggtctgaccacaaactctgtaaattca

SEQ ID NO: 21888 - DNA, 436 bp, Homo sapiens
  MAP TO AC009651.2; EXPRESSED IN BRAIN, SIGNAL = 0.9; EXPRESSED IN HEART, SIGNAL = 0.89; NT HIT: X72913.1, EVALUE 5.90e-02; EST_HUMAN HIT: AI190903.1, EVALUE 1.00e-120; SWISSPROT HIT: P75361, EVALUE 3.30e-02
  unsure 431
aatgaatcttccagtagtgctccaagatgttaaaactgctcaagttgaacttttcagccaaatgactgacattgtccatatgataccaaaagtccaggaaaagactgacttgtatcaaaaacagatggaggtcctggaaaccagaatgaatgttaatgaagacaaacaatgcacaacgactaaagatatcctctctatgaaagaagacatcaaggcattaaagaagaaggtgacagaactggaaattcagaattcctgctccacgatacattgtctagagattctggagggagaaaggggtaaagaaatcacagaactgctttacaaactcatacaaccagcaactctgaagaacactttggcctctacagacatggaaatctcttcagcagaaccagagaaagtgcccagttatccaaagtccactgacncatct

SEQ ID NO: 21889 - DNA, 113 bp, Homo sapiens
  MAP TO AF107885.2; EXPRESSED IN HEART, SIGNAL = 0.86; SWISSPROT HIT: Q64467, EVALUE 1.80e+00; EST_HUMAN HIT: W68106.1, EVALUE 5.70e+00; NT HIT: D89940.1, EVALUE 8.30e-01
cactctgcccagaattagagcattctgcagcgggattggcgtggagcagcaggcttccaccataggaaagtcccctccagcaggggccaccgtgcagccgctctctctggcgg

SEQ ID NO: 21890 - DNA, 205 bp, Homo sapiens
  MAP TO AC010740.2; EXPRESSED IN HEART, SIGNAL = 0.94; NT HIT: AF176832.1, EVALUE 1.00e-112; EST_HUMAN HIT: BE000793.1, EVALUE 1.90e+00; SWISSPROT HIT: P98157, EVALUE 1.00e-27
gtgtcagtgccattgaagtggttgtggagcatggcctggctactccagaaggcctgacagtcgactggatagcaggaaacatatactggatagacagcaatctggaccaaatcgaagtggccaaactagatggctccctaagaactacactaatagcaggagccatggaacaccccagggccattgctttggacccaagatatgg

SEQ ID NO: 21891 - DNA, 429 bp, Homo sapiens
  MAP TO AC011283.2; EXPRESSED IN HEART, SIGNAL = 0.84; NT HIT: AL163283.2, EVALUE 3.00e-04; EST_HUMAN HIT: T92158.1, EVALUE 7.00e-12; SWISSPROT HIT: P50533, EVALUE 1.00e-02
aactgtgaatttaaaacagctgtgattaatatgcaaagacctttaaagagaaaagcagacaacatgcaagatcaaaaggataacgtaaatagtgatatggatattttaagaaagaagcaagaagaaatgcttgagataaaaagcactgtaacagaaataaagaatgcctttgatgagctaaatagtagactgggaatagctgaggacagaatctcaaagctgaaggatctgtcaatagaaatttacaaaactaaaaagcaaagaggaaaaatagacaaagaagaaaaaagagcagaatatccaagtcctgtggaacaagacaatcacaaaaggtataatatacacataatggaaataccagaaggagaagaaaaagaggaaggactggaagcattccattacattatagcaaagaacatcctgaggctt

SEQ ID NO: 21892 - DNA, 93 bp, Homo sapiens
  MAP TO AL109935.13; EXPRESSED IN HEART, SIGNAL = 1.1; EST_HUMAN HIT: AA224550.1, EVALUE 7.30e-02; NT HIT: U75898.1, EVALUE 1.90e-01
gactgtggggcctcttctgcagaggtgcaacagggcttcgtgttcatcacatctgcctcctcctcttcctcatattgcactgaggccaaaagg

SEQ ID NO: 21893 - DNA, 147 bp, Homo sapiens
  MAP TO AF176315.1; EXPRESSED IN HEART, SIGNAL = 0.9; EST_HUMAN HIT: BF679819.1, EVALUE 1.30e-01; NT HIT: AB035512.1, EVALUE 5.20e+00; SWISSPROT HIT: P12616, EVALUE 1.30e+00
ctggcttccagagccagctccacatccacttggagaaagagaatccacaaccaaaaaccgaaatgatagccacaagaatggacacctttttggatctaaattgagaatcacatggagatgtatgtcatccaactcaaacctggtcat

SEQ ID NO: 21894 - DNA, 231 bp, Homo sapiens
  MAP TO AC010974.3; EXPRESSED IN HEART, SIGNAL = 1.5; EXPRESSED IN LUNG, SIGNAL =   1; SWISSPROT HIT: Q10441, EVALUE 1.20e-01; NT HIT: AF052695.1, EVALUE 8.60e+00; EST_HUMAN HIT: AA873479.1, EVALUE 1.40e-01
cgtctcttggatctttcatctggagatttgctttcagaggtggaaagaaaccgaagtctgacacagtcacgaactgatgctgaggtgcacgtgagtttcccagttgccttcagaacacttgttttggtggttattttccttccatcaaatatgatgtcacaagcgaaccataaagtgcatccttgaagcattgtcaggcagataaaaataccttcctttcttgtgttctct

SEQ ID NO: 21895 - DNA, 92 bp, Homo sapiens
  MAP TO AL034551.14; EXPRESSED IN HEART, SIGNAL = 0.88; SWISSPROT HIT: O67555, EVALUE 5.40e+00
ctttcctgcaggtgattattgaggaactcaggctccaatgtctttggctccataatcttcagcacatgactggaattccctccattcaatca

SEQ ID NO: 21896 - DNA, 144 bp, Homo sapiens
  MAP TO AC007163.2; EXPRESSED IN HEART, SIGNAL = 1.1; NT HIT: AF233581.1, EVALUE 1.00e-03; SWISSPROT HIT: Q06278, EVALUE 5.00e-08; EST_HUMAN HIT: AV727460.1, EVALUE 3.10e-02
ctgaatgttcacaattataggctccacgtcttggtacacaatcttcaccacttttgtggcctgcttggcatgatcatgtttgtcagcagccacagtgcagaaaatctgacccacacaaatcacctgcagaaaacacagaccaat

SEQ ID NO: 21897 - DNA, 147 bp, Homo sapiens
  MAP TO AC008496.2; EXPRESSED IN HEART, SIGNAL = 2.9; SWISSPROT HIT: P22648, EVALUE 2.30e+00; NT HIT: M32346.1, EVALUE 1.30e+00; EST_HUMAN HIT: C05212.1, EVALUE 1.00e-75
ctgtcctaaagatggccctttcactgggcaggctacatccagtgaagttcacagccatcacccacacttgatagcatcggtcaggttccagatcttcaaaaatgcagtagctttctttcactgtcagtctgtattcttctaccaact

SEQ ID NO: 21898 - DNA, 132 bp, Homo sapiens
  MAP TO AC007092.3; EXPRESSED IN HEART, SIGNAL = 8.8; NT HIT: AF020092.1, EVALUE 7.40e-02
ctgaggggcctgatcattaagctgcgggtctggaggagcagcggcagcgggatcagctgcctgctgagcttggtcaaagggctgtggctgaactggtgcagccagctggagcaggggcggcaggaatagagg

SEQ ID NO: 21899 - DNA, 274 bp, Homo sapiens
  MAP TO AC009290.1; EXPRESSED IN HEART, SIGNAL = 2.6; NT HIT: gi9507184, EVALUE 6.60e-01; EST_HUMAN HIT: AA905681.1, EVALUE 2.50e-01; SWISSPROT HIT: P31696, EVALUE 8.60e-01
  unsure 49
  unsure 68
  unsure 112
  unsure 133
  unsure 160
actgaggtcagtgttgatgaagatttcaggggatcctcagcaaccaacnactgtatatgtccacagtnggcagcaagtgttgttagagtctttgatggtgatactttttaantgtcctcatgacctccttttnctcataccagagaagttgttactaagngggaatctgtcctggaactgtatctgtcttgtgtactcatttgtagtggtggtggtactggtatctgatggagaggccagagaggtgaggttaggcctgaagcatgggcaaaca

SEQ ID NO: 21900 - DNA, 95 bp, Homo sapiens
  MAP TO AC006148.3; EXPRESSED IN HEART, SIGNAL = 0.89; NT HIT: AJ252942.1, EVALUE 6.70e-01
gtcaggcaaagctcaagggtatcttccagcccatgcactcctgctcatgctgctacactacagactccaagcaatgtgtgtaaactgacagtcac

SEQ ID NO: 21901 - DNA, 199 bp, Homo sapiens
  MAP TO AL109609.5; EXPRESSED IN HEART, SIGNAL = 1.2; EXPRESSED IN BONE MARROW, SIGNAL = 0.96; SWISSPROT HIT: P11532, EVALUE 2.00e-24; NT HIT: L41644.1, EVALUE 1.00e-106; EST_HUMAN HIT: AA053900.1, EVALUE 1.00e-106
cttcgaaactgagcaaatttgctctcaatttcccgccagcgcttgctgagctggatctgagttggctccactgccattgcggccccatcctcagacaagccctcagcttgcctacgcactgcattcagctcctctttcttcttctgcaattcccgatcaatttcctattgagcaaaaccaatacagggcccagggcagt

SEQ ID NO: 21902 - DNA, 164 bp, Homo sapiens
  MAP TO AC008844.2; EXPRESSED IN HEART, SIGNAL = 7.2; NT HIT: AB044397.1, EVALUE 3.80e-01; EST_HUMAN HIT: AA191195.1, EVALUE 3.00e-08; SWISSPROT HIT: P38082, EVALUE 2.90e+00
cagaagcaggagacacagatgggcattttgtagacatgatggatgcggaaacaggatatccaaaaattgctggcaacacagcacactgtcatcatgtgcctgactgggagctgcatttcactgccgctgtccagcacctcaagagagtatcccactgcatatct

SEQ ID NO: 21903 - DNA, 205 bp, Homo sapiens
  MAP TO AC009496.1; EXPRESSED IN HEART, SIGNAL = 0.87; EST_HUMAN HIT: BE744792.1, EVALUE 2.80e+00; NT HIT: Z99124.1, EVALUE 4.10e-01; SWISSPROT HIT: O04773, EVALUE 3.70e+00
taaagcttgaattttattgacctccttctgatgtctatgacatctaatcatctgggtataagaagccagattgttaacagcaagagcagcttaaacgattcttactgaacacacctggacaggtcctttgtgaagcccaaactatgattcggtctctgggctctgttatacatccataaccacttggggaagaaattgaacatgg

SEQ ID NO: 21904 - DNA, 239 bp, Homo sapiens
  MAP TO J03071.1; EXPRESSED IN PLACENTA, SIGNAL = 1.1e+02; EXPRESSED IN HEART, SIGNAL = 1.7; NT HIT: J03756.1, EVALUE 0.00e+00; EST_HUMAN HIT: T29469.1, EVALUE 1.00e-128; SWISSPROT HIT: P01242, EVALUE 6.00e-34
aggctggaagatggcagcccccggactgggcagatcttcaatcagtcctacagcaagtttgacacaaaatcgcacaacgatgacgcactgctcaagaactacgggctgctctactgcttcaggaaggacatggacaaggtcgagacattcctgcgcatcgtgcagtgccgctctgtggagggcagctgtggcttctagctgcccgggtggcatccctgtgacccctccccagtgcctct

SEQ ID NO: 21905 - DNA, 125 bp, Homo sapiens
  MAP TO AC009891.1; EXPRESSED IN HEART, SIGNAL = 1.4; EST_HUMAN HIT: BF515935.1, EVALUE 1.00e-01; SWISSPROT HIT: P52705, EVALUE 6.80e+00
ttatattaaaaacgaagaagtgtacagtgcgtcaggtggtgataaatacaatgaagaaaataagacagagaaattagataggaagtgccaggcgatgggtgatgcttttgatgagtggagtgaac

SEQ ID NO: 21906 - DNA, 306 bp, Homo sapiens
  MAP TO AC010680.3; EXPRESSED IN HEART, SIGNAL = 6.7; EST_HUMAN HIT: F00055.1, EVALUE 0.00e+00; SWISSPROT HIT: P52179, EVALUE 3.00e-14; NT HIT: gi4507720, EVALUE 0.00e+00
caagtatatctttagcttgtacaggttcattcatttctataggttctccttgtccagcacagtttacagcagatacccggaagtagtaattgactccaggtttcaggttggataccacatattctgtagttctgacctctcctttggtagagacagtagtccattcctcttcctctccttgtcttatctcgacaacatacccagtaacagcactgcccccatcatagacaggcttactccagccaagggtgatggatgacttggttgaatctgcgattcttatcttagcaggtggacctggaggat

SEQ ID NO: 21907 - DNA, 119 bp, Homo sapiens
  MAP TO AC011082.1; EXPRESSED IN HEART, SIGNAL = 0.84; NT HIT: AE004345.1, EVALUE 6.60e-02; EST_HUMAN HIT: BE182123.1, EVALUE 2.70e-01
gaaccaagtgactatgctgacagcgatgaaggttattcacgagctcaataaaatggactttccgttgtccaggtcacttgaacctctgtttgaacatgtccataagaaagatcaaccct

SEQ ID NO: 21908 - DNA, 111 bp, Homo sapiens
  MAP TO AC011145.1; EXPRESSED IN HEART, SIGNAL = 1.4; EST_HUMAN HIT: BF108755.1, EVALUE 1.00e-07; NT HIT: AL163246.2, EVALUE 2.00e-05; SWISSPROT HIT: O78483, EVALUE 5.30e+00
tcccattggaagatcttcaagggcaataacaggcatggagttgtcctccatgataacaatgccttcttctggataccccatgaaggacttgacctgcctggggctgtttta

SEQ ID NO: 21909 - DNA, 152 bp, Homo sapiens
  MAP TO AF064858.1; EXPRESSED IN HEART, SIGNAL = 0.97; NT HIT: AL163278.2, EVALUE 1.00e-80; EST_HUMAN HIT: BE697658.1, EVALUE 5.10e-01
ctctccagccccctctgaagccctccccacctcctcttgcttttttccacaaccctcctgaacttctccagccaccgcagctgctgcggctcacctctgggccggcacacacactgttcactctgccgagacacctttccttctccgctcag

SEQ ID NO: 21910 - DNA, 458 bp, Homo sapiens
  MAP TO AJ011929.1; EXPRESSED IN HELA, SIGNAL =   2; EXPRESSED IN HEART, SIGNAL = 1.4; EST_HUMAN HIT: AV705679.1, EVALUE 7.00e-06; NT HIT: AL163285.2, EVALUE 0.00e+00; SWISSPROT HIT: P41060, EVALUE 1.80e-01
aattgttaactgccacaaggagaaaggccaggaaggagtggggcatggtggtgttctagtgttacaagaagaagccagggagggcttcctggatgaagtggcatctgacctgggatctggaggaggagaaaaatgtcccaaaagagcagagagcccaccctaggctctgcaccaggaggcaacttgctgggcttatggaattcagagggcaagtgataagcagaaagtccttgggggccacaattaggatttctgtcttctaaagggcctctgccctctgctgtgtgaccttgggcaagttacttcacctctagtgctttggttgcctcatctgtaaagtggtgaggataatgctatcacactggttgagaattgaagtaattattgctgcaaagggcttataagggtgtctaatactagtactagtaggtacttcatgtgtcttgacaattttaatc

SEQ ID NO: 21911 - DNA, 179 bp, Homo sapiens
  MAP TO AC007312.1; EXPRESSED IN HEART, SIGNAL =   1; NT HIT: AY005150.1, EVALUE 2.00e-03; SWISSPROT HIT: O84250, EVALUE 4.30e-01; EST_HUMAN HIT: R83476.1, EVALUE 4.00e-02
tgacattgagaaagtattttctcagtacagcatctgtgaactggatattttctgtttgccctgcaaacttcccatctgtttccaatctgctccatgccagaagctgaccactgcatccaaggatccctttccctctggcttccagttgagtttggccaatgaaaatcattggcaagaga

SEQ ID NO: 21912 - DNA, 397 bp, Homo sapiens
  MAP TO AC010680.3; EXPRESSED IN HEART, SIGNAL =   4; NT HIT: gi4507720, EVALUE 0.00e+00; EST_HUMAN HIT: Z17829.1, EVALUE 1.00e-06; SWISSPROT HIT: Q90688, EVALUE 1.00e-15
aggaagaccttaggattgttgagcctcttaaagatattgaaacaatggagaagaaatctgtcacattctggtgcaaggtgaatcgtctcaatgtaacactgaagtggaccaaaaatggtgaagaagtgccttttgacaaccgtgtctcatacagagttgataagtacaagcacatgttaaccattaaagactgtggcttcccagatgaaggtgaatacattgtcactgctggacaagataaatctgttgctgagcttctcatcatagaagccccgacagaatttgtggaacacttggaagatcagacagtcactgagttcgatgacgctgtcttctcctgccagctctccagagagaaagccaatgtaaaatggtacagaaatgggagagaaatcaa

SEQ ID NO: 21913 - DNA, 411 bp, Homo sapiens
  MAP TO AC010083.2; EXPRESSED IN HEART, SIGNAL = 0.96; NT HIT: gi11421942, EVALUE 0.00e+00; EST_HUMAN HIT: BE895400.1, EVALUE 0.00e+00; SWISSPROT HIT: Q12934, EVALUE 2.00e-50
gagaaagaagatggacaaccaattgaccagcagcctatagacaaggagattgagccagatggtgcagagctggaaggccctgaagagaaacgtgagggtgaggagcgggacgaagagtccaggagaccctgtgccatggtcacacccggtgcagaggaaccatctatacctgagcctccaaagcctgcggctgatcaggatggagctgaggtgcttgggactaggagcagaagcctgccagaaaaaggccctcccaaggctttggcctataagacagtggaagtggtggaatctatcgagaagatttccacggagagcattcagacatatgaagaaaccgctgtgatcgtggagaccatgattggaaagacaaagtcagacaagaagaaatcaggagagaagagctcttaa

SEQ ID NO: 21914 - DNA, 135 bp, Homo sapiens
  MAP TO AL049553.15; EXPRESSED IN HEART, SIGNAL =   1; EXPRESSED IN HBL100, SIGNAL =   1; EST_HUMAN HIT: AI418520.1, EVALUE 7.80e-02; NT HIT: AE000495.1, EVALUE 4.70e+00
atggcagtcactcagagcactggctgacagagacgctgtgacagagggcaagagagaacgctggaaggtctcgctctcaccaggaattaaatgccacggcctgaaagtgacactttcatggtgctcacaactcat

SEQ ID NO: 21915 - DNA, 115 bp, Homo sapiens
  MAP TO AC012352.1; EXPRESSED IN HEART, SIGNAL = 0.95; NT HIT: AL163301.2, EVALUE 2.00e-07; SWISSPROT HIT: Q08365, EVALUE 4.00e+00; EST_HUMAN HIT: AW273079.1, EVALUE 4.00e-06
ctcttgcctttatatttgaaagaccattttgttggtatcatattcttgattgataatgtattttctttcagcactttgaatatgtcatcacactccactgtggactgcaataatt

SEQ ID NO: 21916 - DNA, 205 bp, Homo sapiens
  MAP TO AL009174.1; EXPRESSED IN HEART, SIGNAL = 2.5; NT HIT: AF126104.1, EVALUE 7.50e+00; EST_HUMAN HIT: AW401836.1, EVALUE 1.20e-01
aaaaaaaaaccaaaaaacaaacaaaaaaaaaaccaccctgaacttctcccaacccttgcagttttcttggtggatcataaagattattgacaatttgaagaagatcaagatgaggttcgatctaaatgtcaagagcatgaggggctgcaataaacataagacctcccactttagtatagaaagatattacctggaagggtcaaga

SEQ ID NO: 21917 - DNA, 184 bp, Homo sapiens
  MAP TO AF064857.1; EXPRESSED IN HEART, SIGNAL = 1.2; NT HIT: AL163281.2, EVALUE 1.00e-99; SWISSPROT HIT: P15265, EVALUE 2.50e-01
gtgatgtacttggtggagagggggctggaggtggctggggcaggagtcaggactgggcacagggaggcagctacatgagttgtgggggcaggggcttacggggctcctgtgggacaggcatagtcacgtgacttggagctggaggcatgtagtcagcaggtcgggctctcccagcaaatcctct

SEQ ID NO: 21918 - DNA, 83 bp, Homo sapiens
  MAP TO AB020869.1; EXPRESSED IN HEART, SIGNAL = 2.2; EST_HUMAN HIT: AI590944.1, EVALUE 6.80e-01
atttgtcattgataagccacctccttccagaaatcacaaattcattctgactgaacccttttttgctttaaatcagaggagcg

SEQ ID NO: 21919 - DNA, 114 bp, Homo sapiens
  MAP TO AC009475.2; EXPRESSED IN HEART, SIGNAL = 1.1; EST_HUMAN HIT: BE895168.1, EVALUE 2.40e-02; SWISSPROT HIT: O60503, EVALUE 5.30e+00; NT HIT: AL163279.2, EVALUE 2.50e-01
gctcatgatcagattcaggtttcgtatctttggcaggaaaatcacagaagtgatgctgtgatctttattgcattcattcacgtgactcatttcatttgccccattactgatggt

SEQ ID NO: 21920 - DNA, 1732 bp, Homo sapiens
  MAP TO AC007114.7; EXPRESSED IN BRAIN, SIGNAL = 2.1; EXPRESSED IN BONE MARROW, SIGNAL = 2.4; EXPRESSED IN LUNG, SIGNAL =   2; EXPRESSED IN PLACENTA, SIGNAL = 1.3; EXPRESSED IN FETAL LIVER, SIGNAL = 2.3; EXPRESSED IN ADULT LIVER, SIGNAL = 1.8; EXPRESSED IN BT474, SIGNAL = 2.5; EXPRESSED IN HEART, SIGNAL = 3.5; EXPRESSED IN HELA, SIGNAL = 3.5; EXPRESSED IN HBL100, SIGNAL = 2.9; EST_HUMAN HIT: AU133388.1, EVALUE 0.00e+00; NT HIT: gi11424399, EVALUE 0.00e+00; SWISSPROT HIT: Q92667, EVALUE 0.00e+00
ctcctgaatgatctgcttccgcatccatggtccatccatcctcagcccccaagtctgacaactcccccttcagcaccccattgctgaagggcacagtactttctggcagtggcggggtgatggccttgtccctggggctcgagctggtctctgtgcaagagtcttcaagccctgaagtgctgaaagaatctgagcagtgtcctggagaagccaccaaagggacactttggctgctgtctgacatgcaggtgacacaggtggcatcttccaccaggatgcctgcccggtccggcaactcttcactgggggtggtcagtgccaggcaggaggccagggagatgtggtgtgcagagatatttggcttactgtccttggtggggctggacagaaggctcttcaggcagctcacgtaggtctttggtggtggtgagccctctgctggtaggcctggcaaggggaggccagcatccggcggggcaacagctgcctctgctgtggcaggctccgcagtgtctgggcccaagacagttttctggtgaactgggacacagctctcttccttctgcccttggagctgactggcctgacacacacgacctgcaaccttgccaaccgtggtggccagcacctgttcggttgcttctgagatcacttgggagattatctggaaggcagcccgcttaatctcctcatttctatccaagccctcctcatttctatccaagctctcctcatttctatccaagccctcctcatttctatccaagccctcctcatttctatccaagctctcctcattgcccagttctccctcgacacctctatcctgggctttggcgtctgcgactgggggtgctggcgccgcatcgtcctttgccagctctgtgtgagccgactcgatgaacctacttggcaacttctctgctacatactcttcctcctgcactggccccaccacctgggatgagctgctcttccccttatcttcttccccctctaaagaggccaggctggggcccttgctgttctccaattccaagacatgctcccgagacaacagagcttcttcaagcaccttttcccccaacacggcatcaccagtcccttcggccccacctgtctctcttgccctctccccagagctacgcttctctgcggggactacggggtagcctggctggaccttccttggcaccctgctgaagggggaatcttgcttacacacctcagctgatttgctggagaatagtacaccctttggggatgaaagggggcactctagaggaatcgatttggcttcaccacctgtcagggctagctccagctttgtactgtcatctctgcgtgttcctggtcgcaatctcatgtctgtggtgttaggaagaatgcccgaggactctgatcttcggcaaggtgggtgtgtctggagcaatgctgggggctctgcaggcagcttgctcacggtggacagttccttttctggaggctctgtgacactggggggtgtggacactactttgggacagacgtcttccacggggagaggttccttgatggcagggtcagccctcagctgcacagcaccagcctccacctgctgctcatcatggctgctgacatggccttttttacgagagaaaaaccaccaccagccgaggagcgccagcatcccaggcaatgccaaggggaagagcgaacggaactggattgccatcctggaggcttgaagtaa

SEQ ID NO: 21921 - DNA, 97 bp, Homo sapiens
  MAP TO AC011291.3; EXPRESSED IN FETAL LIVER, SIGNAL = 1.6; EXPRESSED IN LUNG, SIGNAL = 1.4; EXPRESSED IN BONE MARROW, SIGNAL = 1.6; EXPRESSED IN HELA, SIGNAL = 1.6; EXPRESSED IN HEART, SIGNAL = 1.4; EXPRESSED IN PLACENTA, SIGNAL = 1.5; EXPRESSED IN BT474, SIGNAL = 1.6; EXPRESSED IN ADULT LIVER, SIGNAL = 2.1; EXPRESSED IN BRAIN, SIGNAL = 1.9; EXPRESSED IN HBL100, SIGNAL = 1.5; EST_HUMAN HIT: AA682752.1, EVALUE 6.00e-48; SWISSPROT HIT: P54750, EVALUE 2.00e-11; NT HIT: AB038222.1, EVALUE 6.00e-48
tgtgcagctaactctttccacctctctttgttctgctgaatgatgtccaccaggttgttcttgaaactcttcaggtccactgctgcaagggagtagt

SEQ ID NO: 21922 - DNA, 171 bp, Homo sapiens
  MAP TO AP000247.1; EXPRESSED IN HBL100, SIGNAL = 0.67; EXPRESSED IN HELA, SIGNAL = 0.74; EXPRESSED IN ADULT LIVER, SIGNAL = 0.72; EXPRESSED IN PLACENTA, SIGNAL = 0.7; EXPRESSED IN BONE MARROW, SIGNAL = 0.97; EXPRESSED IN BRAIN, SIGNAL = 1.1; EXPRESSED IN BT474, SIGNAL = 0.75; EXPRESSED IN HEART, SIGNAL = 0.92; EXPRESSED IN LUNG, SIGNAL = 0.85; EXPRESSED IN FETAL LIVER, SIGNAL = 0.65; SWISSPROT HIT: Q13009, EVALUE 1.00e-31; NT HIT: gi4507500, EVALUE 7.00e-92
cttgcaaatcagctccagggtgtcccgtgcagtgtcgcctggccggacgaccgtcagggcaggctgattattgggcagacagaaccaggatggagtgaaatactcgtggacccaaatgtcgcagtcagggttgtgctggtgaacgttaggtaagaccacttctttctccct

SEQ ID NO: 21923 - DNA, 83 bp, Homo sapiens
  MAP TO AL031003.1; EXPRESSED IN LUNG, SIGNAL =   5; EXPRESSED IN HEART, SIGNAL = 3.6; EXPRESSED IN FETAL LIVER, SIGNAL = 3.6; EXPRESSED IN BT474, SIGNAL = 3.8; EXPRESSED IN BONE MARROW, SIGNAL =   4; EXPRESSED IN BRAIN, SIGNAL =   4; EXPRESSED IN PLACENTA, SIGNAL =   4; EXPRESSED IN HELA, SIGNAL = 4.2; EXPRESSED IN HBL100, SIGNAL = 3.4; EXPRESSED IN ADULT LIVER, SIGNAL = 4.7; NT HIT: AB033070.1, EVALUE 9.00e-40
agtggctgcattagcaaagacctggatgttgtcagtattgagaaaagcttcaaatacatcaaacactggagcttggccttttc

SEQ ID NO: 21924 - DNA, 119 bp, Homo sapiens
  MAP TO AC009296.1; EXPRESSED IN HEART, SIGNAL = 1.1; EXPRESSED IN BT474, SIGNAL = 0.93; EXPRESSED IN LUNG, SIGNAL = 1.1; EXPRESSED IN HELA, SIGNAL = 0.86; EXPRESSED IN ADULT LIVER, SIGNAL = 1.3; EXPRESSED IN BRAIN, SIGNAL =   1; EXPRESSED IN PLACENTA, SIGNAL = 0.92; EXPRESSED IN BONE MARROW, SIGNAL =   1; EXPRESSED IN HBL100, SIGNAL = 0.85; EXPRESSED IN FETAL LIVER, SIGNAL = 0.77; SWISSPROT HIT: P16415, EVALUE 9.10e-02; EST_HUMAN HIT: BE701165.1, EVALUE 2.50e-02; NT HIT: AL161495.2, EVALUE 4.10e+00
ttagcaggccctgtgatcaccaggagcatggacaaaagcctccagaagacaaaagtgcaggaaagctcatttctcagagatcagttcagaagtggtccaggttgggggtgggagtctga

SEQ ID NO: 21925 - DNA, 241 bp, Homo sapiens
  MAP TO AL080317.11; EXPRESSED IN ADULT LIVER, SIGNAL =   1; EXPRESSED IN HBL100, SIGNAL =   2; EXPRESSED IN HEART, SIGNAL = 0.85; EST_HUMAN HIT: BF028969.1, EVALUE 4.00e-95; NT HIT: AF179428.1, EVALUE 0.00e+00; SWISSPROT HIT: O60673, EVALUE 3.00e-42
ctctttttggcacaatgttcttcaatattgctgtcccatctctgggacatcaccaaactaagctccatttcctctttttcaatctgtggttcattttcttcatcatcactattttgtggatatttattatttccaaaggagcgacatggtgatggcatcctatttctttccccccgatatccatcactttccaaaccagcaagaagatgtaccagagcctcatcaggactactgtccacta

SEQ ID NO: 21926 - DNA, 156 bp, Homo sapiens
  MAP TO AC005674.9; EXPRESSED IN HELA, SIGNAL =   1; EXPRESSED IN HEART, SIGNAL = 0.94; EXPRESSED IN PLACENTA, SIGNAL = 1.2; EXPRESSED IN BT474, SIGNAL = 0.75; EXPRESSED IN FETAL LIVER, SIGNAL =   1; EXPRESSED IN LUNG, SIGNAL = 0.98; EXPRESSED IN BRAIN, SIGNAL = 1.1; EXPRESSED IN BONE MARROW, SIGNAL = 1.2; EXPRESSED IN HBL100, SIGNAL = 0.82; EXPRESSED IN ADULT LIVER, SIGNAL = 1.1; SWISSPROT HIT: Q56229, EVALUE 1.70e+00; EST_HUMAN HIT: AW450800.1, EVALUE 3.40e-02
agggctgtgatctgctgcccctgcttccagggcagagtccacacctggtcgttgtctgtgggcaagagcattacccagaccacctggatctgtaacacagtgctgggctcagggcccaacaacaggagaacaatgctggggacggggtgggagaga

SEQ ID NO: 21927 - DNA, 580 bp, Homo sapiens
  MAP TO AC004554.1; EXPRESSED IN BT474, SIGNAL = 1.7; EXPRESSED IN FETAL LIVER, SIGNAL = 2.1; EXPRESSED IN ADULT LIVER, SIGNAL = 1.4; EXPRESSED IN LUNG, SIGNAL =   4; EXPRESSED IN BONE MARROW, SIGNAL = 1.8; EXPRESSED IN BRAIN, SIGNAL = 1.6; EXPRESSED IN HELA, SIGNAL = 2.1; EXPRESSED IN PLACENTA, SIGNAL =   3; EXPRESSED IN HBL100, SIGNAL = 1.2; EXPRESSED IN HEART, SIGNAL = 1.9; EST_HUMAN HIT: Z44073.1, EVALUE 3.00e-82; SWISSPROT HIT: P53671, EVALUE 3.00e-70; NT HIT: gi11417990, EVALUE 0.00e+00
gttctcctcatcacatcgcattaattccttcatgaccaacactttgcctgtggctttgtgtgtcactttgatagcctgcccaaagaagcccttccccaggacctccccgtggatcaggtcacaggaccggaagttctgctttgagtaagtgctggaacaacaaagggattcccagcagctgatgtcacggctgagcagcaggggctcctttggagagctagggctaggggacttggagatgctgttactgagtcttagggagcatcttctcagtgtcccctccagattatccttggtgtccagggtgctgagggcgtgagggtgtccagcattctgtgtgtggggagagagccaggcatccagccgcagctgggctggggaccgggagacagggtcatgttcaatcaacagcagaagtgtctggctcatctggctaattgcatcctccaactcctctacttggagtgtgtgggtgggggttccactgatctccaggatgtggtccctggggtggatggcattgcagctgttgggactgatgtgcatctggttgacctcttttacttgcacggtggtaaca

SEQ ID NO: 21928 - DNA, 1448 bp, Homo sapiens
  MAP TO AC000378.1; EXPRESSED IN HELA, SIGNAL = 4.4; EXPRESSED IN PLACENTA, SIGNAL = 3.2; EXPRESSED IN HBL100, SIGNAL = 3.2; EXPRESSED IN HEART, SIGNAL = 3.1; EXPRESSED IN ADULT LIVER, SIGNAL = 3.7; EXPRESSED IN BT474, SIGNAL = 2.7; EXPRESSED IN BONE MARROW, SIGNAL = 2.3; EXPRESSED IN BRAIN, SIGNAL = 2.6; EXPRESSED IN FETAL LIVER, SIGNAL = 2.9; EXPRESSED IN LUNG, SIGNAL = 3.7; NT HIT: gi11436111, EVALUE 0.00e+00; EST_HUMAN HIT: AL042967.1, EVALUE 0.00e+00; SWISSPROT HIT: O14628, EVALUE 0.00e+00
ctatgtcttctcattttacccaagaccttctgccagagcagggcatacaagatgcattcccaaaaagaatactgagaggatatggaaattgtggccttgataatttatatttaaggaaagactgggaaagtttagatgagtgtaagttgcaaaaagattataatggacttaaccaatgttcatcaactacccatagcaaaatctttcaatataataaatatgttaaaatctttgataacttttcaaatttacatagacgtaatataagtaatactggagagaaacctttcaaatgtcaagaatgtggcaaatcctttcaaatgctctcattcctaactgaacatcagaaaattcacactggaaaaaaattccaaaaatgtggagaatgtggcaaaacctttatccagtgctcacactttactgaacctgagaacattgacactggagagaaaccttacaagtgtcaagaatgtaacaacgtcattaaaacttgctcagtccttactaaaaatagaatttatgccggaggggaacattacagatgtgaagaatttggcaaagtatttaaccagtgctcccaccttactgaacatgagcatggtactgaggaaaaaccctgcaaatatgaagagtgcagcagtgtctttatctcttgctcaagcctttctaatcaacagatgattcttgctggagagaagctctccaaatgtgaaacatggtacaaaggttttaaccacagcccaaatccttccaaacaccagagaaatgagattggagggaaacctttcaaatgtgaggaatgtgacagcatcttcaagtggttctcagaccttactaaacataagagaattcacactggtgagaaaccatacaaatgtgacgaatgtgggaaagcctatacacagtcctcacacctcagtgaacacaggaggattcacaccggagagaaaccctaccaatgtgaagaatgtgggaaggtcttcagaacttgctcaagcctttctaaccataagagaactcattctgaagaaaaaccctacacgtgtgaagaatgtggcaacatctttaagcagttatcagacctcactaagcataagaaaacccatactggagagaagccctacaaatgtgacgaatgtggaaaaaactttacccagtcctccaaccttattgtacataagagaattcatactggagagaaaccctacaagtgtgaagaatgtggcagagtcttcatgtggttctcagacattaccaaacataagaaaacccatactggagagaaaccctacaaatgtgacgaatgtggaaaaaactttacccagtcctcaaaccttattgtacataagagaattcatactggagagaaaccctacaagtgtgaaaagtgtggcaaagccttcacccagttctcacacctgactgtacatgaaagcattcatacttga

SEQ ID NO: 21929 - DNA, 148 bp, Homo sapiens
  MAP TO AC011092.1; EXPRESSED IN HEART, SIGNAL = 3.2; EXPRESSED IN FETAL LIVER, SIGNAL = 0.94; SWISSPROT HIT: P36166, EVALUE 5.10e+00; EST_HUMAN HIT: BE884017.1, EVALUE 1.30e-01
atagggacactgatgaaaagggtggtaagatacagagcaaaactacaagcaaaattcaacaagagacaggagggaagcaagagggtagaatttctgtgcaagaaattaagaattccatgaagaggcagggtatggaccttagggaagg

SEQ ID NO: 21930 - DNA, 303 bp, Homo sapiens
  MAP TO AC007095.2; EXPRESSED IN LUNG, SIGNAL =  32; EXPRESSED IN BONE MARROW, SIGNAL =  28; EXPRESSED IN HELA, SIGNAL =  27; EXPRESSED IN PLACENTA, SIGNAL =  30; EXPRESSED IN BT474, SIGNAL =  33; EXPRESSED IN BRAIN, SIGNAL =  15; EXPRESSED IN HEART, SIGNAL =  12; EXPRESSED IN HBL100, SIGNAL =  39; EXPRESSED IN ADULT LIVER, SIGNAL =   7; EXPRESSED IN FETAL LIVER, SIGNAL =  28; NT HIT: D00522.1, EVALUE 2.00e-68; SWISSPROT HIT: Q90835, EVALUE 6.00e-40; EST_HUMAN HIT: BF690913.1, EVALUE 4.00e-62
tcaactcagcaaaactgcaagcaatgtgaactgtgtgacaatccagaatagcggcatagccaccattgatttggtctggatggtggaggataataacctgaccagtgaagctagttgctcccactgatgggtcatttttgctgtcaccagcaacgttgccatgacagacatttttgacagatatgttcttggcgttgagtcccacattgtccccaggaagagcttcactcgaagcttcatgatgcatttcaacagactttacttcagttgtaacgtcgactggagcaaaggtgagcactgtgc

SEQ ID NO: 21931 - DNA, 182 bp, Homo sapiens
  MAP TO AC007450.1; EXPRESSED IN HELA, SIGNAL = 9.2; EXPRESSED IN ADULT LIVER, SIGNAL =  11; EXPRESSED IN BT474, SIGNAL = 6.6; EXPRESSED IN BRAIN, SIGNAL = 7.2; EXPRESSED IN LUNG, SIGNAL = 9.6; EXPRESSED IN BONE MARROW, SIGNAL = 5.9; EXPRESSED IN PLACENTA, SIGNAL = 8.5; EXPRESSED IN HEART, SIGNAL = 8.9; EXPRESSED IN HBL100, SIGNAL = 7.9; EXPRESSED IN FETAL LIVER, SIGNAL =  10; NT HIT: AF199485.1, EVALUE 3.60e-01; EST_HUMAN HIT: AW014885.1, EVALUE 1.70e+00
ttctagaaaatgtagcatgcttcccaaagacagagtttctgacaactaagggttggcagtggaagggaatatcccacagaggtgctgaagtcagtttgcaaagagtttcgaaatattcagcaggaaacttaactggtaaaagaaaaggattattcagggagcacccagcatgccactcattc

SEQ ID NO: 21932 - DNA, 99 bp, Homo sapiens
  MAP TO AL035704.9; EXPRESSED IN BT474, SIGNAL = 8.3; EXPRESSED IN HBL100, SIGNAL = 6.6; EXPRESSED IN FETAL LIVER, SIGNAL = 6.3; EXPRESSED IN ADULT LIVER, SIGNAL = 8.2; EXPRESSED IN BONE MARROW, SIGNAL =   7; EXPRESSED IN LUNG, SIGNAL =  11; EXPRESSED IN BRAIN, SIGNAL = 5.8; EXPRESSED IN HELA, SIGNAL = 7.3; EXPRESSED IN PLACENTA, SIGNAL = 8.2; EXPRESSED IN HEART, SIGNAL = 6.3; EST_HUMAN HIT: BE073468.1, EVALUE 5.40e-02; SWISSPROT HIT: Q99814, EVALUE 2.40e+00; NT HIT: AJ271885.2, EVALUE 8.30e-01
cttgaaggggttctgtgtctgcaaggatgagtgggccattgagaagaaaatgtacctgcaggccccgtgagtggacatgacagggaacaggaaggtggc

SEQ ID NO: 21933 - DNA, 189 bp, Homo sapiens
  MAP TO AL033375.2; EXPRESSED IN HELA, SIGNAL = 5.3; EXPRESSED IN FETAL LIVER, SIGNAL =   4; EXPRESSED IN ADULT LIVER, SIGNAL = 4.1; EXPRESSED IN BT474, SIGNAL = 4.1; EXPRESSED IN LUNG, SIGNAL = 5.1; EXPRESSED IN BRAIN, SIGNAL = 4.3; EXPRESSED IN PLACENTA, SIGNAL = 4.7; EXPRESSED IN HEART, SIGNAL =   4; EXPRESSED IN HBL100, SIGNAL = 5.4; EXPRESSED IN BONE MARROW, SIGNAL = 4.1; NT HIT: M76607.1, EVALUE 1.50e+00; SWISSPROT HIT: P10878, EVALUE 8.60e+00; EST_HUMAN HIT: AA236257.1, EVALUE 6.60e-01
gcttcccgggggagtcacaggctttagagccatgttcagtgcttttggcatgaacctgggccccgttggtgtctacatcagtagattcagaggctggcattgttgtacagtgtggaataatgagaatgtggaggctgacagggtgattatggttttgagagttagtgagacaaaccctggaactgagga

SEQ ID NO: 21934 - DNA, 482 bp, Homo sapiens; identical to SEQ ID NO: 4852
  MAP TO AL050325.20; EXPRESSED IN HEART, SIGNAL = 1.1; SWISSPROT HIT: P15368, EVALUE 1.10e-01; EST_HUMAN HIT: AA341104.1, EVALUE 1.00e-04; NT HIT: U67464.1, EVALUE 2.60e-01

SEQ ID NO: 21935 - DNA, 163 bp, Homo sapiens
  MAP TO AL109823.6; EXPRESSED IN HEART, SIGNAL = 1.2; SWISSPROT HIT: P41679, EVALUE 5.20e+00; NT HIT: M32352.1, EVALUE 3.20e-01; EST_HUMAN HIT: AV688206.1, EVALUE 2.20e+00
tgatatttataaccaacagcaacaggggcattctggtccagaaagttatactgggatgaggcattcagaacaaacggattctctggatgagtagacaaaaccacccagagctcagagtgactgaataaacatgaataaacataagcatgagcaaacagttctt

SEQ ID NO: 21936 - DNA, 98 bp, Homo sapiens
  MAP TO AC007282.2; EXPRESSED IN LUNG, SIGNAL = 3.1; EXPRESSED IN FETAL LIVER, SIGNAL = 2.2; EXPRESSED IN PLACENTA, SIGNAL = 0.66; EXPRESSED IN BRAIN, SIGNAL = 4.3; EXPRESSED IN HEART, SIGNAL = 2.5; EXPRESSED IN ADULT LIVER, SIGNAL = 1.1; EXPRESSED IN HBL100, SIGNAL = 1.1; EXPRESSED IN BONE MARROW, SIGNAL = 2.4; EXPRESSED IN HELA, SIGNAL = 2.7; SWISSPROT HIT: P25498, EVALUE 5.30e+00; EST_HUMAN HIT: AA465007.1, EVALUE 2.00e-48; NT HIT: gi11429897, EVALUE 1.00e-39
attgcagttttccagatttgtaatttttatagttaccagtgttcctgtgggagtatgccgtgcaagatggacagaagtcaagttgtcaaatcctcttc

SEQ ID NO: 21937 - DNA, 154 bp, Homo sapiens
  MAP TO AL023553.5; EXPRESSED IN BRAIN, SIGNAL = 4.7; EXPRESSED IN PLACENTA, SIGNAL = 6.2; EXPRESSED IN HELA, SIGNAL = 3.5; EXPRESSED IN HEART, SIGNAL =   9; EXPRESSED IN LUNG, SIGNAL = 3.6; EXPRESSED IN BONE MARROW, SIGNAL = 3.3; EXPRESSED IN FETAL LIVER, SIGNAL = 3.9; EXPRESSED IN ADULT LIVER, SIGNAL = 2.6; NT HIT: U87928.1, EVALUE 1.00e-81; EST_HUMAN HIT: AW294651.1, EVALUE 1.00e-81; SWISSPROT HIT: Q99798, EVALUE 1.00e-20
atgcaggatgcgacggcccagatggccatgctccagttcatcagcagcgggctgtccaaggtggctgtgccatccaccatccactgtgaccatctgattgaagcccaggttgggggcgagaaagacctgcgccgggccaaggtgagcagaaggt

SEQ ID NO: 21938 - DNA, 151 bp, Homo sapiens
  MAP TO AL023553.5; EXPRESSED IN BONE MARROW, SIGNAL = 2.1; EXPRESSED IN HEART, SIGNAL = 9.1; EXPRESSED IN LUNG, SIGNAL = 2.5; EXPRESSED IN FETAL LIVER, SIGNAL = 2.4; EXPRESSED IN ADULT LIVER, SIGNAL =   2; EXPRESSED IN HELA, SIGNAL = 2.1; EXPRESSED IN PLACENTA, SIGNAL = 1.8; EXPRESSED IN BRAIN, SIGNAL = 2.1; SWISSPROT HIT: P06888, EVALUE 2.30e+00; NT HIT: U87930.1, EVALUE 2.00e-27; EST_HUMAN HIT: Z41314.1, EVALUE 3.00e-76
gcgacgtggcccctaccctgtgctgggcctgatgggtctccagttgggagtagaagcggtgaatggccttcacttgagaatctgtctgttccatttggggacttgggatagacagaggtagaaggaaaattggagacagcattagagattg

SEQ ID NO: 21939 - DNA, 158 bp, Homo sapiens
  MAP TO AL023553.5; EXPRESSED IN HELA, SIGNAL = 3.2; EXPRESSED IN PLACENTA, SIGNAL = 2.2; EXPRESSED IN BRAIN, SIGNAL = 3.3; EXPRESSED IN LUNG, SIGNAL = 1.9; EXPRESSED IN BONE MARROW, SIGNAL = 1.9; EXPRESSED IN HEART, SIGNAL = 6.2; EXPRESSED IN FETAL LIVER, SIGNAL = 2.8; EXPRESSED IN ADULT LIVER, SIGNAL = 1.8; NT HIT: U87934.1, EVALUE 2.00e-67; EST_HUMAN HIT: AL042863.2, EVALUE 6.00e-84; SWISSPROT HIT: P23792, EVALUE 7.80e-01
atatccccctgcccatctcccccaccccatgctgagtaatgcctccaggcggcacaagcccagaggcctgttgggccggggctggggcaggtcccagtggctgccctggggttccagtacagcacttcgtcctgcagccaccacatcaccccttccca

SEQ ID NO: 21940 - DNA, 364 bp, Homo sapiens
  MAP TO AL023553.5; EXPRESSED IN ADULT LIVER, SIGNAL = 3.4; EXPRESSED IN PLACENTA, SIGNAL = 2.4; EXPRESSED IN LUNG, SIGNAL = 3.4; EXPRESSED IN BONE MARROW, SIGNAL = 3.2; EXPRESSED IN HEART, SIGNAL =  16; EXPRESSED IN FETAL LIVER, SIGNAL = 3.5; EXPRESSED IN BRAIN, SIGNAL = 3.4; EXPRESSED IN HELA, SIGNAL = 3.1; NT HIT: AF093093.1, EVALUE 0.00e+00; EST_HUMAN HIT: BE617952.1, EVALUE 0.00e+00; SWISSPROT HIT: Q99798, EVALUE 2.00e-33
aagacttgcctgcctctcacccctctgtcacccctcctgggccccggggcctgctgcctgcctctggagggcttgtcatccacccctccagggccatgccctgacctctgtcctctctacttaccacccaaggtcaaagggaagtgtaccactgaccacatctcagctgctggcccctggctcaagttccgtgggcacttggataacatctccaacaacctgctcattggtgccatcaacattgaaaacggcaaggccaactccgtgcgcaatgccgtcactcaggagtttggccccgtccctgacactgcccgctactacaaggtgggtcagagttgataggggcaatgccagtggtcactcc

SEQ ID NO: 21941 - DNA, 133 bp, Homo sapiens
  MAP TO AL023553.5; EXPRESSED IN PLACENTA, SIGNAL = 1.4; EXPRESSED IN HEART, SIGNAL = 5.9; EXPRESSED IN LUNG, SIGNAL = 1.8; EXPRESSED IN FETAL LIVER, SIGNAL = 1.4; EXPRESSED IN ADULT LIVER, SIGNAL = 1.9; EXPRESSED IN BRAIN, SIGNAL = 3.6; EXPRESSED IN HELA, SIGNAL = 2.2; EXPRESSED IN BONE MARROW, SIGNAL = 1.8; NT HIT: gi11418185, EVALUE 3.00e-69; EST_HUMAN HIT: BF347445.1, EVALUE 4.00e-69; SWISSPROT HIT: Q99798, EVALUE 9.00e-21
aaacatggcatcaggtgggtggtgatcggagacgagaactacggcgagggctcgagccgggagcatgcagctctggagcctcgccaccttgggggccgggccatcatcaccaagagctttgccaggatccacg

SEQ ID NO: 21942 - DNA, 122 bp, Homo sapiens
  MAP TO AL023553.5; EXPRESSED IN HEART, SIGNAL = 6.5; EXPRESSED IN LUNG, SIGNAL = 2.8; EXPRESSED IN BONE MARROW, SIGNAL = 2.2; EXPRESSED IN ADULT LIVER, SIGNAL = 4.2; EXPRESSED IN FETAL LIVER, SIGNAL = 3.9; EXPRESSED IN BRAIN, SIGNAL =   3; EXPRESSED IN PLACENTA, SIGNAL = 4.7; EXPRESSED IN HELA, SIGNAL = 2.9; NT HIT: gi11418185, EVALUE 9.00e-63; EST_HUMAN HIT: BF026635.1, EVALUE 1.00e-62; SWISSPROT HIT: Q99798, EVALUE 4.00e-18
agaccaacctgaagaaacagggcctgctgcctctgaccttcgctgacccggctgactacaacaagattcaccctgtggacaagctgaccattcagggcctgaaggacttcacccctggcaag

SEQ ID NO: 21943 - DNA, 441 bp, Homo sapiens
  MAP TO AC006548.19; EXPRESSED IN LUNG, SIGNAL =   1; EXPRESSED IN PLACENTA, SIGNAL = 0.94; EXPRESSED IN BT474, SIGNAL = 1.3; EXPRESSED IN HBL100, SIGNAL = 0.69; EXPRESSED IN BRAIN, SIGNAL = 1.7; EXPRESSED IN HELA, SIGNAL =   1; EXPRESSED IN FETAL LIVER, SIGNAL = 0.63; EXPRESSED IN HEART, SIGNAL = 1.6; EST_HUMAN HIT: AW367811.1, EVALUE 0.00e+00; SWISSPROT HIT: P52745, EVALUE 5.00e-04; NT HIT: gi8922593, EVALUE 0.00e+00
atgaagaaacacccctgccgccagtgtgacaagcctttcagctcatcccacagactgtgctggcacaaccggatcaagcacaaaggcatcaggaaagtgtatgcctgctcacactgcccagactccacaggtacttttaccaaagggttgatgctggagaagcatgtccagctgatgcatggcatcaaggaccttgacctgaaagaaatgacagacgccaccaatgaggaggaaacagaaataaaagtagacgtcaaggtccgcagtcccaagtggaagttgaaagaaccggttctggagtacaggcctcccagaggagcaataactcaaccactgaaaaagctgaaaatcaatgtttttaaggttcacaagtgtgccttgtgttgcttcaccaccgaaaacctgctgcagttccacgaacacatccctcagcacaaatag

SEQ ID NO: 21944 - DNA, 165 bp, Homo sapiens
  MAP TO AB016897.1; EXPRESSED IN ADULT LIVER, SIGNAL = 4.4; EXPRESSED IN HELA, SIGNAL = 3.6; EXPRESSED IN BRAIN, SIGNAL =   3; EXPRESSED IN HEART, SIGNAL = 2.4; EXPRESSED IN BONE MARROW, SIGNAL = 3.5; EXPRESSED IN PLACENTA, SIGNAL = 0.75; EXPRESSED IN BT474, SIGNAL = 0.64; EXPRESSED IN LUNG, SIGNAL = 0.8; EXPRESSED IN FETAL LIVER, SIGNAL = 0.73; SWISSPROT HIT: P55196, EVALUE 9.00e-17; NT HIT: AB011399.1, EVALUE 4.00e-32; EST_HUMAN HIT: AA863311.1, EVALUE 5.00e-32
aaggctcaaagtaatggacctgaaaagcaggaaaaagaaggggttatccagaacttcaagagaactctctcaaagaaagaaaagaaggaaaaaaagaagagagaaaaagaggcattgcgacaggcatctgataaagatgatagacctttccaaggggaggatgtg

SEQ ID NO: 21945 - DNA, 210 bp, Homo sapiens
  MAP TO AC007687.16; EXPRESSED IN LUNG, SIGNAL = 1.9; EXPRESSED IN ADULT LIVER, SIGNAL = 1.8; EXPRESSED IN BRAIN, SIGNAL = 3.1; EXPRESSED IN PLACENTA, SIGNAL = 1.6; EXPRESSED IN HELA, SIGNAL = 2.9; EXPRESSED IN HEART, SIGNAL = 1.9; EXPRESSED IN BONE MARROW, SIGNAL = 2.6; EXPRESSED IN FETAL LIVER, SIGNAL = 1.1; EST_HUMAN HIT: BE550614.1, EVALUE 2.00e-84; NT HIT: gi4507848, EVALUE 1.00e-84; SWISSPROT HIT: Q92995, EVALUE 8.00e-15
gtgcctgaatagcctgatttcgctgaaatcccatggaggtgatgatagctacgatttcctctggaggttggttatccagtccagaagcaccaaaaacagaggctccagcagaagctgcccctccataaccaggcatggtcagcggctcagcaaaatctgagaaaaataaccacacccaagtcttttcctttttttttttttttttttgtc

SEQ ID NO: 21946 - DNA, 720 bp, Homo sapiens
  MAP TO Z86090.10; EXPRESSED IN BT474, SIGNAL = 0.67; EXPRESSED IN FETAL LIVER, SIGNAL =   1; EXPRESSED IN LUNG, SIGNAL = 0.78; EXPRESSED IN HELA, SIGNAL = 0.74; EXPRESSED IN ADULT LIVER, SIGNAL = 1.3; EXPRESSED IN BRAIN, SIGNAL = 1.2; EXPRESSED IN PLACENTA, SIGNAL = 0.72; EXPRESSED IN HEART, SIGNAL = 3.2; EXPRESSED IN BONE MARROW, SIGNAL = 3.1; SWISSPROT HIT: Q99705, EVALUE 0.00e+00; NT HIT: gi11418166, EVALUE 0.00e+00; EST_HUMAN HIT: BE701073.1, EVALUE 0.00e+00
atgtgcaccctcatcacggccatggatgccaatagtcagttcaccagcacctacatcctgaccgccatggccattgaccgctacctggccactgtccaccccatctcttccacgaagttccggaagccctctgtggccaccctggtgatctgcctcctgtgggccctctccttcatcagcatcacccctgtgtggctgtatgccagactcatccccttcccaggaggtgcagtgggctgcggcatacgcctgcccaacccagacactgacctctactggttcaccctgtaccagtttttcctggcctttgccctgccttttgtggtcatcacagccgcatacgtgaggatcctgcagcgcatgacgtcctcagtggcccccgcctcccagcgcagcatccggctgcggacaaagagggtgacccgcacagccatcgccatctgtctggtcttctttgtgtgctgggcaccctactatgtgctacagctgacccagttgtccatcagccgcccgaccctcacctttgtctacttatacaatgcggccatcagcttgggctatgccaacagctgcctcaacccctttgtgtacatcgtgctctgtgagacgttccgcaaacgcttggtcctgtcggtgaagcctgcagcccaggggcagcttcgcgctgtcagcaacgctcagacggctgacgaggagaggacagaaagcaaaggcacctga

SEQ ID NO: 21947 - DNA, 101 bp, Homo sapiens
  MAP TO Z86090.10; EXPRESSED IN BRAIN, SIGNAL = 3.9; EXPRESSED IN BONE MARROW, SIGNAL =  23; EXPRESSED IN PLACENTA, SIGNAL = 1.9; EXPRESSED IN HELA, SIGNAL = 3.2; EXPRESSED IN HEART, SIGNAL = 2.6; EXPRESSED IN FETAL LIVER, SIGNAL = 1.7; EXPRESSED IN ADULT LIVER, SIGNAL = 3.9; EXPRESSED IN LUNG, SIGNAL = 0.72; NT HIT: AE002245.2, EVALUE 3.40e+00; EST_HUMAN HIT: AW361098.1, EVALUE 2.20e-01
agacccatctgccatcttcactggccaaactgaagaatgaaggggaaattgataaaatcaccaccccagaatttttcaaggccgtgatgatattattaatc

SEQ ID NO: 21948 - DNA, 357 bp, Homo sapiens
  MAP TO AL022319.2; EXPRESSED IN HELA, SIGNAL = 3.2; EXPRESSED IN BONE MARROW, SIGNAL = 6.2; EXPRESSED IN LUNG, SIGNAL = 0.65; EXPRESSED IN ADULT LIVER, SIGNAL = 0.7; EXPRESSED IN BRAIN, SIGNAL = 0.8; EXPRESSED IN HEART, SIGNAL = 2.5; EXPRESSED IN FETAL LIVER, SIGNAL = 0.59; EXPRESSED IN PLACENTA, SIGNAL = 0.71; EST_HUMAN HIT: BF513282.1, EVALUE 7.00e-27; NT HIT: AF211189.1, EVALUE 5.00e-85; SWISSPROT HIT: Q9Z0Y8, EVALUE 1.00e-08
ataatgcatccccctccccctccctgtttctctaaccttgctctcactctttcgtctctgggacctctgctccctgtctgaccatccctccaccttttcccctcccaggtatgcggatcctggtgaacctgctcctggacacactgcccatgctggggaatgtcctgctgctctgcttctttgtcttcttcatctttggcatcataggtgtgcagctctgggcgggcctgctgcgtaaccgctgcttcctggaggagaacttcaccatgtgagttcatcccctgccacccatgcagctccggggactcttactaagacacagttttaaccttctgggtcattgggaatcaggaccaa

SEQ ID NO: 21949 - DNA, 611 bp, Homo sapiens
  MAP TO AC007262.4; EXPRESSED IN HBL100, SIGNAL = 0.68; EXPRESSED IN LUNG, SIGNAL = 8.1; EXPRESSED IN BRAIN, SIGNAL = 0.69; EXPRESSED IN PLACENTA, SIGNAL =  11; EXPRESSED IN BONE MARROW, SIGNAL =   9; EXPRESSED IN HEART, SIGNAL =   5; EXPRESSED IN HELA, SIGNAL = 0.63; EXPRESSED IN BT474, SIGNAL =  15; EXPRESSED IN ADULT LIVER, SIGNAL =  14; EXPRESSED IN FETAL LIVER, SIGNAL =  12; NT HIT: Y19213.1, EVALUE 2.10e-02; SWISSPROT HIT: P40264, EVALUE 7.90e-01; EST_HUMAN HIT: BE762670.1, EVALUE 2.30e+00
agacaagaggccaggccaaagcggaaaagagtctgctatacaagctaaagctggagaagagagggaggctacgggtgtggttaggcctgtagccaatacctgggccaaagcaaaagacaagccagggtctctgacagatgcagtggcagagatgaaggcagtgtctaagaacaaggtcggtgctgagatgaaggaaggagcccctgtcagagcctaaggctctgggcaaagccactggagatttcagtcccgaggctgggaatgagtccaccagctccacatgtaaaaatggggctggtattgatgcctgggtctgggctgaggaagaggccactatcaattcctggttctgaaatggagaagaggctggtaatcattccggtgctaagaatgataaacctgaaattggtgcccaggtctgtgctgaggagttggagcctgtgactggggccagttgcaaacctaggtctggggctgaggaagaggaggaagagaatgtcattgggaactggttttgggaaggagatgatgctagttttgaccctaatcctcaatctgtgagtaggatagttagatctcagcctgtggatgaaattaatggaaaaaaaaaa

SEQ ID NO: 21950 - DNA, 151 bp, Homo sapiens
  MAP TO AL035701.13; EXPRESSED IN BONE MARROW, SIGNAL = 3.2; EXPRESSED IN LUNG, SIGNAL = 0.69; EXPRESSED IN HEART, SIGNAL = 2.6; EXPRESSED IN FETAL LIVER, SIGNAL = 5.6; EXPRESSED IN ADULT LIVER, SIGNAL = 4.7; EXPRESSED IN PLACENTA, SIGNAL = 4.3; EXPRESSED IN HELA, SIGNAL =   3; EXPRESSED IN BRAIN, SIGNAL = 2.2; NT HIT: gi11418447, EVALUE 2.00e-79; EST_HUMAN HIT: AW270089.1, EVALUE 2.00e-55; SWISSPROT HIT: P22413, EVALUE 5.20e-02
gcacaattgtccagccttcatcggcaaccaaaataatgggctgaattcgatcattatgttggtaataaaatctgttaggaatgtcttctttgagataaacattcatatgagggctacagtttttcagtttgttataaacctctgttctatc

SEQ ID NO: 21951 - DNA, 149 bp, Homo sapiens
  MAP TO Z98884.11; EXPRESSED IN HEART, SIGNAL = 1.4; EXPRESSED IN LUNG, SIGNAL = 1.2; EXPRESSED IN FETAL LIVER, SIGNAL = 1.3; EXPRESSED IN BT474, SIGNAL = 0.67; EXPRESSED IN BONE MARROW, SIGNAL = 0.66; EXPRESSED IN BRAIN, SIGNAL = 1.8; NT HIT: gi8567387, EVALUE 8.00e-79; SWISSPROT HIT: P56645, EVALUE 8.00e-24; EST_HUMAN HIT: BE843827.1, EVALUE 5.00e-78
tggaggtgaagacagaaagcaagagaagtgtcactccccattccggatcatcccctatctgattcatgtacatcaccctgcccagccagaattggaatcggaaccttgctgtctcactgtggttgaaaagattcactctggttatgaag

SEQ ID NO: 21952 - DNA, 230 bp, Homo sapiens
  MAP TO AC007363.3; EXPRESSED IN PLACENTA, SIGNAL = 6.5; EXPRESSED IN HEART, SIGNAL = 4.4; EXPRESSED IN LUNG, SIGNAL = 3.9; EXPRESSED IN BONE MARROW, SIGNAL = 7.8; EXPRESSED IN ADULT LIVER, SIGNAL = 6.5; EXPRESSED IN BRAIN, SIGNAL = 0.81; EXPRESSED IN FETAL LIVER, SIGNAL = 6.8; EXPRESSED IN HELA, SIGNAL = 0.61; SWISSPROT HIT: O42163, EVALUE 7.00e-13; EST_HUMAN HIT: BE743922.1, EVALUE 1.00e-126; NT HIT: M15892.1, EVALUE 5.50e-01
cttgtttgcaaagttgggctccaccacatactgcttctcattttcagcagcaccttcaatggtgatgaagaaaatgttgattcctgactctctcgcaagtcttgaagcctcctccactttgtccgtgggccagccatccaccatcaccaccaccacattgggagccccgcttctgtttccattggctttggaaaagaagttcttggtcacaaaggagatggcccgacctg

SEQ ID NO: 21953 - DNA, 199 bp, Homo sapiens
  MAP TO AL049872.3; EXPRESSED IN BRAIN, SIGNAL =   2; EXPRESSED IN ADULT LIVER, SIGNAL = 2.1; EXPRESSED IN HEART, SIGNAL = 2.8; EXPRESSED IN HELA, SIGNAL = 1.1; EXPRESSED IN PLACENTA, SIGNAL = 2.7; EXPRESSED IN LUNG, SIGNAL =   5; EXPRESSED IN FETAL LIVER, SIGNAL = 2.1; EXPRESSED IN BONE MARROW, SIGNAL = 1.6; EXPRESSED IN HBL100, SIGNAL = 0.72; EXPRESSED IN BT474, SIGNAL = 1.2; NT HIT: gi11434816, EVALUE 1.00e-108; SWISSPROT HIT: P42638, EVALUE 2.00e-03; EST_HUMAN HIT: H46192.1, EVALUE 2.80e+00
agaatatttatccaattcctcctgcagctttgaacttctttctttaagcttttcaataaaaatttctttcttgtttataagttgtgtcaactgcttctgctcttctaaactagatgacaaaacgtccttagtttctttatggtcagtatccatttgttcaatattctttttgagttctgctatttccatgtctttcttt

SEQ ID NO: 21954 - DNA, 144 bp, Homo sapiens
  MAP TO AC007564.9; EXPRESSED IN ADULT LIVER, SIGNAL = 2.2; EXPRESSED IN BONE MARROW, SIGNAL = 0.7; EXPRESSED IN HBL100, SIGNAL = 1.2; EXPRESSED IN FETAL LIVER, SIGNAL = 0.57; EXPRESSED IN PLACENTA, SIGNAL =   2; EXPRESSED IN HELA, SIGNAL = 2.4; EXPRESSED IN BRAIN, SIGNAL = 1.6; EXPRESSED IN LUNG, SIGNAL = 2.2; EXPRESSED IN HEART, SIGNAL = 1.9; NT HIT: gi6679031, EVALUE 2.00e-08; EST_HUMAN HIT: BE894192.1, EVALUE 1.00e-75; SWISSPROT HIT: P33215, EVALUE 5.00e-13
ttgtggtagaactgtggcaatggacgtggcaggtgcttctctgacaattccggaattctgaactcctccactagcagcattcacattaacacttcgtttgttcactgttgtgggcttatttgaacagcctttatttaaacttga

SEQ ID NO: 21955 - DNA, 140 bp, Homo sapiens
  MAP TO AC005226.1; EXPRESSED IN HEART, SIGNAL =   6; EXPRESSED IN BRAIN, SIGNAL = 7.4; EXPRESSED IN PLACENTA, SIGNAL = 7.2; EXPRESSED IN LUNG, SIGNAL = 8.1; EXPRESSED IN FETAL LIVER, SIGNAL = 6.4; EXPRESSED IN BONE MARROW, SIGNAL = 7.1; EXPRESSED IN ADULT LIVER, SIGNAL = 6.5; EXPRESSED IN HELA, SIGNAL = 6.8; EST_HUMAN HIT: AL048430.2, EVALUE 1.20e-01; NT HIT: AB025024.1, EVALUE 5.00e-03; SWISSPROT HIT: P03386, EVALUE 3.10e+00
gctctggaaggagaaaatcggatgtcaagaagaccccttcagagttgggttcccaggaggaacagggggcatgtcacgtgatagcagtgattctaggtccccactccatgcaccacagcaactgtggggaggctcagctc

SEQ ID NO: 21956 - DNA, 256 bp, Homo sapiens
  MAP TO AC004468.1; EXPRESSED IN PLACENTA, SIGNAL = 1.8; EXPRESSED IN LUNG, SIGNAL = 1.8; EXPRESSED IN HEART, SIGNAL = 1.7; EXPRESSED IN BRAIN, SIGNAL = 1.5; EXPRESSED IN BONE MARROW, SIGNAL = 1.7; EXPRESSED IN ADULT LIVER, SIGNAL = 1.9; EXPRESSED IN HELA, SIGNAL = 1.6; EXPRESSED IN FETAL LIVER, SIGNAL = 1.7; SWISSPROT HIT: P11532, EVALUE 2.00e-30; NT HIT: gi5032282, EVALUE 1.00e-103
catttggaagctcctgaagacaagtcatttggcagttcattgatggagagtgaagtaaacctggaccgttatcaaacagctttagaagaagtattatcgtggcttctttctgctgaggacacattgcaagcacaaggagagatttctaatgatgtggaagtggtgaaagaccagtttcatactcatgaggtaaactaaaacgttaatttacaaaacaaaacatatgacttgttataatggcaagtcatcctttttc

SEQ ID NO: 21957 - DNA, 118 bp, Homo sapiens
  MAP TO AC004976.1; EXPRESSED IN LUNG, SIGNAL = 2.4; EXPRESSED IN PLACENTA, SIGNAL = 2.2; EXPRESSED IN HEART, SIGNAL = 2.4; EXPRESSED IN FETAL LIVER, SIGNAL = 2.1; EXPRESSED IN BRAIN, SIGNAL = 2.4; EXPRESSED IN BONE MARROW, SIGNAL = 2.1; EXPRESSED IN HELA, SIGNAL = 2.2; EXPRESSED IN ADULT LIVER, SIGNAL = 2.1; SWISSPROT HIT: Q13324, EVALUE 6.00e-18; EST_HUMAN HIT: AA947407.1, EVALUE 2.00e-52; NT HIT: gi4503044, EVALUE 2.00e-60
ctcattgctctcgtgcacttcatggtcaacgagctgcagcaggaaccacatgacatttcgcaggataaaggtggtgatgaggttccagtgaatcacattccgcagacagcgaatgctc

SEQ ID NO: 21958 - DNA, 279 bp, Homo sapiens
  MAP TO AC005332.1; EXPRESSED IN HEART, SIGNAL =   2; EXPRESSED IN ADULT LIVER, SIGNAL = 1.2; EXPRESSED IN PLACENTA, SIGNAL = 1.3; EXPRESSED IN LUNG, SIGNAL = 1.5; EXPRESSED IN FETAL LIVER, SIGNAL = 1.2; EXPRESSED IN BRAIN, SIGNAL = 1.7; EXPRESSED IN BONE MARROW, SIGNAL = 1.2; NT HIT: gi7706167, EVALUE 1.00e-100; SWISSPROT HIT: P55198, EVALUE 1.60e+00; EST_HUMAN HIT: BE566381.1, EVALUE 0.00e+00
ggactgtatataaatgctgcgtttgtttggagagggtgtctttctgtaaggatcactgaagaactgttcaaagtcttggggagcctcagggtgggaggtgatccaatctgatggagaatgcaaggtaatgggtccaaagagatcactggctggctggaaggcttcattcattaaacgttgttccccagcatttaatttctcatactgtgatacaagcactgggttctttgagatgagagctgtttttagtgtctgttcggagtgccgtattatttgcat

SEQ ID NO: 21959 - DNA, 223 bp, Homo sapiens
  MAP TO AC004585.1; EXPRESSED IN PLACENTA, SIGNAL = 4.7; EXPRESSED IN LUNG, SIGNAL = 5.1; EXPRESSED IN HELA, SIGNAL = 4.3; EXPRESSED IN HEART, SIGNAL = 4.2; EXPRESSED IN BRAIN, SIGNAL = 4.7; EXPRESSED IN BONE MARROW, SIGNAL =   4; EXPRESSED IN FETAL LIVER, SIGNAL = 4.6; EXPRESSED IN ADULT LIVER, SIGNAL =   5; SWISSPROT HIT: Q14031, EVALUE 2.70e-01; EST_HUMAN HIT: AI361780.1, EVALUE 5.10e-02; NT HIT: U24393.1, EVALUE 3.40e-02
acgcctcggagttctgtgccaggaaccgagctgaggaactcagctgaggaaaccacgggaatctcatttgaagaggaatttggcccctggagccccctccccactcactggtgggagggtgccaagacttcagtcgccgccgccacaccagcaaaccccaaaccacaggaatgcaatggggtcacctggggacagagggagatggatggacagcgagtaggca

SEQ ID NO: 21960 - DNA, 128 bp, Homo sapiens
  MAP TO AC004381.1; EXPRESSED IN HELA, SIGNAL =   4; EXPRESSED IN BRAIN, SIGNAL = 4.8; EXPRESSED IN BONE MARROW, SIGNAL = 4.7; EXPRESSED IN ADULT LIVER, SIGNAL = 5.3; EXPRESSED IN HEART, SIGNAL = 4.7; EXPRESSED IN PLACENTA, SIGNAL = 4.9; EXPRESSED IN LUNG, SIGNAL = 5.2; EXPRESSED IN FETAL LIVER, SIGNAL = 4.6; SWISSPROT HIT: Q10124, EVALUE 2.10e-01; NT HIT: AF026469.1, EVALUE 2.80e-01; EST_HUMAN HIT: AW965473.1, EVALUE 4.00e-66
tcacgaagaagattcttaacccagtgacgaccaaactcaaagatgtacagaggcagttaaaagcactgcttcctcctgatgctgtgttagtgggccactccttagatttggatctcagagcactgaaa

SEQ ID NO: 21961 - DNA, 91 bp, Homo sapiens
  MAP TO AC004883.2; EXPRESSED IN HEART, SIGNAL = 1.5; EXPRESSED IN BRAIN, SIGNAL = 3.3; EXPRESSED IN BONE MARROW, SIGNAL = 1.7; EXPRESSED IN PLACENTA, SIGNAL = 2.2; EXPRESSED IN LUNG, SIGNAL = 2.4; EXPRESSED IN FETAL LIVER, SIGNAL =   1; EXPRESSED IN ADULT LIVER, SIGNAL = 1.1; NT HIT: AF038968.1, EVALUE 2.00e-44; EST_HUMAN HIT: AL121131.1, EVALUE 3.00e-44
tctaagagaccaaaggccaatgagctaccgcagccaccagtcccggaacccgccaatgctgggaagcggaaagtgagggagttcaacttcg

SEQ ID NO: 21962 - DNA, 224 bp, Homo sapiens
  MAP TO AC005926.1; EXPRESSED IN BONE MARROW, SIGNAL = 1.8; EXPRESSED IN PLACENTA, SIGNAL = 1.7; EXPRESSED IN LUNG, SIGNAL = 1.8; EXPRESSED IN HELA, SIGNAL = 1.8; EXPRESSED IN HEART, SIGNAL = 1.6; EXPRESSED IN FETAL LIVER, SIGNAL = 1.6; EXPRESSED IN ADULT LIVER, SIGNAL = 1.4; EXPRESSED IN BRAIN, SIGNAL = 1.4; NT HIT: M94081.1, EVALUE 1.30e-01; EST_HUMAN HIT: BF378625.1, EVALUE 5.10e-02; SWISSPROT HIT: P32386, EVALUE 6.60e+00
tgttctgcggaatccattatctgctccaactcagggtgggagtaaagctgctctgcctgcctgaatgcaaccttcaacttcaaagtaatgcagtttttactaaaggatgtaggagtgaagtacaggtagggataaagctgggtaaaattgtaaaattgaccttttcgcagcaagctgctcttgacctgggaagccttgacgatgtgaaacatgatacgaatttt

SEQ ID NO: 21963 - DNA, 343 bp, Homo sapiens
  MAP TO AC004923.2; EXPRESSED IN PLACENTA, SIGNAL =  14; EXPRESSED IN LUNG, SIGNAL =  16; EXPRESSED IN HELA, SIGNAL =  13; EXPRESSED IN HEART, SIGNAL =  13; EXPRESSED IN BRAIN, SIGNAL =  12; EXPRESSED IN BONE MARROW, SIGNAL =  13; EXPRESSED IN FETAL LIVER, SIGNAL =  13; EXPRESSED IN ADULT LIVER, SIGNAL =  14; SWISSPROT HIT: P43353, EVALUE 7.00e-63; NT HIT: gi4502042, EVALUE 0.00e+00; EST_HUMAN HIT: BE867889.1, EVALUE 0.00e+00
agcccagcaatgcccgcagccgctggaactgtttctggttgatgatgcggcccaggtttggggagctctgggggtcgtcgccatagaaacgggtgatggtgctctgcagggcaggcagcagcctctcctgcatctcagggctgcataggacgtagtcgggggccacgcaggtctggccggcgttgaagtagcggaaccaggccacgcggttggccacggtctgggggtcgcagttgtcgtccacgtagcaagggttcttgccccccagctccagggtgacaggtgtcaggtgcttggcggcagcagtcataacaatcttgcccacacgagggctccctgggca

SEQ ID NO: 21964 - DNA, 83 bp, Homo sapiens
  MAP TO AC006288.1; EXPRESSED IN PLACENTA, SIGNAL = 1.2; EXPRESSED IN BRAIN, SIGNAL = 1.3; EXPRESSED IN ADULT LIVER, SIGNAL = 1.2; EXPRESSED IN LUNG, SIGNAL = 1.6; EXPRESSED IN HEART, SIGNAL = 1.4; EXPRESSED IN FETAL LIVER, SIGNAL = 1.3; EXPRESSED IN BONE MARROW, SIGNAL = 1.3; NT HIT: AL111440.1, EVALUE 5.70e-01; EST_HUMAN HIT: AW177936.1, EVALUE 6.80e-01
tgtccgtgacagctggtaaaatacagaatgttgatgtttcatgttctgtgcaagttcagaatcaaattggaaaagaaggcaag

SEQ ID NO: 21965 - DNA, 118 bp, Homo sapiens
  MAP TO AC005539.1; EXPRESSED IN LUNG, SIGNAL = 1.1; EXPRESSED IN FETAL LIVER, SIGNAL =   1; EXPRESSED IN BRAIN, SIGNAL =   1; EXPRESSED IN BONE MARROW, SIGNAL = 0.95; EXPRESSED IN ADULT LIVER, SIGNAL = 1.3; EXPRESSED IN HEART, SIGNAL = 1.3; EXPRESSED IN PLACENTA, SIGNAL = 1.1; EST_HUMAN HIT: AI792814.1, EVALUE 3.00e-60; NT HIT: AL139078.2, EVALUE 6.60e-02; SWISSPROT HIT: P52624, EVALUE 1.00e-07
ctttacatctccaaacattgctggtaggttgtgtgtttttgttcccaaatccaagtgatagagaatgtcttcatccatcaaatccaagtaaggatttttaacgtgaacaaaccttttt

SEQ ID NO: 21966 - DNA, 268 bp, Homo sapiens
  MAP TO AC005185.1; EXPRESSED IN ADULT LIVER, SIGNAL = 3.2; EXPRESSED IN PLACENTA, SIGNAL = 3.6; EXPRESSED IN HEART, SIGNAL = 2.7; EXPRESSED IN FETAL LIVER, SIGNAL = 2.9; EXPRESSED IN BRAIN, SIGNAL = 3.2; EXPRESSED IN BONE MARROW, SIGNAL =   3; EXPRESSED IN LUNG, SIGNAL = 3.6; EXPRESSED IN HELA, SIGNAL =   3; NT HIT: gi11420775, EVALUE 0.00e+00; EST_HUMAN HIT: BE897525.1, EVALUE 2.00e-35; SWISSPROT HIT: O15479, EVALUE 7.00e-06
atgcctcgtggtcagaagagtaagctccgtgcccgtgagaaacgccgcaaggcccgagatgagacccggggtctcaatgttcctcaggtcactgaagcagaggaagaagaggccccctgctgttcctcttctgtttctgggggtgctgcttcaagctctcctgctgctggcattccccaggagcctcagagagccccaaccactgccgctgctgcggctgcgggtgtttcatccacaaaatctaaaaaaggtgccaagagccaccaag

SEQ ID NO: 21967 - DNA, 160 bp, Homo sapiens
  MAP TO AC005598.6; EXPRESSED IN PLACENTA, SIGNAL = 3.4; EXPRESSED IN LUNG, SIGNAL = 3.9; EXPRESSED IN HEART, SIGNAL = 3.1; EXPRESSED IN BRAIN, SIGNAL = 3.9; EXPRESSED IN ADULT LIVER, SIGNAL = 3.6; EXPRESSED IN FETAL LIVER, SIGNAL = 3.6; EXPRESSED IN BONE MARROW, SIGNAL = 3.5; EXPRESSED IN HELA, SIGNAL = 3.7; NT HIT: gi11067442, EVALUE 5.70e+00; EST_HUMAN HIT: AA594574.1, EVALUE 2.20e+00
agaagaagaagtggaagtggaagtggaaatggaagaggaagcattagcagcagcagaagaaggagaaggagaaggagaggaagaagaagagaagaaggaggagaagaaggaagaagcagcagacactgcatggcaggattgaggacccaatcagaataaa

SEQ ID NO: 21968 - DNA, 94 bp, Homo sapiens
  MAP TO AC004069.1; EXPRESSED IN BRAIN, SIGNAL = 1.3; EXPRESSED IN LUNG, SIGNAL = 1.6; EXPRESSED IN FETAL LIVER, SIGNAL = 1.3; EXPRESSED IN BONE MARROW, SIGNAL = 1.3; EXPRESSED IN ADULT LIVER, SIGNAL = 1.6; EXPRESSED IN PLACENTA, SIGNAL = 1.3; EXPRESSED IN HEART, SIGNAL = 1.4; NT HIT: AL161546.2, EVALUE 1.30e-02; EST_HUMAN HIT: AU129193.1, EVALUE 1.10e+00
agttctgctggtatttgtaaatacttgcagccatgtgtagcaaagatggagagccatcatcattctgaccctgtttctcactttgtcctggcat

SEQ ID NO: 21969 - DNA, 181 bp, Homo sapiens
  MAP TO AC002525.1; EXPRESSED IN PLACENTA, SIGNAL = 4.1; EXPRESSED IN HELA, SIGNAL = 4.3; EXPRESSED IN HEART, SIGNAL = 3.7; EXPRESSED IN BONE MARROW, SIGNAL = 4.6; EXPRESSED IN ADULT LIVER, SIGNAL = 4.2; EXPRESSED IN BRAIN, SIGNAL = 5.3; EXPRESSED IN FETAL LIVER, SIGNAL = 3.5; EXPRESSED IN LUNG, SIGNAL = 5.3; SWISSPROT HIT: P03120, EVALUE 3.00e+00; EST_HUMAN HIT: AW291215.1, EVALUE 1.60e-01; NT HIT: M63276.1, EVALUE 4.20e-01
tcagtcttgatgtttgtgctattaatggagcacaatctgcagctggcccagatgttgctgacaccagccctgcctgcctctgtcagcatagcaaagattctagcaaatctgtaatgttgtccatgcaccttggtgcagagagtcacatactgctccctaaaaggaaaatgatatggttcct

SEQ ID NO: 21970 - DNA, 102 bp, Homo sapiens
  MAP TO AC006312.8; EXPRESSED IN PLACENTA, SIGNAL = 2.1; EXPRESSED IN LUNG, SIGNAL = 2.3; EXPRESSED IN HEART, SIGNAL = 2.2; EXPRESSED IN BONE MARROW, SIGNAL = 2.3; EXPRESSED IN ADULT LIVER, SIGNAL = 1.9; EXPRESSED IN HELA, SIGNAL = 2.5; EXPRESSED IN FETAL LIVER, SIGNAL = 2.2; EXPRESSED IN BRAIN, SIGNAL = 2.2; EST_HUMAN HIT: AA022459.1, EVALUE 9.00e-51; NT HIT: gi11429665, EVALUE 6.00e-51
ggtggatgaagttgaccctctcgtcttccagcccctggtgggatttcaccggcacattcatgtacccataacggtgctcattgcacacgtggacggagaccc

SEQ ID NO: 21971 - DNA, 90 bp, Homo sapiens
  MAP TO AC005815.1; EXPRESSED IN PLACENTA, SIGNAL = 1.2; EXPRESSED IN LUNG, SIGNAL = 1.2; EXPRESSED IN HELA, SIGNAL = 1.8; EXPRESSED IN HEART, SIGNAL = 1.6; EXPRESSED IN BRAIN, SIGNAL = 1.4; EXPRESSED IN FETAL LIVER, SIGNAL = 1.8; EXPRESSED IN BONE MARROW, SIGNAL = 1.7; EXPRESSED IN ADULT LIVER, SIGNAL = 1.4; NT HIT: gi5174612, EVALUE 3.00e-34; SWISSPROT HIT: Q99733, EVALUE 1.00e-11; EST_HUMAN HIT: R19751.1, EVALUE 1.00e-43
gcttctgctttttcttgatggttttgacagtaacattctttcctttcttccagtcaatagtacacccatcgcagtccatgatctcaggac

SEQ ID NO: 21972 - DNA, 169 bp, Homo sapiens
  MAP TO AC005684.1; EXPRESSED IN PLACENTA, SIGNAL =   9; EXPRESSED IN BONE MARROW, SIGNAL = 7.8; EXPRESSED IN ADULT LIVER, SIGNAL = 8.2; EXPRESSED IN LUNG, SIGNAL = 7.8; EXPRESSED IN HELA, SIGNAL = 8.1; EXPRESSED IN HEART, SIGNAL =   8; EXPRESSED IN FETAL LIVER, SIGNAL = 9.1; EXPRESSED IN BRAIN, SIGNAL = 9.2; SWISSPROT HIT: P33240, EVALUE 1.70e+00; NT HIT: D83710.1, EVALUE 9.90e-02; EST_HUMAN HIT: AI971239.1, EVALUE 5.80e-01
aaagtctgtgggtgctcatccatttgaaagagtctctccatcagaggggaatcaaaggccacccaggcatcttccctcccctccaccacatcccaacccactttctcagggctcacgatggttggacacaacacctgcttctcgatctgcatcctcccctggaatgctg

SEQ ID NO: 21973 - DNA, 217 bp, Homo sapiens
  MAP TO AC004390.1; EXPRESSED IN PLACENTA, SIGNAL = 1.5; EXPRESSED IN LUNG, SIGNAL = 1.7; EXPRESSED IN FETAL LIVER, SIGNAL = 1.4; EXPRESSED IN BONE MARROW, SIGNAL = 1.5; EXPRESSED IN ADULT LIVER, SIGNAL = 1.8; EXPRESSED IN HEART, SIGNAL = 1.7; EXPRESSED IN BRAIN, SIGNAL = 1.7; SWISSPROT HIT: O00330, EVALUE 3.60e+00; NT HIT: Y14946.1, EVALUE 8.00e+00; EST_HUMAN HIT: R43212.1, EVALUE 1.90e-01
catttctgtgattctcttggctctgcctcctccatttttcagctccatcctcaggtaggccttccacatgttcacaagatggctaacagcagcaaccaggctacatgcttctttgttcttatccaagggaagataggtcatctcctccctcaaaagctgaataaaagtcctaagcctcattgtgattgggtcatccctgaaccagtcatcactgtgg

SEQ ID NO: 21974 - DNA, 139 bp, Homo sapiens
  MAP TO AC005196.1; EXPRESSED IN HEART, SIGNAL = 3.6; EXPRESSED IN ADULT LIVER, SIGNAL =   4; EXPRESSED IN PLACENTA, SIGNAL =   6; EXPRESSED IN FETAL LIVER, SIGNAL = 3.8; EXPRESSED IN BRAIN, SIGNAL = 4.2; EXPRESSED IN BONE MARROW, SIGNAL = 4.2; EXPRESSED IN LUNG, SIGNAL = 4.6; EXPRESSED IN HELA, SIGNAL = 3.7; NT HIT: D31782.1, EVALUE 5.00e-03; SWISSPROT HIT: Q61645, EVALUE 6.90e+00; EST_HUMAN HIT: AI792737.1, EVALUE 3.00e-08
tctacaggtcattttggagaaagcacaagttagaacgatgtatgatagtgtaaagaaccaattggaggcagaggtgaagtcttggcctggcaccttggccccggaccagtcaggtattgaagtgatgactcaccctatg

SEQ ID NO: 21975 - DNA, 161 bp, Homo sapiens
  MAP TO AC004549.1; EXPRESSED IN PLACENTA, SIGNAL = 6.4; EXPRESSED IN LUNG, SIGNAL = 7.5; EXPRESSED IN HEART, SIGNAL = 6.9; EXPRESSED IN FETAL LIVER, SIGNAL = 5.8; EXPRESSED IN BONE MARROW, SIGNAL = 6.1; EXPRESSED IN ADULT LIVER, SIGNAL = 6.6; EXPRESSED IN HELA, SIGNAL = 6.4; EXPRESSED IN BRAIN, SIGNAL = 6.6; EST_HUMAN HIT: AI861975.1, EVALUE 1.00e-85; NT HIT: gi11421737, EVALUE 7.00e-86; SWISSPROT HIT: Q11107, EVALUE 9.00e-02
ctttgatgttcacaagaagtgtcccctctgtgagttaatgtttcctcctaactatgatcagagcaaatttgaagaacatgttgaaagtcactggaaggtgtgcccgatgtgcagcgagcagttccctcctgactatgaccagcaggtgtttgaaaggcatg

SEQ ID NO: 21976 - DNA, 113 bp, Homo sapiens
  MAP TO AC004994.1; EXPRESSED IN PLACENTA, SIGNAL = 2.7; EXPRESSED IN LUNG, SIGNAL = 2.5; EXPRESSED IN HEART, SIGNAL = 3.1; EXPRESSED IN FETAL LIVER, SIGNAL = 2.9; EXPRESSED IN BONE MARROW, SIGNAL = 2.1; EXPRESSED IN ADULT LIVER, SIGNAL = 3.3; EXPRESSED IN HELA, SIGNAL = 6.2; EXPRESSED IN BRAIN, SIGNAL = 2.5; SWISSPROT HIT: P06748, EVALUE 7.00e-09; EST_HUMAN HIT: BE926560.1, EVALUE 8.00e-27; NT HIT: M28699.1, EVALUE 1.00e-24
tttcctttgtgggctttgaaataccaccacctatggtcttatggttgaagcatagttcagggccagtgcatattaatgggcagcacttaacagctgtggaggaagatgcacag

SEQ ID NO: 21977 - DNA, 174 bp, Homo sapiens
  MAP TO AC005610.1; EXPRESSED IN ADULT LIVER, SIGNAL = 6.5; EXPRESSED IN PLACENTA, SIGNAL =   6; EXPRESSED IN LUNG, SIGNAL = 5.8; EXPRESSED IN HELA, SIGNAL = 5.9; EXPRESSED IN HEART, SIGNAL = 5.6; EXPRESSED IN BRAIN, SIGNAL = 6.8; EXPRESSED IN BONE MARROW, SIGNAL = 5.2; EXPRESSED IN FETAL LIVER, SIGNAL = 6.4; NT HIT: Z49253.1, EVALUE 1.60e+00; SWISSPROT HIT: P98092, EVALUE 2.30e+00; EST_HUMAN HIT: AW970295.1, EVALUE 1.50e-01
gcttgggagcctccaaggaaccgaaagaagcccatgaaagaactgaggctaagagcagcaacacggctactgctatgaagcacgaggacaatgatggcagtgaattaactcagggcctgccaagttccaactattattctaagtattctctgtgtcttcaatggcttctaacaa

SEQ ID NO: 21978 - DNA, 193 bp, Homo sapiens
  MAP TO AC004084.1; EXPRESSED IN PLACENTA, SIGNAL = 3.8; EXPRESSED IN LUNG, SIGNAL = 3.1; EXPRESSED IN FETAL LIVER, SIGNAL = 3.7; EXPRESSED IN BONE MARROW, SIGNAL = 3.5; EXPRESSED IN HELA, SIGNAL = 3.3; EXPRESSED IN ADULT LIVER, SIGNAL = 3.7; EXPRESSED IN HEART, SIGNAL = 3.1; EXPRESSED IN BRAIN, SIGNAL = 3.7; NT HIT: gi11419196, EVALUE 1.00e-105; EST_HUMAN HIT: BE207240.1, EVALUE 2.00e-78; SWISSPROT HIT: P40823, EVALUE 2.90e+00
gtgctccgggctgcaccgcccgcagaccgaggccgaggtgctggagcagagcgcgcagacgctgcgcgcccacctgggggccctgctgagcgcgctcagccgctcggttcgcgcgtgccccgccgtggtgcgcgccaccttccgccagctcttccggcgcgtgcgcgagcgcttccccggcgcccagcacgag

SEQ ID NO: 21979 - DNA, 269 bp, Homo sapiens
  MAP TO AC004904.1; EXPRESSED IN PLACENTA, SIGNAL = 7.5; EXPRESSED IN HEART, SIGNAL = 5.6; EXPRESSED IN FETAL LIVER, SIGNAL = 4.9; EXPRESSED IN BRAIN, SIGNAL = 8.1; EXPRESSED IN BONE MARROW, SIGNAL =   5; EXPRESSED IN LUNG, SIGNAL = 6.3; EXPRESSED IN HELA, SIGNAL = 6.3; EXPRESSED IN ADULT LIVER, SIGNAL = 5.4; NT HIT: gi4502268, EVALUE 0.00e+00; EST_HUMAN HIT: BE262941.1, EVALUE 0.00e+00; SWISSPROT HIT: P05023, EVALUE 6.00e-36
gcaccgcacgtggtattgttgtctacactggggatcgcactgtgatgggaagaattgccacacttgcttctgggctggaaggaggccagacccccattgctgcagaaattgaacattttatccacatcatcacgggtgtggctgtgttcctgggtgtgtctttcttcatcctttctctcatccttgagtacacctggcttgaggctgtcatcttcctcatcggtatcatcgtagccaatgtgccggaaggtttgctggccactgtcacg

SEQ ID NO: 21980 - DNA, 371 bp, Homo sapiens
  MAP TO AC005479.2; EXPRESSED IN LUNG, SIGNAL =   3; EXPRESSED IN HELA, SIGNAL = 2.2; EXPRESSED IN HEART, SIGNAL = 2.3; EXPRESSED IN FETAL LIVER, SIGNAL = 2.1; EXPRESSED IN BRAIN, SIGNAL = 2.3; EXPRESSED IN PLACENTA, SIGNAL = 2.7; EXPRESSED IN BONE MARROW, SIGNAL = 2.3; EXPRESSED IN ADULT LIVER, SIGNAL = 2.6; EST_HUMAN HIT: BE926105.1, EVALUE 6.00e-03; NT HIT: Z37976.1, EVALUE 0.00e+00; SWISSPROT HIT: P39688, EVALUE 1.40e-01
aggtctatgctcagctgtgcaacgtggctcgcattgaggcagagcgggaggccggggtccacttccggccaggctatgagtatggccccgggcccgatgacctgcactacagcatctatggcccagatggggcccccttctacaactacctgggccccgaggacaccgtccctgagcctgccttccccaacacagccggtcactcagcggaccgcacacccatccttgagtctcctttgcagccctcagaactccagccccactacgtggccagccatccaggtctgtgttgctgcaaaactggggaagaggtgggcaccaaagctgtttcacttccatctcctccacctgctagtcatattgccagcagg

SEQ ID NO: 21981 - DNA, 252 bp, Homo sapiens
  MAP TO AC005209.1; EXPRESSED IN ADULT LIVER, SIGNAL = 2.7; EXPRESSED IN PLACENTA, SIGNAL =   3; EXPRESSED IN HELA, SIGNAL =   3; EXPRESSED IN HEART, SIGNAL = 2.8; EXPRESSED IN FETAL LIVER, SIGNAL = 2.7; EXPRESSED IN BRAIN, SIGNAL = 3.3; EXPRESSED IN LUNG, SIGNAL = 3.4; EXPRESSED IN BONE MARROW, SIGNAL = 3.3; SWISSPROT HIT: P39057, EVALUE 7.00e-24; EST_HUMAN HIT: BE255343.1, EVALUE 9.00e-01; NT HIT: AF257737.1, EVALUE 0.00e+00
cccacagtaaagcagtcgattagcaaattcatggcctttgtccacacaagtgtcaaccaaacatcccagtcttatctgagcaatgaacagcgctacaactatacaactcccaagtcctttctggagttcatcagactctaccagagcttgttgcacaggcacagaaaagagctcaagtgcaagacagagcggttggagaacgggctgctgaagctgcatagcacctctgcccaggtgagcaatgtcccgctc

SEQ ID NO: 21982 - DNA, 132 bp, Homo sapiens
  MAP TO AC004552.1; EXPRESSED IN PLACENTA, SIGNAL = 1.4; EXPRESSED IN LUNG, SIGNAL = 1.8; EXPRESSED IN FETAL LIVER, SIGNAL = 1.3; EXPRESSED IN ADULT LIVER, SIGNAL = 1.6; EXPRESSED IN HEART, SIGNAL = 1.5; EXPRESSED IN BRAIN, SIGNAL = 1.5; EXPRESSED IN BONE MARROW, SIGNAL = 1.6; NT HIT: AF142329.1, EVALUE 2.90e-01; SWISSPROT HIT: gi6685498, EVALUE 9.20e+00; EST_HUMAN HIT: AI307780.1, EVALUE 4.40e-01
ttatggggacagagcatcaggcatgacctgggtttggggcacacaggtggagtgagatttatgatgctgattgcatgtagtgggctggagcttcttgagatcctcatggcctatggtcatctgggccaggac

SEQ ID NO: 21983 - DNA, 109 bp, Homo sapiens
  MAP TO AC005005.1; EXPRESSED IN PLACENTA, SIGNAL = 2.9; EXPRESSED IN LUNG, SIGNAL = 2.9; EXPRESSED IN HELA, SIGNAL = 2.9; EXPRESSED IN FETAL LIVER, SIGNAL = 2.7; EXPRESSED IN ADULT LIVER, SIGNAL = 2.4; EXPRESSED IN HEART, SIGNAL = 2.9; EXPRESSED IN BRAIN, SIGNAL = 3.1; EXPRESSED IN BONE MARROW, SIGNAL = 2.8; EST_HUMAN HIT: AW407653.1, EVALUE 8.80e-02; NT HIT: gi5174698, EVALUE 6.00e-02
ctgagcctcttgatcctcctttaatgctccctgtccacccaccctcttcattctatcttgtgagttagactcccagagactgtcaatggccccaaggcccaggccagcc

SEQ ID NO: 21984 - DNA, 116 bp, Homo sapiens
  MAP TO AC005630.1; EXPRESSED IN PLACENTA, SIGNAL = 8.2; EXPRESSED IN HEART, SIGNAL = 7.5; EXPRESSED IN BONE MARROW, SIGNAL = 7.9; EXPRESSED IN ADULT LIVER, SIGNAL = 8.7; EXPRESSED IN LUNG, SIGNAL = 9.7; EXPRESSED IN HELA, SIGNAL = 8.6; EXPRESSED IN FETAL LIVER, SIGNAL = 8.3; EXPRESSED IN BRAIN, SIGNAL = 7.5; EST_HUMAN HIT: AW162304.1, EVALUE 5.00e-59; SWISSPROT HIT: P07115, EVALUE 3.20e+00; NT HIT: AF266285.1, EVALUE 5.00e-18
ggtcttccggcaggtggagctgaagagccaagaggctccgagtctgcagcagcagccagaccagtagctggagccccagtcccacaaggagcttggatgtgcggacaagcagggtg

SEQ ID NO: 21985 - DNA, 127 bp, Homo sapiens
  MAP TO AC004943.1; EXPRESSED IN PLACENTA, SIGNAL =   5; EXPRESSED IN BRAIN, SIGNAL = 4.9; EXPRESSED IN BONE MARROW, SIGNAL = 4.4; EXPRESSED IN ADULT LIVER, SIGNAL =   5; EXPRESSED IN LUNG, SIGNAL =   6; EXPRESSED IN HELA, SIGNAL = 4.8; EXPRESSED IN HEART, SIGNAL = 4.3; EXPRESSED IN FETAL LIVER, SIGNAL = 4.4; SWISSPROT HIT: P37563, EVALUE 5.40e-02; NT HIT: X16513.1, EVALUE 1.10e+00; EST_HUMAN HIT: W87623.1, EVALUE 6.00e-25
cagttgacctctcaggtggcccacactcttgggcctcactgcatggccacccatgttatcgatcagttgatcacatactggcacatcaggaccaccaattccaatcccaacagctatggcctatatc

SEQ ID NO: 21986 - DNA, 237 bp, Homo sapiens
  MAP TO AC001237.1; EXPRESSED IN PLACENTA, SIGNAL = 1.3; EXPRESSED IN LUNG, SIGNAL = 1.4; EXPRESSED IN FETAL LIVER, SIGNAL = 1.4; EXPRESSED IN BRAIN, SIGNAL = 1.1; EXPRESSED IN BONE MARROW, SIGNAL = 1.3; EXPRESSED IN ADULT LIVER, SIGNAL = 1.4; EXPRESSED IN HEART, SIGNAL = 1.4; NT HIT: AF310105.1, EVALUE 0.00e+00; SWISSPROT HIT: Q9ZCN1, EVALUE 2.00e+00; EST_HUMAN HIT: BE887203.1, EVALUE 5.40e-02
tgctgcctgccctcaatcagctgaagcttcttcacgtggcggctgaatttaatgcagaaagtgcacactaagagctccatgtctgtttctacacacatgcccatttcttcgaaatgggccatcacttgtgtcaggaacgttttgttccgagtctcgtacaagcagtggagggactccagagagtgtggctgcagcagcagctgcagggacgggacccactgcatcaggttcctcccc

SEQ ID NO: 21987 - DNA, 78 bp, Homo sapiens
  MAP TO AC004451.1; EXPRESSED IN PLACENTA, SIGNAL = 5.7; EXPRESSED IN LUNG, SIGNAL = 7.1; EXPRESSED IN HEART, SIGNAL = 5.5; EXPRESSED IN FETAL LIVER, SIGNAL = 5.6; EXPRESSED IN BONE MARROW, SIGNAL = 5.6; EXPRESSED IN ADULT LIVER, SIGNAL = 5.5; EXPRESSED IN HELA, SIGNAL = 6.1; EXPRESSED IN BRAIN, SIGNAL = 6.3; EST_HUMAN HIT: AL138120.1, EVALUE 7.00e-20; NT HIT: AL163209.2, EVALUE 2.00e-16; SWISSPROT HIT: P11369, EVALUE 4.30e+00
gagtgaaaatgtagtatttgtcattctgtgcctggcttacttcacttaacataatgtcctccaggctcatccaagttg

SEQ ID NO: 21988 - DNA, 135 bp, Homo sapiens
  MAP TO AC005038.1; EXPRESSED IN PLACENTA, SIGNAL = 1.5; EXPRESSED IN HEART, SIGNAL = 1.7; EXPRESSED IN BRAIN, SIGNAL = 1.7; EXPRESSED IN BONE MARROW, SIGNAL = 1.4; EXPRESSED IN ADULT LIVER, SIGNAL = 1.8; EXPRESSED IN LUNG, SIGNAL =   2; EXPRESSED IN HELA, SIGNAL = 1.7; EXPRESSED IN FETAL LIVER, SIGNAL = 1.6; NT HIT: gi11422642, EVALUE 2.00e-70; EST_HUMAN HIT: AL042984.2, EVALUE 3.00e-70; SWISSPROT HIT: Q11203, EVALUE 3.00e-21
tgccatgcgaacggtctcatagtagtgcaggggtgcgttgggtgtgctcatgtcatagccaaatcctgcgactgccacctcgtcacagccgtgtagtgccatggtcactgccacactgccaagggtagggatgtt

SEQ ID NO: 21989 - DNA, 94 bp, Homo sapiens
  MAP TO AC005831.1; EXPRESSED IN PLACENTA, SIGNAL = 1.6; EXPRESSED IN LUNG, SIGNAL = 1.4; EXPRESSED IN HEART, SIGNAL = 1.4; EXPRESSED IN BRAIN, SIGNAL = 1.3; EXPRESSED IN BONE MARROW, SIGNAL = 1.8; EXPRESSED IN ADULT LIVER, SIGNAL = 1.3; EXPRESSED IN FETAL LIVER, SIGNAL = 1.5; NT HIT: AL049866.2, EVALUE 1.30e-02; SWISSPROT HIT: P32235, EVALUE 9.50e+00; EST_HUMAN HIT: BF432025.1, EVALUE 7.30e-02
aacgtgtccacggacccatgtccatggatctttgctggaggggctttcccttccctttccttctctcagatgaaccttcaatgattcctggcag

SEQ ID NO: 21990 - DNA, 144 bp, Homo sapiens
  MAP TO AC003087.1; EXPRESSED IN LUNG, SIGNAL = 1.8; EXPRESSED IN FETAL LIVER, SIGNAL = 1.6; EXPRESSED IN BRAIN, SIGNAL = 1.6; EXPRESSED IN BONE MARROW, SIGNAL = 1.6; EXPRESSED IN PLACENTA, SIGNAL = 1.7; EXPRESSED IN HEART, SIGNAL = 1.7; EXPRESSED IN ADULT LIVER, SIGNAL = 1.5; EST_HUMAN HIT: BE698077.1, EVALUE 8.00e-37; SWISSPROT HIT: P43348, EVALUE 2.00e-17; NT HIT: AJ400717.1, EVALUE 8.00e-33
gctcattggtggaaatgcctctactgaaggacccaagggtgaaggtactgaaagcacagtaatcactggtattgatattgtcatgaaccatcacttgcagcaagctggcttcataaaagaagcctacaagatgtatatgaaaga

SEQ ID NO: 21991 - DNA, 240 bp, Homo sapiens
  MAP TO AC004231.1; EXPRESSED IN PLACENTA, SIGNAL = 2.2; EXPRESSED IN LUNG, SIGNAL = 4.7; EXPRESSED IN HELA, SIGNAL = 2.2; EXPRESSED IN FETAL LIVER, SIGNAL = 2.3; EXPRESSED IN ADULT LIVER, SIGNAL = 2.3; EXPRESSED IN HEART, SIGNAL = 2.3; EXPRESSED IN BRAIN, SIGNAL = 2.5; EXPRESSED IN BONE MARROW, SIGNAL =   2; EST_HUMAN HIT: AA927268.1, EVALUE 6.00e-08; SWISSPROT HIT: Q99456, EVALUE 2.00e-35; NT HIT: AF137286.1, EVALUE 0.00e+00
aagaaatccctggaggactccttggccgaagccgagggcgattactgcgcgcagctgtcccaggtgcagcagctcatcagcaacctggaggcacagctgctccaggtgcgcgcggacgcagagcgccagaacgtggaccaccagcggctgctgaatgtcaaggcccgcctggagctggagattgagacctaccgccgcctgctggacggggaggcccaagggtgagcagacaacggaggc

SEQ ID NO: 21992 - DNA, 254 bp, Homo sapiens
  MAP TO AC002542.1; EXPRESSED IN PLACENTA, SIGNAL =   2; EXPRESSED IN HEART, SIGNAL = 2.1; EXPRESSED IN ADULT LIVER, SIGNAL = 1.8; EXPRESSED IN LUNG, SIGNAL = 2.3; EXPRESSED IN FETAL LIVER, SIGNAL = 1.8; EXPRESSED IN BRAIN, SIGNAL = 2.2; EXPRESSED IN BONE MARROW, SIGNAL = 2.1; EXPRESSED IN HELA, SIGNAL = 2.1; EST_HUMAN HIT: AA633788.1, EVALUE 6.00e-73; NT HIT: gi11422159, EVALUE 4.00e-73; SWISSPROT HIT: P31386, EVALUE 2.70e-01
gcttccaactctttcccaagctctggagtcagtgccaccataaagacctcccctgagagtgcagtttactccagccctgatatttcccttttggtcttctccacagctttccatgaagtctcagtttacccaaagaaggagcttcccttctttattctctttactgctggattatgttccttcacagccatgctggccctcctgacacatcagttcccggaacttatgggggtcttcgcaaaagctgtgagtgt

SEQ ID NO: 21993 - DNA, 166 bp, Homo sapiens
  MAP TO AC005571.1; EXPRESSED IN BRAIN, SIGNAL = 2.2; EXPRESSED IN PLACENTA, SIGNAL = 1.9; EXPRESSED IN LUNG, SIGNAL = 2.3; EXPRESSED IN HEART, SIGNAL =   2; EXPRESSED IN BONE MARROW, SIGNAL = 2.5; EXPRESSED IN ADULT LIVER, SIGNAL = 2.1; EXPRESSED IN HELA, SIGNAL = 2.1; EXPRESSED IN FETAL LIVER, SIGNAL =   2; NT HIT: Z46906.1, EVALUE 6.00e+00; SWISSPROT HIT: P07996, EVALUE 1.50e-01
ccataggatgcagggggcctgtggccagcaggagggcagcaggtaaggccagtctttgctgctggcaccacaggtgaagaagttatgtccttccaatctcggcttagctgtcactttgtacaggaggatttccctaattcccatggaccgggctgggtttcccttg

SEQ ID NO: 21994 - DNA, 136 bp, Homo sapiens
  MAP TO AC003092.1; EXPRESSED IN BRAIN, SIGNAL = 1.6; EXPRESSED IN ADULT LIVER, SIGNAL = 2.5; EXPRESSED IN HEART, SIGNAL = 1.9; EXPRESSED IN PLACENTA, SIGNAL = 1.8; EXPRESSED IN LUNG, SIGNAL = 1.6; EXPRESSED IN FETAL LIVER, SIGNAL = 2.1; EXPRESSED IN BONE MARROW, SIGNAL = 1.8
caagaccctatgcagaagaagaagaggaagaaaaggagaggaagacgaagaagaggaagaggaagaggaggagaaggaggaagaagagaaggaggaagaagaggaggaggggtaagaagaaggaggtggaggagga

SEQ ID NO: 21995 - DNA, 313 bp, Homo sapiens
  MAP TO AC004914.1; EXPRESSED IN PLACENTA, SIGNAL = 1.6; EXPRESSED IN HEART, SIGNAL = 1.5; EXPRESSED IN BRAIN, SIGNAL = 1.7; EXPRESSED IN BONE MARROW, SIGNAL = 1.5; EXPRESSED IN ADULT LIVER, SIGNAL = 1.6; EXPRESSED IN LUNG, SIGNAL = 1.9; EXPRESSED IN FETAL LIVER, SIGNAL = 1.3; EST_HUMAN HIT: R37485.1, EVALUE 2.90e-01; SWISSPROT HIT: Q02644, EVALUE 4.50e+00
acccagaagtccagcggagccatccagccaagtgcagcttaggccagccaactccagctgacccttagacacatgataaatcataaattgttgcttatgtcactgagttttggggtagtccattatgcagcaatgactaatacagagagcatcttaacatcttaatttattactttttcaggaccacgtagcaaaccaaaaagtaggtagaagaacttgaccaaaactgtgggcttcctaggaggggccatttccataaagaggacaagccaatccctttcaaaaatgggtatcaggagaacagacatcatga

SEQ ID NO: 21996 - DNA, 395 bp, Homo sapiens
  MAP TO AC005224.1; EXPRESSED IN ADULT LIVER, SIGNAL = 4.9; EXPRESSED IN HELA, SIGNAL = 5.6; EXPRESSED IN HEART, SIGNAL = 4.9; EXPRESSED IN BRAIN, SIGNAL =   6; EXPRESSED IN BONE MARROW, SIGNAL = 5.6; EXPRESSED IN PLACENTA, SIGNAL = 5.5; EXPRESSED IN LUNG, SIGNAL = 5.9; EXPRESSED IN FETAL LIVER, SIGNAL = 4.9; EST_HUMAN HIT: AA446206.1, EVALUE 7.00e-92; SWISSPROT HIT: P24686, EVALUE 7.60e-01; NT HIT: gi11428589, EVALUE 7.00e-14
ctcctggtccatgtgcagaagtaagagcactgccagcaccagcggcggagccagagccagcatgggaagaggcccctccagagagagcactggagctggagggagctccagccaaggaccagaccaacgaggagctgcctgaaatcacggcacgtactgtagccactagccctaaccctggaactgaaagcgtggctggagagagaagtgggagggagggggtgaccagcacagccccagccagcagctcccatgctgcccctagtcctgggcacggtggcaaacatgcaggcagagagcagggcatttggcctggcctcctgtacctcgctggagagaggcttctctcattcactagaaccacagtcctgctgctgcaggtccgtttattctcc

SEQ ID NO: 21997 - DNA, 279 bp, Homo sapiens
  MAP TO AC003678.1; EXPRESSED IN PLACENTA, SIGNAL = 3.4; EXPRESSED IN LUNG, SIGNAL = 4.2; EXPRESSED IN HEART, SIGNAL = 3.2; EXPRESSED IN BRAIN, SIGNAL =   4; EXPRESSED IN BONE MARROW, SIGNAL = 3.4; EXPRESSED IN ADULT LIVER, SIGNAL = 3.6; EXPRESSED IN HELA, SIGNAL = 3.7; EXPRESSED IN FETAL LIVER, SIGNAL = 3.6; NT HIT: gi8922499, EVALUE 3.00e-03; EST_HUMAN HIT: AL134434.1, EVALUE 4.00e-03; SWISSPROT HIT: P23477, EVALUE 2.70e+00
cgataaaaatgaaattgcacgctgcacactcgtttccgccttcttccctcacagtcatggtctgggagtccacactgtgttagcagtggtttgctccttttgtattgcagagaaatgcggatacacatgtagatgtacatatatcgccattcatctctttctccattagtggacatcagggtggtttccagtttggggctgttaacgagcagtgctgacgtgagcttttgtgtacaagctgcgtagcaacatatgctttcacttctcttgggcaaatac

SEQ ID NO: 21998 - DNA, 145 bp, Homo sapiens
  MAP TO AC005592.1; EXPRESSED IN PLACENTA, SIGNAL =   2; EXPRESSED IN LUNG, SIGNAL = 2.8; EXPRESSED IN HELA, SIGNAL = 2.5; EXPRESSED IN HEART, SIGNAL = 3.5; EXPRESSED IN BONE MARROW, SIGNAL = 2.1; EXPRESSED IN FETAL LIVER, SIGNAL = 2.1; EXPRESSED IN BRAIN, SIGNAL = 2.4; EXPRESSED IN ADULT LIVER, SIGNAL = 2.4; SWISSPROT HIT: P17277, EVALUE 2.70e-01; NT HIT: U93872.1, EVALUE 3.30e-01; EST_HUMAN HIT: AL045615.1, EVALUE 7.60e+00
agacgtccaccgtgggctgttatctgcagaatgtcctggaagatttcttggaggtgatgggagctttgaatgcaaagaccagggtggaggcacagggcaggatttgggagtcctgggtagaatgtgaggcagaccagcactccca

SEQ ID NO: 21999 - DNA, 113 bp, Homo sapiens
  MAP TO AC004925.1; EXPRESSED IN LUNG, SIGNAL = 2.4; EXPRESSED IN BRAIN, SIGNAL = 2.4; EXPRESSED IN PLACENTA, SIGNAL = 2.3; EXPRESSED IN HEART, SIGNAL = 2.1; EXPRESSED IN FETAL LIVER, SIGNAL = 2.1; EXPRESSED IN BONE MARROW, SIGNAL = 2.4; EXPRESSED IN ADULT LIVER, SIGNAL = 2.4; EXPRESSED IN HELA, SIGNAL = 2.4; EST_HUMAN HIT: AI908199.1, EVALUE 3.90e+00; NT HIT: AL161540.2, EVALUE 8.30e-01
tcagactctgaaagcacagatgaacacaggagagttaacaagttgggtgaagatagcctgcatcgttcagtacactgtcaacctttctaccaatattcagctacaagccaggt

SEQ ID NO: 22000 - DNA, 102 bp, Homo sapiens
  MAP TO AC004928.2; EXPRESSED IN PLACENTA, SIGNAL = 2.9; EXPRESSED IN LUNG, SIGNAL =   3; EXPRESSED IN FETAL LIVER, SIGNAL = 2.5; EXPRESSED IN BRAIN, SIGNAL = 3.3; EXPRESSED IN BONE MARROW, SIGNAL = 2.7; EXPRESSED IN ADULT LIVER, SIGNAL =   3; EXPRESSED IN HELA, SIGNAL = 3.1; EXPRESSED IN HEART, SIGNAL = 2.8; SWISSPROT HIT: P54761, EVALUE 9.40e+00; EST_HUMAN HIT: BE173964.1, EVALUE 3.20e-01
ggctgccaagccgcacaccctttgagctttcatcagcagattctggggtgtgtgtgtcttcctgggtgtgaggttgtgaccgcagatgacattatacgacat

SEQ ID NO: 22001 - DNA, 374 bp, Homo sapiens
  MAP TO AC004074.1; EXPRESSED IN PLACENTA, SIGNAL = 1.3; EXPRESSED IN HELA, SIGNAL =   2; EXPRESSED IN FETAL LIVER, SIGNAL =   1; EXPRESSED IN BRAIN, SIGNAL = 1.2; EXPRESSED IN LUNG, SIGNAL = 1.3; EXPRESSED IN HEART, SIGNAL = 1.4; EXPRESSED IN BONE MARROW, SIGNAL = 0.99; EXPRESSED IN ADULT LIVER, SIGNAL = 1.1; EST_HUMAN HIT: AI499823.1, EVALUE 4.00e-07; SWISSPROT HIT: P03330, EVALUE 2.00e-03; NT HIT: AF087913.1, EVALUE 5.00e-18
ttggctttgtaaacgctcccttaactagttcagaggtccggaatttaaaaaaggagcttaagccattactggatgacccttatggagtagcagatcaaattgatcaatttttaaggcctgacataggcacttgggctgagttgatgtccatcaggggcatcctcttttcaggggaagaacgaagtatgattcggagggctgctgtggcagtctgggaacgtgagcaccctccgggtcaaaatgttcctcctgtggaccatgaatttcccgcccacgaccctcagtgggacaataacaatgcaaatcactgggaaaacatgcaggatctaagggaggtaataacaaaaggaattcgaatatcagtaccccgaact

SEQ ID NO: 22002 - DNA, 425 bp, Homo sapiens
  MAP TO AC005410.1; EXPRESSED IN PLACENTA, SIGNAL = 1.2; EXPRESSED IN BONE MARROW, SIGNAL = 1.2; EXPRESSED IN FETAL LIVER, SIGNAL = 1.3; EXPRESSED IN HELA, SIGNAL = 3.8; EXPRESSED IN HEART, SIGNAL =   5; EXPRESSED IN LUNG, SIGNAL = 1.3; EXPRESSED IN BRAIN, SIGNAL = 1.3; EXPRESSED IN ADULT LIVER, SIGNAL = 1.5; NT HIT: gi11497621, EVALUE 2.70e-01; SWISSPROT HIT: P52736, EVALUE 4.00e-04; EST_HUMAN HIT: AI934954.1, EVALUE 0.00e+00
agttctttggtgaaaaataagctgagaattcctataaaaggtcttcccacactccctgcaggtggggagcttctgggccatgggggctcttggctgccccttctgggaggtctctctcttctcctcaagccacatggtggacatttctcctgaatgaggattaggcaaatgctgacctagttgtttctcagaaatcctttcttgaggagacagctgttcccctgttccctcatcctgaatgttttgcagagcctcagggagattctctccttctccaaagcatcctggctcatcctcagtgaagaagcccctcaaggaagcctgagaaggaacctctcctgaagcttgacaggaagcatgcaggagctcctggtccctgtgattctccaaatttaggttctccttgtcattctcttgtctatctc

SEQ ID NO: 22003 - DNA, 104 bp, Homo sapiens
  MAP TO AC005028.1; EXPRESSED IN PLACENTA, SIGNAL = 1.6; EXPRESSED IN LUNG, SIGNAL = 1.7; EXPRESSED IN HEART, SIGNAL = 1.7; EXPRESSED IN FETAL LIVER, SIGNAL = 1.4; EXPRESSED IN BRAIN, SIGNAL = 1.8; EXPRESSED IN BONE MARROW, SIGNAL = 1.6; EXPRESSED IN ADULT LIVER, SIGNAL = 1.7; EXPRESSED IN HELA, SIGNAL = 1.7; SWISSPROT HIT: P08122, EVALUE 5.50e+00; NT HIT: AF005859.1, EVALUE 4.00e-03
ctcagaaattccagggtcccgacatgatccatgctcagaagttgggctgcagctcctcggagctggcaggcacaagcctccagcccttcagggcttgcaagagc

SEQ ID NO: 22004 - DNA, 255 bp, Homo sapiens
  MAP TO AC005609.1; EXPRESSED IN PLACENTA, SIGNAL = 1.2; EXPRESSED IN LUNG, SIGNAL = 1.5; EXPRESSED IN FETAL LIVER, SIGNAL = 2.2; EXPRESSED IN BRAIN, SIGNAL = 1.8; EXPRESSED IN ADULT LIVER, SIGNAL =   1; EXPRESSED IN HELA, SIGNAL = 1.8; EXPRESSED IN HEART, SIGNAL =   3; EXPRESSED IN BONE MARROW, SIGNAL = 1.2; NT HIT: gi9256579, EVALUE 0.00e+00; SWISSPROT HIT: P55316, EVALUE 1.20e-01; EST_HUMAN HIT: AI969295.1, EVALUE 1.00e-124
cttcacctccacatggaaaacctgcagaggcctgtccacgatcacctccaggtggatgctgcactccgcgctccgcccacacagctcctcgcggtcgatccgagaattcacaaacaaaatgccattctgcagatttacctccagaaggtccccgtgtcttttggacgccacccggaacaggcgcggcaccagctccgccagctccagccccaggtcctgagcgatgcggcccacgaaggtgccgtgttttgcttc

SEQ ID NO: 22005 - DNA, 156 bp, Homo sapiens
  MAP TO AC003070.1; EXPRESSED IN PLACENTA, SIGNAL =   2; EXPRESSED IN LUNG, SIGNAL = 2.3; EXPRESSED IN HELA, SIGNAL = 1.9; EXPRESSED IN HEART, SIGNAL = 1.6; EXPRESSED IN BONE MARROW, SIGNAL = 2.1; EXPRESSED IN FETAL LIVER, SIGNAL = 1.9; EXPRESSED IN BRAIN, SIGNAL =   2; EXPRESSED IN ADULT LIVER, SIGNAL = 3.6; EST_HUMAN HIT: H52303.1, EVALUE 2.10e+00; SWISSPROT HIT: P20288, EVALUE 6.00e-01; NT HIT: AP000007.1, EVALUE 5.60e+00
gtctcctctccacactatcctcaagccttctggtgaattgaatcttcctaagagatcgcataggtcctgtcattccactcccaatgtcccagcatctcctgcccttcgatatctccctcctttcgcttcttcctttcaacctacaaatgaggtcaa

SEQ ID NO: 22006 - DNA, 115 bp, Homo sapiens
  MAP TO AC003692.1; EXPRESSED IN PLACENTA, SIGNAL = 2.3; EXPRESSED IN BRAIN, SIGNAL = 3.5; EXPRESSED IN ADULT LIVER, SIGNAL = 2.7; EXPRESSED IN LUNG, SIGNAL = 2.9; EXPRESSED IN HELA, SIGNAL = 2.5; EXPRESSED IN HEART, SIGNAL = 2.5; EXPRESSED IN FETAL LIVER, SIGNAL = 2.6; EXPRESSED IN BONE MARROW, SIGNAL = 3.2; NT HIT: Z97022.1, EVALUE 1.00e+00; SWISSPROT HIT: P37553, EVALUE 3.20e+00; EST_HUMAN HIT: AW196090.1, EVALUE 1.50e+00
agcctggaaaccactgtgatttccacttcaatgctatcactggaagacttgaagcaggaggtggataaccacttactagccatgctggagaaggggttccttcattggaagatag

SEQ ID NO: 22007 - DNA, 243 bp, Homo sapiens
  MAP TO AC005212.1; EXPRESSED IN BONE MARROW, SIGNAL = 1.7; EXPRESSED IN HELA, SIGNAL = 1.7; EXPRESSED IN HEART, SIGNAL = 1.9; EXPRESSED IN FETAL LIVER, SIGNAL = 1.7; EXPRESSED IN ADULT LIVER, SIGNAL = 1.8; EXPRESSED IN PLACENTA, SIGNAL = 2.3; EXPRESSED IN LUNG, SIGNAL = 1.7; EXPRESSED IN BRAIN, SIGNAL = 2.1; NT HIT: gi4501848, EVALUE 6.00e-81; SWISSPROT HIT: Q99758, EVALUE 6.00e-25; EST_HUMAN HIT: BE790847.1, EVALUE 2.20e-01
gtgccggctatcacatgacgctggtgaaggagccgcactgcaacccggaagacatctcccagctggtccaccaccacgtgcccaacgccacgctggagagcagcgctggggccgagctgtctttcatccttcccagagagagcacgcacaggtacgcctcccagggagggcacgcacaggtatacatccaagatgggatccccatgggccatgagggctttgtgctcagaggcacctgctctg

SEQ ID NO: 22008 - DNA, 129 bp, Homo sapiens
  MAP TO AC003083.1; EXPRESSED IN PLACENTA, SIGNAL = 2.7; EXPRESSED IN HEART, SIGNAL =   3; EXPRESSED IN BONE MARROW, SIGNAL = 2.8; EXPRESSED IN ADULT LIVER, SIGNAL = 2.8; EXPRESSED IN HELA, SIGNAL =   3; EXPRESSED IN FETAL LIVER, SIGNAL = 2.8; EXPRESSED IN LUNG, SIGNAL =   3; EXPRESSED IN BRAIN, SIGNAL = 2.9; SWISSPROT HIT: P01267, EVALUE 1.80e+00; EST_HUMAN HIT: AI683469.1, EVALUE 4.30e-01; NT HIT: U67531.1, EVALUE 7.20e-02
gtataatgttaaaagaagctggttacaaacctctacaaatgaatctgatggatgttggtgacatccttgtctttgacctatcaaatacctattctcctcttatattagaagctaatgaaaacctgggag

SEQ ID NO: 22009 - DNA, 116 bp, Homo sapiens
  MAP TO AC003962.1; EXPRESSED IN LUNG, SIGNAL = 8.7; EXPRESSED IN BRAIN, SIGNAL =  10; EXPRESSED IN ADULT LIVER, SIGNAL = 8.5; EXPRESSED IN PLACENTA, SIGNAL = 8.8; EXPRESSED IN HELA, SIGNAL = 8.4; EXPRESSED IN HEART, SIGNAL = 7.6; EXPRESSED IN BONE MARROW, SIGNAL = 9.1; EXPRESSED IN FETAL LIVER, SIGNAL = 8.6; SWISSPROT HIT: P11120, EVALUE 7.20e-02; EST_HUMAN HIT: BE389263.1, EVALUE 1.50e+00
aggaatatcatcagtgcggttgtccttccagacttctaaaagtgcaaccaccatgtctctcagttcaaccctggagagaactccatcacggtcaacatcaaataccttgaagcaaa

SEQ ID NO: 22010 - DNA, 185 bp, Homo sapiens
  MAP TO AC005755.1; EXPRESSED IN HEART, SIGNAL = 1.8; EXPRESSED IN FETAL LIVER, SIGNAL = 1.6; EXPRESSED IN BONE MARROW, SIGNAL = 1.7; EXPRESSED IN PLACENTA, SIGNAL = 1.7; EXPRESSED IN BRAIN, SIGNAL = 1.6; EXPRESSED IN ADULT LIVER, SIGNAL = 1.6; EXPRESSED IN LUNG, SIGNAL = 1.6; EXPRESSED IN HELA, SIGNAL = 1.7; SWISSPROT HIT: P95789, EVALUE 3.90e+00; EST_HUMAN HIT: BF244218.1, EVALUE 1.00e-100; NT HIT: gi7705846, EVALUE 1.00e-100
ccactatcgaaaacgatcggcatcccggggtcgctctggaagtcggtctagaagtcgctcaccctcagacaaaagaagtaaacgtggagatgacagacggtctagaagtagagatagagataggaggagagagaggtctcgtagcagggataaaagaagatctcggtcaagggacaggaagcgtc

SEQ ID NO: 22011 - DNA, 95 bp, Homo sapiens
  MAP TO AC004674.1; EXPRESSED IN LUNG, SIGNAL = 5.1; EXPRESSED IN HELA, SIGNAL = 5.3; EXPRESSED IN HEART, SIGNAL = 4.7; EXPRESSED IN FETAL LIVER, SIGNAL = 4.6; EXPRESSED IN BONE MARROW, SIGNAL = 4.6; EXPRESSED IN PLACENTA, SIGNAL = 5.1; EXPRESSED IN BRAIN, SIGNAL = 5.1; EXPRESSED IN ADULT LIVER, SIGNAL = 4.8; NT HIT: AB016064.1, EVALUE 7.90e-01; EST_HUMAN HIT: BF333015.1, EVALUE 1.00e-06
tgtagggacacatcatcactcaactgtgtctctgtgacagtcccacggtgcaggctgtggtttaggcccacatcagcacttacctcagccagact

SEQ ID NO: 22012 - DNA, 237 bp, Homo sapiens
  MAP TO AC005876.2; EXPRESSED IN PLACENTA, SIGNAL = 3.5; EXPRESSED IN LUNG, SIGNAL = 3.6; EXPRESSED IN ADULT LIVER, SIGNAL = 3.9; EXPRESSED IN HELA, SIGNAL = 3.9; EXPRESSED IN HEART, SIGNAL = 3.8; EXPRESSED IN FETAL LIVER, SIGNAL = 3.7; EXPRESSED IN BRAIN, SIGNAL = 3.8; EXPRESSED IN BONE MARROW, SIGNAL =   4; SWISSPROT HIT: P52701, EVALUE 2.60e+00; EST_HUMAN HIT: BE931080.1, EVALUE 0.00e+00; NT HIT: gi11430803, EVALUE 0.00e+00
aatctacatcaggagacaaacccgtatcacattcttgcacaactccttccacgtcttctgcctctggactgaaccccacatctgcacctccaacatctgcttcagcggtccctgtttctcctgttccacagtcgccaatacctcccttacttcaggacccaaatcttcttagacaattgcttcctgctttgcaagccacgctgcagcttaataattctaatgtggacatatctaaaa

SEQ ID NO: 22013 - DNA, 90 bp, Homo sapiens
  MAP TO AC002069.1; EXPRESSED IN PLACENTA, SIGNAL =   4; EXPRESSED IN BONE MARROW, SIGNAL = 3.7; EXPRESSED IN ADULT LIVER, SIGNAL = 3.5; EXPRESSED IN LUNG, SIGNAL = 4.3; EXPRESSED IN HELA, SIGNAL = 3.5; EXPRESSED IN HEART, SIGNAL = 3.2; EXPRESSED IN FETAL LIVER, SIGNAL = 3.5; EXPRESSED IN BRAIN, SIGNAL = 3.8; NT HIT: gi4504896, EVALUE 2.00e-29; SWISSPROT HIT: P52293, EVALUE 6.00e-08; EST_HUMAN HIT: AW391679.1, EVALUE 1.00e-31
tgtaaattggtctgttgatgacattgtcaaaggtataaataacaacaatgtggaaagtcagctgtaagctactcaagctgccaggaaact

SEQ ID NO: 22014 - DNA, 156 bp, Homo sapiens
  MAP TO AC006238.1; EXPRESSED IN PLACENTA, SIGNAL = 1.7; EXPRESSED IN HELA, SIGNAL = 1.9; EXPRESSED IN HEART, SIGNAL = 1.7; EXPRESSED IN FETAL LIVER, SIGNAL = 2.4; EXPRESSED IN BONE MARROW, SIGNAL = 1.5; EXPRESSED IN LUNG, SIGNAL =   2; EXPRESSED IN BRAIN, SIGNAL =   2; EXPRESSED IN ADULT LIVER, SIGNAL = 3.1; SWISSPROT HIT: P12255, EVALUE 8.90e+00; NT HIT: gi4507866, EVALUE 6.00e-83; EST_HUMAN HIT: AW888609.1, EVALUE 9.00e-83
ttctgatagcttcatcatttctccctgaagtcttttacactcttccattagtttccttgtttcggtatcattaagtgaaacactgtgtggttttggcataggtccatcttgcttagatgcattcagtggaacagctttgctaggttccatatcatt

SEQ ID NO: 22015 - DNA, 217 bp, Homo sapiens
  MAP TO AC002073.1; EXPRESSED IN PLACENTA, SIGNAL = 2.2; EXPRESSED IN LUNG, SIGNAL = 2.5; EXPRESSED IN HELA, SIGNAL = 2.3; EXPRESSED IN HEART, SIGNAL = 1.9; EXPRESSED IN BONE MARROW, SIGNAL = 2.2; EXPRESSED IN FETAL LIVER, SIGNAL = 2.2; EXPRESSED IN BRAIN, SIGNAL = 2.6; EXPRESSED IN ADULT LIVER, SIGNAL = 2.2; SWISSPROT HIT: P87131, EVALUE 8.20e-02; EST_HUMAN HIT: BE299406.1, EVALUE 1.00e-110
agaccacctcccaggccctgccagccttcacgacagaaatccaggaagcgtctgaagggccaggtgcagatgaggtgcaggtgttcgctcctgccaacgccctgcccgctcggagtgaggcggcagctgtgcagccagtgattgggatcagccagcgggtgcggatgaactccaaggagaaaaaggacctgggaactctgggtatgacggtccccca

SEQ ID NO: 22016 - DNA, 254 bp, Homo sapiens
  MAP TO AC004820.2; EXPRESSED IN PLACENTA, SIGNAL = 3.5; EXPRESSED IN LUNG, SIGNAL = 3.2; EXPRESSED IN HELA, SIGNAL = 3.4; EXPRESSED IN HEART, SIGNAL = 3.1; EXPRESSED IN BONE MARROW, SIGNAL = 2.9; EXPRESSED IN FETAL LIVER, SIGNAL = 3.3; EXPRESSED IN BRAIN, SIGNAL =   3; EXPRESSED IN ADULT LIVER, SIGNAL = 3.3; NT HIT: AF182034.1, EVALUE 0.00e+00; SWISSPROT HIT: Q13563, EVALUE 1.00e-15; EST_HUMAN HIT: N58386.1, EVALUE 3.60e+00
gtattaatttgaaggccaaaattagagaggtcttcatttgcagaagtatatttgccataacattcactcatcaaagactgaaaagatgaatagactttgcatgtgttgttgcggacttttagttgacgaactctgggaactcctagaagtatattttcatagtagatgcgactgctgttctttaaattatacagctgctggttattgtaccatgaatcccagtacagaccttccaaaaggggtccttccataaa

SEQ ID NO: 22017 - DNA, 75 bp, Homo sapiens
  MAP TO AC006159.2; EXPRESSED IN PLACENTA, SIGNAL = 2.6; EXPRESSED IN LUNG, SIGNAL = 2.7; EXPRESSED IN HEART, SIGNAL = 2.1; EXPRESSED IN FETAL LIVER, SIGNAL = 2.8; EXPRESSED IN BRAIN, SIGNAL = 2.5; EXPRESSED IN BONE MARROW, SIGNAL = 2.7; EXPRESSED IN ADULT LIVER, SIGNAL = 2.5; EXPRESSED IN HELA, SIGNAL = 2.5; NT HIT: AF095609.1, EVALUE 9.10e+00
agagcttagtaaatgagtatgctgtgcccaagaatggaaagggtagaaacagcaggagcaggttcgttggcagag

SEQ ID NO: 22018 - DNA, 369 bp, Homo sapiens
  MAP TO AC004863.1; EXPRESSED IN PLACENTA, SIGNAL =  10; EXPRESSED IN HELA, SIGNAL = 9.3; EXPRESSED IN HEART, SIGNAL =   9; EXPRESSED IN BONE MARROW, SIGNAL =  10; EXPRESSED IN FETAL LIVER, SIGNAL =  11; EXPRESSED IN LUNG, SIGNAL =  13; EXPRESSED IN BRAIN, SIGNAL =  12; EXPRESSED IN ADULT LIVER, SIGNAL =  11; SWISSPROT HIT: P54703, EVALUE 3.00e-04; NT HIT: gi8922337, EVALUE 1.00e-124; EST_HUMAN HIT: AA446697.1, EVALUE 1.00e-121
actgaacatattatttaaatttacatatggccacatcttaaaatgtagcagcctcatgcaaaaattaatgaagaaagaccgtaagtggcacccgtggccgaagcccccccacaaccagcagctggtccagagcttccccacttgcctgttgggggagacctgctgtttggcgacaggacccagatcgctctggaggaggtcccagatgtagatgttggatgtgtcgtcctgcaccaggaacacggcaggcctggttggggaccactgcaggccggtgaccgcatggctgtccgtgctgctgtcccactgcaggagcggaaacgcggagctcagctggtgcagcctgatgcttccgtccgaacagccggc

SEQ ID NO: 22019 - DNA, 266 bp, Homo sapiens
  MAP TO AC005585.1; EXPRESSED IN LUNG, SIGNAL = 0.43; EXPRESSED IN HEART, SIGNAL = 1.5; EST_HUMAN HIT: AI133716.1, EVALUE 8.00e-23; SWISSPROT HIT: Q28640, EVALUE 1.50e+00; NT HIT: Z95636.1, EVALUE 1.00e-02
atggcgcacctgctgggcagccaggcctgcatggagagcctgcgcacagacctcaccgacctgcagggtgccatcgtagacgtcttctcccgcgccgggcctgtgcgcttcccctcctggaagttccctgaccgcatggcctgtgacctcgacatggtggccctgctggagcactatgaccatgttccgggtgaccccgagttcacgcagctgtcccatgccgtgctgctggagctggtcatcgacaggtgagggccttgaccaag

SEQ ID NO: 22020 - DNA, 186 bp, Homo sapiens
  MAP TO AC004472.1; EXPRESSED IN PLACENTA, SIGNAL = 2.8; EXPRESSED IN LUNG, SIGNAL = 2.8; EXPRESSED IN HELA, SIGNAL = 2.8; EXPRESSED IN HEART, SIGNAL = 4.1; EXPRESSED IN FETAL LIVER, SIGNAL =   3; EXPRESSED IN BRAIN, SIGNAL = 2.9; EXPRESSED IN BONE MARROW, SIGNAL = 2.4; EXPRESSED IN ADULT LIVER, SIGNAL = 2.9; SWISSPROT HIT: P55072, EVALUE 3.00e-25; EST_HUMAN HIT: BE796002.1, EVALUE 5.00e-88; NT HIT: gi11429567, EVALUE 3.00e-88
aggcacgggtgtggtccttacccggaagtcatccatagtaactgctagagagttcatgacctcggcatcaatggtctcatcctctaggtcaatgagatccatcttcttgcggatggcttgcagagcagcctctgagcacagggctgctaagtcagcacccacatgcccgtgagtctcattggctac

SEQ ID NO: 22021 - DNA, 231 bp, Homo sapiens
  MAP TO AC004954.1; EXPRESSED IN PLACENTA, SIGNAL = 6.3; EXPRESSED IN LUNG, SIGNAL =  18; EXPRESSED IN FETAL LIVER, SIGNAL = 6.5; EXPRESSED IN BRAIN, SIGNAL = 6.2; EXPRESSED IN ADULT LIVER, SIGNAL = 6.2; EXPRESSED IN HELA, SIGNAL =   6; EXPRESSED IN HEART, SIGNAL =   6; EXPRESSED IN BONE MARROW, SIGNAL = 5.5; EST_HUMAN HIT: BF672695.1, EVALUE 2.10e-01; NT HIT: gi11422159, EVALUE 5.50e-01
tgctgcatttagtgaaacagctgggacctccaggcaccctcctgacacatcagttgaattctttcatctacattctctcctccacctttttctctacttccttcctcttgtttttcttccttctctttctctttctcttcttcctctcctcctcctccttctatctgtcttgtgttatccttgtcatttctgggttatcactataccccctcctccctttctgtttttact

SEQ ID NO: 22022 - DNA, 305 bp, Homo sapiens
  MAP TO AC006352.3; EXPRESSED IN PLACENTA, SIGNAL = 8.6; EXPRESSED IN HELA, SIGNAL = 1.9; EXPRESSED IN HEART, SIGNAL = 1.9; EXPRESSED IN ADULT LIVER, SIGNAL = 5.3; EXPRESSED IN BONE MARROW, SIGNAL =  32; EXPRESSED IN BRAIN, SIGNAL = 1.7; EXPRESSED IN FETAL LIVER, SIGNAL = 2.1; EXPRESSED IN LUNG, SIGNAL = 2.7; SWISSPROT HIT: P01764, EVALUE 5.00e-47; NT HIT: X56163.1, EVALUE 0.00e+00; EST_HUMAN HIT: AW401679.1, EVALUE 1.00e-113
tccagtgtgaggttcagctggtgcagtctgggggaggcttggtacagcctggggggtccctgagactctcctgtgcaggctctggattcaccttcagtagctatgctatgcactgggttcgccaggctccaggaaaaggtctggagtgggtatcagctattggtactggtggtggcacatactatgcagactccgtgaagggccgattcaccatctccagagacaatgccaagaactccttgtatcttcaaatgaacagcctgagagccgaggacatggctgtgtattactgtgcaagagacaca

SEQ ID NO: 22023 - DNA, 108 bp, Homo sapiens
  MAP TO AC004874.1; EXPRESSED IN PLACENTA, SIGNAL = 2.5; EXPRESSED IN LUNG, SIGNAL = 2.4; EXPRESSED IN HEART, SIGNAL = 2.6; EXPRESSED IN FETAL LIVER, SIGNAL = 2.4; EXPRESSED IN BRAIN, SIGNAL = 2.5; EXPRESSED IN BONE MARROW, SIGNAL = 2.2; EXPRESSED IN ADULT LIVER, SIGNAL = 2.4; EXPRESSED IN HELA, SIGNAL = 2.4; NT HIT: AB040945.1, EVALUE 2.30e-01; EST_HUMAN HIT: AW847574.1, EVALUE 1.40e+00
ttactggtgatgagcgatagtgagatgccagaatcgttcagcagatttggcaacatgaagttcattgatgacctcaacaaggatattcaaccctgattggggttgatt

SEQ ID NO: 22024 - DNA, 216 bp, Homo sapiens
  MAP TO AC006084.1; EXPRESSED IN HELA, SIGNAL = 3.2; EXPRESSED IN FETAL LIVER, SIGNAL = 2.6; EXPRESSED IN ADULT LIVER, SIGNAL = 3.2; EXPRESSED IN PLACENTA, SIGNAL = 3.2; EXPRESSED IN HEART, SIGNAL = 2.9; EXPRESSED IN BRAIN, SIGNAL = 2.9; EXPRESSED IN BONE MARROW, SIGNAL = 3.2; EXPRESSED IN LUNG, SIGNAL = 3.6; NT HIT: gi11417304, EVALUE 1.00e-78; SWISSPROT HIT: Q12732, EVALUE 2.10e+00; EST_HUMAN HIT: AW978157.1, EVALUE 2.00e-78
ttacaagtaacattatcaggaaaataatgcgtgtgggtaaaattaccttcccatttatcaccatcagaaacattcttcagatctaaatgtggaatactgacacacgctgcttccccttgaacaccaacactctgacctcctggtacttctgattcagtgttggcattcaaatcacatatcttgctactagaatcctgtattttaaaataaagaata

SEQ ID NO: 22025 - DNA, 164 bp, Homo sapiens
  MAP TO AC004486.1; EXPRESSED IN BRAIN, SIGNAL = 5.5; EXPRESSED IN ADULT LIVER, SIGNAL = 4.8; EXPRESSED IN LUNG, SIGNAL = 6.1; EXPRESSED IN FETAL LIVER, SIGNAL = 4.5; EXPRESSED IN BONE MARROW, SIGNAL = 4.7; EXPRESSED IN PLACENTA, SIGNAL = 5.2; EXPRESSED IN HELA, SIGNAL = 4.9; EXPRESSED IN HEART, SIGNAL = 4.5; EST_HUMAN HIT: T90677.1, EVALUE 1.40e-01; SWISSPROT HIT: P76542, EVALUE 3.50e-01
cctctaagacaaaaacaaatgaggggaatgtggttggaaatgcagttgagtcagccaagccccaagatctgccatatcagctctttgaacatttgaaaatgggagttttcctcagattgaaacaaactccctttccctttacaggagacgttatttccaaaatt

SEQ ID NO: 22026 - DNA, 125 bp, Homo sapiens
  MAP TO AC006524.1; EXPRESSED IN FETAL LIVER, SIGNAL = 1.5; EXPRESSED IN BONE MARROW, SIGNAL = 1.5; EXPRESSED IN LUNG, SIGNAL = 1.4; EXPRESSED IN BRAIN, SIGNAL = 1.4; EXPRESSED IN ADULT LIVER, SIGNAL = 1.5; EXPRESSED IN PLACENTA, SIGNAL = 1.5; EXPRESSED IN HELA, SIGNAL = 1.9; EXPRESSED IN HEART, SIGNAL = 1.6; NT HIT: gi6978530, EVALUE 1.10e+00; SWISSPROT HIT: Q61554, EVALUE 3.10e+00; EST_HUMAN HIT: AA082493.1, EVALUE 1.60e+00
tctgtggcttctacagccaacttcaaggtagctgcaaataaaggtttggtgacaaaacaaataacctcgggacttgtggtattgaccaggacaaccacaaggctaatagcacccaaggtcgacat

SEQ ID NO: 22027 - DNA, 107 bp, Homo sapiens
  MAP TO AC005153.1; EXPRESSED IN BONE MARROW, SIGNAL = 1.7; EXPRESSED IN PLACENTA, SIGNAL =   2; EXPRESSED IN LUNG, SIGNAL = 2.2; EXPRESSED IN HELA, SIGNAL = 1.9; EXPRESSED IN HEART, SIGNAL =   2; EXPRESSED IN FETAL LIVER, SIGNAL =   2; EXPRESSED IN ADULT LIVER, SIGNAL = 1.8; EXPRESSED IN BRAIN, SIGNAL = 1.9; EST_HUMAN HIT: AA290951.1, EVALUE 1.00e-03; NT HIT: AB010426.1, EVALUE 9.10e-01; SWISSPROT HIT: O15440, EVALUE 1.90e+00
tggtcattttatatcttccacttctctccttatcactcatgctttgcttttccttcttgaatgcacagagcatatttatcttcatcattttaatatatcgcctgctg

SEQ ID NO: 22028 - DNA, 144 bp, Homo sapiens
  MAP TO AC005553.1; EXPRESSED IN LUNG, SIGNAL = 2.5; EXPRESSED IN FETAL LIVER, SIGNAL = 2.3; EXPRESSED IN BRAIN, SIGNAL = 2.6; EXPRESSED IN BONE MARROW, SIGNAL = 2.3; EXPRESSED IN HELA, SIGNAL = 2.6; EXPRESSED IN PLACENTA, SIGNAL = 2.5; EXPRESSED IN HEART, SIGNAL = 2.6; EXPRESSED IN ADULT LIVER, SIGNAL = 2.5; EST_HUMAN HIT: W33035.1, EVALUE 1.20e-01
atggcaacacaggaatctcctttgaggattttttttcccccaaatgtttgcttcttggtgacagcatatccccctgaagttggaaagttggagagggctaagtctgggctttatcctcactgtcatttgttgtccttcctgcat

SEQ ID NO: 22029 - DNA, 105 bp, Homo sapiens
  MAP TO AC004592.1; EXPRESSED IN PLACENTA, SIGNAL = 9.8; EXPRESSED IN LUNG, SIGNAL =  11; EXPRESSED IN BONE MARROW, SIGNAL = 8.7; EXPRESSED IN HELA, SIGNAL = 9.5; EXPRESSED IN HEART, SIGNAL = 7.8; EXPRESSED IN FETAL LIVER, SIGNAL = 9.5; EXPRESSED IN BRAIN, SIGNAL = 9.8; EXPRESSED IN ADULT LIVER, SIGNAL = 9.5; SWISSPROT HIT: P19325, EVALUE 2.10e-01; EST_HUMAN HIT: BE267153.1, EVALUE 8.40e-02; NT HIT: U30681.1, EVALUE 2.30e-01
atgtacagtgccgaggggaaatctccacccacttattggtggggtcctaccaggtgccaaagttgctggagacacttcaccaagatgacctcatgcagctcctca

SEQ ID NO: 22030 - DNA, 201 bp, Homo sapiens
  MAP TO AC004241.1; EXPRESSED IN PLACENTA, SIGNAL = 2.9; EXPRESSED IN LUNG, SIGNAL = 3.1; EXPRESSED IN FETAL LIVER, SIGNAL = 2.6; EXPRESSED IN BRAIN, SIGNAL = 3.1; EXPRESSED IN ADULT LIVER, SIGNAL = 2.6; EXPRESSED IN HELA, SIGNAL = 3.5; EXPRESSED IN HEART, SIGNAL = 2.3; EXPRESSED IN BONE MARROW, SIGNAL = 2.3; EST_HUMAN HIT: AA985373.1, EVALUE 1.00e-85; NT HIT: gi5174622, EVALUE 1.00e-109
actcttcacttatgtcaatgagaagctgttctccaagcccacctatgcagccttcatcaacctcctcaacaactaccagcgggcaacaggccatggggagcacttcagtgcccaggagctggccgagcaggacgccttcctcagagagatcatgaagacagcagtcatgaaggagctctacagcttcctccatcaccagag

SEQ ID NO: 22031 - DNA, 372 bp, Homo sapiens
  MAP TO AC006385.3; EXPRESSED IN PLACENTA, SIGNAL = 5.5; EXPRESSED IN BRAIN, SIGNAL = 5.9; EXPRESSED IN ADULT LIVER, SIGNAL = 5.5; EXPRESSED IN LUNG, SIGNAL = 5.7; EXPRESSED IN HELA, SIGNAL = 5.6; EXPRESSED IN HEART, SIGNAL = 5.4; EXPRESSED IN FETAL LIVER, SIGNAL = 5.2; EXPRESSED IN BONE MARROW, SIGNAL =   6; NT HIT: X87941.1, EVALUE 2.30e-01; SWISSPROT HIT: P14404, EVALUE 2.70e+00; EST_HUMAN HIT: AA286875.1, EVALUE 8.70e-02
gtagttctgaaggctgtttatcttgtccttaatcatgacatcagctctcgtatctgtgacgtggcgctaaacattgtggaatgcttgcttcaacttggtgtggtgccctgtgtagaaaagaatagaaagaagagtgaaaacaaggaaaatgagaccttggaaaagaggccaagtgagggagctttccaattcaaaggagtatctggaagttccacctgtggattcggaggccctgctgttagtggagctggagatggtggaggagaagaaggaggaggtggagatggaggaggtggaggaggtgatggaggaggaggtggaggaggtggaggcggcccttatgagaagaatgataagaaccaagagaaggta

SEQ ID NO: 22032 - DNA, 238 bp, Homo sapiens
  MAP TO AC006097.1; EXPRESSED IN BONE MARROW, SIGNAL = 3.5; EXPRESSED IN HELA, SIGNAL = 3.6; EXPRESSED IN HEART, SIGNAL =   7; EXPRESSED IN FETAL LIVER, SIGNAL = 3.1; EXPRESSED IN BRAIN, SIGNAL = 3.4; EXPRESSED IN ADULT LIVER, SIGNAL = 3.2; EXPRESSED IN PLACENTA, SIGNAL = 3.3; EXPRESSED IN LUNG, SIGNAL = 4.4; EST_HUMAN HIT: AA195854.1, EVALUE 1.00e-98; NT HIT: AF005213.1, EVALUE 1.00e-63; SWISSPROT HIT: gi127998, EVALUE 1.00e-12
gttgaatataagaaaggctttgaagagagtaagacccggtttcacctgcccatggatatggtaaacatcaggcatgctaagaaggcccaaactctcgccagtgacctggactacaggaagaaactgcatgaatacactgtgctgcctgaagatatgaagactcagtgggccaagaaggcctatgggctccagagcgaggtgagcccacacattatcagttctcttcatgcatctcttg

SEQ ID NO: 22033 - DNA, 187 bp, Homo sapiens
  MAP TO AC004049.1; EXPRESSED IN ADULT LIVER, SIGNAL =   1; EXPRESSED IN PLACENTA, SIGNAL = 1.9; EXPRESSED IN LUNG, SIGNAL = 1.4; EXPRESSED IN HEART, SIGNAL = 1.4; EXPRESSED IN BRAIN, SIGNAL = 1.2; EXPRESSED IN FETAL LIVER, SIGNAL = 1.3; EXPRESSED IN BONE MARROW, SIGNAL = 2.1; EST_HUMAN HIT: AW965139.1, EVALUE 1.00e-101; SWISSPROT HIT: P90648, EVALUE 3.00e-05; NT HIT: AB040960.1, EVALUE 1.00e-101
attttagaggacaagacaataaagggatgtatcagtgtggagccttacatactgggagaatttgtaaaattgtcaaataacacgaaagtggtgaaaacagaatacaaagccacagaatatggcttggcctatggccatttttcttatgagttttctaatcatagagatgttgtggtcgatttacaag

SEQ ID NO: 22034 - DNA, 113 bp, Homo sapiens
  MAP TO AC004499.1; EXPRESSED IN FETAL LIVER, SIGNAL =   2; EXPRESSED IN BRAIN, SIGNAL =   2; EXPRESSED IN BONE MARROW, SIGNAL = 1.8; EXPRESSED IN ADULT LIVER, SIGNAL =   2; EXPRESSED IN PLACENTA, SIGNAL = 2.4; EXPRESSED IN LUNG, SIGNAL = 2.3; EXPRESSED IN HEART, SIGNAL = 1.8; EXPRESSED IN HELA, SIGNAL = 1.9; NT HIT: AE000527.1, EVALUE 5.30e-02; EST_HUMAN HIT: AW888406.1, EVALUE 1.00e+00
gacgttgagaggccagaagctggtacaattatggcttggagagtttaccagattggaggaagagctgaacccagctgacaatacagtttttgtttcaaataaagcccagaaag

SEQ ID NO: 22035 - DNA, 188 bp, Homo sapiens
  MAP TO AC006208.3; EXPRESSED IN PLACENTA, SIGNAL = 7.2; EXPRESSED IN ADULT LIVER, SIGNAL = 6.6; EXPRESSED IN LUNG, SIGNAL = 8.4; EXPRESSED IN HEART, SIGNAL =   7; EXPRESSED IN FETAL LIVER, SIGNAL = 6.9; EXPRESSED IN BRAIN, SIGNAL = 8.2; EXPRESSED IN BONE MARROW, SIGNAL = 8.4; EXPRESSED IN HELA, SIGNAL = 7.6; SWISSPROT HIT: P09978, EVALUE 8.60e+00; EST_HUMAN HIT: AU120582.1, EVALUE 3.00e-71; NT HIT: D87462.1, EVALUE 2.00e-71
ctaagggcagagttggtgttctgcacgtcatcctcctcgtcatcctcatagtcatcctcatcatctgagtactgctggggtgggcggactggaactcggctgcggcccacacctgccgccaggtcttcttcctcctgggacaaagaccagggcagttacaaacaagtgctgctcggcccaggctgagc

SEQ ID NO: 22036 - DNA, 122 bp, Homo sapiens
  MAP TO AC005572.1; EXPRESSED IN PLACENTA, SIGNAL = 9.5; EXPRESSED IN ADULT LIVER, SIGNAL = 8.7; EXPRESSED IN LUNG, SIGNAL =  10; EXPRESSED IN HELA, SIGNAL = 9.2; EXPRESSED IN HEART, SIGNAL = 9.2; EXPRESSED IN FETAL LIVER, SIGNAL = 8.6; EXPRESSED IN BRAIN, SIGNAL = 9.7; EXPRESSED IN BONE MARROW, SIGNAL = 8.1; SWISSPROT HIT: P06782, EVALUE 7.10e+00; EST_HUMAN HIT: W86490.1, EVALUE 1.00e-01; NT HIT: AF011342.1, EVALUE 2.70e-01
tttataacagttgccctgggaattctgacaccagtaattcacatggtatccaccatcatcctgagctccatgctgatcagtggctcaaaaagtttcttgtaagggaaaagtgcctggagcac

SEQ ID NO: 22037 - DNA, 151 bp, Homo sapiens
  MAP TO AC006004.1; EXPRESSED IN HELA, SIGNAL = 1.7; EXPRESSED IN FETAL LIVER, SIGNAL = 1.5; EXPRESSED IN BONE MARROW, SIGNAL = 1.6; EXPRESSED IN ADULT LIVER, SIGNAL = 1.6; EXPRESSED IN PLACENTA, SIGNAL = 1.9; EXPRESSED IN HEART, SIGNAL = 1.6; EXPRESSED IN BRAIN, SIGNAL = 1.4; EXPRESSED IN LUNG, SIGNAL =   2; NT HIT: gi7662349, EVALUE 1.00e-68; SWISSPROT HIT: P79795, EVALUE 2.00e-04; EST_HUMAN HIT: R19267.1, EVALUE 8.00e+00
taactctgacggtgtggtccggcacgaattacagcatccgattattgcccgctatgtgcgcatagtgcctctggattggaatggagaaggtcgcattggactcagaattgaagtttatggctgttcttactgtgagtatcgtattgtttaa

SEQ ID NO: 22038 - DNA, 107 bp, Homo sapiens
  MAP TO AC004595.1; EXPRESSED IN BRAIN, SIGNAL = 3.3; EXPRESSED IN LUNG, SIGNAL = 3.8; EXPRESSED IN FETAL LIVER, SIGNAL =   3; EXPRESSED IN BONE MARROW, SIGNAL = 3.1; EXPRESSED IN ADULT LIVER, SIGNAL = 3.3; EXPRESSED IN PLACENTA, SIGNAL = 3.1; EXPRESSED IN HEART, SIGNAL = 3.1; EXPRESSED IN HELA, SIGNAL = 3.4; NT HIT: AF216650.1, EVALUE 7.00e-17; EST_HUMAN HIT: R98276.1, EVALUE 4.00e-10
gggcagtctaggagtcccctatagaagggtgactcttggatattgagaggatggtattctttactgaggatcatctggagctggatggcctgaaggtgagaggagac

SEQ ID NO: 22039 - DNA, 145 bp, Homo sapiens
  MAP TO AC006360.2; EXPRESSED IN LUNG, SIGNAL = 2.8; EXPRESSED IN FETAL LIVER, SIGNAL = 2.7; EXPRESSED IN BRAIN, SIGNAL = 2.6; EXPRESSED IN BONE MARROW, SIGNAL = 2.5; EXPRESSED IN HELA, SIGNAL = 2.5; EXPRESSED IN PLACENTA, SIGNAL = 2.6; EXPRESSED IN HEART, SIGNAL = 2.7; EXPRESSED IN ADULT LIVER, SIGNAL = 2.3; SWISSPROT HIT: P31806, EVALUE 5.30e+00; NT HIT: X89819.1, EVALUE 3.30e-01; EST_HUMAN HIT: AW879498.1, EVALUE 4.90e-01
ccatcctggggtcctcacatccttgtttcaagaccagagcctcacggatacatttgtggatattggcctgcaattcttccatgtccagacaccaaaacccagtgcctgcatcctctgtagcttcttctgtttctgtggctgcctg

SEQ ID NO: 22040 - DNA, 116 bp, Homo sapiens
  MAP TO AC005282.1; EXPRESSED IN LUNG, SIGNAL =  13; EXPRESSED IN HELA, SIGNAL =  13; EXPRESSED IN BRAIN, SIGNAL =  13; EXPRESSED IN BONE MARROW, SIGNAL =  14; EXPRESSED IN ADULT LIVER, SIGNAL =  11; EXPRESSED IN PLACENTA, SIGNAL =  12; EXPRESSED IN HEART, SIGNAL =  12; EXPRESSED IN FETAL LIVER, SIGNAL =  13; EST_HUMAN HIT: AW503686.1, EVALUE 3.80e-01; NT HIT: S83390.1, EVALUE 2.50e-01; SWISSPROT HIT: Q08678, EVALUE 1.80e+00
cacatcctcctcaggactccccaccagacgaaagtcccatggcaacagccggatcttgttctccactgggcccccgacaccaggcaccaggcctgcacacagggggtctaaggaag

SEQ ID NO: 22041 - DNA, 342 bp, Homo sapiens
  MAP TO AC005373.1; EXPRESSED IN LUNG, SIGNAL = 4.1; EXPRESSED IN HELA, SIGNAL = 3.7; EXPRESSED IN FETAL LIVER, SIGNAL = 6.8; EXPRESSED IN BRAIN, SIGNAL = 6.4; EXPRESSED IN PLACENTA, SIGNAL = 5.3; EXPRESSED IN HEART, SIGNAL = 5.6; EXPRESSED IN BONE MARROW, SIGNAL = 3.6; EXPRESSED IN ADULT LIVER, SIGNAL = 5.6; SWISSPROT HIT: P11142, EVALUE 2.00e-34; NT HIT: gi11436030, EVALUE 6.00e-79; EST_HUMAN HIT: BE386615.1, EVALUE 1.00e-80
gcctcttcaatgggggccctggggaagctccagcagagggagctccaccatcagggaatcccccaggcattccttctggtgtgcctcctgtactctggtacaggttggtaattatgtggttgcagactttctccagattttgatgttgaaattcttccttcttctgaatctgattcttatccagccagttgataattttaatacccttatcaagaatcttctgtttgtcctcaacgttaatcttgccttgaagtttctcatcttcaacagctgctttcatatcgaatgcatagctttcaactgaattcttggatgacatcttgtccttctgcttctcatctt

SEQ ID NO: 22042 - DNA, 388 bp, Homo sapiens
  MAP TO AC006538.1; EXPRESSED IN PLACENTA, SIGNAL =   6; EXPRESSED IN LUNG, SIGNAL = 5.9; EXPRESSED IN BRAIN, SIGNAL = 6.9; EXPRESSED IN ADULT LIVER, SIGNAL = 5.6; EXPRESSED IN HELA, SIGNAL =   8; EXPRESSED IN HEART, SIGNAL = 5.7; EXPRESSED IN FETAL LIVER, SIGNAL = 5.6; EXPRESSED IN BONE MARROW, SIGNAL = 5.5; NT HIT: AE004868.1, EVALUE 2.40e-01; SWISSPROT HIT: P15196, EVALUE 1.50e-01; EST_HUMAN HIT: AA303113.1, EVALUE 3.60e-01
tgacgaccacaaatcagtacccaactatgtttaaaactctccagctgatctcagacaacccaccttccaccaactcccagcagctcaggagcctttctgatgaccaccctggcagttgcaggaaggccgaggaccaccccggatccccctggacaccggtggctctgagcctcgacctggccagcaccagccaaaaggaccaaccctccaagtgctgacgaacgaggtgaatgaggctcaaggtgacgttgtccggcctgccttctgcctcacacgcttcccccagcttcagccgcctccccgagacccgagagctggggaggagccaggcaggggaacgttcgtcctggctgagctccgaggccatgtccaggggtcatgaatttga

SEQ ID NO: 22043 - DNA, 230 bp, Homo sapiens
  MAP TO AC005588.1; EXPRESSED IN PLACENTA, SIGNAL = 4.3; EXPRESSED IN LUNG, SIGNAL = 5.1; EXPRESSED IN HEART, SIGNAL = 4.3; EXPRESSED IN BRAIN, SIGNAL = 4.6; EXPRESSED IN BONE MARROW, SIGNAL = 4.1; EXPRESSED IN ADULT LIVER, SIGNAL = 4.3; EXPRESSED IN HELA, SIGNAL = 4.2; EXPRESSED IN FETAL LIVER, SIGNAL = 4.2; SWISSPROT HIT: P19901, EVALUE 1.80e+00; EST_HUMAN HIT: BE463987.1, EVALUE 8.20e-01; NT HIT: AB004556.1, EVALUE 1.40e-01
ctacgtggcttgcattccacgagacatgttgacccccagcttgatcttcaggttcgacctctatgttccagacctagagagccaactctttactgcatccaccaccgatatgttccttgccattgtacatgtccatgtctgcatctccatcttctctgccctctgctccttcttattttccttgaatgaggtcagcatccacccaactggcaaggtaagaaataggacac

SEQ ID NO: 22044 - DNA, 80 bp, Homo sapiens
  MAP TO AC006368.2; EXPRESSED IN PLACENTA, SIGNAL = 7.2; EXPRESSED IN ADULT LIVER, SIGNAL = 8.6; EXPRESSED IN LUNG, SIGNAL = 5.1; EXPRESSED IN HEART, SIGNAL =  20; EXPRESSED IN FETAL LIVER, SIGNAL = 9.8; EXPRESSED IN BRAIN, SIGNAL = 3.5; EXPRESSED IN HELA, SIGNAL = 6.3; EXPRESSED IN BONE MARROW, SIGNAL = 5.7; EST_HUMAN HIT: AI435169.1, EVALUE 6.00e-36
aaaggtgcagaagcctgaagaaaagaaacaacttgctcaaaatcacatgacacaactgccccacctgtttcaagaggcac

SEQ ID NO: 22045 - DNA, 275 bp, Homo sapiens
  MAP TO AC004892.2; EXPRESSED IN PLACENTA, SIGNAL =  15; EXPRESSED IN HELA, SIGNAL =  14; EXPRESSED IN HEART, SIGNAL =  14; EXPRESSED IN ADULT LIVER, SIGNAL =  15; EXPRESSED IN BONE MARROW, SIGNAL =  14; EXPRESSED IN BRAIN, SIGNAL =  17; EXPRESSED IN FETAL LIVER, SIGNAL =  15; EXPRESSED IN LUNG, SIGNAL =  17; SWISSPROT HIT: P49006, EVALUE 1.10e-01; EST_HUMAN HIT: AA197054.1, EVALUE 7.00e-05; NT HIT: AL163247.2, EVALUE 1.00e-11
ctcggtcctcagcttgggctggaacctgacacttggtatagccagcaggatactgaggagagtgagcctttggtccccactgattctgagtcagccatgcagctgaaacattggttgtggtggccggtggcagcttactgctcggatgggatccagtggaaacctgggcggcagtagatgggtcccccgtgaggatggagaaggcgctgaaacagctgaagtacagagcaccaagaaggaataagcctttgctggcagagttggatgtgcatttt

SEQ ID NO: 22046 - DNA, 109 bp, Homo sapiens
  MAP TO AC002457.1; EXPRESSED IN BRAIN, SIGNAL = 4.4; EXPRESSED IN ADULT LIVER, SIGNAL = 4.5; EXPRESSED IN PLACENTA, SIGNAL = 4.4; EXPRESSED IN LUNG, SIGNAL =   5; EXPRESSED IN HELA, SIGNAL = 3.9; EXPRESSED IN HEART, SIGNAL = 3.6; EXPRESSED IN BONE MARROW, SIGNAL = 4.2; EXPRESSED IN FETAL LIVER, SIGNAL = 4.6; NT HIT: M29426.1, EVALUE 1.00e-52; SWISSPROT HIT: P08183, EVALUE 6.00e-12
cttcctctcatgatgctggtgtttggagaaatgacagatatctttgcaaatgcaggaaatttagaagatctgatgtcaaacatcactaatagaagtaagtattgtttgt

SEQ ID NO: 22047 - DNA, 103 bp, Homo sapiens
  MAP TO AC004518.1; EXPRESSED IN HEART, SIGNAL = 1.4; EXPRESSED IN BRAIN, SIGNAL = 1.5; EXPRESSED IN PLACENTA, SIGNAL = 1.5; EXPRESSED IN LUNG, SIGNAL = 1.7; EXPRESSED IN FETAL LIVER, SIGNAL = 1.6; EXPRESSED IN BONE MARROW, SIGNAL = 1.5; EXPRESSED IN ADULT LIVER, SIGNAL = 1.7; NT HIT: gi6677638, EVALUE 8.70e-01; EST_HUMAN HIT: BE897030.1, EVALUE 8.20e-02
gtgtgagaaacattttggagacccaaaggaaggggccattgtaaagaagttccaccagagtagaggtaagaacggggagagggcatgcctatagacacctatc

SEQ ID NO: 22048 - DNA, 236 bp, Homo sapiens
  MAP TO AC005598.6; EXPRESSED IN LUNG, SIGNAL = 4.4; EXPRESSED IN HELA, SIGNAL = 2.8; EXPRESSED IN HEART, SIGNAL = 2.5; EXPRESSED IN FETAL LIVER, SIGNAL = 3.5; EXPRESSED IN BRAIN, SIGNAL = 2.5; EXPRESSED IN PLACENTA, SIGNAL =   4; EXPRESSED IN BONE MARROW, SIGNAL = 2.8; EXPRESSED IN ADULT LIVER, SIGNAL =   3; NT HIT: gi5174386, EVALUE 1.00e-119; EST_HUMAN HIT: AU133399.1, EVALUE 1.00e-119
cgatcaaggagaccaaagaggcgttggagaacatgaacagcaccttgaagagcttgcaccaacaaagtacacagcttagcagcagtctgaccagcgtgaaaactagcctgcggtcatctctcaatgaccctctgtgcttggtgcatccatcaagtgaaacctgcaacagcatcagattgtctctaagccagctgaatagcaaccctgaactgaggcaggtgagcaggcatgagctt

SEQ ID NO: 22049 - DNA, 93 bp, Homo sapiens
  MAP TO AC004606.1; EXPRESSED IN PLACENTA, SIGNAL = 1.3; EXPRESSED IN LUNG, SIGNAL = 1.4; EXPRESSED IN FETAL LIVER, SIGNAL = 1.7; EXPRESSED IN BONE MARROW, SIGNAL = 1.3; EXPRESSED IN ADULT LIVER, SIGNAL = 1.4; EXPRESSED IN HEART, SIGNAL = 1.6; EXPRESSED IN BRAIN, SIGNAL = 1.3; NT HIT: X53096.1, EVALUE 3.00e+00
ttgacagactggaataaagttgacttagccaatgagaaacctgaagtttatgctggcatattttttgatatgggtattacatttcaacttaag

SEQ ID NO: 22050 - DNA, 190 bp, Homo sapiens
  MAP TO AC005165.1; EXPRESSED IN BONE MARROW, SIGNAL =  23; EXPRESSED IN PLACENTA, SIGNAL =  71; EXPRESSED IN LUNG, SIGNAL =  29; EXPRESSED IN HELA, SIGNAL =  21; EXPRESSED IN FETAL LIVER, SIGNAL =  35; EXPRESSED IN BRAIN, SIGNAL =  48; EXPRESSED IN ADULT LIVER, SIGNAL =  95; EXPRESSED IN HEART, SIGNAL =  41; SWISSPROT HIT: P02248, EVALUE 1.00e-24; NT HIT: X56998.1, EVALUE 2.00e-62; EST_HUMAN HIT: AA420803.1, EVALUE 6.00e-63
caggatggactctttctggatgttgcagtctgagagagtacggccatcctccagctgtttgcccacaaatatcagacattgctggtcaagtggaacgccctccttgtcttgaatttcggccttgacattctcagtggtgtcactgggctcgacctcgagggtgatggtcttgcctgtgagggtcttcaca

SEQ ID NO: 22051 - DNA, 99 bp, Homo sapiens
  MAP TO AC005288.1; EXPRESSED IN BONE MARROW, SIGNAL =  28; EXPRESSED IN PLACENTA, SIGNAL =  23; EXPRESSED IN LUNG, SIGNAL =  25; EXPRESSED IN HELA, SIGNAL =  25; EXPRESSED IN HEART, SIGNAL =  23; EXPRESSED IN FETAL LIVER, SIGNAL =  23; EXPRESSED IN BRAIN, SIGNAL =  31; EXPRESSED IN ADULT LIVER, SIGNAL =  24; SWISSPROT HIT: P34284, EVALUE 1.00e-06; EST_HUMAN HIT: BF433100.1, EVALUE 3.00e-35; NT HIT: gi11560092, EVALUE 3.00e-16
gcctggaatgttctggctctggatggcagtaactggcagcgaattgacctatttgatttccagagggatattgaggtataattatgtggtgtgtggccc

SEQ ID NO: 22052 - DNA, 206 bp, Homo sapiens
  MAP TO AC005231.2; EXPRESSED IN LUNG, SIGNAL =  11; EXPRESSED IN FETAL LIVER, SIGNAL =  12; EXPRESSED IN PLACENTA, SIGNAL =  11; EXPRESSED IN HELA, SIGNAL =  10; EXPRESSED IN BRAIN, SIGNAL =  13; EXPRESSED IN BONE MARROW, SIGNAL =  11; EXPRESSED IN ADULT LIVER, SIGNAL =  12; EXPRESSED IN HEART, SIGNAL =  10; SWISSPROT HIT: O88307, EVALUE 2.20e+00; NT HIT: M19650.1, EVALUE 7.60e+00
ctgccctgctctggggctctgagatggtggctggatcccatcttacatgcagctgagctgggctggggcacacaggagccaggcgtgtgcccagtaacaaacaaaaccatgtggccatgcttgcacatgatccatgtcttcttggtcagcagctctttgctgctcagagccttcatggcgcctgccctgtgaagccacgtggtggg

SEQ ID NO: 22053 - DNA, 211 bp, Homo sapiens
  MAP TO AC006531.1; EXPRESSED IN PLACENTA, SIGNAL = 1.5; EXPRESSED IN LUNG, SIGNAL = 1.4; EXPRESSED IN BONE MARROW, SIGNAL = 1.7; EXPRESSED IN HEART, SIGNAL = 1.7; EXPRESSED IN FETAL LIVER, SIGNAL = 1.8; EXPRESSED IN BRAIN, SIGNAL = 1.2; EXPRESSED IN ADULT LIVER, SIGNAL = 1.8; NT HIT: AJ000477.1, EVALUE 8.00e-06; EST_HUMAN HIT: AW898066.1, EVALUE 2.00e-07
acgggcaactatggtgatgatgagaaggagaaggatgaagaggaggaggagggtggtggtgatggccatgatgatggtggtgatgatcgtggtaatgaggatgatggcaatggtcatgatgatgatgatgatgacggtgatggtggtggtgatgataatgataataatgatatcagaggcgtgtgaaccagaacactccatcttaaatagt

SEQ ID NO: 22054 - DNA, 155 bp, Homo sapiens
  MAP TO AC004927.2; EXPRESSED IN LUNG, SIGNAL = 7.7; EXPRESSED IN BONE MARROW, SIGNAL = 5.7; EXPRESSED IN PLACENTA, SIGNAL = 6.8; EXPRESSED IN HELA, SIGNAL = 6.3; EXPRESSED IN HEART, SIGNAL = 5.1; EXPRESSED IN FETAL LIVER, SIGNAL = 6.2; EXPRESSED IN BRAIN, SIGNAL = 6.2; EXPRESSED IN ADULT LIVER, SIGNAL = 6.4; NT HIT: gi11417366, EVALUE 1.40e+00; EST_HUMAN HIT: AA077705.1, EVALUE 3.00e-27
atctagtacctagaatcagcactgatgatatggatctagtacctagaatcagcactgatgatatacatctagtacccagaatcaatgctgatgatatggatctagtacctagaataatcctgacacagccatcacccttcaccagcatccgacaa

SEQ ID NO: 22055 - DNA, 228 bp, Homo sapiens
  MAP TO AC005393.1; EXPRESSED IN PLACENTA, SIGNAL = 2.8; EXPRESSED IN LUNG, SIGNAL = 2.2; EXPRESSED IN HEART, SIGNAL = 1.8; EXPRESSED IN BRAIN, SIGNAL = 1.6; EXPRESSED IN BONE MARROW, SIGNAL = 9.8; EXPRESSED IN ADULT LIVER, SIGNAL = 1.7; EXPRESSED IN HELA, SIGNAL = 1.7; EXPRESSED IN FETAL LIVER, SIGNAL = 2.4; SWISSPROT HIT: Q05315, EVALUE 4.00e-37; EST_HUMAN HIT: AW970335.1, EVALUE 1.00e-115
ctggtacttatctggcagcactgagatgctcagttcaaattcttggccatcctgaaagggcatgttcttggattccacctgctgcttccaggccccatactcacggctgttcatgaccacacgacgaccaaagcacacttggaaatggaagacaatgtctgattcctccttcatctcagtgtggaaatccacctgcagatatggttcattcctgagggcagagcacac

SEQ ID NO: 22056 - DNA, 417 bp, Homo sapiens
  MAP TO AC004161.1; EXPRESSED IN PLACENTA, SIGNAL = 3.8; EXPRESSED IN LUNG, SIGNAL = 4.1; EXPRESSED IN FETAL LIVER, SIGNAL = 3.8; EXPRESSED IN BONE MARROW, SIGNAL = 3.3; EXPRESSED IN HELA, SIGNAL = 3.1; EXPRESSED IN BRAIN, SIGNAL =   3; EXPRESSED IN ADULT LIVER, SIGNAL = 4.1; EXPRESSED IN HEART, SIGNAL = 2.5; NT HIT: gi4503512, EVALUE 1.00e-114; SWISSPROT HIT: Q13347, EVALUE 7.00e-62; EST_HUMAN HIT: BE730508.1, EVALUE 1.00e-117
aatattcaccaacacctctccaggcttggcactatactggttgagctttccactctcatggcctgcaatgatgcactccccacaggagccccaaatggcactagtgattttagagtcactgcaagggatcttcaggtagcactcattgctgtcaatctggctcagatcctgcaggtcaaagaagctcacaaagcactgatagcttttctgcttctccatggagaacgtgatgatattgcccccaaagtcaaaactgcagatccacacagttgaattggtcttgagtagggccagctgtttccctgtttcacaggcccaaagatggttgtcagctgaatgggtgaggacatgcttggtgtcccagtcagcgtccacataccacacagctctggtatggcccatgtagatgcccagcct

SEQ ID NO: 22057 - DNA, 155 bp, Homo sapiens
  MAP TO AC006144.1; EXPRESSED IN BONE MARROW, SIGNAL = 1.4; EXPRESSED IN HEART, SIGNAL = 1.5; EXPRESSED IN FETAL LIVER, SIGNAL = 1.3; EXPRESSED IN ADULT LIVER, SIGNAL = 1.4; EXPRESSED IN PLACENTA, SIGNAL = 2.3; EXPRESSED IN BRAIN, SIGNAL = 1.3; EXPRESSED IN LUNG, SIGNAL = 1.5; EST_HUMAN HIT: BF663335.1, EVALUE 3.40e-02; NT HIT: AF167441.1, EVALUE 6.00e-06; SWISSPROT HIT: P38266, EVALUE 2.30e+00
cctgctcaaaatagtattatcattggtaatatggtctgtatcttgtctgacccggatgatgtgtcccaagaagtagggtttgagaaggtagattctgcattcatagaggaaggggtggccgtccaggtacaggccacatgtcatgaatcatttcc

SEQ ID NO: 22058 - DNA, 227 bp, Homo sapiens
  MAP TO AC004526.1; EXPRESSED IN ADULT LIVER, SIGNAL =  17; EXPRESSED IN PLACENTA, SIGNAL =  15; EXPRESSED IN HEART, SIGNAL =  15; EXPRESSED IN FETAL LIVER, SIGNAL =  16; EXPRESSED IN BRAIN, SIGNAL =  22; EXPRESSED IN BONE MARROW, SIGNAL =  15; EXPRESSED IN LUNG, SIGNAL =  13; EXPRESSED IN HELA, SIGNAL =  11; SWISSPROT HIT: P21359, EVALUE 4.00e-40; NT HIT: M89914.1, EVALUE 1.00e-119; EST_HUMAN HIT: BE936121.1, EVALUE 1.00e-113
aacccccccgatttgccgacaagcccagaccaaactagaagtggccctgtacatgtttctgtggaaccctgacactgaagctgttctggttgccatgtcctgtttccgccacctctgtgaggaagcagatatccggtgtggggtggatgaagtgtcagtgcataacctcttgcccaactataacacattcatggagtttgcctctgtcagcaatatgatgtcaacag

SEQ ID NO: 22059 - DNA, 326 bp, Homo sapiens
  MAP TO AC004991.1; EXPRESSED IN PLACENTA, SIGNAL = 5.1; EXPRESSED IN ADULT LIVER, SIGNAL = 5.1; EXPRESSED IN LUNG, SIGNAL = 5.3; EXPRESSED IN HEART, SIGNAL = 5.3; EXPRESSED IN FETAL LIVER, SIGNAL = 5.3; EXPRESSED IN BRAIN, SIGNAL = 7.2; EXPRESSED IN HELA, SIGNAL = 5.6; EXPRESSED IN BONE MARROW, SIGNAL = 5.2; NT HIT: U35239.1, EVALUE 3.20e+00; EST_HUMAN HIT: BE741629.1, EVALUE 3.00e-01; SWISSPROT HIT: O35181, EVALUE 5.50e-01
ctgtgatggggaggaccacaaagcccctggccacaggctggcacatccagcagtcagcggcagtgacccagacagagaccgggaattccccgggcacgtggccgaccacacggatggtggagctgagacccttctccatcttgccagtaagcaccagcggggtgtggatccagtggaagcggtagaggtgggcgtcagcgggcagggccaggctgccgttgtccttggccaccaggctggccgagatggtcaccaccgctcccgtggtggcagggctatcggtggtgagattgagttcatacaggcctaggagcccagaaacaaag

SEQ ID NO: 22060 - DNA, 169 bp, Homo sapiens
  MAP TO AC005316.1; EXPRESSED IN PLACENTA, SIGNAL = 3.8; EXPRESSED IN LUNG, SIGNAL = 5.7; EXPRESSED IN FETAL LIVER, SIGNAL = 3.6; EXPRESSED IN ADULT LIVER, SIGNAL = 3.7; EXPRESSED IN HELA, SIGNAL = 3.9; EXPRESSED IN HEART, SIGNAL =   4; EXPRESSED IN BRAIN, SIGNAL = 4.1; EXPRESSED IN BONE MARROW, SIGNAL = 3.6; SWISSPROT HIT: P54098, EVALUE 1.00e-19; EST_HUMAN HIT: BE903223.1, EVALUE 2.00e-81; NT HIT: gi11432966, EVALUE 1.00e-81
cttcctgatccatgggatcaccaggggccccagccccctcgatgggcaacttgctggctgtggctggttccttcttcaccttcttagctttcttctgcttaaattcttgcaggtcccactccaggtcccagagccaggggtcttctttgtacctacagagccagtccac

SEQ ID NO: 22061 - DNA, 239 bp, Homo sapiens
  MAP TO AC004222.1; EXPRESSED IN ADULT LIVER, SIGNAL =   3; EXPRESSED IN PLACENTA, SIGNAL = 3.3; EXPRESSED IN LUNG, SIGNAL = 3.6; EXPRESSED IN HELA, SIGNAL = 3.5; EXPRESSED IN HEART, SIGNAL = 3.3; EXPRESSED IN BRAIN, SIGNAL = 3.1; EXPRESSED IN FETAL LIVER, SIGNAL =   3; EXPRESSED IN BONE MARROW, SIGNAL = 2.9; SWISSPROT HIT: P21359, EVALUE 7.00e-43; EST_HUMAN HIT: BE936121.1, EVALUE 1.00e-119; NT HIT: M89914.1, EVALUE 1.00e-119
atattgctgacagaggcaaactccatgaatgtgttatagttgggcaagaggttatgcactgacacttcatccaccccacaccggatatctgcttcctcacagaggtggcggaaacaggacatggcaaccagaacagcttcagtgtcagggttccacagaaacatgtacagggccacttctagtttggtctgggcttgtcggcaaatcgggggggttccgctgcatcctgctgcactatc

SEQ ID NO: 22062 - DNA, 88 bp, Homo sapiens
  MAP TO AC004615.1; EXPRESSED IN HEART, SIGNAL = 2.4; EXPRESSED IN ADULT LIVER, SIGNAL = 2.6; EXPRESSED IN PLACENTA, SIGNAL = 2.6; EXPRESSED IN FETAL LIVER, SIGNAL = 1.9; EXPRESSED IN BRAIN, SIGNAL = 3.6; EXPRESSED IN BONE MARROW, SIGNAL = 2.7; EXPRESSED IN LUNG, SIGNAL = 3.1; EXPRESSED IN HELA, SIGNAL = 2.6; EST_HUMAN HIT: AV653405.1, EVALUE 1.00e-18; SWISSPROT HIT: P06836, EVALUE 5.60e+00; NT HIT: AL163282.2, EVALUE 1.00e-11
ggcccagcaccacgtagatgctactgaggcttggggcttgcaccctctgaagcctcagcctgagctgtaccttggcccctttagccat

SEQ ID NO: 22063 - DNA, 218 bp, Homo sapiens
  MAP TO AC005919.1; EXPRESSED IN LUNG, SIGNAL = 1.9; EXPRESSED IN BRAIN, SIGNAL = 1.8; EXPRESSED IN PLACENTA, SIGNAL = 1.8; EXPRESSED IN HEART, SIGNAL = 1.5; EXPRESSED IN FETAL LIVER, SIGNAL = 1.7; EXPRESSED IN BONE MARROW, SIGNAL = 1.8; EXPRESSED IN ADULT LIVER, SIGNAL = 1.7; EXPRESSED IN HELA, SIGNAL = 1.7; SWISSPROT HIT: P13645, EVALUE 1.00e-10; NT HIT: gi7106336, EVALUE 1.00e-54; EST_HUMAN HIT: AI150703.1, EVALUE 9.00e-87
aggcggcagtaggtctcaatttctttttccaagtggaccttgacatcgaggagatgctcatactccagcttctggccctcggtctcggttctgacctggtgcagctgctcctccagggccccgatctgagcctggatctgcgccagctgcgtacagtagttgctctcggtctccgtcaaggagcactccagggagtgtttctgaggacatcaaagaag

SEQ ID NO: 22064 - DNA, 100 bp, Homo sapiens
  MAP TO AC006379.2; EXPRESSED IN LUNG, SIGNAL = 3.3; EXPRESSED IN HELA, SIGNAL = 4.6; EXPRESSED IN HEART, SIGNAL =   5; EXPRESSED IN FETAL LIVER, SIGNAL = 8.3; EXPRESSED IN BRAIN, SIGNAL = 6.8; EXPRESSED IN PLACENTA, SIGNAL = 4.7; EXPRESSED IN BONE MARROW, SIGNAL = 5.7; EXPRESSED IN ADULT LIVER, SIGNAL =   6; SWISSPROT HIT: P34413, EVALUE 1.00e-06; EST_HUMAN HIT: BF131007.1, EVALUE 1.00e-49; NT HIT: AB020684.1, EVALUE 1.00e-12
ctcaagtctgcatcttcgtaaagtggatgattcacaatgggatgaagtgtagacagcttgacgcttgccattgtaggcatggcacctgcgaagacagcat

SEQ ID NO: 22065 - DNA, 144 bp, Homo sapiens
  MAP TO AC004904.1; EXPRESSED IN LUNG, SIGNAL = 2.6; EXPRESSED IN FETAL LIVER, SIGNAL = 2.3; EXPRESSED IN BRAIN, SIGNAL = 2.1; EXPRESSED IN BONE MARROW, SIGNAL = 2.3; EXPRESSED IN HELA, SIGNAL = 2.6; EXPRESSED IN PLACENTA, SIGNAL = 2.6; EXPRESSED IN HEART, SIGNAL = 2.3; EXPRESSED IN ADULT LIVER, SIGNAL = 2.4; EST_HUMAN HIT: AA278478.1, EVALUE 3.10e-02
gtgttttttctctctgttgttcacattgatggtaatttgggtaattgctctatcttcagattcgatgattttttcctctttttccttcattttcttattgagcccattgagcttgttactttcattattgtattttttcattct

SEQ ID NO: 22066 - DNA, 166 bp, Homo sapiens
  MAP TO AC004477.1; EXPRESSED IN PLACENTA, SIGNAL =   7; EXPRESSED IN LUNG, SIGNAL = 5.6; EXPRESSED IN HEART, SIGNAL = 4.5; EXPRESSED IN HELA, SIGNAL = 4.6; EXPRESSED IN FETAL LIVER, SIGNAL = 8.8; EXPRESSED IN BRAIN, SIGNAL = 5.2; EXPRESSED IN BONE MARROW, SIGNAL = 6.1; EXPRESSED IN ADULT LIVER, SIGNAL = 6.9; SWISSPROT HIT: P27918, EVALUE 7.80e-01; EST_HUMAN HIT: BF240537.1, EVALUE 4.00e-79; NT HIT: AF110322.1, EVALUE 3.00e-79
tcaactatgagatcccctcactgaagaagcagattgccaagtgccagcagctgcagcaagaatacagccgcaaggaggaggagtgccaggcaggggctgccgagatgcgggagcagttctaccactcctgcaagcagtatggcatcacggtgagcggcggcagcct

SEQ ID NO: 22067 - DNA, 149 bp, Homo sapiens
  MAP TO AC002467.1; EXPRESSED IN LUNG, SIGNAL = 2.1; EXPRESSED IN HELA, SIGNAL = 1.9; EXPRESSED IN HEART, SIGNAL = 2.5; EXPRESSED IN FETAL LIVER, SIGNAL = 2.8; EXPRESSED IN BONE MARROW, SIGNAL =   2; EXPRESSED IN PLACENTA, SIGNAL = 1.8; EXPRESSED IN BRAIN, SIGNAL = 2.2; EXPRESSED IN ADULT LIVER, SIGNAL =   2; NT HIT: AB017568.1, EVALUE 3.40e-01; EST_HUMAN HIT: AW804417.1, EVALUE 1.30e-01
acaatcagggtaagttgaacactgaatattctgttgtagaattcatttgcaatgacttctggtgagcctccaatgaggacatactctttctctgcaatttcatttttgcccacagccacctcagccatggaggagctctaggtgatact

SEQ ID NO: 22068 - DNA, 242 bp, Homo sapiens
  MAP TO AC004932.1; EXPRESSED IN PLACENTA, SIGNAL = 2.5; EXPRESSED IN LUNG, SIGNAL = 2.5; EXPRESSED IN HELA, SIGNAL = 2.3; EXPRESSED IN FETAL LIVER, SIGNAL = 2.3; EXPRESSED IN ADULT LIVER, SIGNAL = 2.3; EXPRESSED IN HEART, SIGNAL = 2.6; EXPRESSED IN BRAIN, SIGNAL = 2.2; EXPRESSED IN BONE MARROW, SIGNAL = 2.3; EST_HUMAN HIT: AI017565.1, EVALUE 4.00e-18; NT HIT: D84232.1, EVALUE 2.30e+00; SWISSPROT HIT: P73162, EVALUE 1.60e+00
ctgtctgtgtaattgcccttaccggtgcagctgcaggcatgtctcaggcaagcctccttaccatgcaagtttccacggatcccactgtgtgcatgttcatagaagaggaggaaacttttccctgggagcccaccaattacacagagaacaaagttgtttctatattgggccttgctcccttatctgtgcagctgcagcttgatttttcaggtttttttctctgtttaaaagaattctactga

SEQ ID NO: 22069 - DNA, 158 bp, Homo sapiens
  MAP TO AC004169.3; EXPRESSED IN PLACENTA, SIGNAL = 3.5; EXPRESSED IN HELA, SIGNAL = 3.2; EXPRESSED IN HEART, SIGNAL = 2.5; EXPRESSED IN FETAL LIVER, SIGNAL = 3.3; EXPRESSED IN BRAIN, SIGNAL =   3; EXPRESSED IN BONE MARROW, SIGNAL = 3.1; EXPRESSED IN LUNG, SIGNAL = 4.7; EXPRESSED IN ADULT LIVER, SIGNAL = 3.1; EST_HUMAN HIT: AW161935.1, EVALUE 8.00e-74; NT HIT: gi11056013, EVALUE 6.00e-74; SWISSPROT HIT: P20127, EVALUE 4.00e+00
tggaaaactcgcccatctccagctgtgacaccagtgacaccgagggccccgtgccggtgaacagcgcggccgtcttgaagaagagccaggctgccccgggcagctccccctgccgagggcatgtgctgcggaaggccaaggtaagccctgatgtccgg

SEQ ID NO: 22070 - DNA, 364 bp, Homo sapiens
  MAP TO AC006070.1; EXPRESSED IN PLACENTA, SIGNAL = 1.8; EXPRESSED IN HEART, SIGNAL = 1.9; EXPRESSED IN LUNG, SIGNAL = 1.9; EXPRESSED IN HELA, SIGNAL = 1.9; EXPRESSED IN FETAL LIVER, SIGNAL = 1.6; EXPRESSED IN BRAIN, SIGNAL = 1.9; EXPRESSED IN BONE MARROW, SIGNAL = 1.8; EXPRESSED IN ADULT LIVER, SIGNAL = 1.8; SWISSPROT HIT: P45931, EVALUE 1.50e+00; EST_HUMAN HIT: BE250684.1, EVALUE 2.00e-05; NT HIT: M27685.1, EVALUE 2.00e-17
gtgcacaggagctgctctggccacagctggacccacagctggtttggccacagcagctggacccacagcagatgggctggtagcagggtgtgctgcagcaggaaggctggcagcagctggtcacacaggtgggctggcagcaggtggtcctgcagcaggtgttttgacagcaagttgggtggcagtaaggctggcagcagctggacacacagcaggagggctggcagcagggtgtgctgctgcaggtggtcacaatggtgggctgccagcaggtagtcctgcagcaagtggtcctgcagcaggtaggctgacagccaggggagcaacagtgggtcatgttgtcaggggtggagggtgggcttct

SEQ ID NO: 22071 - DNA, 251 bp, Homo sapiens
  MAP TO AC004687.1; EXPRESSED IN PLACENTA, SIGNAL = 3.5; EXPRESSED IN LUNG, SIGNAL = 3.7; EXPRESSED IN FETAL LIVER, SIGNAL = 3.7; EXPRESSED IN BONE MARROW, SIGNAL = 3.2; EXPRESSED IN HELA, SIGNAL = 4.1; EXPRESSED IN ADULT LIVER, SIGNAL = 3.9; EXPRESSED IN HEART, SIGNAL =   3; EXPRESSED IN BRAIN, SIGNAL = 4.2; EST_HUMAN HIT: AI393843.1, EVALUE 5.80e-02; SWISSPROT HIT: P97459, EVALUE 4.50e-01; NT HIT: AB014512.1, EVALUE 5.00e-94
tatccaagaagcaccaccctatctcctggtccctcctcaggccacagaccccaagcccacgtgccatcttctctttagaccttgacctcccgccgggctcccctgggcgctgcaccccaaagtcttccgagcctgcccctgccactctcactggggtccctcgaaggacagccaagaaggcagagtctctctccaactcctcccactccgagtccatccacaacagccccaagtcatgccctacacctgag

SEQ ID NO: 22072 - DNA, 195 bp, Homo sapiens
  MAP TO AC006487.7; EXPRESSED IN PLACENTA, SIGNAL = 1.6; EXPRESSED IN LUNG, SIGNAL = 1.3; EXPRESSED IN HEART, SIGNAL = 1.9; EXPRESSED IN BRAIN, SIGNAL = 2.3; EXPRESSED IN HELA, SIGNAL = 3.2; EXPRESSED IN FETAL LIVER, SIGNAL = 2.3; EXPRESSED IN BONE MARROW, SIGNAL = 2.1; EXPRESSED IN ADULT LIVER, SIGNAL = 2.7; NT HIT: Z98266.1, EVALUE 1.20e-01
gattctggtagtgacactgatggcagtggcataatgatgatggtcataatggtgctggtgttgttagaagtggtggtgatggtggcagtggtggtgatgatggtgatggtactggtggtggtcataatgatgatggtcatagtggtactagttttggtatagatgcttctggtcatggtgatagtgggagtctca

SEQ ID NO: 22073 - DNA, 212 bp, Homo sapiens
  MAP TO AC005318.1; EXPRESSED IN LUNG, SIGNAL = 3.2; EXPRESSED IN PLACENTA, SIGNAL =   3; EXPRESSED IN HEART, SIGNAL =   3; EXPRESSED IN FETAL LIVER, SIGNAL = 2.8; EXPRESSED IN BRAIN, SIGNAL = 2.6; EXPRESSED IN BONE MARROW, SIGNAL = 2.5; EXPRESSED IN ADULT LIVER, SIGNAL = 3.1; EXPRESSED IN HELA, SIGNAL = 2.3; NT HIT: gi11432974, EVALUE 1.00e-106; SWISSPROT HIT: P08910, EVALUE 3.00e-34; EST_HUMAN HIT: AA781155.1, EVALUE 1.00e-106
tccaggtcggcctccacctgctccgtgtcagagcactgcaacttgttacgctcccattggcaaatggcgttggcgtactccaccaccagcttatccatccatgtcaggggctcggggaacagcacagagccctcaaagaagcccaagtggcccccatgcagaggcagcacaaacatgacgttctctcgtttctctgcaggggaaacgcagct

SEQ ID NO: 22074 - DNA, 93 bp, Homo sapiens
  MAP TO AC005099.1; EXPRESSED IN LUNG, SIGNAL = 1.6; EXPRESSED IN FETAL LIVER, SIGNAL = 1.9; EXPRESSED IN BONE MARROW, SIGNAL = 1.7; EXPRESSED IN PLACENTA, SIGNAL = 1.6; EXPRESSED IN HELA, SIGNAL = 1.8; EXPRESSED IN HEART, SIGNAL = 1.9; EXPRESSED IN BRAIN, SIGNAL = 1.9; EXPRESSED IN ADULT LIVER, SIGNAL = 1.8; SWISSPROT HIT: P53820, EVALUE 9.50e+00; NT HIT: L00122.1, EVALUE 4.90e-02; EST_HUMAN HIT: AW190802.1, EVALUE 1.10e+00
ctctaaggagccgaacctttaccttccgctcactgacataacagatgtgtgtgactgtgggggtgggggagacgggatgggctctgcaggtct

SEQ ID NO: 22075 - DNA, 189 bp, Homo sapiens
  MAP TO AC005237.2; EXPRESSED IN FETAL LIVER, SIGNAL = 1.7; EXPRESSED IN BRAIN, SIGNAL = 1.9; EXPRESSED IN BONE MARROW, SIGNAL = 1.5; EXPRESSED IN PLACENTA, SIGNAL = 1.6; EXPRESSED IN HEART, SIGNAL = 1.9; EXPRESSED IN ADULT LIVER, SIGNAL = 1.7; EXPRESSED IN LUNG, SIGNAL = 1.9; SWISSPROT HIT: P22194, EVALUE 2.00e-07; EST_HUMAN HIT: BF690466.1, EVALUE 2.00e-59; NT HIT: AF067133.1, EVALUE 1.00e-102
gcaatcgaaaatatcgacaccttaaccaacctggagagtttgtttttggggaaaaacaaaattactaaacttcagaacctggatgcgctcaccaacctgacagtcctcagtatgcaggtacggagcttcctgagccgcccttccctgcgagccctggcagggccagcgctgctggacacaatcttagtt

SEQ ID NO: 22076 - DNA, 108 bp, Homo sapiens
  MAP TO AC005138.1; EXPRESSED IN LUNG, SIGNAL = 1.7; EXPRESSED IN FETAL LIVER, SIGNAL = 1.8; EXPRESSED IN PLACENTA, SIGNAL = 1.7; EXPRESSED IN BRAIN, SIGNAL = 1.6; EXPRESSED IN BONE MARROW, SIGNAL = 1.6; EXPRESSED IN ADULT LIVER, SIGNAL = 1.6; EXPRESSED IN HEART, SIGNAL = 1.5; EST_HUMAN HIT: AW054976.1, EVALUE 1.40e+00
gattgttgggaagaaaacactatttgactcaggtggggtacagttgaatgatgacagccatagagatgatattgatgatgatgatgatatctatttgttaggtgttca

SEQ ID NO: 22077 - DNA, 156 bp, Homo sapiens
  MAP TO AC005951.1; EXPRESSED IN BONE MARROW, SIGNAL = 3.4; EXPRESSED IN PLACENTA, SIGNAL = 3.9; EXPRESSED IN ADULT LIVER, SIGNAL = 3.7; EXPRESSED IN BRAIN, SIGNAL = 3.6; EXPRESSED IN FETAL LIVER, SIGNAL = 3.3; EXPRESSED IN HEART, SIGNAL = 3.6; EXPRESSED IN HELA, SIGNAL = 3.7; EXPRESSED IN LUNG, SIGNAL =   4; SWISSPROT HIT: gi8039778, EVALUE 3.00e+00; NT HIT: U86303.1, EVALUE 2.30e-02
tacccatggccgcctctgctgccatcaccgccccctagtgggcaagcgggcgaattgggctcctgccctgtccaactcttacagagggcacggcggtcggccagctgggagcaagcctcgtggcccaggctgcccccccgctcactgcctggccag

SEQ ID NO: 22078 - DNA, 182 bp, Homo sapiens
  MAP TO AC004227.1; EXPRESSED IN PLACENTA, SIGNAL = 4.8; EXPRESSED IN HEART, SIGNAL = 4.7; EXPRESSED IN BONE MARROW, SIGNAL = 4.3; EXPRESSED IN ADULT LIVER, SIGNAL = 5.7; EXPRESSED IN LUNG, SIGNAL = 5.2; EXPRESSED IN HELA, SIGNAL = 5.5; EXPRESSED IN FETAL LIVER, SIGNAL = 4.6; EXPRESSED IN BRAIN, SIGNAL =   4; SWISSPROT HIT: Q13796, EVALUE 1.30e+00; NT HIT: gi7706512, EVALUE 2.00e-98; EST_HUMAN HIT: BE552426.1, EVALUE 6.30e-01
gaatcagcagctttgctaccaggttctactccttcaacaaaaataccaaatcccttctcactccctccattaaggctgaattgtagaggggactcgcgggaagccttttgcagcacaacctgtctccacttagcctttgcagcacaggcaatattcaataaccggagatgaccattcatctt

SEQ ID NO: 22079 - DNA, 258 bp, Homo sapiens
  MAP TO AC004491.1; EXPRESSED IN BRAIN, SIGNAL = 5.4; EXPRESSED IN BONE MARROW, SIGNAL = 5.4; EXPRESSED IN ADULT LIVER, SIGNAL = 5.9; EXPRESSED IN LUNG, SIGNAL =   6; EXPRESSED IN HELA, SIGNAL = 5.4; EXPRESSED IN HEART, SIGNAL = 4.9; EXPRESSED IN FETAL LIVER, SIGNAL = 5.5; EXPRESSED IN PLACENTA, SIGNAL = 5.3; EST_HUMAN HIT: BE717228.1, EVALUE 3.70e+00; SWISSPROT HIT: P16557, EVALUE 1.40e+00; NT HIT: AF280107.1, EVALUE 4.00e-02
ttgatgttacttgggtagggctgagagggccttgtttattgtgggtagcatcaagtccacacccagggccatggccagagaactgcccatttgaccttgcctcccttactggagatttgttggatataagaggcagcatcttccctccaactactagaaaatctggcagaagtggatgagtgttcagtgctctgtagaccctctggctgacggctggatccacagttgagtagacctcaggatgatggtcaaggggag

SEQ ID NO: 22080 - DNA, 104 bp, Homo sapiens
  MAP TO AC004937.1; EXPRESSED IN LUNG, SIGNAL = 7.9; EXPRESSED IN HELA, SIGNAL =   7; EXPRESSED IN BONE MARROW, SIGNAL = 9.5; EXPRESSED IN ADULT LIVER, SIGNAL = 8.9; EXPRESSED IN PLACENTA, SIGNAL = 9.3; EXPRESSED IN HEART, SIGNAL = 8.2; EXPRESSED IN FETAL LIVER, SIGNAL =  12; EXPRESSED IN BRAIN, SIGNAL =  12; EST_HUMAN HIT: AW195784.1, EVALUE 6.00e-09; NT HIT: AF217403.1, EVALUE 6.00e-05
atttgaaattcaaaatgctccaataagcatttcttttgaacatcatgttggtgctcacacaggttcgcatttcggagccattcaactgaacttggcatgttcat

SEQ ID NO: 22081 - DNA, 148 bp, Homo sapiens
  MAP TO AC005478.1; EXPRESSED IN BRAIN, SIGNAL =   6; EXPRESSED IN ADULT LIVER, SIGNAL = 5.4; EXPRESSED IN PLACENTA, SIGNAL =   6; EXPRESSED IN LUNG, SIGNAL = 5.7; EXPRESSED IN HELA, SIGNAL = 5.7; EXPRESSED IN HEART, SIGNAL = 5.4; EXPRESSED IN BONE MARROW, SIGNAL = 5.8; EXPRESSED IN FETAL LIVER, SIGNAL = 5.5; NT HIT: AF078103.1, EVALUE 3.00e-66; EST_HUMAN HIT: BF673088.1, EVALUE 1.00e-66
atggctcggactcaaaagaacaaggccacagcacaccacttagggctgcttaaggctcgtcttgctaagcttcgtcgagaactcattactccaaagggtggtggtggtggaggtccaggagaaggtttgtgttcttcttcaatatata

SEQ ID NO: 22082 - DNA, 270 bp, Homo sapiens
  MAP TO AC004217.1; EXPRESSED IN PLACENTA, SIGNAL = 6.4; EXPRESSED IN LUNG, SIGNAL = 7.3; EXPRESSED IN HEART, SIGNAL = 5.8; EXPRESSED IN FETAL LIVER, SIGNAL = 5.9; EXPRESSED IN BONE MARROW, SIGNAL = 6.4; EXPRESSED IN ADULT LIVER, SIGNAL = 5.8; EXPRESSED IN HELA, SIGNAL = 6.4; EXPRESSED IN BRAIN, SIGNAL = 6.6; SWISSPROT HIT: P47819, EVALUE 8.70e-01; NT HIT: X65041.1, EVALUE 6.50e-01; EST_HUMAN HIT: BE675498.1, EVALUE 0.00e+00
tgtttgtgggaatcagagcaatgcctatgcccggctgctggaataccgcctgaatgccttgcgaggactgtggaatgcccagcgccagctggccttagaagaacagcatgaaagggaaagttcaggtgatgaggaaactttggccctgctcaaacgccagggcttgttgcagcaacctgagcaagcgcccttcacatcgaggatggggctcctgctggtcttcccccttattcagtcccagagtagaacagacccctctctctgtaacat

SEQ ID NO: 22083 - DNA, 282 bp, Homo sapiens
  MAP TO AC005544.1; EXPRESSED IN ADULT LIVER, SIGNAL = 1.5; EXPRESSED IN PLACENTA, SIGNAL = 1.7; EXPRESSED IN LUNG, SIGNAL = 1.9; EXPRESSED IN HEART, SIGNAL = 1.8; EXPRESSED IN BRAIN, SIGNAL = 1.8; EXPRESSED IN HELA, SIGNAL = 1.7; EXPRESSED IN FETAL LIVER, SIGNAL = 1.7; EXPRESSED IN BONE MARROW, SIGNAL = 1.7; EST_HUMAN HIT: BE220753.1, EVALUE 0.00e+00; NT HIT: gi7661883, EVALUE 0.00e+00; SWISSPROT HIT: P42694, EVALUE 6.00e-34
cgccacccaagactgtcaaaccccctgaggatcaactgaagtcggagaacctcgaggtgtccagttccttcaactacagtgtgctgcagcatcttggccagtttccaccccttatgcctaacaagcagatcgcggagtcggccaatagcagtagcccccagagctctgcggggggcaagcccgccatgtcctatgccagcgctctgcgggcccctccaaagcccaggccccctcctgagcaggccaagaagagtagcgaccctctgtctctcttccaggaac

SEQ ID NO: 22084 - DNA, 277 bp, Homo sapiens
  MAP TO AC004774.1; EXPRESSED IN LUNG, SIGNAL = 1.8; EXPRESSED IN HELA, SIGNAL = 1.7; EXPRESSED IN FETAL LIVER, SIGNAL = 1.6; EXPRESSED IN BRAIN, SIGNAL = 1.9; EXPRESSED IN BONE MARROW, SIGNAL = 1.7; EXPRESSED IN ADULT LIVER, SIGNAL = 1.4; EXPRESSED IN PLACENTA, SIGNAL = 1.6; EXPRESSED IN HEART, SIGNAL = 1.7; SWISSPROT HIT: P70396, EVALUE 5.00e-39; NT HIT: gi11420784, EVALUE 0.00e+00; EST_HUMAN HIT: BE794412.1, EVALUE 0.00e+00
ctggctggttggtggcgcttgggacgcggttgtaggcgccgccgtactggtggtaggagctagcgtagctatagtcggcataagctttggctgggtagctcccggcggagccgttcacgccgtgatactgatactggtaggggttgagagctttgccataggaagccgaggtaggagagcagtagccgtgcggggctccccccgtagggctgtagtagtcagaatcggtagctgaagactcgggcaaagttggcgattcctgagacggatggtgcat

SEQ ID NO: 22085 - DNA, 166 bp, Homo sapiens
  MAP TO AC002042.1; EXPRESSED IN HELA, SIGNAL = 3.4; EXPRESSED IN HEART, SIGNAL = 3.1; EXPRESSED IN BRAIN, SIGNAL = 4.1; EXPRESSED IN PLACENTA, SIGNAL = 3.7; EXPRESSED IN LUNG, SIGNAL = 3.8; EXPRESSED IN FETAL LIVER, SIGNAL = 2.7; EXPRESSED IN BONE MARROW, SIGNAL = 3.9; EXPRESSED IN ADULT LIVER, SIGNAL = 3.2; NT HIT: gi9631135, EVALUE 3.80e-01; EST_HUMAN HIT: T18862.1, EVALUE 1.00e-51
cactctggtcgtgctgcagtctctgtcaccgccaccatcaaccacagtgaggcaagccagtgggccacaggctctagcactcagcagacagacatggagcagctctcgccgatgaccagctccaccactctgaccacactgctgtctccgtggccatcttctttga

SEQ ID NO: 22086 - DNA, 389 bp, Homo sapiens
  MAP TO AC005962.1; EXPRESSED IN PLACENTA, SIGNAL = 5.2; EXPRESSED IN HEART, SIGNAL = 5.5; EXPRESSED IN LUNG, SIGNAL = 6.5; EXPRESSED IN HELA, SIGNAL = 5.3; EXPRESSED IN FETAL LIVER, SIGNAL = 7.4; EXPRESSED IN BRAIN, SIGNAL = 6.2; EXPRESSED IN BONE MARROW, SIGNAL =  19; EXPRESSED IN ADULT LIVER, SIGNAL = 5.2; NT HIT: M29908.1, EVALUE 0.00e+00; EST_HUMAN HIT: BE831175.1, EVALUE 3.00e-17; SWISSPROT HIT: P11678, EVALUE 2.00e-55
cgcatcaagaaccagcgtgactgcatccctttcttccgctcggcaccctcatgcccccaaaacaagaacagagtccgcaaccagatcaacgcgctcacctcctttgtggacgccagcatggtgtatggcagtgaggtctccctctcgctgcggctccgcaaccggaccaactacctggggctgctggccatcaaccagcgctttcaagacaacggccgggccctgctgcccttcgacaacctgcacgatgacccctgtctcctcaccaaccgctcggcgcgcatcccctgcttcctggcaggtcagacagggaggaaggtggtgtcttcccaggaaacagccatccctggggtcccaactgggaagcaatggtgggatgtggtgaaggt

SEQ ID NO: 22087 - DNA, 202 bp, Homo sapiens
  MAP TO AC004828.2; EXPRESSED IN PLACENTA, SIGNAL = 3.2; EXPRESSED IN LUNG, SIGNAL = 3.7; EXPRESSED IN FETAL LIVER, SIGNAL = 3.6; EXPRESSED IN BONE MARROW, SIGNAL =   3; EXPRESSED IN HELA, SIGNAL =   3; EXPRESSED IN HEART, SIGNAL = 2.9; EXPRESSED IN BRAIN, SIGNAL = 3.4; EXPRESSED IN ADULT LIVER, SIGNAL = 3.2; NT HIT: AB046793.1, EVALUE 3.00e-02; EST_HUMAN HIT: AI908567.1, EVALUE 4.50e-02; SWISSPROT HIT: P52265, EVALUE 8.50e+00
aatgctgaagaggcatatgttgaaaacttctctgcagaatggttctccttctgctgagagcaagagagaaaaatctgctcacttccgtatttgcctctgtttaatccctcagcatccgcatgggagcagtgagctcttttctgctgagagcagcagcagccagagccaaagcttggacaacagctaccgggtcttaaggatg

SEQ ID NO: 22088 - DNA, 297 bp, Homo sapiens
  MAP TO AB019441.1; EXPRESSED IN LUNG, SIGNAL = 0.96; EXPRESSED IN PLACENTA, SIGNAL = 1.3; EXPRESSED IN HEART, SIGNAL = 1.8; EXPRESSED IN BONE MARROW, SIGNAL = 0.56; EXPRESSED IN ADULT LIVER, SIGNAL = 0.48; EXPRESSED IN HELA, SIGNAL = 3.5; SWISSPROT HIT: P01743, EVALUE 5.00e-38; EST_HUMAN HIT: AI791363.1, EVALUE 0.00e+00; NT HIT: X62107.1, EVALUE 0.00e+00
gaggtgaagaagcctggggcctcagtgaaggtttcctgcaaggcttctggatacaccttcactagctatgctatgcattgggtgcgccaggcccccggacaaaggcttgagtggatgggatggagcaacgctggcaatggtaacacaaaatattcacaggagttccagggcagagtcaccattaccagggacacatccgcgagcacagcctacatggagctgagcagcctgagatctgaggacatggctgtgtattactgtgcgagagacacagtgtgaaaacccacatcctgagag

SEQ ID NO: 22089 - DNA, 259 bp, Homo sapiens
  MAP TO AC002538.1; EXPRESSED IN PLACENTA, SIGNAL =   1; EXPRESSED IN HEART, SIGNAL = 3.5; EXPRESSED IN BONE MARROW, SIGNAL = 0.76; EXPRESSED IN ADULT LIVER, SIGNAL = 1.9; EXPRESSED IN LUNG, SIGNAL = 0.67; EXPRESSED IN FETAL LIVER, SIGNAL = 1.7; EXPRESSED IN BRAIN, SIGNAL = 0.94; NT HIT: Z97068.1, EVALUE 1.60e-01; SWISSPROT HIT: P08640, EVALUE 9.30e-02; EST_HUMAN HIT: AW370211.1, EVALUE 6.00e-02
taaaacctcttttccctttgaagttcctgcatttgactctcctctgccctgccatgttgtcctcatcaatccactccccagtacccactcttccttcatcaaggactttggcatgtggctttccatcttcattgccatcacagttcctaccaacactctgcgagtctccaataggcacagggatgacacctctgatgcccggccctcttggttcctccacactctcagcactccagtcccctttccctgcacacttcat

SEQ ID NO: 22090 - DNA, 111 bp, Homo sapiens
  MAP TO AC004702.1; EXPRESSED IN ADULT LIVER, SIGNAL =  21; EXPRESSED IN PLACENTA, SIGNAL =  27; EXPRESSED IN HELA, SIGNAL =  22; EXPRESSED IN HEART, SIGNAL =  20; EXPRESSED IN FETAL LIVER, SIGNAL =  21; EXPRESSED IN BRAIN, SIGNAL =  24; EXPRESSED IN LUNG, SIGNAL =  29; EXPRESSED IN BONE MARROW, SIGNAL =  23; SWISSPROT HIT: P09019, EVALUE 3.20e+00; EST_HUMAN HIT: W28082.1, EVALUE 9.00e-02; NT HIT: AF169825.1, EVALUE 4.00e-03
ctttgagaagagggacaagaaatgggaaggggtagggcagcagggcagcagcagtcttgcttttcataataagctccttgtcctggttcattattttaacccctgtatata

SEQ ID NO: 22091 - DNA, 224 bp, Homo sapiens
  MAP TO AC004615.1; EXPRESSED IN PLACENTA, SIGNAL = 1.7; EXPRESSED IN LUNG, SIGNAL = 1.6; EXPRESSED IN FETAL LIVER, SIGNAL = 1.4; EXPRESSED IN BRAIN, SIGNAL = 1.3; EXPRESSED IN BONE MARROW, SIGNAL = 1.5; EXPRESSED IN ADULT LIVER, SIGNAL = 1.4; EXPRESSED IN HEART, SIGNAL = 1.4; SWISSPROT HIT: Q13591, EVALUE 1.00e-33; NT HIT: gi4506880, EVALUE 1.00e-114; EST_HUMAN HIT: BE782391.1, EVALUE 5.10e-02
attacggaaccattaagaaagtgcgggtacccctgaatcagacctcaagcagctgtttgctggaagagattgagctcttccctgagaggcggagggagcccatcaggagcctgcagatcctgcacagccagagtgtcctgttcgtggggctgcgggagcacgtggtcaagatccccctgaagaggtgccagttctaccgcacacgcaggtagggcatctccggg

SEQ ID NO: 22092 - DNA, 132 bp, Homo sapiens
  MAP TO AC004957.1; EXPRESSED IN ADULT LIVER, SIGNAL = 3.2; EXPRESSED IN PLACENTA, SIGNAL = 3.6; EXPRESSED IN LUNG, SIGNAL = 3.6; EXPRESSED IN HELA, SIGNAL = 3.1; EXPRESSED IN HEART, SIGNAL = 3.1; EXPRESSED IN BRAIN, SIGNAL = 3.1; EXPRESSED IN FETAL LIVER, SIGNAL = 2.7; EXPRESSED IN BONE MARROW, SIGNAL =   3; NT HIT: AJ006345.1, EVALUE 1.00e-03; EST_HUMAN HIT: AI054422.1, EVALUE 2.80e-02
tggtaaccatagaaagaacaaggtcaacagatattttcaaggaagtaaaagctcttagaaatagattagataaaggagaggaagaagaggaaggaatcaaagataactccaaggtaactgggtggatgaagt

SEQ ID NO: 22093 - DNA, 177 bp, Homo sapiens
  MAP TO AC006324.2; EXPRESSED IN PLACENTA, SIGNAL =  25; EXPRESSED IN HELA, SIGNAL =  24; EXPRESSED IN HEART, SIGNAL =  21; EXPRESSED IN BONE MARROW, SIGNAL =  22; EXPRESSED IN ADULT LIVER, SIGNAL =  20; EXPRESSED IN BRAIN, SIGNAL =  25; EXPRESSED IN FETAL LIVER, SIGNAL =  22; EXPRESSED IN LUNG, SIGNAL =  25; NT HIT: X78885.1, EVALUE 1.00e-32; EST_HUMAN HIT: AA053053.1, EVALUE 4.00e-33
tgctttcactaccaccaccagagtcacttccacctcctccactgatacagctgttatagctgccactcccaccatagccactgccctggtttctataaccctgtccaccacttccatagcgtctgcttcctctggagtaactaggactgcctccaacataactaccatcgttatcaa

SEQ ID NO: 22094 - DNA, 141 bp, Homo sapiens
  MAP TO AC005971.5; EXPRESSED IN BRAIN, SIGNAL = 1.9; EXPRESSED IN BONE MARROW, SIGNAL = 1.8; EXPRESSED IN PLACENTA, SIGNAL = 1.9; EXPRESSED IN LUNG, SIGNAL = 2.2; EXPRESSED IN ADULT LIVER, SIGNAL = 2.1; EXPRESSED IN FETAL LIVER, SIGNAL =   2; EXPRESSED IN HEART, SIGNAL = 2.2; EXPRESSED IN HELA, SIGNAL = 2.1; NT HIT: gi11425417, EVALUE 5.00e-74; EST_HUMAN HIT: BE879070.1, EVALUE 7.00e-74; SWISSPROT HIT: P23797, EVALUE 5.40e-02
ggtacacccagtgccttaggcgggccaagcctagcactgtgggagcaaaaaacatggcttcatcgtcagggtgcgctatgaccagcagggtccggctttcggctcccagccgtcctccctgctcccgactcttcattcgtt

SEQ ID NO: 22095 - DNA, 197 bp, Homo sapiens
  MAP TO AC002091.1; EXPRESSED IN PLACENTA, SIGNAL = 1.9; EXPRESSED IN LUNG, SIGNAL =   2; EXPRESSED IN HEART, SIGNAL = 1.8; EXPRESSED IN BRAIN, SIGNAL =   2; EXPRESSED IN BONE MARROW, SIGNAL = 1.9; EXPRESSED IN ADULT LIVER, SIGNAL = 1.9; EXPRESSED IN FETAL LIVER, SIGNAL = 1.9; SWISSPROT HIT: P46707, EVALUE 7.50e-01; EST_HUMAN HIT: AA470686.1, EVALUE 1.70e-01
aggtgtcctctaccatccctccacttcttcttctctctttccttatcacccaagtctaaaggcagtcccagatccaaagggccattattgagctctcttcccctcctctcagctgcatggtaggtccaggatccactgtgccacccatccgcagcaacggcctcaggcccgtcccctccctggagcttggggtacag

SEQ ID NO: 22096 - DNA, 130 bp, Homo sapiens
  MAP TO AC002542.1; EXPRESSED IN LUNG, SIGNAL = 1.9; EXPRESSED IN HELA, SIGNAL = 2.8; EXPRESSED IN HEART, SIGNAL = 3.2; EXPRESSED IN FETAL LIVER, SIGNAL =   4; EXPRESSED IN BRAIN, SIGNAL = 3.2; EXPRESSED IN BONE MARROW, SIGNAL = 3.9; EXPRESSED IN PLACENTA, SIGNAL = 4.2; EXPRESSED IN ADULT LIVER, SIGNAL =   5; NT HIT: AF012871.1, EVALUE 1.10e+00; SWISSPROT HIT: P34455, EVALUE 3.10e+00; EST_HUMAN HIT: AA868610.1, EVALUE 2.00e-18
agcaggggttggcagtggtgaggtccaggtagttataatagccataagagcagggattatggttattgagctcaccagtgtgtttcaagccatgatctggagtcaaggtgttagtgattcctctaagggg

SEQ ID NO: 22097 - DNA, 208 bp, Homo sapiens
  MAP TO AC004228.2; EXPRESSED IN PLACENTA, SIGNAL = 2.7; EXPRESSED IN HEART, SIGNAL = 2.4; EXPRESSED IN FETAL LIVER, SIGNAL = 2.3; EXPRESSED IN BRAIN, SIGNAL = 2.3; EXPRESSED IN BONE MARROW, SIGNAL = 2.4; EXPRESSED IN ADULT LIVER, SIGNAL = 2.3; EXPRESSED IN HELA, SIGNAL = 2.5; EXPRESSED IN LUNG, SIGNAL = 2.9; SWISSPROT HIT: P13290, EVALUE 1.90e-01; NT HIT: AF038536.1, EVALUE 5.00e-78
gtgcccgacaccgtcttccaccacggccgcgtgggcatcaacacagaccggccggatgaggcgctggttgtgcacgggaatgtcaaggtcatgggctcgcttatgcacccctccgacctgcgcgccaaggaacacgtgcaggaggtggggacagggctgtgggggccgggcgggtccagacgctggagcgggccgcgggggcggggct

SEQ ID NO: 22098 - DNA, 331 bp, Homo sapiens
  MAP TO AC004801.1; EXPRESSED IN HELA, SIGNAL = 2.9; EXPRESSED IN HEART, SIGNAL = 2.9; EXPRESSED IN BRAIN, SIGNAL = 7.2; EXPRESSED IN BONE MARROW, SIGNAL = 1.7; EXPRESSED IN PLACENTA, SIGNAL =   4; EXPRESSED IN LUNG, SIGNAL = 3.3; EXPRESSED IN FETAL LIVER, SIGNAL = 1.7; EXPRESSED IN ADULT LIVER, SIGNAL = 2.8; SWISSPROT HIT: P50408, EVALUE 2.00e-45; NT HIT: gi11419660, EVALUE 0.00e+00; EST_HUMAN HIT: BF665962.1, EVALUE 0.00e+00
gtcctcatatgggtgctccttggaggggatctccaggacagtagggatagagtgctggtgggtgtccagggcatgctgcaccatctctgcgatgtactggttgatgaggatgatgccagtgtcatcccggtttagaaattgccggaaagtgtcttcgatctcattgatggtcgtatccttctccaccaccaggaaattggggtggcagttcttgttaagctcccctatgctgcccagcaggaaaccagtcaccgtgtccttgtctctgatcactgcgatgagcttccttctccccgccatccctgcagccaggcagagctcaccccagagc

SEQ ID NO: 22099 - DNA, 174 bp, Homo sapiens
  MAP TO AC005154.1; EXPRESSED IN PLACENTA, SIGNAL = 5.1; EXPRESSED IN LUNG, SIGNAL = 4.3; EXPRESSED IN FETAL LIVER, SIGNAL = 6.1; EXPRESSED IN BONE MARROW, SIGNAL =   5; EXPRESSED IN HELA, SIGNAL = 4.3; EXPRESSED IN BRAIN, SIGNAL = 5.4; EXPRESSED IN ADULT LIVER, SIGNAL = 5.3; EXPRESSED IN HEART, SIGNAL = 4.6; SWISSPROT HIT: P40908, EVALUE 5.10e+00; NT HIT: gi11545901, EVALUE 2.00e-06; EST_HUMAN HIT: AW964385.1, EVALUE 2.00e-93
tggatgccctcaagacgtgtacgaccatggaatgggagactggagggacccatggatcctaagcatggactgggttccccagtacgagccatgagccagctgaatctgaatgagaagatggaacgaggaccgaccggagtcttgatgcttaacagaccaatgctttctggctga

SEQ ID NO: 22100 - DNA, 194 bp, Homo sapiens
  MAP TO AC005690.7; EXPRESSED IN PLACENTA, SIGNAL = 1.3; EXPRESSED IN HEART, SIGNAL =   2; EXPRESSED IN ADULT LIVER, SIGNAL = 1.4; EXPRESSED IN LUNG, SIGNAL = 0.69; EXPRESSED IN FETAL LIVER, SIGNAL = 4.1; EXPRESSED IN BRAIN, SIGNAL = 1.2; EXPRESSED IN BONE MARROW, SIGNAL = 1.6; SWISSPROT HIT: P04929, EVALUE 4.40e-01; NT HIT: AJ269504.1, EVALUE 1.80e+00; EST_HUMAN HIT: BF239481.1, EVALUE 2.70e+00
ctccccactaccactgccaccatctctccgcttatcacaaccaccatcaagagtgtttgtgagtttgtgtttttatgtctgtcttccccctcagccttcaagaagacaaggtcagtgttcatttcttgttgtatcctcattatttggagcagagtttgatacacagcagaagcccaattactacctgttgatag

SEQ ID NO: 22101 - DNA, 256 bp, Homo sapiens
  MAP TO AC005826.1; EXPRESSED IN LUNG, SIGNAL = 0.89; EXPRESSED IN FETAL LIVER, SIGNAL = 0.8; EXPRESSED IN BRAIN, SIGNAL =   1; EXPRESSED IN BONE MARROW, SIGNAL = 0.64; EXPRESSED IN ADULT LIVER, SIGNAL = 0.55; EXPRESSED IN PLACENTA, SIGNAL = 0.61; EXPRESSED IN HEART, SIGNAL = 1.9; SWISSPROT HIT: P23813, EVALUE 1.60e-01; NT HIT: U91619.1, EVALUE 1.60e-01; EST_HUMAN HIT: BE538857.1, EVALUE 0.00e+00
agagtggttctgctggggaaccaccgcgcctgcagttcgtgcacctcttcccggagctgcgccagggaattacggacgaactggaaggggtcgagaagggtcttggccaccacctttagctccaagccttttcgctttttcagatttgggatcctccccggggaggacctcctggcgccccctggcagtttcccgccgcctagggccgacttttccacctccagctcccgggcgggggaggccccgtacggccgct

SEQ ID NO: 22102 - DNA, 78 bp, Homo sapiens
  MAP TO AC006227.1; EXPRESSED IN BONE MARROW, SIGNAL = 4.1; EXPRESSED IN ADULT LIVER, SIGNAL = 3.9; EXPRESSED IN PLACENTA, SIGNAL = 4.1; EXPRESSED IN LUNG, SIGNAL =   4; EXPRESSED IN HELA, SIGNAL = 5.3; EXPRESSED IN HEART, SIGNAL =   5; EXPRESSED IN FETAL LIVER, SIGNAL = 5.6; EXPRESSED IN BRAIN, SIGNAL = 4.3
agcaccctgctgctgctgatgagcatgcaccctgccgtgctgttactgctgctgctgctgctgctggcacatgtgagc

SEQ ID NO: 22103 - DNA, 215 bp, Homo sapiens
  MAP TO AC005544.1; EXPRESSED IN PLACENTA, SIGNAL = 1.9; EXPRESSED IN LUNG, SIGNAL = 2.2; EXPRESSED IN FETAL LIVER, SIGNAL = 1.9; EXPRESSED IN HELA, SIGNAL = 1.9; EXPRESSED IN BRAIN, SIGNAL = 1.9; EXPRESSED IN BONE MARROW, SIGNAL = 1.9; EXPRESSED IN ADULT LIVER, SIGNAL = 2.1; EXPRESSED IN HEART, SIGNAL =   2; NT HIT: AF142624.1, EVALUE 1.00e-118; SWISSPROT HIT: Q9UBN1, EVALUE 3.00e-05; EST_HUMAN HIT: AI423159.1, EVALUE 5.00e-08
gtggggaccacacgagacaggcactcctgtgtccccagctcccggcccagcaccagcccgggcgggcggctcacctgcagccacgaagaggatgccggcactgaggacgatgttgttcttgcggctgtagatcctgccagcaccgatgcacaggccacccagcaggagcaggatggtgctgaggatggggaagacgctggaggctcgcacgatgc

SEQ ID NO: 22104 - DNA, 315 bp, Homo sapiens
  MAP TO AC005316.1; EXPRESSED IN PLACENTA, SIGNAL = 0.97; EXPRESSED IN HEART, SIGNAL = 7.2; EXPRESSED IN ADULT LIVER, SIGNAL =   1; EXPRESSED IN LUNG, SIGNAL =   1; EXPRESSED IN FETAL LIVER, SIGNAL = 1.1; EXPRESSED IN BRAIN, SIGNAL = 0.78; EXPRESSED IN BONE MARROW, SIGNAL = 1.1; SWISSPROT HIT: P54098, EVALUE 7.00e-35; NT HIT: U60325.1, EVALUE 1.00e-115; EST_HUMAN HIT: BF665387.1, EVALUE 1.00e-115
ctagggggatgaaaagtcaaaactgaccagtctggcccaaggaacgctcacccaaagccccacataggagcacatggccaggctagaggccatgggccccgcatacctggtcaagaggttggtgatctgcaaggccagggcagcgcggtagcggtcctcctcccgcaccaggtagcgaacctcgtcatggatgctgatgcagaagcgcccatctatggcaaactcttcaaacagccacttcatggccacaagcatgaggtgtaagtagtcaacagcagagctctgtaccacccaattcacacggctggtcataaa

SEQ ID NO: 22105 - DNA, 151 bp, Homo sapiens
  MAP TO AC002036.1; EXPRESSED IN PLACENTA, SIGNAL = 2.5; EXPRESSED IN LUNG, SIGNAL = 2.6; EXPRESSED IN FETAL LIVER, SIGNAL = 3.3; EXPRESSED IN BRAIN, SIGNAL = 2.7; EXPRESSED IN ADULT LIVER, SIGNAL = 2.3; EXPRESSED IN HELA, SIGNAL = 2.3; EXPRESSED IN HEART, SIGNAL = 3.1; EXPRESSED IN BONE MARROW, SIGNAL = 3.3; NT HIT: AB002358.1, EVALUE 1.40e+00; EST_HUMAN HIT: BF334740.1, EVALUE 2.00e-53; SWISSPROT HIT: P49147, EVALUE 9.00e+00
gccagtaatggtgacattactcaggcagtcagccttctcactgatgagagagttaaggagcccagtcaagacactgttgctacagaaccatctgaagtagaggggagtgctgccaacaaggaagtattagcaagtaggtaccatatatcct

SEQ ID NO: 22106 - DNA, 257 bp, Homo sapiens
  MAP TO AC004915.1; EXPRESSED IN LUNG, SIGNAL = 2.6; EXPRESSED IN BRAIN, SIGNAL = 2.1; EXPRESSED IN BONE MARROW, SIGNAL = 2.5; EXPRESSED IN PLACENTA, SIGNAL =   2; EXPRESSED IN HELA, SIGNAL = 2.1; EXPRESSED IN HEART, SIGNAL = 1.7; EXPRESSED IN FETAL LIVER, SIGNAL =   2; EXPRESSED IN ADULT LIVER, SIGNAL = 2.1; SWISSPROT HIT: P10262, EVALUE 4.70e-01; EST_HUMAN HIT: BF058381.1, EVALUE 2.30e-01; NT HIT: AF132555.1, EVALUE 6.20e-01
ttcaggtctctgtccaacctggccctttctgcatcggcatctgcatctgcatcccttgtgatgctagtttccctttctgtgagggctgccactagcagatcagcctttttcctgagcctccgctcagcctcccttttagcctcctggttgtggttaacgtacaccttggaggccacttctaaaagctgggtggcaatcatacctgcaaaatcctctagcttttgcagcttccacctgatgtccccctgggcttgtcc

SEQ ID NO: 22107 - DNA, 243 bp, Homo sapiens
  MAP TO AC005369.1; EXPRESSED IN LUNG, SIGNAL = 1.3; EXPRESSED IN BRAIN, SIGNAL = 1.1; EXPRESSED IN PLACENTA, SIGNAL = 1.6; EXPRESSED IN HEART, SIGNAL = 1.3; EXPRESSED IN BONE MARROW, SIGNAL = 1.2; EXPRESSED IN ADULT LIVER, SIGNAL = 1.3; EXPRESSED IN FETAL LIVER, SIGNAL = 1.5; SWISSPROT HIT: P49590, EVALUE 5.00e-42; EST_HUMAN HIT: BE292784.1, EVALUE 0.00e+00; NT HIT: U18937.1, EVALUE 0.00e+00
cttcatcctctgctccacaatgtagaagattcgctcaaccccaatgctgagtcccacacatggcaccttgtggcccttggggtcaaacatgcccaccagcccatcatagcgcccaccagcagccacactgcccacattcaggggctcctccccagcctgagttggggtctgcagcagcactgcttcatagatcactcctgtatagtagtctaggccccgagccaggctgaggtcaaaggagat

SEQ ID NO: 22108 - DNA, 166 bp, Homo sapiens
  MAP TO AC002544.1; EXPRESSED IN PLACENTA, SIGNAL = 1.2; EXPRESSED IN LUNG, SIGNAL = 1.3; EXPRESSED IN HEART, SIGNAL = 1.3; EXPRESSED IN BRAIN, SIGNAL = 1.3; EXPRESSED IN BONE MARROW, SIGNAL = 1.2; EXPRESSED IN ADULT LIVER, SIGNAL = 1.2; EXPRESSED IN FETAL LIVER, SIGNAL = 1.3; SWISSPROT HIT: Q13286, EVALUE 5.00e-23; EST_HUMAN HIT: AI470052.1, EVALUE 1.00e-75; NT HIT: X99832.1, EVALUE 7.00e-89
cggccaatgctgacctccagggcgatgttgtggaaggtgttcacgtaggctgcgcctcccaggagcccctcatacagaatgatcaggaagacgaggtagatgcttggcagaaagccgaaccacacgtctgccagcaggaacaccaggttgaggcactgtgaacagg

SEQ ID NO: 22109 - DNA, 149 bp, Homo sapiens
  MAP TO AC004958.1; EXPRESSED IN ADULT LIVER, SIGNAL =  14; EXPRESSED IN PLACENTA, SIGNAL =  17; EXPRESSED IN LUNG, SIGNAL =  19; EXPRESSED IN HEART, SIGNAL =  12; EXPRESSED IN BRAIN, SIGNAL =  17; EXPRESSED IN FETAL LIVER, SIGNAL =  14; EXPRESSED IN BONE MARROW, SIGNAL =  16; EXPRESSED IN HELA, SIGNAL =  15; SWISSPROT HIT: O78424, EVALUE 6.00e-01; NT HIT: AB028070.1, EVALUE 9.00e-79; EST_HUMAN HIT: AW960753.1, EVALUE 1.00e-78
aaaacagaccatctctgaaatctctgaaaactgataacaggccagaaaaatccaaatgtaagccactttggggaaaagtattttaccttgacttaccttctgtcaccatatctgaaaaacttcaaaaggacattaaggatctgggaggg

SEQ ID NO: 22110 - DNA, 217 bp, Homo sapiens
  MAP TO AC006101.2; EXPRESSED IN LUNG, SIGNAL = 1.5; EXPRESSED IN FETAL LIVER, SIGNAL = 1.5; EXPRESSED IN BONE MARROW, SIGNAL = 1.6; EXPRESSED IN PLACENTA, SIGNAL = 1.6; EXPRESSED IN ADULT LIVER, SIGNAL = 1.2; EXPRESSED IN BRAIN, SIGNAL = 1.6; EXPRESSED IN HEART, SIGNAL = 2.2; EXPRESSED IN HELA, SIGNAL = 1.8; NT HIT: gi4758647, EVALUE 1.00e-119; SWISSPROT HIT: P33176, EVALUE 2.00e-34; EST_HUMAN HIT: AV693731.1, EVALUE 1.00e-119
caatctgtgcagaatgccctcttctggccatattctttgacctgactgcttcctttatgcgatctacttcttgctgatagcgtttgcgatcacgagatgcattttctttagcttctttcagtgctgattccaaagctttcactctctcagctgtagctcgaagtcgcttttccaacttaggaagttcacagcggagatctgcattatcacgtaccaa

SEQ ID NO: 22111 - DNA, 639 bp, Homo sapiens
  MAP TO AC000134.14; EXPRESSED IN BRAIN, SIGNAL = 1.7; EXPRESSED IN PLACENTA, SIGNAL = 1.6; EXPRESSED IN LUNG, SIGNAL = 1.2; EXPRESSED IN HEART, SIGNAL = 1.8; EXPRESSED IN BONE MARROW, SIGNAL =   2; EXPRESSED IN ADULT LIVER, SIGNAL = 1.5; EXPRESSED IN HELA, SIGNAL = 2.1; EXPRESSED IN FETAL LIVER, SIGNAL = 2.5; EST_HUMAN HIT: BF526328.1, EVALUE 0.00e+00; NT HIT: U93237.1, EVALUE 0.00e+00; SWISSPROT HIT: O00255, EVALUE 2.00e-43
tcagaggcctttgcgctgccgcttgaggaaagacagagtgtagtcactaggggtggacactttctgcttcttcatctgcacttgcgactgtgccgtgagttgcagcttgatggcgctcgagttgatcttggtggccaccagcagctccttcatgcccttcatcttctcactctggaaagtgagcactggaccctccggcggtggtgatgctgcgggtgctggcacctgagccgtgctgccaccttcagggcctcgggctgtgccagcgacagtcccaggaggcttccgggggggtcctgacactgcaccctggccggtgcccaggcccttgtccagtgctggcttcttgggcggcgggggctcctctggcttggactcccgccgtgggccccgccgccggccttcccgggcttcctcgccccacggctcctcggcctcggccgcctcggcctctcggctcactatgcgcaccttctgccgcacctgggccagtggggagagcaaggtgagagcaaggttgccggccagtggctggaactccaggaccctgctctggccatcccatcccacccagggggtctcagtcccatcggcaccgaaggggatgggcagatgctgcccctgggccagaaaagtctg

SEQ ID NO: 22112 - DNA, 102 bp, Homo sapiens
  MAP TO AB019437.1; EXPRESSED IN PLACENTA, SIGNAL = 2.1; EXPRESSED IN LUNG, SIGNAL = 2.5; EXPRESSED IN HEART, SIGNAL = 1.8; EXPRESSED IN FETAL LIVER, SIGNAL = 2.1; EXPRESSED IN BRAIN, SIGNAL = 2.4; EXPRESSED IN BONE MARROW, SIGNAL = 2.1; EXPRESSED IN ADULT LIVER, SIGNAL = 3.2; EXPRESSED IN HELA, SIGNAL = 2.3; EST_HUMAN HIT: AU134293.1, EVALUE 2.00e-36; SWISSPROT HIT: P35190, EVALUE 3.70e-01; NT HIT: M36852.1, EVALUE 4.00e-46
gttccagctcacatgggaaatactttctgagagtcctggacctcctgtgcaagaacatgaaacacctgtggttcttcctcctcctggtggcagctcccagat

SEQ ID NO: 22113 - DNA, 103 bp, Homo sapiens
  MAP TO AC006531.1; EXPRESSED IN PLACENTA, SIGNAL = 5.8; EXPRESSED IN BONE MARROW, SIGNAL = 0.57; EXPRESSED IN HELA, SIGNAL =   9; EXPRESSED IN LUNG, SIGNAL = 0.49; EXPRESSED IN FETAL LIVER, SIGNAL = 0.76; EXPRESSED IN BRAIN, SIGNAL = 0.7; EXPRESSED IN ADULT LIVER, SIGNAL = 0.48; EXPRESSED IN HEART, SIGNAL = 8.6; SWISSPROT HIT: Q00959, EVALUE 2.00e-14; EST_HUMAN HIT: AI732851.1, EVALUE 2.00e-51; NT HIT: gi6006002, EVALUE 2.00e-51
ccggtctttgttcagcacaatcaccaccagcctggggtgcacctggtagccttcctcagtgaaggataagtctttgccatcccatgtaacattgaccataaat

SEQ ID NO: 22114 - DNA, 175 bp, Homo sapiens
  MAP TO AC004804.1; EXPRESSED IN LUNG, SIGNAL = 2.5; EXPRESSED IN PLACENTA, SIGNAL = 2.5; EXPRESSED IN HEART, SIGNAL = 2.6; EXPRESSED IN FETAL LIVER, SIGNAL = 2.3; EXPRESSED IN BRAIN, SIGNAL = 2.9; EXPRESSED IN BONE MARROW, SIGNAL = 2.2; EXPRESSED IN ADULT LIVER, SIGNAL = 2.4; EXPRESSED IN HELA, SIGNAL = 2.6; EST_HUMAN HIT: AW139713.1, EVALUE 6.00e-01; NT HIT: L11910.1, EVALUE 6.30e+00; SWISSPROT HIT: Q37897, EVALUE 8.80e+00
ttttttcattttttaaacacagaccattctccctcaagcaagaacacatattatataattactctgagccaccatccgcagccccagtcatctctcttccactctaaccacattaagagcatattctctgacactatacttcatggattgaagatgcatatccataaatttaaaa

SEQ ID NO: 22115 - DNA, 185 bp, Homo sapiens
  MAP TO AC003025.1; EXPRESSED IN LUNG, SIGNAL = 1.7; EXPRESSED IN HEART, SIGNAL = 1.8; EXPRESSED IN FETAL LIVER, SIGNAL = 1.7; EXPRESSED IN BRAIN, SIGNAL = 1.6; EXPRESSED IN BONE MARROW, SIGNAL = 1.6; EXPRESSED IN PLACENTA, SIGNAL = 1.5; EXPRESSED IN ADULT LIVER, SIGNAL = 1.9; SWISSPROT HIT: Q09466, EVALUE 1.00e+00; NT HIT: AF134404.1, EVALUE 8.00e-49; EST_HUMAN HIT: BF526041.1, EVALUE 3.00e-95
ctgacagcaacaaagaagagcagcaccccagggacgccgtagaaggggaggtaggataagaagaagcgggcatagaagctggcggcccagagcaaatcctgcagaggagggcagaggcgataccgagaggtctccaggtgcccggaggtctggaggcctggtgggtgggaggaggacctcaggca

SEQ ID NO: 22116 - DNA, 257 bp, Homo sapiens
  MAP TO AC004872.1; EXPRESSED IN LUNG, SIGNAL = 4.5; EXPRESSED IN HEART, SIGNAL = 3.5; EXPRESSED IN FETAL LIVER, SIGNAL = 5.8; EXPRESSED IN BRAIN, SIGNAL = 4.1; EXPRESSED IN PLACENTA, SIGNAL =   4; EXPRESSED IN BONE MARROW, SIGNAL =   4; EXPRESSED IN HELA, SIGNAL = 4.3; EXPRESSED IN ADULT LIVER, SIGNAL = 3.3; SWISSPROT HIT: P05648, EVALUE 1.80e+00; NT HIT: U82671.2, EVALUE 5.00e-23; EST_HUMAN HIT: BE181714.1, EVALUE 5.90e-02
cagtcagattactggctttggtctctctgtgcaaacggttgaatgaatggtaaaaatgactgtttgtctcttctgtaaagttctgattaatgccaaaaagaattctgaggccagtatgaaactgatgtatttgtgctgtgaattcatttttctgtgttgaggggtactttaggaaaaaacatgaacttaggaccccataagcttgctgctcaagacggcccaataagcaggtcaataacaaactttgcttcaggtcc

SEQ ID NO: 22117 - DNA, 94 bp, Homo sapiens
  MAP TO AC006010.2; EXPRESSED IN HEART, SIGNAL = 2.5; EXPRESSED IN HELA, SIGNAL = 2.4; EXPRESSED IN FETAL LIVER, SIGNAL = 2.4; EXPRESSED IN BRAIN, SIGNAL = 2.6; EXPRESSED IN BONE MARROW, SIGNAL = 2.3; EXPRESSED IN ADULT LIVER, SIGNAL = 2.4; EXPRESSED IN PLACENTA, SIGNAL = 2.5; EXPRESSED IN LUNG, SIGNAL = 2.5; SWISSPROT HIT: P46589, EVALUE 1.10e+00; EST_HUMAN HIT: AA525207.1, EVALUE 1.10e+00; NT HIT: X56600.1, EVALUE 2.00e-01
ctgagatgtatttaagaaaaagtgagcactttgtggctatgttgattcttatgtatactgtgcctttccattttgaagtgagtgtatctggaat

SEQ ID NO: 22118 - DNA, 524 bp, Homo sapiens
  MAP TO AC002115.1; EXPRESSED IN PLACENTA, SIGNAL = 4.6; EXPRESSED IN LUNG, SIGNAL = 7.5; EXPRESSED IN HELA, SIGNAL = 6.4; EXPRESSED IN HEART, SIGNAL = 6.5; EXPRESSED IN BONE MARROW, SIGNAL = 5.9; EXPRESSED IN FETAL LIVER, SIGNAL =  11; EXPRESSED IN BRAIN, SIGNAL = 2.8; EXPRESSED IN ADULT LIVER, SIGNAL =  14; NT HIT: AF000671.1, EVALUE 3.00e-54; EST_HUMAN HIT: AA885210.1, EVALUE 3.00e-61; SWISSPROT HIT: O00321, EVALUE 4.00e-87
agcccgactctcaggctcttccgtggtccggggactggacagacatggcgtgcacagcctgggactcttggagcggcgcctcgcagaccctgggccccgcccctctcggcccgggccccatccccgccgccggctccgaaggcgccgcgggccagaactgcgtccccgtggcgggagaggccacctcgtggtcgcgcgcccaggccgccgggagcaacaccagctgggactgttctgtggggcccgacggcgatacctactggggcagtggcctgggcggggagccgcgcacggactgtaccatttcgtggggcgggcccgcgggcccggactgtaccacctcctggaacccggggctgcatgcgggtggcaccacctctttgaagcggtaccagagctcagctctcaccgtttgctccgaaccgagcccgcagtcggaccgtgccagtttggctcgatgccccaaaactaaccaccgaggtgagagggccgcaaagactgcggggagggcgaagctggagtcc

SEQ ID NO: 22119 - DNA, 224 bp, Homo sapiens
  MAP TO AC005318.1; EXPRESSED IN LUNG, SIGNAL = 1.5; EXPRESSED IN HELA, SIGNAL = 1.6; EXPRESSED IN HEART, SIGNAL = 1.8; EXPRESSED IN FETAL LIVER, SIGNAL = 1.6; EXPRESSED IN BRAIN, SIGNAL = 1.6; EXPRESSED IN BONE MARROW, SIGNAL = 1.6; EXPRESSED IN PLACENTA, SIGNAL = 1.6; EXPRESSED IN ADULT LIVER, SIGNAL = 1.6; SWISSPROT HIT: P12271, EVALUE 3.00e-20; NT HIT: L34219.1, EVALUE 1.00e-123; EST_HUMAN HIT: W28826.1, EVALUE 1.00e-107
gccaaggatgagctgaacgagagagaggagacccgggaggaggcagtgcgagagctgcaggagatggtgcaggcgcaggcggcctcgggggaggagctggcggtggccgtggcggagagggtgcaagagaaggacagcggcttcttcctgcgcttcatccgcgcacggaagttcaacgtgggccgtgcctatgagctgctcagaggtgaggccagtgcttggag

SEQ ID NO: 22120 - DNA, 207 bp, Homo sapiens
  MAP TO AC004845.1; EXPRESSED IN PLACENTA, SIGNAL = 5.9; EXPRESSED IN HELA, SIGNAL = 5.5; EXPRESSED IN FETAL LIVER, SIGNAL = 5.5; EXPRESSED IN BRAIN, SIGNAL = 6.1; EXPRESSED IN LUNG, SIGNAL = 7.1; EXPRESSED IN HEART, SIGNAL = 5.3; EXPRESSED IN BONE MARROW, SIGNAL = 5.7; EXPRESSED IN ADULT LIVER, SIGNAL = 6.1; EST_HUMAN HIT: BE796537.1, EVALUE 1.00e-76; NT HIT: X81591.1, EVALUE 1.00e-44; SWISSPROT HIT: P04630, EVALUE 5.00e-10
ggcatgtctcaggggagaagctgcttgtccgggtcttaccgtccatgtccaagcgctgcatgatgatggccagctccacctcgcttggcatgtaccccaaagagcgcatggccatgcccagctcctgcttggagatgaagccgttcccatcccggtccagaacccgaaaggcctctcggatttctacaatggaaaagcaaagaaagt

SEQ ID NO: 22121 - DNA, 83 bp, Homo sapiens
  MAP TO AC004671.1; EXPRESSED IN HEART, SIGNAL = 1.4; EXPRESSED IN BRAIN, SIGNAL = 1.7; EXPRESSED IN BONE MARROW, SIGNAL = 1.2; EXPRESSED IN PLACENTA, SIGNAL = 1.1; EXPRESSED IN LUNG, SIGNAL =   1; EXPRESSED IN FETAL LIVER, SIGNAL = 1.2; EXPRESSED IN ADULT LIVER, SIGNAL =   1; EST_HUMAN HIT: AI191956.1, EVALUE 6.40e-02; SWISSPROT HIT: O77245, EVALUE 2.50e+00; NT HIT: X64315.1, EVALUE 1.70e-01
tgaggctcctcccaggcagaggtggggtcctcccagggctgcccaccggtcgtcctctctcgcatcctctcagggctctccat

SEQ ID NO: 22122 - DNA, 210 bp, Homo sapiens
  MAP TO AC006120.1; EXPRESSED IN LUNG, SIGNAL = 1.6; EXPRESSED IN FETAL LIVER, SIGNAL = 2.9; EXPRESSED IN HELA, SIGNAL = 2.6; EXPRESSED IN BRAIN, SIGNAL = 1.7; EXPRESSED IN BONE MARROW, SIGNAL = 1.8; EXPRESSED IN ADULT LIVER, SIGNAL =   3; EXPRESSED IN PLACENTA, SIGNAL = 1.4; EXPRESSED IN HEART, SIGNAL = 2.5; NT HIT: gi4506230, EVALUE 8.00e-77; EST_HUMAN HIT: AI697266.1, EVALUE 1.00e-76; SWISSPROT HIT: P26516, EVALUE 6.00e-24
atgtctcgtaacaagtgttcaactccaacttcctcagcttactctgctccaatttcactggtcacatgttcaaatgttttcaaggttggagttccatcatcttggatttcttccactgaaatgtatgcttctgtgggcagccctaggtcctttggattcacgtcaataatgatcaataccgagttaggatagtatcttttcatgagttca

SEQ ID NO: 22123 - DNA, 143 bp, Homo sapiens
  MAP TO AC003662.1; EXPRESSED IN LUNG, SIGNAL = 2.1; EXPRESSED IN PLACENTA, SIGNAL = 1.6; EXPRESSED IN HEART, SIGNAL =   2; EXPRESSED IN FETAL LIVER, SIGNAL = 1.7; EXPRESSED IN BRAIN, SIGNAL = 1.9; EXPRESSED IN BONE MARROW, SIGNAL = 1.8; EXPRESSED IN ADULT LIVER, SIGNAL = 2.1; EXPRESSED IN HELA, SIGNAL =   2; NT HIT: K03332.1, EVALUE 1.00e-03; SWISSPROT HIT: P20114, EVALUE 3.10e+00
ctctccccacacggtgagcagtgaaccttggtccacaaaccagacccccagaatccgtttcatgtcccaccacggtgtgctctcccaggctgtgcctgaggcccaggctcctgtgcgcagcagaacgtggggaaaggggatag

SEQ ID NO: 22124 - DNA, 156 bp, Homo sapiens
  MAP TO AC000053.1; EXPRESSED IN PLACENTA, SIGNAL = 1.6; EXPRESSED IN HELA, SIGNAL = 1.8; EXPRESSED IN HEART, SIGNAL = 1.8; EXPRESSED IN FETAL LIVER, SIGNAL = 1.9; EXPRESSED IN ADULT LIVER, SIGNAL = 1.4; EXPRESSED IN LUNG, SIGNAL = 1.7; EXPRESSED IN BRAIN, SIGNAL =   2; EXPRESSED IN BONE MARROW, SIGNAL = 2.1; NT HIT: U64453.1, EVALUE 1.40e+00; EST_HUMAN HIT: AI820921.1, EVALUE 5.30e-01
gatgatgatgatggagaaggagaagaagaaggaggaggaggaggaaagaaggaagaagaagaagaagaggaggaggaagaagaagacgaagggaagaagaagaaggatgaggaggaggaggaatagacagactgacaaagattctctactgttgtc

SEQ ID NO: 22125 - DNA, 114 bp, Homo sapiens
  MAP TO AC006461.2; EXPRESSED IN BRAIN, SIGNAL = 2.1; EXPRESSED IN ADULT LIVER, SIGNAL = 1.7; EXPRESSED IN PLACENTA, SIGNAL = 2.3; EXPRESSED IN LUNG, SIGNAL = 1.8; EXPRESSED IN HELA, SIGNAL = 1.6; EXPRESSED IN HEART, SIGNAL = 1.9; EXPRESSED IN BONE MARROW, SIGNAL = 1.6; EXPRESSED IN FETAL LIVER, SIGNAL =   2; SWISSPROT HIT: P73182, EVALUE 7.10e+00; EST_HUMAN HIT: AI807191.1, EVALUE 7.00e-49
agccgcaagaacaacatgtttgcacagtttcggaaaaatgagcgagacaagcagaaactcattgacaccgtggccaagcagctccgaggactcatcagcagccaccactcatga

SEQ ID NO: 22126 - DNA, 443 bp, Homo sapiens
  MAP TO AC005701.1; EXPRESSED IN HELA, SIGNAL = 4.7; EXPRESSED IN BRAIN, SIGNAL = 4.9; EXPRESSED IN ADULT LIVER, SIGNAL = 4.4; EXPRESSED IN PLACENTA, SIGNAL = 8.9; EXPRESSED IN LUNG, SIGNAL = 5.1; EXPRESSED IN HEART, SIGNAL = 5.2; EXPRESSED IN FETAL LIVER, SIGNAL = 4.9; EXPRESSED IN BONE MARROW, SIGNAL = 4.3; SWISSPROT HIT: P39057, EVALUE 1.00e-47; NT HIT: AF257737.1, EVALUE 0.00e+00
ctgtgagtgacgtggtccacaagatgctgtttgaacaggaggctccacctcttaataatattcagcagagatgccttaaagggtcgaatatcaattttcatccagccgtcaaacaccttgatgggttccagcctgcacacctcttcatagagcgtttcataggagtcgatttgcactttaaactgagaaaggaggggagggttctctgggatgccatcttccacatggtcttcaatttcttccggagtgaggatgtgcccgtacagcagaaactgacccagaacctccttccggtcctccacatagaggtacgaatactggctgaaggtgctctgatagccacagcagaggcccatcattctctggactctctccatgagtgtgcgccgcatgtttgccaaatctggtataccgtccaggtcgacctggggaagcgagacaac

SEQ ID NO: 22127 - DNA, 190 bp, Homo sapiens
  MAP TO AC004904.1; EXPRESSED IN ADULT LIVER, SIGNAL = 3.7; EXPRESSED IN PLACENTA, SIGNAL = 5.9; EXPRESSED IN HEART, SIGNAL = 3.6; EXPRESSED IN LUNG, SIGNAL = 4.3; EXPRESSED IN FETAL LIVER, SIGNAL = 4.2; EXPRESSED IN BRAIN, SIGNAL = 4.9; EXPRESSED IN BONE MARROW, SIGNAL = 2.9; EXPRESSED IN HELA, SIGNAL = 3.8; SWISSPROT HIT: P35317, EVALUE 1.00e-25; NT HIT: J03007.1, EVALUE 9.00e-92; EST_HUMAN HIT: BE743876.1, EVALUE 1.00e-91
ggtgctatcgtggctgtgactggtgacggtgtgaatgactctccagctttgaagaaagcagacattggggttgctatggggattgctggctcagatgtgtccaagcaagctgctgacatgattcttctggatgacaactttgcctcaattgtgactggagtagaggaaggtgagagctatttaaggtgta

SEQ ID NO: 22128 - DNA, 122 bp, Homo sapiens
  MAP TO AC005591.1; EXPRESSED IN PLACENTA, SIGNAL = 1.4; EXPRESSED IN LUNG, SIGNAL = 1.4; EXPRESSED IN HEART, SIGNAL = 1.3; EXPRESSED IN FETAL LIVER, SIGNAL = 1.5; EXPRESSED IN BRAIN, SIGNAL = 1.6; EXPRESSED IN BONE MARROW, SIGNAL = 1.3; EXPRESSED IN ADULT LIVER, SIGNAL = 1.5; EST_HUMAN HIT: BF308733.1, EVALUE 1.00e-62; SWISSPROT HIT: Q12236, EVALUE 4.00e-09; NT HIT: Y15056.1, EVALUE 9.00e-63
aatggagaactacttaaatatattcgcaaaatcggttcattcgatgagacctgtacccgattttacacggctgagattgtgtctgctttagagtacttgcacggcaagggcatcattcacag

SEQ ID NO: 22129 - DNA, 385 bp, Homo sapiens
  MAP TO AC005510.3; EXPRESSED IN PLACENTA, SIGNAL = 1.7; EXPRESSED IN LUNG, SIGNAL = 1.7; EXPRESSED IN FETAL LIVER, SIGNAL = 1.5; EXPRESSED IN BONE MARROW, SIGNAL = 1.6; EXPRESSED IN ADULT LIVER, SIGNAL = 1.4; EXPRESSED IN HEART, SIGNAL = 1.8; EXPRESSED IN BRAIN, SIGNAL = 1.6; SWISSPROT HIT: Q60675, EVALUE 1.60e+00; NT HIT: AB028990.1, EVALUE 6.00e-42; EST_HUMAN HIT: BE300383.1, EVALUE 9.00e-42
gaagggcagtagggaattccagaaaaagaactgttcttccagaaatacttctccaggccttgatgaagcggtccagctggctggagcaaatcttgtagtagacattcataaattcttggttgcagctgtattccaccagccagcaggcgatgcagattacatcctggatcacactcttgggcaggtgctccagggacataatctcctgtacctccagatcatcatcaccaccgatcagatccaggatgagcacaggtgatacaaacttattgtgcctggtcatcaggctgcagagctcagatgtgtgttctgggctgtctgggctattgtcctggaaatactccacagccttctgaatcttagccatgcttcccagatactcttc

SEQ ID NO: 22130 - DNA, 132 bp, Homo sapiens
  MAP TO AC005477.1; EXPRESSED IN PLACENTA, SIGNAL = 1.3; EXPRESSED IN LUNG, SIGNAL = 1.6; EXPRESSED IN HEART, SIGNAL = 1.3; EXPRESSED IN FETAL LIVER, SIGNAL = 1.4; EXPRESSED IN BRAIN, SIGNAL = 1.4; EXPRESSED IN BONE MARROW, SIGNAL = 1.3; EXPRESSED IN ADULT LIVER, SIGNAL = 1.4; NT HIT: L47572.1, EVALUE 1.90e-02; SWISSPROT HIT: P27057, EVALUE 2.40e+00; EST_HUMAN HIT: AW854259.1, EVALUE 1.70e+00
ccagtgcaaggattaccatattttcctatgctgctttggtgactgtgagtgcctgtgcatggatggagcctcccatcagtgtcagcatggagtcttcaattccaatgagcagtttcctgttgatctacatta

SEQ ID NO: 22131 - DNA, 118 bp, Homo sapiens
  MAP TO AC006015.2; EXPRESSED IN LUNG, SIGNAL = 1.5; EXPRESSED IN FETAL LIVER, SIGNAL = 1.1; EXPRESSED IN BONE MARROW, SIGNAL = 1.3; EXPRESSED IN HEART, SIGNAL = 1.3; EXPRESSED IN BRAIN, SIGNAL = 1.5; EXPRESSED IN ADULT LIVER, SIGNAL = 1.1; EXPRESSED IN PLACENTA, SIGNAL = 1.3; SWISSPROT HIT: P51566, EVALUE 1.40e+00; EST_HUMAN HIT: AL120937.1, EVALUE 7.00e-49
ccccgccacgtggcaggtgctcgtcctcagagaagctcgagtcttggttgggttcaaagtcctcctcggctgccatgctctccatcagcttgctcacagcgccccccttgctgaggtt

SEQ ID NO: 22132 - DNA, 155 bp, Homo sapiens
  MAP TO AC002119.1; EXPRESSED IN PLACENTA, SIGNAL = 2.9; EXPRESSED IN HEART, SIGNAL = 2.4; EXPRESSED IN BRAIN, SIGNAL = 5.7; EXPRESSED IN BONE MARROW, SIGNAL = 3.5; EXPRESSED IN ADULT LIVER, SIGNAL = 2.6; EXPRESSED IN LUNG, SIGNAL = 4.3; EXPRESSED IN HELA, SIGNAL = 2.6; EXPRESSED IN FETAL LIVER, SIGNAL = 3.8; NT HIT: AB018270.1, EVALUE 2.00e-82; SWISSPROT HIT: Q9Z9H0, EVALUE 4.60e-01; EST_HUMAN HIT: BE933221.1, EVALUE 4.00e-82
agaagcgccaccttcaagtgaacgtcaccaacccagtacagtgcagcctgcacgggaagaagtgcaccgtctccgtggagacgcggctcaaccagccccagcccgacttcaccaagaatcgctcgggcttcatcctcagcgtgcccgggaactga

SEQ ID NO: 22133 - DNA, 175 bp, Homo sapiens
  MAP TO AC005323.1; EXPRESSED IN LUNG, SIGNAL = 0.8; EXPRESSED IN HEART, SIGNAL =  23; EXPRESSED IN BONE MARROW, SIGNAL = 1.1; EXPRESSED IN ADULT LIVER, SIGNAL = 0.44; SWISSPROT HIT: P13538, EVALUE 5.00e-26; EST_HUMAN HIT: F00725.1, EVALUE 5.00e-51; NT HIT: gi11024711, EVALUE 2.00e-83
cagttagcatgaactgataggcattgtcagagatggagaagatatggggtggggcctcctggcgctttttgcctcggtaggctgtcaccacctcagggttgtacaccggcagccacttgtaggggttgacggtgacacagaagaggcccgagtaggtctgtgggaaaggacgggg

SEQ ID NO: 22134 - DNA, 162 bp, Homo sapiens
  MAP TO AC005912.1; EXPRESSED IN PLACENTA, SIGNAL = 3.5; EXPRESSED IN ADULT LIVER, SIGNAL = 3.5; EXPRESSED IN LUNG, SIGNAL =   4; EXPRESSED IN HEART, SIGNAL = 3.4; EXPRESSED IN FETAL LIVER, SIGNAL = 3.3; EXPRESSED IN BRAIN, SIGNAL = 3.1; EXPRESSED IN BONE MARROW, SIGNAL = 3.3; EXPRESSED IN HELA, SIGNAL = 3.6; SWISSPROT HIT: Q90643, EVALUE 4.60e-01
ggctgcagccacgcacctggggttctggggcttccaaacatccacaggtgctgctgatgcctggccaggagggcacaccaccaggcccacgcacagcagacagaacattcccagggacacactgcccacattccctccagaacaaacaccctgtcaccacca

SEQ ID NO: 22135 - DNA, 210 bp, Homo sapiens
  MAP TO AC002044.1; EXPRESSED IN PLACENTA, SIGNAL = 2.5; EXPRESSED IN LUNG, SIGNAL = 2.9; EXPRESSED IN FETAL LIVER, SIGNAL =   2; EXPRESSED IN BRAIN, SIGNAL =   3; EXPRESSED IN BONE MARROW, SIGNAL = 2.4; EXPRESSED IN ADULT LIVER, SIGNAL = 2.6; EXPRESSED IN HELA, SIGNAL = 2.9; EXPRESSED IN HEART, SIGNAL = 2.2; SWISSPROT HIT: P48678, EVALUE 1.30e+00; NT HIT: AF248054.1, EVALUE 5.00e-04; EST_HUMAN HIT: AW296870.1, EVALUE 3.00e-03
cccctgacagaatgagcagcagtatcggcggcggcggcggcggcggcagcagcagcagcagcagcagagaaaagaccaggagcgagttgcacgtgctccctccctccctccctccgctcaaggccaggagctgctgggacctgtggtctggcagtggggaaggcaggggagcctggtcagcagcagggtgggaaaacgtggaatggagac

SEQ ID NO: 22136 - DNA, 253 bp, Homo sapiens
  MAP TO AC006530.4; EXPRESSED IN BONE MARROW, SIGNAL = 1.2; EXPRESSED IN ADULT LIVER, SIGNAL = 1.2; EXPRESSED IN PLACENTA, SIGNAL = 1.3; EXPRESSED IN HEART, SIGNAL = 1.5; EXPRESSED IN FETAL LIVER, SIGNAL = 1.4; EXPRESSED IN BRAIN, SIGNAL = 1.1; EXPRESSED IN LUNG, SIGNAL = 0.99; NT HIT: D26535.1, EVALUE 0.00e+00; EST_HUMAN HIT: AU133426.1, EVALUE 1.00e-80; SWISSPROT HIT: P46799, EVALUE 1.70e+00
ctgctcctgctaaggccaagccggctgaagctcctgctgctgcagccccaaaagcagaacctacagcagcggcagttcctccccctgcagcacccatacccactcagatgccaccggtgccctcgccctcacagcctccttctggcaaacctggtaggcttccaactcccacatgtcatgtgggagaacatctcgtctaatatgttccttcaaagggtaaactctagactgatgatggttctgaacaggccag

SEQ ID NO: 22137 - DNA, 108 bp, Homo sapiens
  MAP TO AC004675.1; EXPRESSED IN LUNG, SIGNAL = 1.8; EXPRESSED IN PLACENTA, SIGNAL = 2.7; EXPRESSED IN HEART, SIGNAL = 3.8; EXPRESSED IN FETAL LIVER, SIGNAL = 2.2; EXPRESSED IN BRAIN, SIGNAL = 1.6; EXPRESSED IN BONE MARROW, SIGNAL = 1.8; EXPRESSED IN ADULT LIVER, SIGNAL = 7.2; NT HIT: gi4759069, EVALUE 2.00e-54; EST_HUMAN HIT: AA550792.1, EVALUE 3.00e-54; SWISSPROT HIT: Q16627, EVALUE 3.00e-07
gtgaggaggattcagtcttggtccctagggcgatggtgatgaggaggaagaagggaatggcagccacggagatcttcatgctgtgggaagctgttgtgggaggagagc

SEQ ID NO: 22138 - DNA, 204 bp, Homo sapiens
  MAP TO AC005392.1; EXPRESSED IN PLACENTA, SIGNAL = 0.75; EXPRESSED IN HEART, SIGNAL = 2.8; EXPRESSED IN BONE MARROW, SIGNAL = 0.66; EXPRESSED IN LUNG, SIGNAL = 0.64; EXPRESSED IN ADULT LIVER, SIGNAL = 0.7; SWISSPROT HIT: Q15238, EVALUE 1.00e-35; NT HIT: M32634.1, EVALUE 1.00e-111; EST_HUMAN HIT: AA151017.1, EVALUE 1.00e-111
atttggagctttccttgccagtagctgagttacgaacagagcaagtatagagccctctatgctttgtagtaatttgggggatagagagcttttgtcctgattgctgaaacttcccattaattgtccaaaaatactctgccggtgggttagattccgcgaagcaggacaagtagaggttttctcctgaacggtaataggtgaatg

SEQ ID NO: 22139 - DNA, 138 bp, Homo sapiens
  MAP TO AC005316.1; EXPRESSED IN PLACENTA, SIGNAL = 9.2; EXPRESSED IN HEART, SIGNAL = 8.7; EXPRESSED IN FETAL LIVER, SIGNAL =  11; EXPRESSED IN BRAIN, SIGNAL = 9.7; EXPRESSED IN BONE MARROW, SIGNAL = 9.8; EXPRESSED IN ADULT LIVER, SIGNAL =  10; EXPRESSED IN HELA, SIGNAL = 9.7; EXPRESSED IN LUNG, SIGNAL =  11; SWISSPROT HIT: O19132, EVALUE 9.10e+00; NT HIT: AF176111.1, EVALUE 3.10e-01
ctactgttgctgccaccacacatgaaaccagcgactggagagtgacacctggagttgggcagccccaaagagtcttgtcagccagagcttcctggtctgtgccaaggctacatgagtgttcacaggcggaatataagt

SEQ ID NO: 22140 - DNA, 199 bp, Homo sapiens
  MAP TO AC005612.1; EXPRESSED IN PLACENTA, SIGNAL = 1.2; EXPRESSED IN HEART, SIGNAL = 1.5; EXPRESSED IN FETAL LIVER, SIGNAL = 1.2; EXPRESSED IN BONE MARROW, SIGNAL = 1.1; EXPRESSED IN ADULT LIVER, SIGNAL = 1.7; EXPRESSED IN LUNG, SIGNAL = 1.3; EXPRESSED IN BRAIN, SIGNAL = 1.2; SWISSPROT HIT: P20591, EVALUE 1.00e-32; NT HIT: M30817.1, EVALUE 1.00e-108; EST_HUMAN HIT: AW384094.1, EVALUE 1.00e-108
gaatcttgacgaagcctgatctggtggacaaaggaactgaagacaaggttgtggacgtggtgcggaacctcgtgttccacctgaagaagggttacatgattgtcaagtgccggggccagcaggagatccaggaccagctgagcctgtccgaagccctgcagagagagaagatcttctttgagaaccacccatatttcag

SEQ ID NO: 22141 - DNA, 186 bp, Homo sapiens
  MAP TO AC006141.2; EXPRESSED IN HELA, SIGNAL = 4.2; EXPRESSED IN HEART, SIGNAL = 3.7; EXPRESSED IN ADULT LIVER, SIGNAL = 5.7; EXPRESSED IN FETAL LIVER, SIGNAL = 5.4; EXPRESSED IN BRAIN, SIGNAL = 4.2; EXPRESSED IN BONE MARROW, SIGNAL = 4.4; EXPRESSED IN PLACENTA, SIGNAL = 4.1; EXPRESSED IN LUNG, SIGNAL = 3.7; NT HIT: gi7705764, EVALUE 2.00e-95; SWISSPROT HIT: P44806, EVALUE 2.90e+00; EST_HUMAN HIT: BF665668.1, EVALUE 3.00e-95
gttgatgggaaaacaaatcctaaaattcagagcatctatttggaaaggtttccaatctttaaggcttgttttagtgctaatggggaagaagttttagccacgagtacccacagcaaggttctttatgtctatgacatgctggctggaaagttaattcctgtgcatcaagtgagaggtaagatttct

SEQ ID NO: 22142 - DNA, 167 bp, Homo sapiens
  MAP TO AC004763.1; EXPRESSED IN PLACENTA, SIGNAL = 3.6; EXPRESSED IN HELA, SIGNAL = 2.8; EXPRESSED IN FETAL LIVER, SIGNAL = 3.1; EXPRESSED IN BRAIN, SIGNAL = 2.9; EXPRESSED IN LUNG, SIGNAL = 3.6; EXPRESSED IN HEART, SIGNAL = 2.5; EXPRESSED IN BONE MARROW, SIGNAL = 2.8; EXPRESSED IN ADULT LIVER, SIGNAL = 4.8; SWISSPROT HIT: O14960, EVALUE 9.00e-17; EST_HUMAN HIT: AV719110.1, EVALUE 5.00e-23; NT HIT: AB007546.1, EVALUE 2.00e-89
gtttttgtgtcaaaatgttctacattaagccaattaagtataaaggtcctattaagaagggagaaaaacttggaactctattgcccttgcagaaagtttatcctggcatacaatcgcatgtgcacattgaaaactgtgactcgagtgaccctactgcatacctgtaa

SEQ ID NO: 22143 - DNA, 138 bp, Homo sapiens
  MAP TO AC005599.5; EXPRESSED IN PLACENTA, SIGNAL = 5.4; EXPRESSED IN LUNG, SIGNAL = 5.3; EXPRESSED IN FETAL LIVER, SIGNAL = 5.6; EXPRESSED IN BRAIN, SIGNAL = 4.9; EXPRESSED IN ADULT LIVER, SIGNAL = 5.4; EXPRESSED IN HELA, SIGNAL = 5.7; EXPRESSED IN HEART, SIGNAL = 5.3; EXPRESSED IN BONE MARROW, SIGNAL = 5.4; NT HIT: AB032369.1, EVALUE 7.00e-70; SWISSPROT HIT: Q60787, EVALUE 1.00e-09; EST_HUMAN HIT: N49261.1, EVALUE 4.60e-01
tgtccccagggcaaactgctgattcctctccaggaagcgtatttttacattgtagactttgttctcataaaacacagccaaaacatagggctcttccttggattttgtggaacaatctcggaccaagaaactaccatc

SEQ ID NO: 22144 - DNA, 97 bp, Homo sapiens
  MAP TO AC004957.1; EXPRESSED IN BONE MARROW, SIGNAL = 1.5; EXPRESSED IN ADULT LIVER, SIGNAL =   2; EXPRESSED IN PLACENTA, SIGNAL = 1.7; EXPRESSED IN LUNG, SIGNAL = 1.8; EXPRESSED IN HEART, SIGNAL = 1.8; EXPRESSED IN FETAL LIVER, SIGNAL = 1.8; EXPRESSED IN BRAIN, SIGNAL = 1.6; NT HIT: AL163246.2, EVALUE 2.00e-16; EST_HUMAN HIT: AI624582.1, EVALUE 2.00e-21
ttgccctgcataagctctccttgcctgctgccatccaggtaagatgtgacttgctcctccttgccttccgctatgaatgtgaggcctccacaggcat

SEQ ID NO: 22145 - DNA, 160 bp, Homo sapiens
  MAP TO AC004883.2; EXPRESSED IN BONE MARROW, SIGNAL = 2.5; EXPRESSED IN ADULT LIVER, SIGNAL = 2.5; EXPRESSED IN LUNG, SIGNAL =   3; EXPRESSED IN HELA, SIGNAL = 2.4; EXPRESSED IN HEART, SIGNAL = 2.2; EXPRESSED IN FETAL LIVER, SIGNAL = 2.5; EXPRESSED IN BRAIN, SIGNAL = 3.1; EXPRESSED IN PLACENTA, SIGNAL = 2.7; EST_HUMAN HIT: AV721616.1, EVALUE 1.00e-20; NT HIT: AF267747.1, EVALUE 2.00e-36
tttttcaaaaatcaattttcccttttgtgaatctagtaatgaatctcgaaatgggtacatgacacactttcctattgaaggtaaagtacacatttataccttatctcagaacagtcagaagccaggttactgttttattggttagtgatgcaaatattga

SEQ ID NO: 22146 - DNA, 144 bp, Homo sapiens
  MAP TO AC006024.1; EXPRESSED IN PLACENTA, SIGNAL = 1.6; EXPRESSED IN LUNG, SIGNAL = 1.5; EXPRESSED IN FETAL LIVER, SIGNAL = 1.2; EXPRESSED IN BRAIN, SIGNAL = 1.4; EXPRESSED IN BONE MARROW, SIGNAL = 1.3; EXPRESSED IN ADULT LIVER, SIGNAL = 1.2; EXPRESSED IN HEART, SIGNAL = 1.4; NT HIT: AL111394.1, EVALUE 3.20e-01; EST_HUMAN HIT: BF241410.1, EVALUE 2.00e-03
cagtacaagagagcatacaatgagtggccaccacatgcccagaggagctcctaatctaggagcatgggtgctccagtgcctggagatctttctgagtatggagtatagagggacctactgcaccactatctctgcacaggaatg

SEQ ID NO: 22147 - DNA, 130 bp, Homo sapiens
  MAP TO AC002287.1; EXPRESSED IN PLACENTA, SIGNAL =  11; EXPRESSED IN BRAIN, SIGNAL =  12; EXPRESSED IN ADULT LIVER, SIGNAL =  11; EXPRESSED IN LUNG, SIGNAL =  13; EXPRESSED IN HELA, SIGNAL =  12; EXPRESSED IN HEART, SIGNAL =  11; EXPRESSED IN FETAL LIVER, SIGNAL =  11; EXPRESSED IN BONE MARROW, SIGNAL =  11; NT HIT: AF223391.1, EVALUE 7.30e-02; EST_HUMAN HIT: BE741083.1, EVALUE 2.80e-02
acccagggtagggtgtgtgagttctgtacccatcagtaccacagataggaggggtccaagaaggctgggagccacatcaggtctgagtccttttagaggaattaacatagacattgagagacagatgctg

SEQ ID NO: 22148 - DNA, 473 bp, Homo sapiens
  MAP TO AC004853.1; EXPRESSED IN BRAIN, SIGNAL = 1.9; EXPRESSED IN HEART, SIGNAL = 1.7; EXPRESSED IN BONE MARROW, SIGNAL = 1.8; EXPRESSED IN ADULT LIVER, SIGNAL = 1.8; EXPRESSED IN PLACENTA, SIGNAL =   2; EXPRESSED IN LUNG, SIGNAL =   2; EXPRESSED IN HELA, SIGNAL = 1.9; EXPRESSED IN FETAL LIVER, SIGNAL =   2; NT HIT: gi11420819, EVALUE 0.00e+00; EST_HUMAN HIT: BF380735.1, EVALUE 1.10e-01; SWISSPROT HIT: Q13607, EVALUE 3.00e-77
tcggccatcatgcatggagggctgtgtgctaggttggccatcacatcctgggtcagtggctccatcaactctcttgtgcagactgctatcacctttcagctgcccatgtgcactaacaagtttattgatcacatatcctgtgaactcctagctgtggtcaggctggcttgtgtggacacctcctccaatgaggctgccatcatggtgtctagcattgttcttctgatgacacctttctgcctggttctgttgtcctacatccggatcatctccaccatcctaaagatccagtccagagaaggaagaaagaaagccttccacacgtgtgcctctcacctcacggtggttgccctgtgctacggcacaacgattttcacttacatccagccccactctggtccctcagtccttcaagagaagctgatctctgtcttctatgccattgttatgcctctgctgaaccctgtgattta

SEQ ID NO: 22149 - DNA, 116 bp, Homo sapiens
  MAP TO AC002064.1; EXPRESSED IN LUNG, SIGNAL = 5.7; EXPRESSED IN BRAIN, SIGNAL = 4.2; EXPRESSED IN ADULT LIVER, SIGNAL = 4.3; EXPRESSED IN PLACENTA, SIGNAL = 4.4; EXPRESSED IN HELA, SIGNAL = 4.3; EXPRESSED IN HEART, SIGNAL = 3.4; EXPRESSED IN FETAL LIVER, SIGNAL = 3.9; EXPRESSED IN BONE MARROW, SIGNAL = 4.2; SWISSPROT HIT: P49744, EVALUE 9.30e+00; EST_HUMAN HIT: AA508880.1, EVALUE 2.00e-39; NT HIT: X78993.1, EVALUE 2.50e-01
gaaaacagcttggattactaagttttttcttcgctatggtccatgttgcctacagcctctgcttaccgatgagaaggtcagagagatatttgtttctcaacatggcttatcagcag

SEQ ID NO: 22150 - DNA, 126 bp, Homo sapiens
  MAP TO AC004805.1; EXPRESSED IN ADULT LIVER, SIGNAL =   8; EXPRESSED IN PLACENTA, SIGNAL =  12; EXPRESSED IN LUNG, SIGNAL =  10; EXPRESSED IN HEART, SIGNAL = 7.4; EXPRESSED IN BRAIN, SIGNAL = 7.8; EXPRESSED IN HELA, SIGNAL = 7.7; EXPRESSED IN FETAL LIVER, SIGNAL = 9.6; EXPRESSED IN BONE MARROW, SIGNAL = 9.5; EST_HUMAN HIT: BE870069.1, EVALUE 4.00e-41; NT HIT: X87689.1, EVALUE 3.00e-41; SWISSPROT HIT: Q29238, EVALUE 4.00e-16
ccatacagcaggaatgggagctgccctcctgggcacagcttttgcactatcttggtctgcctcttggtgtcaatgatggtgacattgaaggtgactcccttgagccacagcaccatgaacagtctc

SEQ ID NO: 22151 - DNA, 207 bp, Homo sapiens
  MAP TO AC004682.1; EXPRESSED IN BONE MARROW, SIGNAL = 6.7; EXPRESSED IN PLACENTA, SIGNAL = 6.4; EXPRESSED IN LUNG, SIGNAL = 6.2; EXPRESSED IN HELA, SIGNAL = 6.1; EXPRESSED IN FETAL LIVER, SIGNAL =   6; EXPRESSED IN ADULT LIVER, SIGNAL = 5.8; EXPRESSED IN HEART, SIGNAL = 6.3; EXPRESSED IN BRAIN, SIGNAL = 7.7; SWISSPROT HIT: Q92620, EVALUE 2.00e-34; EST_HUMAN HIT: AU127214.1, EVALUE 1.00e-113; NT HIT: AF038391.1, EVALUE 1.00e-113
ctgtgttgtccagggccccgaggatccagagctgatacatagagttgagcatgttgtcctccgggggcgggtccatgaagtggaactgcagcaggtcctgcaccccgagggacttgagcagcagcaccacgttggccaggttagtcctctggatctcgggcactgtggtggtcaggagctcattcttgtaggcgctctgggtgtaga

SEQ ID NO: 22152 - DNA, 97 bp, Homo sapiens
  MAP TO AC004943.1; EXPRESSED IN LUNG, SIGNAL = 4.8; EXPRESSED IN FETAL LIVER, SIGNAL =   4; EXPRESSED IN BONE MARROW, SIGNAL = 3.8; EXPRESSED IN PLACENTA, SIGNAL =   4; EXPRESSED IN HELA, SIGNAL = 3.8; EXPRESSED IN HEART, SIGNAL = 3.2; EXPRESSED IN BRAIN, SIGNAL = 3.9; EXPRESSED IN ADULT LIVER, SIGNAL = 3.7; NT HIT: U12259.1, EVALUE 8.10e-01; EST_HUMAN HIT: BE693575.1, EVALUE 3.00e-01
tcagggtacatttgaaggaaggtacatcctcgtaatcagaacagaagtggttgtctgtgagctttgtgacagcatcaggtttatctccattgtcacc

SEQ ID NO: 22153 - DNA, 158 bp, Homo sapiens
  MAP TO AC003684.1; EXPRESSED IN PLACENTA, SIGNAL = 3.5; EXPRESSED IN HEART, SIGNAL =   3; EXPRESSED IN BRAIN, SIGNAL = 3.7; EXPRESSED IN BONE MARROW, SIGNAL = 3.4; EXPRESSED IN ADULT LIVER, SIGNAL = 3.1; EXPRESSED IN LUNG, SIGNAL = 3.8; EXPRESSED IN HELA, SIGNAL = 3.2; EXPRESSED IN FETAL LIVER, SIGNAL = 3.2; NT HIT: D14547.1, EVALUE 2.00e-18; SWISSPROT HIT: P31819, EVALUE 6.80e+00; EST_HUMAN HIT: N72364.1, EVALUE 6.00e-04
cctctgtcacccctgagacaagaccagcgcctcctcttcctcctcctcttcagcccactcaacaagaagatgacgagggtgaagaccttcgggatgatccacatccacttcgtgaatacaaagtatattttctcttccttaggattttcttcatgaca

SEQ ID NO: 22154 - DNA, 202 bp, Homo sapiens
  MAP TO AC004870.2; EXPRESSED IN BONE MARROW, SIGNAL = 8.8; EXPRESSED IN ADULT LIVER, SIGNAL = 8.5; EXPRESSED IN PLACENTA, SIGNAL = 9.7; EXPRESSED IN LUNG, SIGNAL = 9.6; EXPRESSED IN HEART, SIGNAL = 8.9; EXPRESSED IN BRAIN, SIGNAL =  11; EXPRESSED IN HELA, SIGNAL = 9.1; EXPRESSED IN FETAL LIVER, SIGNAL = 8.6; NT HIT: J02987.1, EVALUE 4.80e-01; EST_HUMAN HIT: N33041.1, EVALUE 2.80e+00
ctatctccaaagccatgagaaggaatataatcattcaagaatggggggtggagagagagagagagagacagagagagaaagagagagagaagaagaagaagaggaggaggaggagaagaagaagaggaggaggagggagaggaggagaggagtaaggagaagagaagtagaggaggaggaggaggtggagggagaggaggag

SEQ ID NO: 22155 - DNA, 76 bp, Homo sapiens
  MAP TO AC000005.1; EXPRESSED IN PLACENTA, SIGNAL = 1.5; EXPRESSED IN LUNG, SIGNAL = 1.6; EXPRESSED IN FETAL LIVER, SIGNAL = 1.3; EXPRESSED IN BRAIN, SIGNAL = 1.4; EXPRESSED IN BONE MARROW, SIGNAL = 1.5; EXPRESSED IN ADULT LIVER, SIGNAL = 1.4; EXPRESSED IN HEART, SIGNAL = 1.4; NT HIT: gi11526236, EVALUE 1.00e-35; SWISSPROT HIT: Q13112, EVALUE 2.00e-08; EST_HUMAN HIT: BE799980.1, EVALUE 2.00e-35
agttctccttgttcagctgggcctcgtcctcatcctgaaaagcgatctgctccggctccttgttatcattcacctt

SEQ ID NO: 22156 - DNA, 178 bp, Homo sapiens
  MAP TO AC004672.1; EXPRESSED IN PLACENTA, SIGNAL = 2.8; EXPRESSED IN ADULT LIVER, SIGNAL = 2.8; EXPRESSED IN LUNG, SIGNAL = 2.9; EXPRESSED IN HEART, SIGNAL = 2.7; EXPRESSED IN FETAL LIVER, SIGNAL = 2.7; EXPRESSED IN BRAIN, SIGNAL = 2.8; EXPRESSED IN BONE MARROW, SIGNAL = 2.3; EXPRESSED IN HELA, SIGNAL = 2.6; NT HIT: AB015617.1, EVALUE 4.00e-26; SWISSPROT HIT: P32595, EVALUE 3.90e+00; EST_HUMAN HIT: AW836047.1, EVALUE 8.00e-96
gcccccactgcatcaactacacggcaactggattccccaaggtagcccccactgcatcaacctacacagcaactggattttcacaggctcttttcaaagtttgagtgagaggctcacctgcccccgggtcatcttctgcagctcattctcccaagccgcctggtcatcgtccaagtta

SEQ ID NO: 22157 - DNA, 193 bp, Homo sapiens
  MAP TO AC006094.1; EXPRESSED IN PLACENTA, SIGNAL =   9; EXPRESSED IN LUNG, SIGNAL = 9.5; EXPRESSED IN FETAL LIVER, SIGNAL = 8.3; EXPRESSED IN BRAIN, SIGNAL = 8.8; EXPRESSED IN BONE MARROW, SIGNAL = 8.4; EXPRESSED IN ADULT LIVER, SIGNAL = 8.5; EXPRESSED IN HELA, SIGNAL = 8.9; EXPRESSED IN HEART, SIGNAL = 8.8; NT HIT: AF171220.1, EVALUE 1.10e-01; EST_HUMAN HIT: AA397781.1, EVALUE 5.00e-45
tcaactcagcagctccacgccgccttccatctccacgccgccttccatctccacgccgccttccatctccacgccgccttccatctccacgccgccttccatctccacgccgccttccatctccacgccgccttccatcgctggcatcacctgcctccctgcttgtttccttttcagatcaaatcctataatt

SEQ ID NO: 22158 - DNA, 135 bp, Homo sapiens
  MAP TO AC005529.7; EXPRESSED IN PLACENTA, SIGNAL = 8.4; EXPRESSED IN LUNG, SIGNAL =  10; EXPRESSED IN HEART, SIGNAL =   8; EXPRESSED IN FETAL LIVER, SIGNAL = 8.5; EXPRESSED IN BONE MARROW, SIGNAL = 9.1; EXPRESSED IN ADULT LIVER, SIGNAL = 8.1; EXPRESSED IN HELA, SIGNAL = 8.1; EXPRESSED IN BRAIN, SIGNAL = 8.7; NT HIT: X72662.1, EVALUE 2.00e-70; SWISSPROT HIT: P35240, EVALUE 2.00e-21; EST_HUMAN HIT: BE898640.1, EVALUE 3.00e-70
aataaaaagggcacagagctgctgcttggagtggatgccctggggcttcacatttatgaccctgagaacagactgacccccaagatctccttcccgtggaatgaaatccgaaacatctcgtacagtgacaaggag

SEQ ID NO: 22159 - DNA, 288 bp, Homo sapiens
  MAP TO AC005500.1; EXPRESSED IN PLACENTA, SIGNAL = 2.9; EXPRESSED IN HEART, SIGNAL = 3.3; EXPRESSED IN FETAL LIVER, SIGNAL = 5.1; EXPRESSED IN BONE MARROW, SIGNAL = 3.2; EXPRESSED IN ADULT LIVER, SIGNAL = 2.7; EXPRESSED IN HELA, SIGNAL = 3.3; EXPRESSED IN LUNG, SIGNAL = 3.2; EXPRESSED IN BRAIN, SIGNAL = 2.6; NT HIT: gi6678765, EVALUE 1.10e-02; SWISSPROT HIT: Q13105, EVALUE 1.00e-04; EST_HUMAN HIT: BF529931.1, EVALUE 0.00e+00
ccctgtcccctgttttgccaactgtcaggccacagttgtaagggatcttgtggctgtcaggatggcagaggagcaggagttcacccagctctgcaagttgcctgcacagccctcacacccacactgcgtgaacaacacctaccgcagcgcacagcactcccaggctctgctccgagggctgctggctctccgggacagcggaatcctcttcgatgttgtgctggtggtggagggcagacacatcgaggcccatcgcatcctgctggctgcgtcctgcgattacttcag

SEQ ID NO: 22160 - DNA, 112 bp, Homo sapiens
  MAP TO AC004891.1; EXPRESSED IN PLACENTA, SIGNAL = 4.1; EXPRESSED IN LUNG, SIGNAL = 4.2; EXPRESSED IN HELA, SIGNAL = 3.4; EXPRESSED IN HEART, SIGNAL = 2.9; EXPRESSED IN BRAIN, SIGNAL = 3.4; EXPRESSED IN FETAL LIVER, SIGNAL = 3.2; EXPRESSED IN ADULT LIVER, SIGNAL = 3.1; EXPRESSED IN BONE MARROW, SIGNAL = 3.6; EST_HUMAN HIT: R85106.1, EVALUE 5.60e+00; SWISSPROT HIT: P16444, EVALUE 4.20e+00
tcttctggtcaagcaggatcacagggtatagttcaaatgataacatgcatatgcattgggctcttgtactctgctcattggctctgcggaatctactggggattaaaggaat

SEQ ID NO: 22161 - DNA, 158 bp, Homo sapiens
  MAP TO AC004860.1; EXPRESSED IN PLACENTA, SIGNAL = 1.9; EXPRESSED IN HELA, SIGNAL = 1.7; EXPRESSED IN HEART, SIGNAL = 1.7; EXPRESSED IN FETAL LIVER, SIGNAL = 1.7; EXPRESSED IN LUNG, SIGNAL = 1.9; EXPRESSED IN BRAIN, SIGNAL = 1.9; EXPRESSED IN BONE MARROW, SIGNAL = 1.7; EXPRESSED IN ADULT LIVER, SIGNAL = 1.7; NT HIT: U82671.2, EVALUE 1.40e+00; SWISSPROT HIT: P12433, EVALUE 4.00e+00; EST_HUMAN HIT: AA897339.1, EVALUE 6.00e-84
accatcactgagctggaatacaacatggggcatctgaaaagaagaaccaaaatagatgcctggtcttcaactaaattacctgttcatctttttccaggaaaccttggaacaccaaggaatcagcagtcaaacgagctcagtctctcagaacacatgtg

SEQ ID NO: 22162 - DNA, 244 bp, Homo sapiens
  MAP TO AC004812.1; EXPRESSED IN LUNG, SIGNAL = 2.9; EXPRESSED IN FETAL LIVER, SIGNAL = 2.7; EXPRESSED IN BRAIN, SIGNAL = 2.9; EXPRESSED IN BONE MARROW, SIGNAL = 2.2; EXPRESSED IN HELA, SIGNAL = 2.7; EXPRESSED IN PLACENTA, SIGNAL = 2.6; EXPRESSED IN HEART, SIGNAL = 2.3; EXPRESSED IN ADULT LIVER, SIGNAL = 2.3; SWISSPROT HIT: Q10105, EVALUE 8.10e-02; EST_HUMAN HIT: BF313139.1, EVALUE 0.00e+00; NT HIT: D86973.1, EVALUE 0.00e+00
cttagtgatggcatttagggcatcccagctctcctccagaaccacagggctggagtcattgaagaggcggatcaggcccgagaccaggctccgcaggtggctggtgtagtcagcctttgagcgggaacagtagatgttgaggatgatggcagcagcttgcctcatgcccacctcagggctgcgggtggcctccagcagatactcgatgatgatccggtgccctgtgtcatcctctacggagagg

SEQ ID NO: 22163 - DNA, 178 bp, Homo sapiens
  MAP TO AC004616.1; EXPRESSED IN PLACENTA, SIGNAL = 2.9; EXPRESSED IN HEART, SIGNAL = 3.1; EXPRESSED IN FETAL LIVER, SIGNAL = 2.8; EXPRESSED IN BRAIN, SIGNAL = 2.9; EXPRESSED IN LUNG, SIGNAL = 3.1; EXPRESSED IN HELA, SIGNAL =   3; EXPRESSED IN BONE MARROW, SIGNAL = 2.8; EXPRESSED IN ADULT LIVER, SIGNAL = 2.5; EST_HUMAN HIT: AW197496.1, EVALUE 1.60e-01; SWISSPROT HIT: O78507, EVALUE 6.70e+00
ggatggctccttctctcttctgatcctgagtgctggaaagctcaagaaattcttctgagaattgagtgagttcagccagcctggattccctggaattctggtgaagcctgactggggtaagaacaaagattgagaaggtttgacttggtagacaaccagtacctcatgaatagatatc

SEQ ID NO: 22164 - DNA, 201 bp, Homo sapiens
  MAP TO AC004485.1; EXPRESSED IN HEART, SIGNAL = 2.7; EXPRESSED IN PLACENTA, SIGNAL = 2.8; EXPRESSED IN FETAL LIVER, SIGNAL = 2.9; EXPRESSED IN BRAIN, SIGNAL = 2.8; EXPRESSED IN BONE MARROW, SIGNAL = 2.7; EXPRESSED IN ADULT LIVER, SIGNAL =   4; EXPRESSED IN LUNG, SIGNAL = 3.1; EXPRESSED IN HELA, SIGNAL = 2.8; SWISSPROT HIT: P29170, EVALUE 9.80e-01; EST_HUMAN HIT: M78510.1, EVALUE 7.00e-01; NT HIT: AF110520.1, EVALUE 8.00e-03
ctccagtccaagccacatcccctggccaaaatacaaacaaaaccaactgttggcaactcaaccctgcatcttctcctagctgctgagccatttctctcctttgtttcaaagtcaagttgtttatttctaacagctttgttaagataacattgagatactgttgagcttgttgagattcaaaaggaggtgaatcagtggaga

SEQ ID NO: 22165 - DNA, 86 bp, Homo sapiens
  MAP TO AC004945.1; EXPRESSED IN LUNG, SIGNAL =  14; EXPRESSED IN FETAL LIVER, SIGNAL =  11; EXPRESSED IN PLACENTA, SIGNAL =  12; EXPRESSED IN HELA, SIGNAL =  12; EXPRESSED IN BRAIN, SIGNAL =  13; EXPRESSED IN BONE MARROW, SIGNAL =  12; EXPRESSED IN ADULT LIVER, SIGNAL =  11; EXPRESSED IN HEART, SIGNAL =   9; EST_HUMAN HIT: BE888016.1, EVALUE 1.70e-02; SWISSPROT HIT: Q90722, EVALUE 3.20e+00; NT HIT: X58855.1, EVALUE 5.00e-05
gggtggcagaggtggaaaaggtggaggaaggggaaggagaagcaggtggagcaggcacactcagtgtaactttactaaaatacatg

SEQ ID NO: 22166 - DNA, 199 bp, Homo sapiens
  MAP TO AC005663.1; EXPRESSED IN LUNG, SIGNAL = 2.8; EXPRESSED IN BRAIN, SIGNAL = 1.7; EXPRESSED IN ADULT LIVER, SIGNAL = 2.5; EXPRESSED IN PLACENTA, SIGNAL = 2.6; EXPRESSED IN HELA, SIGNAL =   3; EXPRESSED IN HEART, SIGNAL = 2.8; EXPRESSED IN FETAL LIVER, SIGNAL =   3; EXPRESSED IN BONE MARROW, SIGNAL = 2.3; SWISSPROT HIT: P30999, EVALUE 1.00e-04; NT HIT: gi4502246, EVALUE 1.00e-108; EST_HUMAN HIT: BE869016.1, EVALUE 1.00e-108
ggagctacgccatggctgagcttgtgcggaatgtgcgcaatgcacaggctccgccgcgaccgggggcctgcctggaggaagacaccgtggtggcggtgctcaacaccatccacgaaatcgtgtccgacagcctggataacgcgcgctcgctcctgcaggcacgcggggtgccagcgttggtggctctcgtggcctccag

SEQ ID NO: 22167 - DNA, 151 bp, Homo sapiens
  MAP TO AC005540.2; EXPRESSED IN PLACENTA, SIGNAL =   6; EXPRESSED IN ADULT LIVER, SIGNAL =   5; EXPRESSED IN LUNG, SIGNAL = 6.3; EXPRESSED IN HELA, SIGNAL = 5.7; EXPRESSED IN HEART, SIGNAL = 5.2; EXPRESSED IN FETAL LIVER, SIGNAL =   5; EXPRESSED IN BRAIN, SIGNAL = 5.6; EXPRESSED IN BONE MARROW, SIGNAL = 5.5; SWISSPROT HIT: P97464, EVALUE 6.90e+00; NT HIT: AB032983.1, EVALUE 1.40e+00
atttatgatcctagtattcacaaggggaaggattgtaaaaaaatgtgctgtcttcattttcaacctgacagttttcaggcttgtgtgtttcctagtcaagtgtttatgcttgttcttgtatgtgctatctaagagggtatcaaacgctttg

SEQ ID NO: 22168 - DNA, 370 bp, Homo sapiens
  MAP TO AC004676.1; EXPRESSED IN ADULT LIVER, SIGNAL = 4.8; EXPRESSED IN PLACENTA, SIGNAL = 5.3; EXPRESSED IN LUNG, SIGNAL = 5.4; EXPRESSED IN HEART, SIGNAL = 4.8; EXPRESSED IN BRAIN, SIGNAL = 4.6; EXPRESSED IN HELA, SIGNAL = 4.8; EXPRESSED IN FETAL LIVER, SIGNAL = 4.6; EXPRESSED IN BONE MARROW, SIGNAL = 4.6; SWISSPROT HIT: P19811, EVALUE 3.00e-01; NT HIT: X96587.1, EVALUE 2.30e-01
atgagtacatcttgtcctcccaagatccttggaaatcgaagctttgctatgctcattactgagaaggctctggcgcccttcaacccatttgtatctcttcaacctctcactaaacatttgttgtctggccggcacagctgcaggctcctaaaagccatggccccagacctctgggaagctcccctgaaagaggtcaaggtgaggagtatcccgaagggcattgtgtttgattctagaagcaagtggacaccaggacaccacaagattgatcacgagaaatccatgcctctgttttcagaacttgcttgcatctttccctatgtggcactccagaagccagtaagttggaggagtttgattctacccagag

SEQ ID NO: 22169 - DNA, 390 bp, Homo sapiens
  MAP TO AC004590.1; EXPRESSED IN HEART, SIGNAL = 4.2; EXPRESSED IN BRAIN, SIGNAL = 4.4; EXPRESSED IN PLACENTA, SIGNAL = 4.2; EXPRESSED IN LUNG, SIGNAL = 4.4; EXPRESSED IN FETAL LIVER, SIGNAL =   4; EXPRESSED IN BONE MARROW, SIGNAL = 3.9; EXPRESSED IN ADULT LIVER, SIGNAL = 4.5; EXPRESSED IN HELA, SIGNAL = 4.4; NT HIT: gi11434392, EVALUE 0.00e+00; SWISSPROT HIT: O54898, EVALUE 7.00e-44; EST_HUMAN HIT: H06096.1, EVALUE 2.00e-58
gcagctggaccagcaggcgctccagccggaacagcctcggccgtgcacccagcctgaagcggagaagcccaagtggagagcggcggtccctgttgtcgggagaaggccaggagagccaggatgaagaggagagctcagaagaggagcgggccagccctgcgggcagtgaccatcgccacagggggtccctggagcgggaggccaagagttcctttgacctgccagacacactgcaggtgccagggctgcatcgcactgccagtggccgagggtctgcttctgagcaccaggactgcaatggcaagtcggcttcagggcgcctggcccgggccctgcggcctgatgaccccccactggatggggatgacgccgatgacgagggcaacctgg

SEQ ID NO: 22170 - DNA, 217 bp, Homo sapiens
  MAP TO AC005611.1; EXPRESSED IN PLACENTA, SIGNAL = 5.3; EXPRESSED IN HELA, SIGNAL = 5.3; EXPRESSED IN HEART, SIGNAL = 5.1; EXPRESSED IN ADULT LIVER, SIGNAL = 5.2; EXPRESSED IN BONE MARROW, SIGNAL = 4.8; EXPRESSED IN BRAIN, SIGNAL = 5.8; EXPRESSED IN FETAL LIVER, SIGNAL = 4.9; EXPRESSED IN LUNG, SIGNAL = 5.1; SWISSPROT HIT: P08547, EVALUE 5.00e-14; EST_HUMAN HIT: BE143371.1, EVALUE 1.00e-11; NT HIT: AF044206.1, EVALUE 1.00e-04
agaagacataacaattcttaatgtctatgcacctaacaacgcaacatcaaaatgtgtgagccaaaaactggcagaactgcaaggagaaataaatgaatctactattgtaattagagacttcaacatccctctattagtaattggcagatccagcaagcagaaaatcattaaggacatagttgaacggaacagcactatcaatcaagtgaatctaaat

SEQ ID NO: 22171 - DNA, 79 bp, Homo sapiens
  MAP TO AC002302.1; EXPRESSED IN PLACENTA, SIGNAL =   2; EXPRESSED IN LUNG, SIGNAL = 2.8; EXPRESSED IN FETAL LIVER, SIGNAL = 2.1; EXPRESSED IN BRAIN, SIGNAL = 2.2; EXPRESSED IN BONE MARROW, SIGNAL = 2.3; EXPRESSED IN ADULT LIVER, SIGNAL = 2.2; EXPRESSED IN HELA, SIGNAL = 2.4; EXPRESSED IN HEART, SIGNAL = 2.1; EST_HUMAN HIT: BE263922.1, EVALUE 2.40e-01; NT HIT: AF034716.1, EVALUE 1.60e-01
gaagctcacagaggttgatgacttgcctaggatcgctcagaaagcaggcagcagagctgattgccatggtaaccatttc

SEQ ID NO: 22172 - DNA, 212 bp, Homo sapiens
  MAP TO AC004828.2; EXPRESSED IN BRAIN, SIGNAL = 1.8; EXPRESSED IN ADULT LIVER, SIGNAL = 1.7; EXPRESSED IN HELA, SIGNAL = 1.9; EXPRESSED IN HEART, SIGNAL = 1.5; EXPRESSED IN BONE MARROW, SIGNAL = 1.6; EXPRESSED IN PLACENTA, SIGNAL = 1.5; EXPRESSED IN LUNG, SIGNAL = 2.6; EXPRESSED IN FETAL LIVER, SIGNAL = 1.5; NT HIT: X68709.1, EVALUE 3.20e-02; EST_HUMAN HIT: BF206989.1, EVALUE 4.80e-02
agacacagggtttgcagggccaagggcagctgggtttgcaccacctgcagcagtagcgaccttttgactttggtcctcctgctgtcgcttgctctatcgccccccagctttgtcttcagcagagcccatggctcatcccgcgcctggtgctgctgctgaaagggcagagtggactgctggagccggcgctgaccttccccgcccccgcccat

SEQ ID NO: 22173 - DNA, 170 bp, Homo sapiens
  MAP TO AC005371.1; EXPRESSED IN LUNG, SIGNAL = 5.1; EXPRESSED IN HELA, SIGNAL = 4.1; EXPRESSED IN BONE MARROW, SIGNAL = 4.4; EXPRESSED IN ADULT LIVER, SIGNAL = 4.9; EXPRESSED IN PLACENTA, SIGNAL = 4.8; EXPRESSED IN HEART, SIGNAL = 4.1; EXPRESSED IN FETAL LIVER, SIGNAL = 4.7; EXPRESSED IN BRAIN, SIGNAL = 5.1; EST_HUMAN HIT: AW850754.1, EVALUE 1.50e-01; NT HIT: AE000983.1, EVALUE 3.90e-01; SWISSPROT HIT: P35972, EVALUE 6.70e+00
gtcaaacaggaaagaggctttactgaattcattttgtagcacattcttcaagcccgagatggttggcactaagtatccaagctgcttgtgaaaggaagcatccatgtgcactgatctaagacatagctttgaacagttaacagtttctggaggaaaatagtgacagaagg

SEQ ID NO: 22174 - DNA, 136 bp, Homo sapiens
  MAP TO AC005588.1; EXPRESSED IN PLACENTA, SIGNAL = 3.9; EXPRESSED IN LUNG, SIGNAL = 4.7; EXPRESSED IN HELA, SIGNAL = 4.6; EXPRESSED IN FETAL LIVER, SIGNAL = 4.6; EXPRESSED IN BONE MARROW, SIGNAL = 4.1; EXPRESSED IN ADULT LIVER, SIGNAL = 5.4; EXPRESSED IN HEART, SIGNAL = 3.5; EXPRESSED IN BRAIN, SIGNAL = 4.8; EST_HUMAN HIT: AL157547.1, EVALUE 4.50e-01; NT HIT: U01247.1, EVALUE 3.00e-01
ggctgctctctctggctgaactgggcacagagattgtgcagcaaagtaaacagctgactgccttgcaccagagtctctctgatgacacagcgcttgacttcaagtgtcaacaaacggaccctgaaatgagactaga

SEQ ID NO: 22175 - DNA, 231 bp, Homo sapiens
  MAP TO AC005803.1; EXPRESSED IN LUNG, SIGNAL = 1.8; EXPRESSED IN ADULT LIVER, SIGNAL = 2.1; EXPRESSED IN PLACENTA, SIGNAL = 1.7; EXPRESSED IN HELA, SIGNAL = 1.8; EXPRESSED IN HEART, SIGNAL =   2; EXPRESSED IN FETAL LIVER, SIGNAL = 1.8; EXPRESSED IN BRAIN, SIGNAL =   2; EXPRESSED IN BONE MARROW, SIGNAL = 1.7; NT HIT: gi11425128, EVALUE 1.00e-115; EST_HUMAN HIT: AI469951.1, EVALUE 3.20e+00; SWISSPROT HIT: Q09499, EVALUE 5.00e-14
tcagagggcgtctggagtcactgggggctggggctctgggggctcgtggaagtagtagggctggaagagtctctcgtggctgcacagctccatggcccggtaggtgtgtgcgaggaggtgggggaagcgagatgtgaagtagcacacgaagtcgtcggggagggaccccagcgtctcccgcacctctgcaggcagctcccggtagtggtgcttctgcaaagagttagaaag

SEQ ID NO: 22176 - DNA, 201 bp, Homo sapiens
  MAP TO AC004070.1; EXPRESSED IN PLACENTA, SIGNAL = 1.1; EXPRESSED IN BRAIN, SIGNAL = 0.73; EXPRESSED IN ADULT LIVER, SIGNAL = 2.4; EXPRESSED IN HEART, SIGNAL = 1.6; EXPRESSED IN LUNG, SIGNAL = 1.2; EXPRESSED IN FETAL LIVER, SIGNAL = 1.9; EXPRESSED IN BONE MARROW, SIGNAL = 1.2; SWISSPROT HIT: P40034, EVALUE 6.50e+00; NT HIT: AB022430.1, EVALUE 7.40e+00; EST_HUMAN HIT: AV654352.1, EVALUE 2.00e-04
taactgctactctagtccagtggttctcaaagagtggccccagaccaccaccaccaccgccatcgccatcatcatcatcatgcctgggaacttgttagaaacatcagtcctcaggccccactctaaatctactgaattagaaactctggggatgaggcccagcaggttctgttttaacaagctttccaggtaatgctgatc

SEQ ID NO: 22177 - DNA, 138 bp, Homo sapiens
  MAP TO AC004927.2; EXPRESSED IN HEART, SIGNAL = 1.8; EXPRESSED IN BRAIN, SIGNAL = 1.8; EXPRESSED IN PLACENTA, SIGNAL = 1.8; EXPRESSED IN LUNG, SIGNAL = 1.9; EXPRESSED IN HELA, SIGNAL = 1.9; EXPRESSED IN FETAL LIVER, SIGNAL = 2.4; EXPRESSED IN BONE MARROW, SIGNAL =   2; EXPRESSED IN ADULT LIVER, SIGNAL = 2.4; SWISSPROT HIT: P25491, EVALUE 1.40e+00; NT HIT: AJ251154.1, EVALUE 1.20e+00; EST_HUMAN HIT: BE734781.1, EVALUE 4.60e-01
gagaaggagcttcagcttcaaggagaggtaaaagcaggtaacaagcagctgcttttgaagtggtgcagcggcagaggaggtggagaaggccaggttgccattatcagtggctaccaggtgccgcgggatcgcgttagg

SEQ ID NO: 22178 - DNA, 269 bp, Homo sapiens
  MAP TO AC006501.5; EXPRESSED IN BONE MARROW, SIGNAL = 2.1; EXPRESSED IN BRAIN, SIGNAL = 1.7; EXPRESSED IN ADULT LIVER, SIGNAL = 1.7; EXPRESSED IN PLACENTA, SIGNAL =   2; EXPRESSED IN LUNG, SIGNAL =   2; EXPRESSED IN HELA, SIGNAL =   2; EXPRESSED IN HEART, SIGNAL =   2; EXPRESSED IN FETAL LIVER, SIGNAL = 1.9; SWISSPROT HIT: O00222, EVALUE 4.40e+00; NT HIT: gi6755601, EVALUE 2.60e+00; EST_HUMAN HIT: BE762670.1, EVALUE 3.80e+00
atgaagcttgtttaccaaataaaagagcagaatgctgtggtggattggctgcttcagatctcatcaaatggaagagtcctgtgtttattcctttgcatggcatcatgcaaaggccctgcctctgcgtggagcccatgcgtctttgttttgattcattccttcttctggtcaaccagggagaggaggaagagggagttgttccttgcctagaggaaaatggcagagcagcagcagatccaggtagtggttcaatacccagatcttctagc

SEQ ID NO: 22179 - DNA, 135 bp, Homo sapiens
  MAP TO AC004974.1; EXPRESSED IN BONE MARROW, SIGNAL = 1.3; EXPRESSED IN ADULT LIVER, SIGNAL = 1.5; EXPRESSED IN PLACENTA, SIGNAL = 1.6; EXPRESSED IN HEART, SIGNAL = 1.4; EXPRESSED IN LUNG, SIGNAL = 1.3; EXPRESSED IN FETAL LIVER, SIGNAL = 1.4; EXPRESSED IN BRAIN, SIGNAL = 1.5; SWISSPROT HIT: P94393, EVALUE 7.00e+00; EST_HUMAN HIT: AW608814.1, EVALUE 4.50e-01
cttgacaatcacatgatctgcctccttgacaatcacatgatctgcctccaaatctttctttatgaaaagtcttatatctcttttaagatcttgaacctcaactgcatttataacactgctgaaaaatggaggaga

SEQ ID NO: 22180 - DNA, 189 bp, Homo sapiens
  MAP TO AC004894.1; EXPRESSED IN BONE MARROW, SIGNAL = 3.9; EXPRESSED IN ADULT LIVER, SIGNAL = 3.4; EXPRESSED IN PLACENTA, SIGNAL = 3.6; EXPRESSED IN HEART, SIGNAL = 3.3; EXPRESSED IN LUNG, SIGNAL = 3.8; EXPRESSED IN HELA, SIGNAL = 4.7; EXPRESSED IN FETAL LIVER, SIGNAL = 3.3; EXPRESSED IN BRAIN, SIGNAL = 3.7; NT HIT: gi11428643, EVALUE 4.00e-66; SWISSPROT HIT: P13995, EVALUE 4.00e-25; EST_HUMAN HIT: BF700222.1, EVALUE 6.00e-66
tccttgatcatatgtgctgtgatgagatttggaatgtctgcagcagatattacaatatctgcaagaatggtatgcttcttcagctgctctttgggagtgtatccatgagatattgtaacagtagcatcacctctgggaccttcatgcgccccatctgtgtgcagtaacattgcaactggcatttcaaca

SEQ ID NO: 22181 - DNA, 281 bp, Homo sapiens
  MAP TO AC005344.1; EXPRESSED IN PLACENTA, SIGNAL = 1.4; EXPRESSED IN HEART, SIGNAL = 1.7; EXPRESSED IN BONE MARROW, SIGNAL = 1.1; EXPRESSED IN ADULT LIVER, SIGNAL = 1.4; EXPRESSED IN LUNG, SIGNAL = 1.3; EXPRESSED IN HELA, SIGNAL = 1.6; EXPRESSED IN FETAL LIVER, SIGNAL = 1.2; EXPRESSED IN BRAIN, SIGNAL = 1.2; NT HIT: L14005.1, EVALUE 2.70e+00
gtttattcctgacccaggatacctcagctccaactggaccccaggcagtaagaggcttcctcttagagtcagcggattcccactgatgcagcccaagattacctgccccgtcctcctcctcctgctcctcctctggctcctcccactctccctcctcctcctagtgcttctcctcctgttcctctcctcttcttcccctcctgctcccccctgtgttcctcctcctccttctactccttttgttcctcctccactgcctcctcctcctcctcctcctcctc

SEQ ID NO: 22182 - DNA, 460 bp, Homo sapiens
  MAP TO AC005410.1; EXPRESSED IN HEART, SIGNAL = 2.1; EXPRESSED IN LUNG, SIGNAL = 2.2; EXPRESSED IN FETAL LIVER, SIGNAL = 1.6; EXPRESSED IN BONE MARROW, SIGNAL = 1.4; EXPRESSED IN PLACENTA, SIGNAL = 1.8; EXPRESSED IN HELA, SIGNAL = 3.8; EXPRESSED IN BRAIN, SIGNAL =   2; EXPRESSED IN ADULT LIVER, SIGNAL = 1.6; SWISSPROT HIT: Q62203, EVALUE 2.00e-09; NT HIT: AL163284.2, EVALUE 1.00e-86; EST_HUMAN HIT: BF083726.1, EVALUE 1.00e-78
gtggcaagtcccgcttttctggggaagggtcaagtaccccaaccccttctcttgtctctaccccttctctgcttttctggggcaggggcaagtacccctcaaccccttctccttcacccttagcggcaagtcccgctttcctagggggcaagaaccccccaatcccttatttccacaccccaacctcttatctctgcgccccagtcccttatttccacgccccaacctcttgtctctgcgccccaatcccttatctctgcgccccaatcccttatttccacaccccaacctcttatctctgcgccccagtcccttatttccacgccccaacctcttatctctgcgtcccaatcccttatttccacgccccaacctcttatctctgcgccccaatcccttatctctgcgccccaatgccttatttccgcgccccgacccccccctcccgcttttctggaag

SEQ ID NO: 22183 - DNA, 131 bp, Homo sapiens
  MAP TO AC006007.1; EXPRESSED IN PLACENTA, SIGNAL = 2.3; EXPRESSED IN LUNG, SIGNAL = 1.3; EXPRESSED IN FETAL LIVER, SIGNAL = 2.3; EXPRESSED IN BRAIN, SIGNAL = 1.9; EXPRESSED IN BONE MARROW, SIGNAL = 1.9; EXPRESSED IN ADULT LIVER, SIGNAL = 2.1; EXPRESSED IN HELA, SIGNAL = 2.1; EXPRESSED IN HEART, SIGNAL =   2; NT HIT: AL163267.2, EVALUE 3.90e+00; EST_HUMAN HIT: AW813276.1, EVALUE 1.20e+00
tcatgttttaaatgatgtaaggtctgtagtccaggaaagatcactttgagtcttgaaataactcaagcacaattgctgctggacatagaaattctgagcacagagagcattactgtcggccatgtattctt

SEQ ID NO: 22184 - DNA, 79 bp, Homo sapiens
  MAP TO AC004633.1; EXPRESSED IN BONE MARROW, SIGNAL = 1.2; EXPRESSED IN PLACENTA, SIGNAL = 1.1; EXPRESSED IN LUNG, SIGNAL = 1.3; EXPRESSED IN HEART, SIGNAL = 1.4; EXPRESSED IN FETAL LIVER, SIGNAL = 1.2; EXPRESSED IN ADULT LIVER, SIGNAL = 1.9; EXPRESSED IN BRAIN, SIGNAL =   2; EST_HUMAN HIT: AA781460.1, EVALUE 6.00e-02; NT HIT: AJ249981.1, EVALUE 3.00e-03
taaaggcatggtcaggtctaatgctgttgctgctgctgctgccgctgctgctgatgatgatgacgacgatgactcagcg

SEQ ID NO: 22185 - DNA, 251 bp, Homo sapiens
  MAP TO AC004492.1; EXPRESSED IN LUNG, SIGNAL =   2; EXPRESSED IN BONE MARROW, SIGNAL = 1.8; EXPRESSED IN HELA, SIGNAL = 1.8; EXPRESSED IN ADULT LIVER, SIGNAL = 1.8; EXPRESSED IN PLACENTA, SIGNAL = 1.8; EXPRESSED IN HEART, SIGNAL = 1.7; EXPRESSED IN FETAL LIVER, SIGNAL = 1.9; EXPRESSED IN BRAIN, SIGNAL = 1.7; SWISSPROT HIT: P55198, EVALUE 7.70e-01; EST_HUMAN HIT: AI690862.1, EVALUE 2.00e-04
cccaaatagcaatactccccaacagggaaatacactttgtgacgctgccagatattagaagcaatcacagttcccagccagcagctccgcctgattgcagtggccagccagtagtcttgctggaaggtgaagctcagccagcagccgcatccaaactcagagcaaaggcagagacccagccaactagagaaactgacagcaagctctgcctccctggggttgatatcagctggctcatccagaatcacagg

SEQ ID NO: 22186 - DNA, 169 bp, Homo sapiens
  MAP TO AC004953.1; EXPRESSED IN FETAL LIVER, SIGNAL = 1.7; EXPRESSED IN BRAIN, SIGNAL = 1.7; EXPRESSED IN BONE MARROW, SIGNAL = 1.8; EXPRESSED IN PLACENTA, SIGNAL = 1.7; EXPRESSED IN HELA, SIGNAL = 1.8; EXPRESSED IN HEART, SIGNAL = 1.5; EXPRESSED IN ADULT LIVER, SIGNAL = 1.7; EXPRESSED IN LUNG, SIGNAL = 2.1; NT HIT: gi11072102, EVALUE 3.00e-05; SWISSPROT HIT: P25564, EVALUE 3.00e+00; EST_HUMAN HIT: BE741323.1, EVALUE 9.00e-03
ctcctcctcactgaagcggtctgcctgggtcataagtttttctttgatgctgttcaagggagagacacagtcatgttcagggaacgggatacccagcttgaacatgcagatcccaggggtgatgaggggcaagtgggggcagggggacatcctggaccaggaggacatc

SEQ ID NO: 22187 - DNA, 84 bp, Homo sapiens
  MAP TO AC005479.2; EXPRESSED IN FETAL LIVER, SIGNAL = 1.8; EXPRESSED IN BONE MARROW, SIGNAL = 1.7; EXPRESSED IN ADULT LIVER, SIGNAL = 1.8; EXPRESSED IN HELA, SIGNAL = 1.9; EXPRESSED IN PLACENTA, SIGNAL = 2.1; EXPRESSED IN LUNG, SIGNAL =   2; EXPRESSED IN HEART, SIGNAL = 1.8; EXPRESSED IN BRAIN, SIGNAL =   2; EST_HUMAN HIT: AA443991.1, EVALUE 6.50e-02; NT HIT: M29935.1, EVALUE 6.80e-01
ctgcctggcaaccaggtacatgagtaagaccttgttagaagtggacagcaagtttctgctggacttcttccagccctggtcatt

SEQ ID NO: 22188 - DNA, 138 bp, Homo sapiens
  MAP TO AC003691.1; EXPRESSED IN PLACENTA, SIGNAL = 3.6; EXPRESSED IN HEART, SIGNAL = 3.3; EXPRESSED IN BONE MARROW, SIGNAL = 3.1; EXPRESSED IN ADULT LIVER, SIGNAL = 2.3; EXPRESSED IN HELA, SIGNAL = 1.9; EXPRESSED IN FETAL LIVER, SIGNAL = 4.2; EXPRESSED IN LUNG, SIGNAL = 3.6; EXPRESSED IN BRAIN, SIGNAL = 2.2; EST_HUMAN HIT: AI247679.1, EVALUE 4.60e-01; NT HIT: gi9838361, EVALUE 4.80e+00
tgtctccgtgtagcctaaaagtgggattcaaaggcatgctatcaatttgattctttctagagagaaaaagcagcagctgcttcatttcctggaaactctttccagaagccaggaattctgggaaatgctgcaggtgac

SEQ ID NO: 22189 - DNA, 340 bp, Homo sapiens
  MAP TO AC004881.1; EXPRESSED IN PLACENTA, SIGNAL = 1.4; EXPRESSED IN LUNG, SIGNAL = 1.4; EXPRESSED IN HEART, SIGNAL = 1.4; EXPRESSED IN BRAIN, SIGNAL = 1.5; EXPRESSED IN FETAL LIVER, SIGNAL = 1.3; EXPRESSED IN ADULT LIVER, SIGNAL = 1.4; EXPRESSED IN BONE MARROW, SIGNAL = 1.2; SWISSPROT HIT: P16553, EVALUE 7.70e-01
ctgggatgtctaaaaatttgtcaacagccacagaaagtaaccctgaggtcatgtcagagggtgaaaaagaatgtgcttacttggcattctgcaaacacacaaatggaacactggtggcgacagtgtttcaaaggtctctccaggtggcagagttcccagttggctctggtctccctgccaaggatgtggacatggagatggtggattcaggagcagtgcatgataaccaagccctcacatacctggtctgaacgagagacctcaaaccccagcacagccactggggccttgcagatgaaggagacaggtgtcctgtgtgcccacttgagaacagtcctca

SEQ ID NO: 22190 - DNA, 162 bp, Homo sapiens
  MAP TO AC004695.1; EXPRESSED IN PLACENTA, SIGNAL = 1.8; EXPRESSED IN HEART, SIGNAL = 1.3; EXPRESSED IN FETAL LIVER, SIGNAL = 1.4; EXPRESSED IN LUNG, SIGNAL = 1.8; EXPRESSED IN BRAIN, SIGNAL = 1.4; EXPRESSED IN BONE MARROW, SIGNAL = 1.3; EXPRESSED IN ADULT LIVER, SIGNAL = 1.6; SWISSPROT HIT: P23470, EVALUE 7.00e-27; EST_HUMAN HIT: BF372796.1, EVALUE 8.60e+00; NT HIT: gi11386168, EVALUE 4.00e-84
tcatccaggttttgttagaagactcattgtcgaagccatcgagttgcagttcctggtattcttccccaacacgcgcatactggtctaaaatgtcaataggagactggtgacggcccccacagctgacactagacgtgacccagtgctcaggaccataggcac

SEQ ID NO: 22191 - DNA, 249 bp, Homo sapiens
  MAP TO AC005606.1; EXPRESSED IN LUNG, SIGNAL = 1.3; EXPRESSED IN FETAL LIVER, SIGNAL = 1.4; EXPRESSED IN BONE MARROW, SIGNAL = 1.3; EXPRESSED IN PLACENTA, SIGNAL = 1.2; EXPRESSED IN BRAIN, SIGNAL = 1.4; EXPRESSED IN ADULT LIVER, SIGNAL = 1.2; EXPRESSED IN HELA, SIGNAL = 6.1; EXPRESSED IN HEART, SIGNAL = 6.4; NT HIT: AK024487.1, EVALUE 1.00e-122; SWISSPROT HIT: P28478, EVALUE 1.90e-01; EST_HUMAN HIT: BE256039.1, EVALUE 1.00e-122
ctgctcaccctcgttccggcgcgagtgccgtggcgcgtagctgaactgcaggtcgatgtggcggttctggcgtgcctcggcgcggctgcgactgtggcaggccgtcctgtgggccttgaggtcgatctcggtgcggaaggcgtgggtgaactgctccgtgctgcagcggccttcctcacacagaaagtgcttctcccggaagtgctcacgcaggtaggcatagtcgctggcaggagatggggtgtcggt

SEQ ID NO: 22192 - DNA, 174 bp, Homo sapiens
  MAP TO AC004782.1; EXPRESSED IN PLACENTA, SIGNAL = 2.4; EXPRESSED IN HELA, SIGNAL =   2; EXPRESSED IN HEART, SIGNAL = 1.6; EXPRESSED IN FETAL LIVER, SIGNAL = 1.4; EXPRESSED IN BRAIN, SIGNAL = 2.4; EXPRESSED IN ADULT LIVER, SIGNAL = 2.1; EXPRESSED IN LUNG, SIGNAL = 1.4; EXPRESSED IN BONE MARROW, SIGNAL = 1.7; SWISSPROT HIT: P04150, EVALUE 3.00e-21; EST_HUMAN HIT: AU139958.1, EVALUE 1.00e-72; NT HIT: U78509.1, EVALUE 1.00e-93
ggttattgaacctgaagtgttatatgcaggatatgatagctctgttccagactcaacttggaggatcatgactacgctcaacatgttaggagggcggcaagtgattgcagcagtgaaatgggcaaaggcaataccaggtaagatgcaaaacataaaagagcaactatataaacc

SEQ ID NO: 22193 - DNA, 163 bp, Homo sapiens
  MAP TO AC003071.1; EXPRESSED IN PLACENTA, SIGNAL = 1.4; EXPRESSED IN LUNG, SIGNAL = 1.7; EXPRESSED IN FETAL LIVER, SIGNAL = 1.4; EXPRESSED IN BRAIN, SIGNAL = 1.6; EXPRESSED IN ADULT LIVER, SIGNAL = 1.5; EXPRESSED IN HEART, SIGNAL = 1.6; EXPRESSED IN BONE MARROW, SIGNAL = 1.5; EST_HUMAN HIT: R36410.1, EVALUE 5.60e-01; SWISSPROT HIT: P20050, EVALUE 4.60e-01
tcatagcagcagtacaagctttgaaagtggaacaaacaatgaagatattaagaaagccagtgttctactgatccgtaaattgtatatactgatgcaggaccttgagccacttcctaataatgttgtacttactatgaaactccactactataatgcaggtagg

SEQ ID NO: 22194 - DNA, 114 bp, Homo sapiens
  MAP TO AC004904.1; EXPRESSED IN ADULT LIVER, SIGNAL = 2.2; EXPRESSED IN PLACENTA, SIGNAL = 3.1; EXPRESSED IN BONE MARROW, SIGNAL = 1.9; EXPRESSED IN LUNG, SIGNAL = 2.7; EXPRESSED IN HELA, SIGNAL = 3.1; EXPRESSED IN HEART, SIGNAL =   2; EXPRESSED IN FETAL LIVER, SIGNAL = 2.2; EXPRESSED IN BRAIN, SIGNAL = 2.9; NT HIT: D00099.1, EVALUE 1.00e-18; EST_HUMAN HIT: AU130738.1, EVALUE 2.00e-18; SWISSPROT HIT: P05023, EVALUE 4.00e-07
gttggacgtgataagtatgagcctgcagctgtttcagaacaaggtgataaaaagggcaaaaagggcaaaaaagacagggacatggatgaactgaagaaagaagtttctatggta

SEQ ID NO: 22195 - DNA, 442 bp, Homo sapiens
  MAP TO AC006014.2; EXPRESSED IN LUNG, SIGNAL = 5.1; EXPRESSED IN BRAIN, SIGNAL = 3.5; EXPRESSED IN ADULT LIVER, SIGNAL = 2.1; EXPRESSED IN PLACENTA, SIGNAL = 3.9; EXPRESSED IN HELA, SIGNAL = 3.1; EXPRESSED IN HEART, SIGNAL = 2.4; EXPRESSED IN FETAL LIVER, SIGNAL =   5; EXPRESSED IN BONE MARROW, SIGNAL = 7.4; NT HIT: AF143405.1, EVALUE 7.00e-02; EST_HUMAN HIT: AW867316.1, EVALUE 0.00e+00; SWISSPROT HIT: P23091, EVALUE 1.20e+00
acgtgatcagttgcagaagcattacacggtggcctggtttctttactcagcccctggggtagatcccagccccccacgtaggtcccttggctggaaaaggaagagggaatgtttggatgaatctgatgatgagccagagaaggagctcgcccctgagcctgaggagacctgggtggcggagacgctgtgtggcctcaagatgaaggcgaagcgacggcgagtgtcgctcgtgctccctgagtactacgaggccttcaacaggctgcttggtaggaggacaccccagagagcacctccaatcctgttctttctaaagaggaaacttccaataaccacacttttccaatgggaaaaatatgccccagtgggtgagctctccatgcgggaggactctgaagtgatcactcatgagggacacttaaggagacaacagaggattagg

SEQ ID NO: 22196 - DNA, 101 bp, Homo sapiens
  MAP TO AC004650.1; EXPRESSED IN PLACENTA, SIGNAL =   3; EXPRESSED IN LUNG, SIGNAL = 3.8; EXPRESSED IN HELA, SIGNAL = 4.9; EXPRESSED IN FETAL LIVER, SIGNAL = 3.8; EXPRESSED IN BONE MARROW, SIGNAL = 3.9; EXPRESSED IN ADULT LIVER, SIGNAL = 4.2; EXPRESSED IN HEART, SIGNAL =   4; EXPRESSED IN BRAIN, SIGNAL = 3.8; EST_HUMAN HIT: BE079780.1, EVALUE 9.00e-11; NT HIT: AJ271736.1, EVALUE 1.00e-08
aagtgatgtgagtgatgatcttcataaactcaagaatccactttctttgctcattcatgagaagcaactcctcatgcatttaagttttatcgagattgcag

SEQ ID NO: 22197 - DNA, 187 bp, Homo sapiens
  MAP TO AC004503.1; EXPRESSED IN HEART, SIGNAL = 9.3; EXPRESSED IN BRAIN, SIGNAL =  11; EXPRESSED IN ADULT LIVER, SIGNAL =  12; EXPRESSED IN PLACENTA, SIGNAL =  18; EXPRESSED IN LUNG, SIGNAL =  15; EXPRESSED IN FETAL LIVER, SIGNAL =  25; EXPRESSED IN BONE MARROW, SIGNAL =  25; EXPRESSED IN HELA, SIGNAL =  10; NT HIT: gi11416585, EVALUE 5.00e-78; EST_HUMAN HIT: BF569669.1, EVALUE 7.00e-78; SWISSPROT HIT: Q95215, EVALUE 2.00e-13
attgtaactgtgaactgtgcccggctgctgaaagccgaccaccatgcaaccaacggggtggtgcacctcatcgataaggtcatctccaccatcaccaacaacatccagcagatcattgagatcgaggacacctttgagacccttcgggtaagggactgccctgggtggaggcccaggcttgggacac

SEQ ID NO: 22198 - DNA, 452 bp, Homo sapiens
  MAP TO AC004706.1; EXPRESSED IN LUNG, SIGNAL = 1.8; EXPRESSED IN BRAIN, SIGNAL = 2.1; EXPRESSED IN ADULT LIVER, SIGNAL = 1.6; EXPRESSED IN HELA, SIGNAL = 1.9; EXPRESSED IN HEART, SIGNAL = 1.7; EXPRESSED IN BONE MARROW, SIGNAL = 1.8; EXPRESSED IN PLACENTA, SIGNAL = 1.8; EXPRESSED IN FETAL LIVER, SIGNAL = 1.7; SWISSPROT HIT: Q02388, EVALUE 1.00e-03; NT HIT: AF109906.1, EVALUE 5.00e-03; EST_HUMAN HIT: BE910592.1, EVALUE 6.60e+00
cattggccctggaagcccgggagctgtgggcactcccacggccatggaacctctagcagccacaggcctcccagcagtctgccttcttccagacaggccagagacatgctcaaagatggtcccctcccccacagaccccagcagccccacagccatggacactcctgtagtctgtctgcctcccaacaaacctgagacacccccagagccagtcttctccgccatgggcccaggcatcctggtcgaggtgggcacctccatccttgtgggacccttggcatctgcaggtccgcccactgtctctctttcaccccacaattctgagccagtttcctcttgcacaggcctaggcaccctgggagccacgggcaccccactagctgcagacagccccacagtgccaggcattcctgcagtttgctgcctccctgacaagcctgaaaagcctccat

SEQ ID NO: 22199 - DNA, 75 bp, Homo sapiens
  MAP TO AC002504.1; EXPRESSED IN BRAIN, SIGNAL = 8.4; EXPRESSED IN ADULT LIVER, SIGNAL = 6.9; EXPRESSED IN HELA, SIGNAL = 6.6; EXPRESSED IN HEART, SIGNAL = 6.8; EXPRESSED IN BONE MARROW, SIGNAL = 7.2; EXPRESSED IN PLACENTA, SIGNAL = 6.7; EXPRESSED IN LUNG, SIGNAL = 8.4; EXPRESSED IN FETAL LIVER, SIGNAL =   7; NT HIT: U65016.1, EVALUE 1.50e-01; EST_HUMAN HIT: AI352475.1, EVALUE 8.70e-01; SWISSPROT HIT: P03161, EVALUE 7.40e+00
agataaaagaccatgatctctgggggatgtgctgttctccccatctgctgaagtccacatttggcttctcttctt

SEQ ID NO: 22200 - DNA, 224 bp, Homo sapiens
  MAP TO AC005385.2; EXPRESSED IN BONE MARROW, SIGNAL = 1.3; EXPRESSED IN PLACENTA, SIGNAL = 1.8; EXPRESSED IN LUNG, SIGNAL = 1.7; EXPRESSED IN HEART, SIGNAL = 1.3; EXPRESSED IN FETAL LIVER, SIGNAL = 1.3; EXPRESSED IN ADULT LIVER, SIGNAL = 1.4; EXPRESSED IN BRAIN, SIGNAL = 1.6; SWISSPROT HIT: P34216, EVALUE 5.00e+00; NT HIT: gi11545770, EVALUE 1.00e-123; EST_HUMAN HIT: BE799746.1, EVALUE 1.00e-123
aattccagaaggacactcttcataggcatttacatttgactctgtttcagtttttggttcatctgttgagaaatctatgatttctgtttttctgatgctctcatcctctttatcttcctgtaagttaagtccagagttctccaacgtagcttcatcttccgagtttgactcagcgtcactttcatttaggccaggaggtagcagcccactccacatcttttctt

SEQ ID NO: 22201 - DNA, 76 bp, Homo sapiens
  MAP TO AC004254.1; EXPRESSED IN LUNG, SIGNAL = 2.1; EXPRESSED IN PLACENTA, SIGNAL = 1.9; EXPRESSED IN HEART, SIGNAL = 1.7; EXPRESSED IN FETAL LIVER, SIGNAL = 1.5; EXPRESSED IN BRAIN, SIGNAL = 2.7; EXPRESSED IN BONE MARROW, SIGNAL = 1.8; EXPRESSED IN HELA, SIGNAL =   2; EXPRESSED IN ADULT LIVER, SIGNAL = 1.8; EST_HUMAN HIT: BF332417.1, EVALUE 2.00e-35; NT HIT: AF227749.1, EVALUE 6.00e-01
agtctccacaggtgacaaaaattgacttgacgtttggatctaagaggccttccttcgccatccattcatcgaccct

SEQ ID NO: 22202 - DNA, 216 bp, Homo sapiens
  MAP TO AC006299.1; EXPRESSED IN LUNG, SIGNAL = 0.72; EXPRESSED IN BRAIN, SIGNAL = 0.75; EXPRESSED IN PLACENTA, SIGNAL = 0.67; EXPRESSED IN HEART, SIGNAL = 1.8; EXPRESSED IN FETAL LIVER, SIGNAL = 0.76; EXPRESSED IN BONE MARROW, SIGNAL = 0.68; EXPRESSED IN ADULT LIVER, SIGNAL =  22; NT HIT: AF056880.1, EVALUE 1.30e-01; SWISSPROT HIT: P43174, EVALUE 4.70e+00; EST_HUMAN HIT: N58323.1, EVALUE 7.60e-01
ctgcagcatcaacaagactgccctcaactgtgggattacatacatagcactggtggtcaaaaataaagaagttttcactgccagctccagcacaaaatccaaggtagtgactccaattgccctagctggaccatctcctgtttccagacagatgagatctgtcatcagaagaatgatgacaatgagaatgtcaccaagtaacaaaaccatagttgc

SEQ ID NO: 22203 - DNA, 186 bp, Homo sapiens
  MAP TO AC005392.1; EXPRESSED IN PLACENTA, SIGNAL = 3.6; EXPRESSED IN LUNG, SIGNAL =   5; EXPRESSED IN HELA, SIGNAL = 3.5; EXPRESSED IN FETAL LIVER, SIGNAL = 4.2; EXPRESSED IN BONE MARROW, SIGNAL =   4; EXPRESSED IN ADULT LIVER, SIGNAL = 3.4; EXPRESSED IN HEART, SIGNAL = 3.8; EXPRESSED IN BRAIN, SIGNAL = 4.1; NT HIT: gi9966888, EVALUE 3.00e-88; EST_HUMAN HIT: AI205247.1, EVALUE 5.00e-88; SWISSPROT HIT: P34020, EVALUE 5.10e+00
tctccaagggctgcacggaggccaaggaccaggagccccgcgtcactgagcaccggatgggccccggcctctccctgatctcctacaccttcgtgtgccgccaggaggacttctgcaacaacctcgttaactccctcccgctttgggccccacagcccccagcaggtgcctgcgggagggtcggga

SEQ ID NO: 22204 - DNA, 334 bp, Homo sapiens
  MAP TO AC005684.1; EXPRESSED IN LUNG, SIGNAL = 4.8; EXPRESSED IN HELA, SIGNAL = 4.8; EXPRESSED IN ADULT LIVER, SIGNAL = 5.2; EXPRESSED IN PLACENTA, SIGNAL = 4.5; EXPRESSED IN HEART, SIGNAL = 4.9; EXPRESSED IN FETAL LIVER, SIGNAL = 5.1; EXPRESSED IN BRAIN, SIGNAL = 5.5; EXPRESSED IN BONE MARROW, SIGNAL = 4.4; EST_HUMAN HIT: BE169131.1, EVALUE 4.00e-13; SWISSPROT HIT: P35527, EVALUE 9.80e-01; NT HIT: AF302150.1, EVALUE 8.00e-04
tctagcatgctcctgctccggccctggtcggtgaactctggggagccaaggcagatgggcgctgtggggctgccgtgccggaactgctggcgctgctgccactcgtagagctgccacacggtgccatcccggtgcgcccggcgctcttcactcgacatcttcaggtggctggctcggtcctgcgcatacttgtagtcacttggcaggtttcggggaggtggcgaggagccccccgaggggtgtcgggtgctcttgggaagagtctggtagttttctgggaaggacagggattggccaggaccctggcgaggaagcgtctggtccaagggaagac

SEQ ID NO: 22205 - DNA, 439 bp, Homo sapiens
  MAP TO AC004080.1; EXPRESSED IN LUNG, SIGNAL = 2.4; EXPRESSED IN HELA, SIGNAL =   2; EXPRESSED IN FETAL LIVER, SIGNAL = 2.4; EXPRESSED IN BRAIN, SIGNAL = 2.3; EXPRESSED IN BONE MARROW, SIGNAL = 2.4; EXPRESSED IN ADULT LIVER, SIGNAL =   3; EXPRESSED IN PLACENTA, SIGNAL = 2.5; EXPRESSED IN HEART, SIGNAL = 3.1; SWISSPROT HIT: P31269, EVALUE 4.00e-51; NT HIT: AF010258.1, EVALUE 0.00e+00; EST_HUMAN HIT: BE292889.1, EVALUE 0.00e+00
ggttcaggtttaatgccataaggccggctggagggcaagcccgcgaaggagagcgcaccgggcgtgggctccagccaggagcgcatgtacctgccgtccggcgccgccgccgccacgggcgcctgggggtgcacgtaggggtggtggtgatggtggtggtacaccgcagcgggtacagcgttggcgcccgccgcgtgcactgggttccacgaggcgccaaacaccgtcgccttggactggaagctgcacgggctgaagtcggggtgctcggccagcgtcgccgcctgccggggaggctggcccagggtccccggcgcatagcggccaacgctcagctcatccgcggcgtcggcgcccagcaggaacgagtccacgtagtagttgcccagggccccagtggtggccatcaccgtgcccagcgcctggcccgcccggcccg

SEQ ID NO: 22206 - DNA, 80 bp, Homo sapiens
  MAP TO AC005822.1; EXPRESSED IN HEART, SIGNAL = 1.7; EXPRESSED IN BRAIN, SIGNAL = 1.6; EXPRESSED IN BONE MARROW, SIGNAL = 1.5; EXPRESSED IN PLACENTA, SIGNAL = 0.98; EXPRESSED IN LUNG, SIGNAL = 1.3; EXPRESSED IN FETAL LIVER, SIGNAL = 1.3; EXPRESSED IN ADULT LIVER, SIGNAL = 1.4; EST_HUMAN HIT: AW404800.1, EVALUE 9.00e-29; NT HIT: gi11425114, EVALUE 6.00e-38
tagccatcctgtctggaaagcatgttttcctctggggtcttcctctggggtatcttgggaaagggtagagttttgaggag

SEQ ID NO: 22207 - DNA, 168 bp, Homo sapiens
  MAP TO AC005848.1; EXPRESSED IN PLACENTA, SIGNAL = 2.8; EXPRESSED IN LUNG, SIGNAL = 3.3; EXPRESSED IN HELA, SIGNAL = 3.2; EXPRESSED IN HEART, SIGNAL = 2.5; EXPRESSED IN BONE MARROW, SIGNAL = 2.7; EXPRESSED IN FETAL LIVER, SIGNAL = 2.6; EXPRESSED IN BRAIN, SIGNAL = 2.9; EXPRESSED IN ADULT LIVER, SIGNAL = 2.9; SWISSPROT HIT: Q01970, EVALUE 8.00e-22; NT HIT: Z16411.1, EVALUE 5.00e-90; EST_HUMAN HIT: BE018257.1, EVALUE 7.00e-90
cctcttcctcatcttcctcctcatcctcacggtcagcaggtccaagaacataggggcctcggttcaggccctcgtcacccagagacttctgaggctccaggctgggcttctcaagccctacctcctccccattgctcaggcctgggcagctgtcagagctgggagacc

SEQ ID NO: 22208 - DNA, 109 bp, Homo sapiens
  MAP TO AC004087.1; EXPRESSED IN PLACENTA, SIGNAL = 1.6; EXPRESSED IN LUNG, SIGNAL = 1.3; EXPRESSED IN HEART, SIGNAL = 1.6; EXPRESSED IN FETAL LIVER, SIGNAL = 1.4; EXPRESSED IN BONE MARROW, SIGNAL = 1.5; EXPRESSED IN BRAIN, SIGNAL = 1.6; EXPRESSED IN ADULT LIVER, SIGNAL = 1.6; NT HIT: AF213884.1, EVALUE 9.30e-01; EST_HUMAN HIT: AW947181.1, EVALUE 1.40e+00; SWISSPROT HIT: O55193, EVALUE 5.50e+00
atgaacacttttatgactgataattctgccagactgttggaaagaagggctgagcaaggtcataatgacattcactgtacttgtgtccctgctttccctagtctttttg

SEQ ID NO: 22209 - DNA, 162 bp, Homo sapiens
  MAP TO AC005611.1; EXPRESSED IN LUNG, SIGNAL = 6.4; EXPRESSED IN FETAL LIVER, SIGNAL = 6.2; EXPRESSED IN PLACENTA, SIGNAL = 6.2; EXPRESSED IN HELA, SIGNAL = 7.1; EXPRESSED IN BRAIN, SIGNAL =   7; EXPRESSED IN BONE MARROW, SIGNAL = 6.6; EXPRESSED IN ADULT LIVER, SIGNAL = 6.1; EXPRESSED IN HEART, SIGNAL =   6; EST_HUMAN HIT: AW340946.1, EVALUE 3.00e-86; NT HIT: X99279.1, EVALUE 1.50e+00
ccttttggtgacagtgggtgaagtcctggaaaagagtttactgaatgtcagccggactgattggcacatggcatttactgggatgtcccgtcggcagatgatctacagtgcagccagagcgatagcaggcatgtataaacagcgcctgccacccaggacagt

SEQ ID NO: 22210 - DNA, 201 bp, Homo sapiens
  MAP TO AC004757.1; EXPRESSED IN LUNG, SIGNAL = 6.4; EXPRESSED IN HELA, SIGNAL = 6.4; EXPRESSED IN BRAIN, SIGNAL = 6.1; EXPRESSED IN BONE MARROW, SIGNAL = 7.8; EXPRESSED IN ADULT LIVER, SIGNAL = 8.5; EXPRESSED IN PLACENTA, SIGNAL = 7.3; EXPRESSED IN HEART, SIGNAL = 5.9; EXPRESSED IN FETAL LIVER, SIGNAL =   9
tcagtgatggtgatgatggtgatggtgacagtgatgatggtgatgatggtgatgctgccgatgatggtgatgctggtgatagtgatggtgatgatggtgatagtgacggcgatgatgatagtgatgacggtgatggtgacagtgacagtgatggtgatgatgatggtggtgatggtgatgtgacagtgatggtgatgatga

SEQ ID NO: 22211 - DNA, 206 bp, Homo sapiens
  MAP TO AC005661.1; EXPRESSED IN LUNG, SIGNAL = 3.7; EXPRESSED IN FETAL LIVER, SIGNAL = 6.9; EXPRESSED IN BRAIN, SIGNAL = 4.8; EXPRESSED IN BONE MARROW, SIGNAL = 4.5; EXPRESSED IN HELA, SIGNAL = 4.8; EXPRESSED IN PLACENTA, SIGNAL = 4.3; EXPRESSED IN HEART, SIGNAL = 4.7; EXPRESSED IN ADULT LIVER, SIGNAL = 4.7; NT HIT: gi6754389, EVALUE 1.90e+00; SWISSPROT HIT: P98197, EVALUE 6.50e+00
cccccaggccaggagatgctgcccagaggccctgggaaagctcttccctggcctctgcttcctctgctttctggtgacctacgccctggtgggtgctgtggtcttctctgccattgaggacggccaggtcctggtggcagcagatgatggagagtttgagaagttcttggaggagctctgcagaatcttgaactgcagtgaaacag

SEQ ID NO: 22212 - DNA, 77 bp, Homo sapiens
  MAP TO AC003078.1; EXPRESSED IN PLACENTA, SIGNAL = 4.5; EXPRESSED IN HEART, SIGNAL =   4; EXPRESSED IN FETAL LIVER, SIGNAL = 4.2; EXPRESSED IN BONE MARROW, SIGNAL = 4.5; EXPRESSED IN ADULT LIVER, SIGNAL = 3.9; EXPRESSED IN HELA, SIGNAL = 4.4; EXPRESSED IN LUNG, SIGNAL = 4.2; EXPRESSED IN BRAIN, SIGNAL = 4.8; EST_HUMAN HIT: AI337261.1, EVALUE 4.00e-03; NT HIT: AJ010770.1, EVALUE 1.00e-08
agccacatcacagctttcttgtacttaggaacatcatacagcacttcagtactatgcttgaggggctatttaaaaca

SEQ ID NO: 22213 - DNA, 99 bp, Homo sapiens
  MAP TO AC004911.1; EXPRESSED IN PLACENTA, SIGNAL = 2.5; EXPRESSED IN LUNG, SIGNAL =   3; EXPRESSED IN HEART, SIGNAL = 2.7; EXPRESSED IN HELA, SIGNAL = 2.9; EXPRESSED IN FETAL LIVER, SIGNAL = 2.5; EXPRESSED IN BRAIN, SIGNAL = 2.7; EXPRESSED IN BONE MARROW, SIGNAL = 2.8; EXPRESSED IN ADULT LIVER, SIGNAL = 2.6; SWISSPROT HIT: P12783, EVALUE 3.20e+00; EST_HUMAN HIT: AW876103.1, EVALUE 4.80e+00
gaaaatagaagcttctttgcagaagaagccggtgtccatcaggacggaactgaatgcacctctggatcaggtggcgaaaatgctgcaaaaagatccagg

SEQ ID NO: 22214 - DNA, 227 bp, Homo sapiens
  MAP TO AC002093.1; EXPRESSED IN PLACENTA, SIGNAL = 1.2; EXPRESSED IN LUNG, SIGNAL = 1.2; EXPRESSED IN HEART, SIGNAL = 1.3; EXPRESSED IN FETAL LIVER, SIGNAL = 0.98; EXPRESSED IN BRAIN, SIGNAL = 1.2; EXPRESSED IN BONE MARROW, SIGNAL = 1.2; EXPRESSED IN ADULT LIVER, SIGNAL = 1.2; SWISSPROT HIT: P35084, EVALUE 1.80e+00; NT HIT: M15826.1, EVALUE 1.00e-04; EST_HUMAN HIT: BE047864.1, EVALUE 2.00e-54
  unsure 27
  unsure 45
  unsure 104
  unsure 127
  unsure 132
  unsure 150
  unsure 159
  unsure 163
cgctggaagtaggccagttcctccttngagcaggaacactttggnctttgagttcattccgctcctgaaggatctgctcaaactcctcccgactgaagcggcanctgccctgcctccgaggggcgcnccgangctgctgcgcggcctccngcctttggnaagngacaggcacagtcagagggtcgcctcggctggcgttcccccgccccagggccatcatgggaatg

SEQ ID NO: 22215 - DNA, 217 bp, Homo sapiens
  MAP TO AC005664.1; EXPRESSED IN PLACENTA, SIGNAL = 5.2; EXPRESSED IN LUNG, SIGNAL =   5; EXPRESSED IN HEART, SIGNAL = 4.3; EXPRESSED IN BONE MARROW, SIGNAL = 5.2; EXPRESSED IN ADULT LIVER, SIGNAL = 4.8; EXPRESSED IN HELA, SIGNAL = 4.5; EXPRESSED IN FETAL LIVER, SIGNAL = 5.5; EXPRESSED IN BRAIN, SIGNAL = 4.9; SWISSPROT HIT: P72943, EVALUE 9.30e-01; NT HIT: M36787.1, EVALUE 5.10e-01; EST_HUMAN HIT: AW130149.1, EVALUE 1.90e-01
ccccattgcctgtggtccatatgccagtggcaatgctcctgaataaggccttcccgaccgtgctttgacaagggctgaataatttttttctttaatggttgtggtgccacaggcctctgacccaggactctcaatgtgcaactttgcagcctttgtcttctgactggctgattggggatctactggtgagtcaaactcctgagccatgactgtagaa

SEQ ID NO: 22216 - DNA, 187 bp, Homo sapiens
  MAP TO AC003665.1; EXPRESSED IN PLACENTA, SIGNAL = 2.6; EXPRESSED IN LUNG, SIGNAL = 2.7; EXPRESSED IN HEART, SIGNAL = 1.7; EXPRESSED IN BRAIN, SIGNAL = 2.8; EXPRESSED IN HELA, SIGNAL = 1.9; EXPRESSED IN FETAL LIVER, SIGNAL = 2.5; EXPRESSED IN BONE MARROW, SIGNAL = 2.2; EXPRESSED IN ADULT LIVER, SIGNAL = 2.8; NT HIT: gi11427149, EVALUE 9.00e-92; SWISSPROT HIT: P22059, EVALUE 2.00e-12; EST_HUMAN HIT: BF514933.1, EVALUE 6.00e-29
gagcctgtggaacattctgcgcaacaacatcggcaaagacctgtccaaggtgtcaatgcctgtgcagctcaacgagccgctcaacactctgcagcggctctgcgaggagctggagtacagcagcctcctggaccaggccagccgcatcgccgacccctgcgagcgcatggtacctgcttcctgtcct

SEQ ID NO: 22217 - DNA, 125 bp, Homo sapiens
  MAP TO AC005482.1; EXPRESSED IN LUNG, SIGNAL =  80; EXPRESSED IN FETAL LIVER, SIGNAL = 2.8; EXPRESSED IN BONE MARROW, SIGNAL = 2.5; EXPRESSED IN PLACENTA, SIGNAL = 2.6; EXPRESSED IN HELA, SIGNAL = 2.9; EXPRESSED IN HEART, SIGNAL = 2.3; EXPRESSED IN BRAIN, SIGNAL = 3.1; EXPRESSED IN ADULT LIVER, SIGNAL = 2.5; NT HIT: AB016625.1, EVALUE 2.80e-01; EST_HUMAN HIT: AV725833.1, EVALUE 6.40e+00; SWISSPROT HIT: P25572, EVALUE 9.20e+00
tcttctctgttgataacgctgtggctccatccagagttaacgcgctgggcattctcccttgggatgccgccattcacacccacggcattacctccatctttaccttggtaagtcccaaatctcct

SEQ ID NO: 22218 - DNA, 200 bp, Homo sapiens
  MAP TO AC004773.1; EXPRESSED IN LUNG, SIGNAL = 1.4; EXPRESSED IN FETAL LIVER, SIGNAL = 1.2; EXPRESSED IN BRAIN, SIGNAL = 1.1; EXPRESSED IN HEART, SIGNAL = 1.5; EXPRESSED IN PLACENTA, SIGNAL = 1.2; EXPRESSED IN BONE MARROW, SIGNAL = 1.5; EXPRESSED IN ADULT LIVER, SIGNAL = 1.7; NT HIT: gi7305188, EVALUE 7.30e+00; SWISSPROT HIT: P40715, EVALUE 1.90e-01; EST_HUMAN HIT: BE179356.1, EVALUE 1.00e-109
agattgtctggtgtttatcgccaactttaacaccatcctccaagacttctgctctgtcggagcctgggtccctgtcagcctcctctgtgaagaaacctcttgcctgtgcccccctcgaagccccagagctaaccagggctgctttcatgtgttgcttggaggattcgcattcgaatctgaattgctaatggtggaaaaga

SEQ ID NO: 22219 - DNA, 335 bp, Homo sapiens
  MAP TO AC004853.1; EXPRESSED IN PLACENTA, SIGNAL = 1.7; EXPRESSED IN LUNG, SIGNAL = 1.9; EXPRESSED IN HELA, SIGNAL = 1.6; EXPRESSED IN FETAL LIVER, SIGNAL = 1.7; EXPRESSED IN BRAIN, SIGNAL = 1.5; EXPRESSED IN BONE MARROW, SIGNAL = 1.8; EXPRESSED IN ADULT LIVER, SIGNAL = 1.7; EXPRESSED IN HEART, SIGNAL = 1.3; NT HIT: gi11420819, EVALUE 0.00e+00; EST_HUMAN HIT: AW104581.1, EVALUE 3.10e-01; SWISSPROT HIT: Q13607, EVALUE 1.00e-53
gacgtgggtgagagaatttattctccttggcttatccagtgactggtgcactcagatatccctgttttccctgttcttggtcacatacctcatgacagtgctggggaactgtctcattgtccttctgatcagactggacagccgactccacactcccatgtatttctttctcaccaacctctcccttgtcgatgtctcctatgccacaagcgtagtcccccagctgctggcacattttcttgcagaacataaagccatcccattccagagctgtgcagcccagttatttttctccctggccttgggtgggattgagtttgttctcctggcagtga

SEQ ID NO: 22220 - DNA, 522 bp, Homo sapiens
  MAP TO AC003957.1; EXPRESSED IN LUNG, SIGNAL = 0.92; EXPRESSED IN BRAIN, SIGNAL = 1.4; EXPRESSED IN ADULT LIVER, SIGNAL =   1; EXPRESSED IN PLACENTA, SIGNAL = 1.1; EXPRESSED IN HEART, SIGNAL = 1.6; EXPRESSED IN FETAL LIVER, SIGNAL = 1.1; EXPRESSED IN BONE MARROW, SIGNAL = 1.1; NT HIT: U78289.1, EVALUE 1.30e+00; SWISSPROT HIT: Q04888, EVALUE 3.80e-01
atggccttctctcaggtgcagtgtctggacgacaaccatgtgaactggcgctccagcgagtccaagcctgagttcttctacagcgaggagcagcggctggcgctggaggccctggtggcccgcggccgggacgccttctacgaggtgctcaagcgggagaacatccgagacttcctctcggagctggagctcaagcgcatcctggagaccatcgaggtgtacgacccgggctctgaggaccctcggggcacgggcccctctcaggggcccgaggacaatggggtcggcgacggcgaggaagccagcggggcggatggggtccccatcgaggccgagccgctgccctccctggagtactggccccagaagtcggaccgctccatcccgcagctggacctgggctggcccgacaccatcgcctaccgcggcgtgacccgggctagcgtctacatgcagccccccatagacgggcaggcccacatcaaagaggtggtgcggaagatgatcagccaggcacagaag

SEQ ID NO: 22221 - DNA, 148 bp, Homo sapiens
  MAP TO AC002302.1; EXPRESSED IN BONE MARROW, SIGNAL = 3.1; EXPRESSED IN PLACENTA, SIGNAL = 2.3; EXPRESSED IN LUNG, SIGNAL =   2; EXPRESSED IN HELA, SIGNAL = 2.7; EXPRESSED IN HEART, SIGNAL =   2; EXPRESSED IN FETAL LIVER, SIGNAL = 3.1; EXPRESSED IN BRAIN, SIGNAL = 2.2; EXPRESSED IN ADULT LIVER, SIGNAL = 2.8; EST_HUMAN HIT: BE018348.1, EVALUE 3.00e-08; SWISSPROT HIT: P08341, EVALUE 6.90e+00; NT HIT: AL163209.2, EVALUE 2.00e-05
ctatgatgggtgaagccaagaggaagccattagaactgccccagcctaggaaaacagccaaccaagagcaatactacatccttagagggacagcagagatcagtgccatcatcaatgacttgaaagatgcagaggtagtgattcccac

SEQ ID NO: 22222 - DNA, 140 bp, Homo sapiens
  MAP TO AC005345.1; EXPRESSED IN LUNG, SIGNAL =   1; EXPRESSED IN BONE MARROW, SIGNAL =   1; EXPRESSED IN PLACENTA, SIGNAL = 0.83; EXPRESSED IN HEART, SIGNAL =  45; EXPRESSED IN FETAL LIVER, SIGNAL = 0.99; EXPRESSED IN BRAIN, SIGNAL = 0.88; EXPRESSED IN ADULT LIVER, SIGNAL = 0.89; SWISSPROT HIT: P40917, EVALUE 8.00e-01; NT HIT: Y13278.1, EVALUE 3.10e-01
ttttctataatctggaaatgatttgagttgaaatgacatgttatgagttgaagcgacacagaaggccggatatggtcaagattgagatcttcgatgcctggtaaaagtgcagtttacgtaaaataaattttatcaggtat

SEQ ID NO: 22223 - DNA, 131 bp, Homo sapiens
  MAP TO AC003119.1; EXPRESSED IN LUNG, SIGNAL = 1.9; EXPRESSED IN ADULT LIVER, SIGNAL = 1.9; EXPRESSED IN PLACENTA, SIGNAL = 1.7; EXPRESSED IN HEART, SIGNAL = 1.5; EXPRESSED IN FETAL LIVER, SIGNAL = 1.6; EXPRESSED IN BRAIN, SIGNAL = 1.8; EXPRESSED IN BONE MARROW, SIGNAL = 1.7; EST_HUMAN HIT: BE063546.1, EVALUE 1.70e+00
ctgtgcatcaccaaatgtctttttgtgcaccagcagctgcatatgacttacactttgggtgacagtacattcgacctcacggtatttcaagtgcagtgttgaggccagcaacagcagcattatgtgggggc

SEQ ID NO: 22224 - DNA, 89 bp, Homo sapiens
  MAP TO AC005659.2; EXPRESSED IN LUNG, SIGNAL =  15; EXPRESSED IN FETAL LIVER, SIGNAL =  20; EXPRESSED IN BRAIN, SIGNAL =  16; EXPRESSED IN BONE MARROW, SIGNAL =  13; EXPRESSED IN PLACENTA, SIGNAL =  14; EXPRESSED IN HELA, SIGNAL =  22; EXPRESSED IN HEART, SIGNAL =  12; EXPRESSED IN ADULT LIVER, SIGNAL =  41; EST_HUMAN HIT: BE960184.1, EVALUE 1.10e+00; NT HIT: D90084.1, EVALUE 2.90e+00
atgagggtgggatcatacccagcgtcgaccaatcacagtagagcacctcctacaaacaggttaggttcgtcctggaaatggcccatgac

SEQ ID NO: 22225 - DNA, 301 bp, Homo sapiens
  MAP TO AC002519.1; EXPRESSED IN HEART, SIGNAL = 7.7; EXPRESSED IN BRAIN, SIGNAL = 8.4; EXPRESSED IN BONE MARROW, SIGNAL = 7.2; EXPRESSED IN ADULT LIVER, SIGNAL = 8.4; EXPRESSED IN PLACENTA, SIGNAL = 8.1; EXPRESSED IN HELA, SIGNAL = 7.8; EXPRESSED IN FETAL LIVER, SIGNAL = 7.9; EXPRESSED IN LUNG, SIGNAL =   9; EST_HUMAN HIT: AA284651.1, EVALUE 1.00e-95; SWISSPROT HIT: O75153, EVALUE 8.00e-24; NT HIT: AB014564.1, EVALUE 5.00e-14
ccagtagctgcggtcatccacctctgctgtgtccagcgtgtacagaccctccatgtccgctgccttgtgcgggtgctcaccgttcaggtcattggtgaatgctatggaggctgccacatccctggcaaagtccttgtagtggccactaatgacaaagcccaggctgaagatgatgcggctccacatgaacatctgcagcttggtctcctcactgggactgatggccatgacgatgcctccctgactaccatggcgccccatgtggctgccattctgaagttgctgtgtacctgggagggac

SEQ ID NO: 22226 - DNA, 490 bp, Homo sapiens
  MAP TO AC004636.1; EXPRESSED IN PLACENTA, SIGNAL = 4.2; EXPRESSED IN LUNG, SIGNAL = 4.1; EXPRESSED IN HEART, SIGNAL = 5.3; EXPRESSED IN BRAIN, SIGNAL = 4.4; EXPRESSED IN BONE MARROW, SIGNAL = 4.3; EXPRESSED IN ADULT LIVER, SIGNAL = 4.4; EXPRESSED IN HELA, SIGNAL = 4.3; EXPRESSED IN FETAL LIVER, SIGNAL = 4.4; NT HIT: AF064254.1, EVALUE 0.00e+00; EST_HUMAN HIT: AA469992.1, EVALUE 1.00e-29; SWISSPROT HIT: O14975, EVALUE 3.00e-31
gaaactcctgttcccttacttttgggatgacttctggttcgtgttgaaggtggtgctcattataattcggctgaagaagtatgaaaagagaggggagctggtgactgtgctggataaattcttgagtcatgccaaaagacaacctcggaaacctttcatcatctatgagggagacatctacacctatcaggatgtagacaaaaggagcagcagagtggcccatgtcttcctgaaccattcctctctgaaaaagggggacacggtggctctgctgatgagcaatgagccggacttcgttcacgtgtggttcggcctcgccaagctgggctgcgtggtggcctttctcaacaccaacattcgctccaactccctcctgaattgcatccgcgcctgtgggcccagagccctagtggtgggcgcaggtagagtatggggtgtggtctgcctatacagaatggcagcccacctgctttcataccctttttttttt

SEQ ID NO: 22227 - DNA, 109 bp, Homo sapiens
  MAP TO AC006150.2; EXPRESSED IN PLACENTA, SIGNAL = 1.7; EXPRESSED IN LUNG, SIGNAL = 1.5; EXPRESSED IN HEART, SIGNAL = 1.4; EXPRESSED IN BRAIN, SIGNAL = 1.8; EXPRESSED IN FETAL LIVER, SIGNAL = 1.6; EXPRESSED IN BONE MARROW, SIGNAL = 1.2; EXPRESSED IN ADULT LIVER, SIGNAL = 1.5; EST_HUMAN HIT: BE087330.1, EVALUE 1.00e-06; NT HIT: AF003529.1, EVALUE 3.00e-16
agatgccatacaagacaatgctgattctctgcagaaccgactctttgcttctagacctataattagactcaagtctcatcagtctcctaaaggtgaggtacaatgtgtg

SEQ ID NO: 22228 - DNA, 145 bp, Homo sapiens
  MAP TO AC004802.1; EXPRESSED IN LUNG, SIGNAL = 5.2; EXPRESSED IN HELA, SIGNAL = 5.7; EXPRESSED IN BRAIN, SIGNAL = 6.5; EXPRESSED IN BONE MARROW, SIGNAL = 5.4; EXPRESSED IN ADULT LIVER, SIGNAL =   5; EXPRESSED IN PLACENTA, SIGNAL = 4.8; EXPRESSED IN HEART, SIGNAL = 4.7; EXPRESSED IN FETAL LIVER, SIGNAL =   5; EST_HUMAN HIT: AW024078.1, EVALUE 3.00e-76; NT HIT: AB029004.1, EVALUE 2.00e-76; SWISSPROT HIT: O83416, EVALUE 2.70e-01
cctccttcaagatttctaagagtcgatcaacttctgcctgggccttgctagattcatctttgtacctggtgatctctctctccaagtgctgtattcggtcactcatctctggactggctctggcttccaatgctgcctcatgtgc

SEQ ID NO: 22229 - DNA, 124 bp, Homo sapiens
  MAP TO AC005549.1; EXPRESSED IN LUNG, SIGNAL = 2.5; EXPRESSED IN HELA, SIGNAL = 2.1; EXPRESSED IN BONE MARROW, SIGNAL = 2.4; EXPRESSED IN ADULT LIVER, SIGNAL = 2.5; EXPRESSED IN PLACENTA, SIGNAL = 2.9; EXPRESSED IN HEART, SIGNAL = 2.6; EXPRESSED IN FETAL LIVER, SIGNAL = 3.7; EXPRESSED IN BRAIN, SIGNAL = 2.5; NT HIT: Y18933.1, EVALUE 6.00e-64; EST_HUMAN HIT: AI478647.1, EVALUE 2.00e-55; SWISSPROT HIT: P13500, EVALUE 9.00e-15
tcaagtcttcggagtttgggtttgcttgtccaggtggtccatggaatcctgaacccacttctgcttggggtcagcacagatctccttggccacaatggtcttgaagctgtggggagggaggaca

SEQ ID NO: 22230 - DNA, 245 bp, Homo sapiens
  MAP TO AC002099.1; EXPRESSED IN PLACENTA, SIGNAL = 2.6; EXPRESSED IN HELA, SIGNAL =   3; EXPRESSED IN HEART, SIGNAL = 2.9; EXPRESSED IN BONE MARROW, SIGNAL =   3; EXPRESSED IN ADULT LIVER, SIGNAL = 2.8; EXPRESSED IN BRAIN, SIGNAL = 2.9; EXPRESSED IN FETAL LIVER, SIGNAL = 2.6; EXPRESSED IN LUNG, SIGNAL = 3.1; SWISSPROT HIT: Q15528, EVALUE 5.00e-23; EST_HUMAN HIT: BE618264.1, EVALUE 1.00e-114; NT HIT: AJ224639.1, EVALUE 0.00e+00
ctggacgagtaatactcctcctccagctcgtagaggtcaatggagatctcgtctcgcagcgtgatgagcttccggtcgcactcctcctgcagtgtgcgcagctgctggttgcgctggtcaatggcctcgttcacggaggggaagtcattgaggatcaggaactgcttgaggtcggacaccagcttcatcagggactcgccggctcggacctgtggccatcagaaccagggcgggcacagggtgag

SEQ ID NO: 22231 - DNA, 113 bp, Homo sapiens
  MAP TO AC004782.1; EXPRESSED IN ADULT LIVER, SIGNAL = 1.3; EXPRESSED IN PLACENTA, SIGNAL = 1.4; EXPRESSED IN LUNG, SIGNAL = 1.3; EXPRESSED IN HEART, SIGNAL = 1.3; EXPRESSED IN BRAIN, SIGNAL = 1.2; EXPRESSED IN BONE MARROW, SIGNAL = 1.3; EXPRESSED IN FETAL LIVER, SIGNAL = 1.3; NT HIT: gi6671715, EVALUE 1.60e-02
ttcctccttggggttggctttatccttggactccatgttcttaaaagcagcatgacataacgtttcatacaaatgctgccagagatggcactgctcattcttattataatact

SEQ ID NO: 22232 - DNA, 114 bp, Homo sapiens
  MAP TO AC004383.1; EXPRESSED IN LUNG, SIGNAL = 2.3; EXPRESSED IN ADULT LIVER, SIGNAL = 1.9; EXPRESSED IN PLACENTA, SIGNAL = 1.9; EXPRESSED IN HELA, SIGNAL = 2.2; EXPRESSED IN HEART, SIGNAL = 2.2; EXPRESSED IN FETAL LIVER, SIGNAL = 2.1; EXPRESSED IN BRAIN, SIGNAL = 2.3; EXPRESSED IN BONE MARROW, SIGNAL = 2.2; SWISSPROT HIT: O77695, EVALUE 4.10e+00; EST_HUMAN HIT: BF510257.1, EVALUE 7.00e-58; NT HIT: gi11496282, EVALUE 5.00e-58
catctgtgtgaagagaccaatcctcagaaatatcaagaaagtgagatggctgcagaggttgagcctcctgagcccctgcttggtgacaagggacctgggtatgctcttcttcac

SEQ ID NO: 22233 - DNA, 204 bp, Homo sapiens
  MAP TO AC005856.1; EXPRESSED IN PLACENTA, SIGNAL = 1.2; EXPRESSED IN HEART, SIGNAL = 1.5; EXPRESSED IN BRAIN, SIGNAL =   2; EXPRESSED IN BONE MARROW, SIGNAL = 1.2; EXPRESSED IN ADULT LIVER, SIGNAL = 1.8; EXPRESSED IN LUNG, SIGNAL = 1.2; EXPRESSED IN FETAL LIVER, SIGNAL = 1.1; NT HIT: AB027759.1, EVALUE 8.00e-03; EST_HUMAN HIT: T80876.1, EVALUE 1.00e-39
gtcgcggggaaggcaggcgcgaaggggtgcagggaagaaggaggaggcggcggcagtggcggtggccatggcagaagcggaaacaggagcagcagcagcagcagcagcggcaggagaggcacacaggagccagatcctaaaggctttgtatgccacattaggaaagaatttggaatacagcttctgtttggaaaacattttctg

SEQ ID NO: 22234 - DNA, 89 bp, Homo sapiens
  MAP TO AC005737.1; EXPRESSED IN PLACENTA, SIGNAL = 1.3; EXPRESSED IN LUNG, SIGNAL = 1.4; EXPRESSED IN HEART, SIGNAL = 1.3; EXPRESSED IN BONE MARROW, SIGNAL = 0.99; EXPRESSED IN FETAL LIVER, SIGNAL = 3.2; EXPRESSED IN BRAIN, SIGNAL = 1.2; EXPRESSED IN ADULT LIVER, SIGNAL =  15; NT HIT: AP001511.1, EVALUE 2.90e+00; EST_HUMAN HIT: AI138582.1, EVALUE 1.10e+00
tcttggagtttggctaccacactcttcataatcttgaaataactatgtcttgcagttccacccaggatgcttgtaatgtcacactgagt

SEQ ID NO: 22235 - DNA, 195 bp, Homo sapiens
  MAP TO AC004944.1; EXPRESSED IN PLACENTA, SIGNAL = 8.8; EXPRESSED IN HEART, SIGNAL = 9.2; EXPRESSED IN FETAL LIVER, SIGNAL =  15; EXPRESSED IN LUNG, SIGNAL =   9; EXPRESSED IN HELA, SIGNAL = 8.2; EXPRESSED IN BRAIN, SIGNAL =  10; EXPRESSED IN BONE MARROW, SIGNAL = 8.6; EXPRESSED IN ADULT LIVER, SIGNAL =  12; SWISSPROT HIT: P49657, EVALUE 9.90e-01; NT HIT: AF322069.1, EVALUE 1.80e+00
agtttcagggtgattcaataagccaatcatgggagtcccatgactgttgtcagccatgtagttaggagggacccagtgatttcgaggggtcatactggaatattcttccttgttcttgaaagagagacaatgatgtatcagtcttcttttctggacatttttgtgtctgccatcctcagagctgtggttattctt

SEQ ID NO: 22236 - DNA, 296 bp, Homo sapiens
  MAP TO AC005859.1; EXPRESSED IN PLACENTA, SIGNAL = 1.1; EXPRESSED IN BRAIN, SIGNAL = 1.1; EXPRESSED IN ADULT LIVER, SIGNAL = 1.6; EXPRESSED IN LUNG, SIGNAL = 1.1; EXPRESSED IN HEART, SIGNAL = 1.5; EXPRESSED IN FETAL LIVER, SIGNAL = 1.1; EXPRESSED IN BONE MARROW, SIGNAL = 1.1; EST_HUMAN HIT: AV715810.1, EVALUE 3.00e-93; NT HIT: gi11430039, EVALUE 2.00e-93; SWISSPROT HIT: P98133, EVALUE 2.40e+00
agagtttactctgggttttattgcagaacacaaattccctcaattgcttttttcttgcaggtgtctttttccagaattttttcttataaccagcctttctcctcacccaaaggccagaatgaagtcgaaaaaacctatagataacagctttcacagttgttctcttgcctttttgtgtactgacgtatattacagttctgactggcagcttcaggacacttggaagcaagggggccactctgttggggatcactgcagtatgcccacatgtcaggtttctgacagatgtgatcagc

SEQ ID NO: 22237 - DNA, 118 bp, Homo sapiens
  MAP TO AC005500.1; EXPRESSED IN PLACENTA, SIGNAL = 2.2; EXPRESSED IN LUNG, SIGNAL = 2.3; EXPRESSED IN FETAL LIVER, SIGNAL =   2; EXPRESSED IN HELA, SIGNAL = 2.4; EXPRESSED IN BRAIN, SIGNAL = 2.1; EXPRESSED IN BONE MARROW, SIGNAL = 2.1; EXPRESSED IN ADULT LIVER, SIGNAL = 1.9; EXPRESSED IN HEART, SIGNAL = 2.1; SWISSPROT HIT: P46627, EVALUE 6.20e-01; NT HIT: X69465.1, EVALUE 6.60e-02; EST_HUMAN HIT: AW836196.1, EVALUE 3.00e-60
acctcttcataaaggaggggctctgagaggctgtggccaggacgaaggtgcacagacagggccaggcagtgaggagaggcccactgttggcctggtctgcagggcttctgcccagcat

SEQ ID NO: 22238 - DNA, 124 bp, Homo sapiens
  MAP TO AC002299.1; EXPRESSED IN PLACENTA, SIGNAL = 5.3; EXPRESSED IN LUNG, SIGNAL = 5.1; EXPRESSED IN FETAL LIVER, SIGNAL = 5.6; EXPRESSED IN BRAIN, SIGNAL = 4.1; EXPRESSED IN ADULT LIVER, SIGNAL = 4.1; EXPRESSED IN HELA, SIGNAL =   6; EXPRESSED IN HEART, SIGNAL = 4.4; EXPRESSED IN BONE MARROW, SIGNAL = 6.3; SWISSPROT HIT: P05127, EVALUE 1.00e-17; NT HIT: M13975.1, EVALUE 6.00e-64; EST_HUMAN HIT: AA972674.1, EVALUE 9.00e-64
aatcggacaaagacagaagactgtcagtagagatttgggattgggatttgaccagcaggaatgacttcatgggatctttgtcctttgggatttctgaacttcagaaagccagtgttgatggctg

SEQ ID NO: 22239 - DNA, 381 bp, Homo sapiens
  MAP TO AC004522.1; EXPRESSED IN PLACENTA, SIGNAL =   5; EXPRESSED IN LUNG, SIGNAL = 4.7; EXPRESSED IN FETAL LIVER, SIGNAL = 5.3; EXPRESSED IN BONE MARROW, SIGNAL = 4.3; EXPRESSED IN ADULT LIVER, SIGNAL = 4.3; EXPRESSED IN HELA, SIGNAL = 4.8; EXPRESSED IN HEART, SIGNAL = 4.8; EXPRESSED IN BRAIN, SIGNAL = 4.9; SWISSPROT HIT: O43309, EVALUE 1.00e-35; NT HIT: AF155100.1, EVALUE 3.00e-19; EST_HUMAN HIT: T46864.1, EVALUE 4.00e-93
gctgcacaggagaaggatggtatcgtaatagtgaaggtggaagaggaagatgaggaagaccacatgtgggggcaggattccaccctacaggacacgcctcctccagacccagagatattccgccaacgcttcaggcgcttctgttaccagaacacttttgggccccgagaggctctcagtcggctgaaggaactttgtcatcagtggctgcggccagaaataaacaccaaggaacagatcctggagcttctggtgctagagcagtttctttccatcctgcccaaggagctccaggtctggctgcaggaataccgccccgatagtggagaggaggccgtgacccttctagaagacttggagcttgatttatcaggacaacag

SEQ ID NO: 22240 - DNA, 301 bp, Homo sapiens
  MAP TO AC003958.1; EXPRESSED IN PLACENTA, SIGNAL =   8; EXPRESSED IN LUNG, SIGNAL = 8.3; EXPRESSED IN HEART, SIGNAL = 7.7; EXPRESSED IN FETAL LIVER, SIGNAL = 7.8; EXPRESSED IN BRAIN, SIGNAL = 7.9; EXPRESSED IN BONE MARROW, SIGNAL = 8.1; EXPRESSED IN ADULT LIVER, SIGNAL = 6.8; EXPRESSED IN HELA, SIGNAL = 7.8; EST_HUMAN HIT: BE789667.1, EVALUE 2.70e-01; NT HIT: AF127937.1, EVALUE 1.90e-01; SWISSPROT HIT: O69873, EVALUE 1.80e+00
tgccatttccacctgggaggagccacgtgaccaggcgttctcagtagcctccactggtgtcagggggaacagagcattcggctgttgccggtctgcctttccaggactagcatccatggaagatggggtccatcgccaacctgcgaagatgtggaaggcaagcccctcattccagagccagaagctgtggccggcttccccttcccatctccaacctgggctaatgacagctggcagatgcttggccatgatgacaggtcttttcgaagatgtatttttaccctctggataaacagcagtt

SEQ ID NO: 22241 - DNA, 157 bp, Homo sapiens
  MAP TO AC004899.1; EXPRESSED IN PLACENTA, SIGNAL = 2.3; EXPRESSED IN LUNG, SIGNAL = 2.2; EXPRESSED IN HEART, SIGNAL = 1.9; EXPRESSED IN HELA, SIGNAL = 2.1; EXPRESSED IN FETAL LIVER, SIGNAL = 1.8; EXPRESSED IN BRAIN, SIGNAL = 1.8; EXPRESSED IN BONE MARROW, SIGNAL =   2; EXPRESSED IN ADULT LIVER, SIGNAL = 1.9; EST_HUMAN HIT: BE645620.1, EVALUE 5.30e-01
tcagtgctgggtcctgtatataaagaaactggaactcagaatagaagtgaacaacctggccaaagtcacataacccctgatttacaaagttggaatttaaacaaattatcgtatccactgatctgatgatttctccatcctttgagcttcgagccac

SEQ ID NO: 22242 - DNA, 188 bp, Homo sapiens
  MAP TO AC005610.1; EXPRESSED IN LUNG, SIGNAL =   3; EXPRESSED IN PLACENTA, SIGNAL = 3.2; EXPRESSED IN HEART, SIGNAL = 3.5; EXPRESSED IN FETAL LIVER, SIGNAL = 3.9; EXPRESSED IN BRAIN, SIGNAL = 3.5; EXPRESSED IN BONE MARROW, SIGNAL = 3.4; EXPRESSED IN HELA, SIGNAL = 3.4; EXPRESSED IN ADULT LIVER, SIGNAL =   3; EST_HUMAN HIT: AA985313.1, EVALUE 1.00e-60; NT HIT: U52351.1, EVALUE 1.00e-81; SWISSPROT HIT: P30999, EVALUE 8.00e-09
cagggagaacataccgatgagctccttatttctgacgtccaaggccatgttccgcagcgcagtggccaccgcgcacaccacacggtcattgtctattcggagcagctccacgaggatgggcaggcctttctcttttcggacagcggctcggatatatactgaccactgcaaaaacagggaaggcgaag

SEQ ID NO: 22243 - DNA, 112 bp, Homo sapiens
  MAP TO AC003090.1; EXPRESSED IN ADULT LIVER, SIGNAL =  13; EXPRESSED IN BONE MARROW, SIGNAL = 9.3; EXPRESSED IN PLACENTA, SIGNAL =  13; EXPRESSED IN LUNG, SIGNAL = 9.2; EXPRESSED IN HELA, SIGNAL = 9.3; EXPRESSED IN HEART, SIGNAL = 7.5; EXPRESSED IN BRAIN, SIGNAL = 8.2; EXPRESSED IN FETAL LIVER, SIGNAL = 7.9; NT HIT: AF091216.1, EVALUE 2.40e-01
ctcttgaacttcattcttccagccagagaacaaactgccccaaaaatgctgcagactggctgactcagcagtggtgctactgcctgctgataaagatgtgagtttaagacca

SEQ ID NO: 22244 - DNA, 533 bp, Homo sapiens
  MAP TO AC004797.1; EXPRESSED IN PLACENTA, SIGNAL = 7.6; EXPRESSED IN HEART, SIGNAL = 6.7; EXPRESSED IN BONE MARROW, SIGNAL = 7.5; EXPRESSED IN ADULT LIVER, SIGNAL = 5.7; EXPRESSED IN LUNG, SIGNAL = 7.9; EXPRESSED IN HELA, SIGNAL = 7.4; EXPRESSED IN FETAL LIVER, SIGNAL = 6.4; EXPRESSED IN BRAIN, SIGNAL =   7; EST_HUMAN HIT: M85719.1, EVALUE 0.00e+00; SWISSPROT HIT: Q9Z1D7, EVALUE 9.90e-02; NT HIT: gi11425359, EVALUE 0.00e+00
aatgtatctaaaggggaaaagggtgtctcttctcagtccaaagagactcctgttcttaagacaagcagtgaggaggaagaggaagagagtgaggaagaggccacagatgacagcaatgactatggagagaatgaaaagcagaagaaaaaggagaagatagtagagaaagtcagcgttacacaaaggagaaccaggagagctgcctctgttgccgcagctaccacttcccctactcccagaactacaagaggtcgtaggaagagtgtagagccacctaagcgtaagaagcgggccacaaaggagcccaaagcaccagtccagaaagctaagtgtgaagagaaagagactctgacctgtgagaagtgccccagggtatttaacactcgctggtacctggagaagcacatgaacgttactcataggcgcatgcagatttgtgataaatgtggcaagaagtttgtcctggaaagtgagctgtcccttcaccagcaaacagactgtgaaaaaaacattcaggtaggtttcatcaccga

SEQ ID NO: 22245 - DNA, 83 bp, Homo sapiens
  MAP TO AC004827.1; EXPRESSED IN BONE MARROW, SIGNAL =   3; EXPRESSED IN PLACENTA, SIGNAL = 2.9; EXPRESSED IN LUNG, SIGNAL = 3.2; EXPRESSED IN HELA, SIGNAL = 2.8; EXPRESSED IN FETAL LIVER, SIGNAL = 3.1; EXPRESSED IN BRAIN, SIGNAL = 2.9; EXPRESSED IN ADULT LIVER, SIGNAL = 2.7; EXPRESSED IN HEART, SIGNAL = 2.5; EST_HUMAN HIT: BE814357.1, EVALUE 3.90e+00
gttgaagtagagagtactcaacagtttagggtgggtggcatcaggaccttgggcttccatggggatagtagccgtgaaaacag

SEQ ID NO: 22246 - DNA, 350 bp, Homo sapiens
  MAP TO AC004906.1; EXPRESSED IN BRAIN, SIGNAL = 3.1; EXPRESSED IN BONE MARROW, SIGNAL = 3.1; EXPRESSED IN ADULT LIVER, SIGNAL = 2.9; EXPRESSED IN LUNG, SIGNAL = 3.1; EXPRESSED IN HELA, SIGNAL = 3.4; EXPRESSED IN HEART, SIGNAL = 3.5; EXPRESSED IN FETAL LIVER, SIGNAL = 3.2; EXPRESSED IN PLACENTA, SIGNAL = 3.5; SWISSPROT HIT: Q01174, EVALUE 5.50e-02
ctcgagttggaggtctcggctcctcatgaccgccatgttcttctcctcactgagctgtgcgtagcgcatggctaagttgtagttgtcgtccttcaccttgaccagctcgtcattgtagctgtcccgctcttccttcatcttgtagtaccgctcctggaaggttagcagctccacgcgcgtcagcgtcatctgcttcttctcatcctccagctgccgcaacctggccagcagctcgcagcgttgcaggtccttggccttcatctgctgctgcagcttgatgacctcgttcatcaggaagtgcgtgaggccctcgtggccttcctccactgtggagagggggcacccagtca

SEQ ID NO: 22247 - DNA, 164 bp, Homo sapiens
  MAP TO AC005664.1; EXPRESSED IN LUNG, SIGNAL = 8.7; EXPRESSED IN HELA, SIGNAL =  11; EXPRESSED IN BRAIN, SIGNAL =  10; EXPRESSED IN BONE MARROW, SIGNAL = 8.7; EXPRESSED IN ADULT LIVER, SIGNAL =  12; EXPRESSED IN PLACENTA, SIGNAL =  12; EXPRESSED IN HEART, SIGNAL = 7.9; EXPRESSED IN FETAL LIVER, SIGNAL =  13; NT HIT: gi11526341, EVALUE 9.00e-30; EST_HUMAN HIT: BE734190.1, EVALUE 2.00e-87; SWISSPROT HIT: P33450, EVALUE 3.00e+00
ggtttccctgcaggagccagagcctgcagggtgggtgtcgggacatgctgatcttccctcaagacaggtgagtggcctgggtttagcttggggacatcctctcccacataggacagcagagtgttctggtgggcctggcgggtgggggtgacagggatggactg

SEQ ID NO: 22248 - DNA, 281 bp, Homo sapiens
  MAP TO AB019441.1; EXPRESSED IN ADULT LIVER, SIGNAL = 7.6; EXPRESSED IN PLACENTA, SIGNAL = 4.5; EXPRESSED IN LUNG, SIGNAL = 3.9; EXPRESSED IN HELA, SIGNAL = 5.7; EXPRESSED IN HEART, SIGNAL = 3.7; EXPRESSED IN BRAIN, SIGNAL = 4.8; EXPRESSED IN BONE MARROW, SIGNAL = 5.9; EXPRESSED IN FETAL LIVER, SIGNAL = 6.3; EST_HUMAN HIT: AW405472.1, EVALUE 0.00e+00; NT HIT: Z14240.1, EVALUE 0.00e+00; SWISSPROT HIT: P06331, EVALUE 2.00e-30
ggactggtgaagccttcggagaccctgtccctcacctgcactgtctctggtggctccatcagtagttactactggagctggatccggcagcccgccgggaagggactggagtggattgggcgtatctataccagtgggagcaccaactacaacccctccctcaagagtcgagtcaccatgtcagtagacacgtccaagaaccagttctccctgaagctgagctctgtgaccgccgcggacacggccgtgtattactgtgcgagagacacagtgaggggagg

SEQ ID NO: 22249 - DNA, 244 bp, Homo sapiens
  MAP TO AC005841.3; EXPRESSED IN ADULT LIVER, SIGNAL = 5.5; EXPRESSED IN LUNG, SIGNAL =   5; EXPRESSED IN PLACENTA, SIGNAL = 4.7; EXPRESSED IN HELA, SIGNAL = 4.3; EXPRESSED IN HEART, SIGNAL = 4.4; EXPRESSED IN FETAL LIVER, SIGNAL = 5.7; EXPRESSED IN BRAIN, SIGNAL = 4.8; EXPRESSED IN BONE MARROW, SIGNAL = 4.7; EST_HUMAN HIT: AW013867.1, EVALUE 2.00e-08; NT HIT: AJ278170.1, EVALUE 1.00e-39; SWISSPROT HIT: P54258, EVALUE 9.30e-02
atgagcaccaagcaggaggccaggagagatgagggagaagccaggacgagggggcaggaggcacagcttcgagaccgagcccacctgagccagcagcgccggctcaaacaggccacccagttcctgcacaaggactcggccgacctgctcccgctggacagcctcaagaggctcggcacctccaaggacttggtgaggcatcacccctcccctgccagcgtcccctggccttttccttccactt

SEQ ID NO: 22250 - DNA, 156 bp, Homo sapiens
  MAP TO AC004824.1; EXPRESSED IN PLACENTA, SIGNAL =  12; EXPRESSED IN LUNG, SIGNAL =  12; EXPRESSED IN HELA, SIGNAL =  11; EXPRESSED IN FETAL LIVER, SIGNAL =  13; EXPRESSED IN HEART, SIGNAL =  10; EXPRESSED IN BRAIN, SIGNAL =  12; EXPRESSED IN BONE MARROW, SIGNAL =   9; EXPRESSED IN ADULT LIVER, SIGNAL =  12; SWISSPROT HIT: O88807, EVALUE 3.00e-07; NT HIT: AF120023.1, EVALUE 1.40e+00
gggacacagagtaggagatgaggcctgagaattcggcagatgggaatgctatagcttcaacgtagaaagtctccttcaagtggttcccgaggagggccaaggtataggcgtgctggtcgggccccagcaccaactcaaaggtactggagttgtctt

SEQ ID NO: 22251 - DNA, 206 bp, Homo sapiens
  MAP TO AC004477.1; EXPRESSED IN PLACENTA, SIGNAL =  37; EXPRESSED IN BONE MARROW, SIGNAL =  38; EXPRESSED IN ADULT LIVER, SIGNAL =  41; EXPRESSED IN LUNG, SIGNAL =  47; EXPRESSED IN HELA, SIGNAL =  38; EXPRESSED IN HEART, SIGNAL =  33; EXPRESSED IN FETAL LIVER, SIGNAL =  38; EXPRESSED IN BRAIN, SIGNAL =  41; SWISSPROT HIT: P34803, EVALUE 2.50e-01; NT HIT: AF110322.1, EVALUE 1.00e-112; EST_HUMAN HIT: N46046.1, EVALUE 1.00e-112
cttgagatcttcttagcccagagagcagtggagttgagtgaggaggcagatgtcctgtctgtgagccagttccagctggctccagccatcctgcagggccagaccaaagagaagatggttaccatggtgtcagtgctggaggatctgattggcaagcttaccagtcttcagctgcaacacctgtttatgatcctggcctcaccaag

SEQ ID NO: 22252 - DNA, 274 bp, Homo sapiens
  MAP TO AC006213.1; EXPRESSED IN BONE MARROW, SIGNAL = 1.7; EXPRESSED IN PLACENTA, SIGNAL = 1.5; EXPRESSED IN LUNG, SIGNAL = 1.6; EXPRESSED IN HELA, SIGNAL = 1.7; EXPRESSED IN FETAL LIVER, SIGNAL = 1.6; EXPRESSED IN ADULT LIVER, SIGNAL = 1.5; EXPRESSED IN HEART, SIGNAL = 1.4; EXPRESSED IN BRAIN, SIGNAL = 1.8; EST_HUMAN HIT: AA016131.1, EVALUE 2.00e-57; SWISSPROT HIT: Q02566, EVALUE 2.70e-02; NT HIT: X87344.1, EVALUE 1.00e-33
tctgaacagagctgagatggctgaaatgatggaaatagaatttgggatatggataggaatgaagatcattgagatgcaggagtacattgaaacccaatccaaagaagctaagaatcacaataaaatgatacaggagctgacagacaaaatagccactacagaaaagaatgtggccaacctgatagagctgaaaaatatactacaagaatttcatagtgcaatctcaagtattaatagcagaatagaccaagctgaagaaaaaaatcttggagct

SEQ ID NO: 22253 - DNA, 130 bp, Homo sapiens
  MAP TO AC004106.1; EXPRESSED IN LUNG, SIGNAL = 1.4; EXPRESSED IN PLACENTA, SIGNAL = 2.6; EXPRESSED IN HEART, SIGNAL = 1.4; EXPRESSED IN FETAL LIVER, SIGNAL = 4.5; EXPRESSED IN BRAIN, SIGNAL = 1.4; EXPRESSED IN BONE MARROW, SIGNAL = 1.4; EXPRESSED IN ADULT LIVER, SIGNAL = 1.5; EST_HUMAN HIT: AA747216.1, EVALUE 1.10e-01; NT HIT: AF139940.1, EVALUE 2.90e-01
aagtaatgtggtacaaacagtgtgcagttttctccaacgcatttggcaaggacttggtatccttgtggacaggatggacaggcatgctctgcatgatccctgttagatggctttgttcttttttcccatt

SEQ ID NO: 22254 - DNA, 182 bp, Homo sapiens
  MAP TO AC002542.1; EXPRESSED IN BONE MARROW, SIGNAL = 1.4; EXPRESSED IN PLACENTA, SIGNAL = 1.3; EXPRESSED IN LUNG, SIGNAL = 1.2; EXPRESSED IN HEART, SIGNAL = 1.5; EXPRESSED IN FETAL LIVER, SIGNAL = 1.5; EXPRESSED IN ADULT LIVER, SIGNAL = 1.5; EXPRESSED IN BRAIN, SIGNAL = 1.4; EST_HUMAN HIT: AV734680.1, EVALUE 2.00e-75; NT HIT: AJ289880.1, EVALUE 1.00e-16; SWISSPROT HIT: Q04870, EVALUE 7.70e-01
ctggtgattccttctcttccttactaatgtcctttgtggcatttttttcccagaatagggcactttcgtctacattgaaaacctgttcaggtaggtatcctttctcttcaattattttcttaatggcacctgggaactcatctgctgcctcttggttggcagaagctgcatctcctgttatc

SEQ ID NO: 22255 - DNA, 169 bp, Homo sapiens
  MAP TO AC004414.1; EXPRESSED IN HEART, SIGNAL = 2.2; EXPRESSED IN BRAIN, SIGNAL = 2.6; EXPRESSED IN BONE MARROW, SIGNAL = 1.8; EXPRESSED IN PLACENTA, SIGNAL = 2.1; EXPRESSED IN LUNG, SIGNAL = 2.2; EXPRESSED IN HELA, SIGNAL = 2.1; EXPRESSED IN FETAL LIVER, SIGNAL =   2; EXPRESSED IN ADULT LIVER, SIGNAL =   2; NT HIT: AB014533.1, EVALUE 1.00e-90; SWISSPROT HIT: P52551, EVALUE 2.00e-01; EST_HUMAN HIT: AI188864.1, EVALUE 2.30e+00
agttctcagagccattcttctcccacaaggggctcttctggggacccaggtctggggttccagcgaggtcctggtcactgcagtcttcctggtctgtggcccacttgtctttgtatttcatgctgtcctgctgcgagtccagagagacgatgtctgagggggaactcat

SEQ ID NO: 22256 - DNA, 109 bp, Homo sapiens
  MAP TO AC004491.1; EXPRESSED IN PLACENTA, SIGNAL = 3.5; EXPRESSED IN LUNG, SIGNAL = 4.1; EXPRESSED IN HELA, SIGNAL =   4; EXPRESSED IN HEART, SIGNAL = 3.8; EXPRESSED IN BONE MARROW, SIGNAL = 3.9; EXPRESSED IN FETAL LIVER, SIGNAL = 3.7; EXPRESSED IN BRAIN, SIGNAL =   4; EXPRESSED IN ADULT LIVER, SIGNAL =   4; NT HIT: L36189.1, EVALUE 9.30e-01; EST_HUMAN HIT: AW137363.1, EVALUE 1.40e+00; SWISSPROT HIT: P49705, EVALUE 4.20e+00
ccaagactatgaacaactgaacaaccacagccaggactcaggaacccccggcctggtcttggctgaagctgagggctgcaggaagcaaggaagtgtggcacttccctta

SEQ ID NO: 22257 - DNA, 175 bp, Homo sapiens
  MAP TO AC004112.1; EXPRESSED IN PLACENTA, SIGNAL = 3.2; EXPRESSED IN LUNG, SIGNAL = 3.7; EXPRESSED IN FETAL LIVER, SIGNAL =   4; EXPRESSED IN BONE MARROW, SIGNAL = 3.3; EXPRESSED IN ADULT LIVER, SIGNAL =   4; EXPRESSED IN HELA, SIGNAL = 3.3; EXPRESSED IN HEART, SIGNAL = 3.6; EXPRESSED IN BRAIN, SIGNAL = 3.4; NT HIT: gi11496268, EVALUE 3.00e-94; EST_HUMAN HIT: BE645373.1, EVALUE 5.00e-94; SWISSPROT HIT: Q99612, EVALUE 1.50e-01
tccagttgatcccacgtctttctatcggggagcagcgaagtgtgtttagtttcttccatgtgagttcttaagtctgctttggatttgaacttcacatggcagccataacatctgcattggtgaacttgcctccgaataaaattgaccagtttcacttgctgatagaaatttaatc

SEQ ID NO: 22258 - DNA, 189 bp, Homo sapiens
  MAP TO AC005746.1; EXPRESSED IN PLACENTA, SIGNAL = 2.1; EXPRESSED IN LUNG, SIGNAL = 2.2; EXPRESSED IN FETAL LIVER, SIGNAL = 1.6; EXPRESSED IN BRAIN, SIGNAL = 1.3; EXPRESSED IN ADULT LIVER, SIGNAL = 1.8; EXPRESSED IN HELA, SIGNAL = 1.7; EXPRESSED IN HEART, SIGNAL = 1.6; EXPRESSED IN BONE MARROW, SIGNAL = 1.8; NT HIT: Z46941.1, EVALUE 4.40e-01; SWISSPROT HIT: P06727, EVALUE 9.00e-04; EST_HUMAN HIT: H95909.1, EVALUE 1.10e-02
gtgctggccagcctgccgggctacatgtcttccagctctcatgagatagtctccttcaaattatctgacttctgggccaagtgcatgtgcacctctgtagtgaagagtgccagctccttctgcaggtcagtcaaccattttatcaaggctaaaggcactgacaaggctgcagtgagccactgctcactg

SEQ ID NO: 22259 - DNA, 111 bp, Homo sapiens
  MAP TO AC004592.1; EXPRESSED IN PLACENTA, SIGNAL = 1.5; EXPRESSED IN BRAIN, SIGNAL = 2.1; EXPRESSED IN ADULT LIVER, SIGNAL = 1.7; EXPRESSED IN LUNG, SIGNAL = 2.5; EXPRESSED IN HELA, SIGNAL = 1.7; EXPRESSED IN HEART, SIGNAL = 1.6; EXPRESSED IN FETAL LIVER, SIGNAL = 1.4; EXPRESSED IN BONE MARROW, SIGNAL = 1.6; SWISSPROT HIT: P25304, EVALUE 9.30e+00; NT HIT: gi4759163, EVALUE 3.00e-56; EST_HUMAN HIT: BF510579.1, EVALUE 4.00e-56
tggccatctgagccgcagaccatggctgactgtgccacgggacagggcttgcacttgaccaaattcgaaggtccaacccagtgtttctgggccacgttccccttcttttgc

SEQ ID NO: 22260 - DNA, 151 bp, Homo sapiens
  MAP TO AC004914.1; EXPRESSED IN PLACENTA, SIGNAL = 2.6; EXPRESSED IN LUNG, SIGNAL = 2.7; EXPRESSED IN HELA, SIGNAL =   3; EXPRESSED IN FETAL LIVER, SIGNAL = 2.9; EXPRESSED IN BRAIN, SIGNAL = 2.6; EXPRESSED IN BONE MARROW, SIGNAL = 2.7; EXPRESSED IN ADULT LIVER, SIGNAL = 2.7; EXPRESSED IN HEART, SIGNAL = 2.8; SWISSPROT HIT: P19725, EVALUE 2.30e+00; EST_HUMAN HIT: BF576479.1, EVALUE 5.10e-01; NT HIT: AL161594.2, EVALUE 3.40e-01
ctctcctctgccaagtcaattcttccctgcatttcaagacccagcccaagaccttctgcttctcgaagtagagtctgactggctggcgatccagaaaggcctagaggccaggccggaagaggagagaaaagagtcaggcatgaagctaccg

SEQ ID NO: 22261 - DNA, 170 bp, Homo sapiens
  MAP TO AC005479.2; EXPRESSED IN ADULT LIVER, SIGNAL = 1.5; EXPRESSED IN PLACENTA, SIGNAL = 3.5; EXPRESSED IN LUNG, SIGNAL = 1.7; EXPRESSED IN FETAL LIVER, SIGNAL = 1.5; EXPRESSED IN HEART, SIGNAL = 1.4; EXPRESSED IN BRAIN, SIGNAL = 1.3; EXPRESSED IN BONE MARROW, SIGNAL = 1.4; EST_HUMAN HIT: AV713390.1, EVALUE 5.00e-91; NT HIT: gi11434964, EVALUE 3.00e-91; SWISSPROT HIT: Q15668, EVALUE 1.00e-28
ttcagtctaaaagcagcaaggccgtggtgcatggcatcctgatgggcgtcccagttccctttcccattcctgagcctgatggttgtaagagtggaattaactgccctatccaaaaagacaagacctatagctacctgaataaactaccagtgaaaagcgaatatccctct

SEQ ID NO: 22262 - DNA, 423 bp, Homo sapiens
  MAP TO AC005840.1; EXPRESSED IN BONE MARROW, SIGNAL = 1.9; EXPRESSED IN PLACENTA, SIGNAL = 1.9; EXPRESSED IN LUNG, SIGNAL =   2; EXPRESSED IN HELA, SIGNAL = 2.1; EXPRESSED IN HEART, SIGNAL = 5.7; EXPRESSED IN FETAL LIVER, SIGNAL = 1.8; EXPRESSED IN ADULT LIVER, SIGNAL = 1.8; EXPRESSED IN BRAIN, SIGNAL = 1.9; SWISSPROT HIT: P47825, EVALUE 6.40e-01; NT HIT: gi4758931, EVALUE 0.00e+00; EST_HUMAN HIT: AW361877.1, EVALUE 0.00e+00
tgtcttcttaaactgagccttcttgtaggcatgatggagttccgtgtgtgcctacagagaatacaggaggatggaagcagctttacttgctttgttggaggcataggcatcgcctgcactgatggtcataattttctggatgcccccggtattcggaaggcgctgtgcattctggtaactgttttggattacgttgttcaacatgtaacaggcagaggctgtagtttcaatgagaaggtcagtactcgggactgtatcaggaatgatggagaccaaactggggagagtttctttggcaattttattctgcagagaaagattctgggacagattcctcagcagcaagttggctgtctttttcacacttgggtcactgacatgcaccatctttcgggtgtgctgcaggccattttccttctggac

SEQ ID NO: 22263 - DNA, 188 bp, Homo sapiens
  MAP TO AC004695.1; EXPRESSED IN LUNG, SIGNAL = 5.7; EXPRESSED IN BRAIN, SIGNAL = 1.6; EXPRESSED IN BONE MARROW, SIGNAL = 1.8; EXPRESSED IN PLACENTA, SIGNAL = 1.6; EXPRESSED IN HEART, SIGNAL = 1.3; EXPRESSED IN FETAL LIVER, SIGNAL = 1.7; EXPRESSED IN ADULT LIVER, SIGNAL = 1.6; NT HIT: S65019.1, EVALUE 4.40e-01
gcactgtgtgagtcacatggtcatagtcagtacaaggaagccaccagcattatagtcactatcatcaccacaaccacccccatcaccatcatcaaagtccatatctgcaccatcatcactatgactgtcatctccatcaccaccatcacaatgatcattaccaccgtcatatctcggtatatgacatc

SEQ ID NO: 22264 - DNA, 253 bp, Homo sapiens
  MAP TO AC002059.3; EXPRESSED IN LUNG, SIGNAL = 1.9; EXPRESSED IN HELA, SIGNAL =   2; EXPRESSED IN HEART, SIGNAL = 1.9; EXPRESSED IN FETAL LIVER, SIGNAL = 1.9; EXPRESSED IN BRAIN, SIGNAL = 2.6; EXPRESSED IN BONE MARROW, SIGNAL = 2.2; EXPRESSED IN PLACENTA, SIGNAL = 1.7; EXPRESSED IN ADULT LIVER, SIGNAL =   2; EST_HUMAN HIT: Z21836.1, EVALUE 1.00e-95; NT HIT: U36261.1, EVALUE 0.00e+00; SWISSPROT HIT: Q10567, EVALUE 4.00e-37
cccctccacaaaggcactgggaggcttatggtagacggaagccagcgtgccgatgtagcagataagctcgtctaacagtgtgggctcgatgaggtccgtctcttcagagatgagtggcttctcagccaacaccacctccttggctgccaccgggtccgtggacagcaggcgccagtagatgtagccacggtcccgcaggtctgggttatctgagtccttgtgggggtgaggagaagcccatgaaactcagagt

SEQ ID NO: 22265 - DNA, 371 bp, Homo sapiens
  MAP TO AC006256.1; EXPRESSED IN LUNG, SIGNAL = 1.8; EXPRESSED IN HEART, SIGNAL = 1.6; EXPRESSED IN FETAL LIVER, SIGNAL = 1.6; EXPRESSED IN BRAIN, SIGNAL =   2; EXPRESSED IN BONE MARROW, SIGNAL = 1.6; EXPRESSED IN HELA, SIGNAL = 1.9; EXPRESSED IN PLACENTA, SIGNAL = 1.5; EXPRESSED IN ADULT LIVER, SIGNAL = 2.1; NT HIT: D14547.1, EVALUE 8.00e-26; EST_HUMAN HIT: AA479120.1, EVALUE 1.00e-06
ctcaggtctaagaacagaacctcaggaggtaccaacagttaagagtactagtagcccttgaacaacgtgggtttaaacttcacgggtccacttatatgcatttttttctgcctcccctgagagaggaagaccaatcccttctcttcctcctcctcctcagcctactcaacatgaaggtgctgagaaacaagatcttcatgataatccaattccacttaatgggtagtaaatatattttctttttcttatgattttcttaataacattttcttttctttagtttattgaacgaatacagtatagaatacatataacatacaaaatgttatcaccaattgttatttattagtaaggcttctggtcaacagtag

SEQ ID NO: 22266 - DNA, 119 bp, Homo sapiens
  MAP TO AC003683.1; EXPRESSED IN PLACENTA, SIGNAL = 5.5; EXPRESSED IN LUNG, SIGNAL = 5.7; EXPRESSED IN HEART, SIGNAL = 5.7; EXPRESSED IN BRAIN, SIGNAL = 5.7; EXPRESSED IN FETAL LIVER, SIGNAL = 5.8; EXPRESSED IN BONE MARROW, SIGNAL = 5.2; EXPRESSED IN ADULT LIVER, SIGNAL = 5.3; EXPRESSED IN HELA, SIGNAL = 5.9; EST_HUMAN HIT: AW883141.1, EVALUE 7.00e-06; NT HIT: AF284444.1, EVALUE 1.00e+00
agtttctgtctctcccctcttggctttatcgtaataagagagggggcaaagcttccagtagcccaaatcactgtcaccagctttacacgatggcattcaatgacaatatttgcacgacc

SEQ ID NO: 22267 - DNA, 105 bp, Homo sapiens
  MAP TO AC005667.1; EXPRESSED IN BONE MARROW, SIGNAL = 2.4; EXPRESSED IN PLACENTA, SIGNAL = 2.5; EXPRESSED IN LUNG, SIGNAL = 2.8; EXPRESSED IN HELA, SIGNAL = 2.4; EXPRESSED IN HEART, SIGNAL = 2.1; EXPRESSED IN FETAL LIVER, SIGNAL = 2.5; EXPRESSED IN BRAIN, SIGNAL = 2.7; EXPRESSED IN ADULT LIVER, SIGNAL = 2.5; EST_HUMAN HIT: AA618086.1, EVALUE 1.30e+00; NT HIT: AF026198.1, EVALUE 8.90e-01
caagcaaaaggctactccctagtttcagacaccatctggatccatttcccccaaggcctagtatacagtgtgacccagtacgatggcaaatgtaaagcctgctga

SEQ ID NO: 22268 - DNA, 95 bp, Homo sapiens
  MAP TO AC000003.1; EXPRESSED IN PLACENTA, SIGNAL = 5.9; EXPRESSED IN HEART, SIGNAL = 4.2; EXPRESSED IN BONE MARROW, SIGNAL = 7.1; EXPRESSED IN ADULT LIVER, SIGNAL = 7.4; EXPRESSED IN LUNG, SIGNAL =   5; EXPRESSED IN HELA, SIGNAL = 5.9; EXPRESSED IN FETAL LIVER, SIGNAL =  12; EXPRESSED IN BRAIN, SIGNAL = 6.9; EST_HUMAN HIT: BF194707.1, EVALUE 1.00e-46; SWISSPROT HIT: O00548, EVALUE 9.50e+00
tcatctcctgggtgggtaccaccggtgtgcacagataaaagtgtgctcccgggagatgcaggtcacactgtacgaggaggagtgagtcgtgtcct

SEQ ID NO: 22269 - DNA, 185 bp, Homo sapiens
  MAP TO AC004668.1; EXPRESSED IN PLACENTA, SIGNAL = 1.5; EXPRESSED IN HEART, SIGNAL = 1.4; EXPRESSED IN BONE MARROW, SIGNAL = 1.5; EXPRESSED IN ADULT LIVER, SIGNAL =   2; EXPRESSED IN LUNG, SIGNAL = 1.3; EXPRESSED IN HELA, SIGNAL =   2; EXPRESSED IN FETAL LIVER, SIGNAL = 1.9; EXPRESSED IN BRAIN, SIGNAL = 1.3; NT HIT: gi11421026, EVALUE 1.00e-100; SWISSPROT HIT: O75439, EVALUE 2.00e-28; EST_HUMAN HIT: AU118182.1, EVALUE 1.00e-100
tggtcccaaaattgtccgtccaagtgcagtattttgataagctgtggcatgaagataatcaaaaacaacttcttgtaaattggtttcaacttcctgcatctctctaaggattactccacgctcacgttcaatctctgcttctcccaatgtgctgttttgtattatatcagcaagaatttctacag

SEQ ID NO: 22270 - DNA, 426 bp, Homo sapiens
  MAP TO AC000378.1; EXPRESSED IN LUNG, SIGNAL = 4.2; EXPRESSED IN FETAL LIVER, SIGNAL = 3.3; EXPRESSED IN BRAIN, SIGNAL = 4.1; EXPRESSED IN BONE MARROW, SIGNAL = 3.7; EXPRESSED IN PLACENTA, SIGNAL = 3.2; EXPRESSED IN HELA, SIGNAL = 3.4; EXPRESSED IN HEART, SIGNAL = 2.7; EXPRESSED IN ADULT LIVER, SIGNAL = 3.3; NT HIT: AF229357.1, EVALUE 1.70e-02; EST_HUMAN HIT: AW848041.1, EVALUE 2.00e-52; SWISSPROT HIT: Q09782, EVALUE 2.90e-01
gatgtagataactcgagctttgctgattgtgagaaaggtatgagaaatggccctgatggaattttcttcttgtactttaaggggaagaaagcagcatcatcccactattccaggggaggtgctaaatacgagggtgaggctgtcaagcggtccctggtggagtcctacactcacccaaacagcaacgagacagagcggagggagaacatcgataccgtcatgaactgcttcagcacagaagactttgactttgtgactctgtactacagagagccagataacgtgggacatcgattcgggccagaggcagagaagaggaagttgatgattcagcaaatcggcaggaccatcgtgtatctggtgggagccactgagaagcacagcctgcagagcacctcagcgtcatcatcacatcagaccatgggg

SEQ ID NO: 22271 - DNA, 165 bp, Homo sapiens
  MAP TO AC004837.1; EXPRESSED IN LUNG, SIGNAL =   4; EXPRESSED IN FETAL LIVER, SIGNAL = 3.9; EXPRESSED IN BONE MARROW, SIGNAL = 3.6; EXPRESSED IN PLACENTA, SIGNAL = 3.9; EXPRESSED IN HELA, SIGNAL = 3.9; EXPRESSED IN HEART, SIGNAL = 3.4; EXPRESSED IN BRAIN, SIGNAL = 3.6; EXPRESSED IN ADULT LIVER, SIGNAL = 3.6; SWISSPROT HIT: P11233, EVALUE 5.00e-25; NT HIT: gi11420697, EVALUE 3.00e-88; EST_HUMAN HIT: AI934090.1, EVALUE 4.00e-88
ttagctcgtgttttagcagatgtttccacgtagttaacattccactgctcagctctgttttttgcctcttctacagaaacctgtcttttatcttctaaatctgatttgttaccaaccagtagaaatggaacattctcatcttcttttactcttaaaatctgctcc

SEQ ID NO: 22272 - DNA, 132 bp, Homo sapiens
  MAP TO AC003685.1; EXPRESSED IN LUNG, SIGNAL = 1.9; EXPRESSED IN HEART, SIGNAL =   2; EXPRESSED IN FETAL LIVER, SIGNAL = 1.9; EXPRESSED IN BRAIN, SIGNAL =   2; EXPRESSED IN BONE MARROW, SIGNAL = 1.8; EXPRESSED IN PLACENTA, SIGNAL = 1.8; EXPRESSED IN ADULT LIVER, SIGNAL = 1.9; SWISSPROT HIT: P24821, EVALUE 5.30e+00; EST_HUMAN HIT: AV720408.1, EVALUE 4.40e-01
ctgcagagcccagtcaagcaggctggatatgctggaagagggagctctggggctgacggggatgctcctccaagcccagctctgggcacttctctaggaggcccttctgctcctctttctaggaacaaggaa

SEQ ID NO: 22273 - DNA, 217 bp, Homo sapiens
  MAP TO AC005871.2; EXPRESSED IN PLACENTA, SIGNAL =   2; EXPRESSED IN LUNG, SIGNAL = 2.4; EXPRESSED IN FETAL LIVER, SIGNAL = 1.9; EXPRESSED IN BRAIN, SIGNAL = 1.3; EXPRESSED IN BONE MARROW, SIGNAL = 1.9; EXPRESSED IN ADULT LIVER, SIGNAL = 1.9; EXPRESSED IN HELA, SIGNAL = 1.9; EXPRESSED IN HEART, SIGNAL = 1.8; SWISSPROT HIT: P08089, EVALUE 8.50e-02
caggttaaagccatcaccaccagatgggcaaatgggctagctcaggttaaaaccctcaccaccagatgggcaaacgggctagctcaggttaaaaccctcaccaccagacaggcaaacgggttagctcaggttaaaaccctcaccaccagacaggcaaagaggctagctcaggttaaaaccctcaccactagatgggcaaacgggctagctcaggtta

SEQ ID NO: 22274 - DNA, 171 bp, Homo sapiens
  MAP TO AC006239.5; EXPRESSED IN BONE MARROW, SIGNAL = 1.7; EXPRESSED IN PLACENTA, SIGNAL = 2.1; EXPRESSED IN LUNG, SIGNAL =   2; EXPRESSED IN HELA, SIGNAL = 2.1; EXPRESSED IN HEART, SIGNAL = 1.9; EXPRESSED IN FETAL LIVER, SIGNAL = 2.1; EXPRESSED IN ADULT LIVER, SIGNAL = 1.9; EXPRESSED IN BRAIN, SIGNAL = 1.9; EST_HUMAN HIT: BF570500.1, EVALUE 2.30e+00; SWISSPROT HIT: Q14324, EVALUE 5.10e+00; NT HIT: U63711.1, EVALUE 2.00e-03
cgagaaagggctggtaacttcagttttgcaattactgatttagcacaagtgttaagacatgaggatgatatggagtggttaggagcagggggccaaaggcctgaaggggtttacttcttggttctggtcttcacaaactgtgtggccgtggaaagttactaaatctctgta

SEQ ID NO: 22275 - DNA, 184 bp, Homo sapiens
  MAP TO AC005878.2; EXPRESSED IN PLACENTA, SIGNAL = 3.4; EXPRESSED IN HEART, SIGNAL = 3.6; EXPRESSED IN FETAL LIVER, SIGNAL =   3; EXPRESSED IN LUNG, SIGNAL = 3.8; EXPRESSED IN HELA, SIGNAL = 2.8; EXPRESSED IN BRAIN, SIGNAL = 3.6; EXPRESSED IN BONE MARROW, SIGNAL = 2.9; EXPRESSED IN ADULT LIVER, SIGNAL = 3.1; EST_HUMAN HIT: BE350127.1, EVALUE 2.00e-31; SWISSPROT HIT: P95294, EVALUE 5.10e+00; NT HIT: U93163.1, EVALUE 2.00e-28
aaatactttttttaaaaaacttaactgtaaaacagcctcaggtagcttcttcaggtgatattctagaagaaagcattgttatcataggagatgacagttccatgtgtgttattgccccagaagactttccagtgggacgagatgtaaaggtagaaggcagtgatattgatgatcctgacccctg

SEQ ID NO: 22276 - DNA, 128 bp, Homo sapiens
  MAP TO AC005753.1; EXPRESSED IN PLACENTA, SIGNAL = 1.4; EXPRESSED IN HEART, SIGNAL = 1.5; EXPRESSED IN FETAL LIVER, SIGNAL = 1.5; EXPRESSED IN BONE MARROW, SIGNAL = 1.4; EXPRESSED IN ADULT LIVER, SIGNAL = 1.6; EXPRESSED IN LUNG, SIGNAL = 1.8; EXPRESSED IN BRAIN, SIGNAL = 0.82; SWISSPROT HIT: Q53634, EVALUE 5.40e+00; NT HIT: AJ251059.1, EVALUE 4.40e+00; EST_HUMAN HIT: BF242055.1, EVALUE 4.20e-01
gcctcattggccagacatctggtttctctgggcatccccagggaatggaagtcagacagtattacttcagtagctctgatgccatctacctcaggctggcttgtactcatggggctcaggatgctccc

SEQ ID NO: 22277 - DNA, 125 bp, Homo sapiens
  MAP TO AC004506.1; EXPRESSED IN PLACENTA, SIGNAL =   3; EXPRESSED IN BRAIN, SIGNAL = 3.4; EXPRESSED IN ADULT LIVER, SIGNAL =   3; EXPRESSED IN LUNG, SIGNAL = 4.6; EXPRESSED IN HELA, SIGNAL = 3.2; EXPRESSED IN HEART, SIGNAL =   3; EXPRESSED IN FETAL LIVER, SIGNAL = 2.9; EXPRESSED IN BONE MARROW, SIGNAL = 3.2; EST_HUMAN HIT: AI935265.1, EVALUE 7.00e-09; NT HIT: U01317.1, EVALUE 2.00e-14
gacacctgtgaggcgaggcagaaagggccttctaggggatccagcaagcccgcagggattttcctgctgcttcctgtacccctgtatttctctcagttctctaaactgacccagctccaagtaag

SEQ ID NO: 22278 - DNA, 172 bp, Homo sapiens
  MAP TO AC003030.1; EXPRESSED IN PLACENTA, SIGNAL = 1.7; EXPRESSED IN LUNG, SIGNAL = 1.6; EXPRESSED IN HELA, SIGNAL = 1.7; EXPRESSED IN FETAL LIVER, SIGNAL = 1.7; EXPRESSED IN BRAIN, SIGNAL = 1.2; EXPRESSED IN BONE MARROW, SIGNAL = 1.6; EXPRESSED IN ADULT LIVER, SIGNAL = 1.8; EXPRESSED IN HEART, SIGNAL = 1.7; EST_HUMAN HIT: BE513437.1, EVALUE 9.20e+00; NT HIT: AB020699.1, EVALUE 3.00e-79; SWISSPROT HIT: Q25604, EVALUE 5.90e-01
gtgaagagcgtgaagccgtgtctgaagcagctgcagcagtgcatccagaccatctccacactgcacgatgatgagatcctgcccagcaaccccgctgacctcttccactggctgcccaaggagcacatgtgtgtgcttgtctacctggtgcgtccccaccagggcccgggcc

SEQ ID NO: 22279 - DNA, 158 bp, Homo sapiens
  MAP TO AC004736.1; EXPRESSED IN FETAL LIVER, SIGNAL = 1.5; EXPRESSED IN BRAIN, SIGNAL = 1.4; EXPRESSED IN BONE MARROW, SIGNAL = 1.3; EXPRESSED IN ADULT LIVER, SIGNAL = 1.6; EXPRESSED IN PLACENTA, SIGNAL = 1.2; EXPRESSED IN HEART, SIGNAL = 1.7; EXPRESSED IN LUNG, SIGNAL = 1.3; SWISSPROT HIT: P37773, EVALUE 1.30e+00; NT HIT: AF129756.1, EVALUE 9.10e-02; EST_HUMAN HIT: AA948400.1, EVALUE 1.40e-01
ctaaaggtcttccctctgcggctcctctgatagggagagcctggcaagttctcttgtatgtacacctgtggatgtgtcagcctgcaggtgagcatggtcagtatgcagaggtgggtccagggtgtgtagggcctgaagcctggaagttttgggggtca

SEQ ID NO: 22280 - DNA, 481 bp, Homo sapiens
  MAP TO AC003688.1; EXPRESSED IN ADULT LIVER, SIGNAL =  14; EXPRESSED IN PLACENTA, SIGNAL =  16; EXPRESSED IN LUNG, SIGNAL =  16; EXPRESSED IN HEART, SIGNAL =  14; EXPRESSED IN BRAIN, SIGNAL =  17; EXPRESSED IN HELA, SIGNAL =  13; EXPRESSED IN FETAL LIVER, SIGNAL =  14; EXPRESSED IN BONE MARROW, SIGNAL =  14; EST_HUMAN HIT: BF568222.1, EVALUE 1.00e-120; SWISSPROT HIT: P13468, EVALUE 1.70e+00; NT HIT: gi11425769, EVALUE 6.00e-92
ctgcccctcacccagcaccggcttgtccgcctgactccgggccgggggggcgggggttcccgagaccgccgtcgccggattgccaggggtgcgggagcccggcgccgagggggtcccagcagcggggcccgaggcggctccgcccccgccgcccgccccgccgcctttctgcggctcccctgcgggcaccggtaccaccaccgctaccacccctgccgccgtcgcgggcaccgtcgccgcggggaccgctgtagcccccgctgccgcctccacctcgctcatcccgccgggtccagtaccggccacagccgccaccgccccggcccctccccccggctcgcgaacccaccgccctgctcggtcctcgcgccccgagcctcgcccacacgccggcagcgggcccggagccgaggccaatggcagcccgctgccgccgctcgcgcagaccccgcctcccgaccacgggccaatcccagcccag

SEQ ID NO: 22281 - DNA, 531 bp, Homo sapiens
  MAP TO AC004216.1; EXPRESSED IN PLACENTA, SIGNAL = 4.2; EXPRESSED IN BRAIN, SIGNAL = 3.3; EXPRESSED IN BONE MARROW, SIGNAL = 3.2; EXPRESSED IN ADULT LIVER, SIGNAL = 3.4; EXPRESSED IN LUNG, SIGNAL = 3.5; EXPRESSED IN HELA, SIGNAL =   3; EXPRESSED IN HEART, SIGNAL = 2.9; EXPRESSED IN FETAL LIVER, SIGNAL = 3.2
acaccctctccctcctccaccacaccttctccctcctccaccttcatcaccccctccctcctccaccaccccctctctctcctccacctccaccaccccttctccctcctccaccaccccttctccctcctctaccttcatcactccctttcctaccccgtctcactcctctacgttcatcacccccctccctcctccatcaccccctctccctcctccaccatcccctctccctcctccaccttcatcaacccctctccctcctccaccttcatcacttcctttcctaccccctctacctcctccaccttcatcaccccctctccctcctccattaccccctctccctccttcaccatcccctctccctcctccaccttcatcaacccctctccctcctccaccaccccctctccgtgctccaccttcattactccctcttactcctccaccacctcctctccctcctccacctcccactctcctcttcctcttcctccctccccctcctccatgccccctcactcctcc

SEQ ID NO: 22282 - DNA, 96 bp, Homo sapiens
  MAP TO AC004601.1; EXPRESSED IN PLACENTA, SIGNAL = 2.1; EXPRESSED IN BRAIN, SIGNAL = 1.9; EXPRESSED IN BONE MARROW, SIGNAL = 1.9; EXPRESSED IN ADULT LIVER, SIGNAL = 2.1; EXPRESSED IN LUNG, SIGNAL = 2.6; EXPRESSED IN HELA, SIGNAL = 2.3; EXPRESSED IN HEART, SIGNAL = 2.1; EXPRESSED IN FETAL LIVER, SIGNAL =   2; NT HIT: gi11432540, EVALUE 2.00e-01
cagctgcttggagtcaaatcgctgctgagcagcttcttgggctctcagctgcagcttttgggctagacaatccacctgaggagaaaagtggcatca

SEQ ID NO: 22283 - DNA, 214 bp, Homo sapiens
  MAP TO AC004863.1; EXPRESSED IN BONE MARROW, SIGNAL = 7.7; EXPRESSED IN PLACENTA, SIGNAL = 8.6; EXPRESSED IN LUNG, SIGNAL = 8.5; EXPRESSED IN HELA, SIGNAL = 7.7; EXPRESSED IN HEART, SIGNAL = 7.3; EXPRESSED IN FETAL LIVER, SIGNAL = 6.8; EXPRESSED IN ADULT LIVER, SIGNAL = 6.3; EXPRESSED IN BRAIN, SIGNAL = 8.6; SWISSPROT HIT: P07199, EVALUE 8.90e-01; NT HIT: gi11419323, EVALUE 1.00e-110; EST_HUMAN HIT: AA868568.1, EVALUE 5.00e-82
ctacttgtgcagttttccctctggccacagggcttcctgcaaaagcagacgcagcctgttgcactcgtccacctccggggccgcccaccgcctcttcaggtgctggatgtcgatggagccagacgccctggccagcaccagggccaggaagctgccaccagccttctcaggctcacccaccgcagccatggccaccagcctgcagggagagggg

SEQ ID NO: 22284 - DNA, 128 bp, Homo sapiens
  MAP TO AC004241.1; EXPRESSED IN PLACENTA, SIGNAL = 0.87; EXPRESSED IN HEART, SIGNAL = 1.8; EXPRESSED IN FETAL LIVER, SIGNAL = 0.9; EXPRESSED IN BRAIN, SIGNAL = 1.1; EXPRESSED IN LUNG, SIGNAL =   1; EXPRESSED IN BONE MARROW, SIGNAL = 0.78; EXPRESSED IN ADULT LIVER, SIGNAL = 0.77; EST_HUMAN HIT: AW939119.1, EVALUE 4.00e-66; NT HIT: AF258669.1, EVALUE 7.20e-02; SWISSPROT HIT: P25638, EVALUE 1.00e-03
gggaatggatttttcaaagaggggaaatatgaaagagcaattgaatgctatactcgagggatagcagcagatggtgctaatgcccttcttccagctaacagagctatggcctatctgaagattcagaa

SEQ ID NO: 22285 - DNA, 103 bp, Homo sapiens
  MAP TO AC004061.1; EXPRESSED IN PLACENTA, SIGNAL = 1.9; EXPRESSED IN LUNG, SIGNAL = 1.5; EXPRESSED IN HEART, SIGNAL = 1.7; EXPRESSED IN BONE MARROW, SIGNAL = 2.2; EXPRESSED IN ADULT LIVER, SIGNAL = 1.8; EXPRESSED IN HELA, SIGNAL =   2; EXPRESSED IN FETAL LIVER, SIGNAL = 2.5; EXPRESSED IN BRAIN, SIGNAL = 2.1; NT HIT: gi5803002, EVALUE 2.20e-01; EST_HUMAN HIT: BF590974.1, EVALUE 3.30e-01
ctcccttcttccactgatgagagaactgtatcagctggattctagtccagagctgtttgtttattataaagtgatgtgcatctgagggagagagtgtctgtga

SEQ ID NO: 22286 - DNA, 185 bp, Homo sapiens
  MAP TO AC004520.1; EXPRESSED IN PLACENTA, SIGNAL = 1.8; EXPRESSED IN HEART, SIGNAL = 1.5; EXPRESSED IN BONE MARROW, SIGNAL = 1.3; EXPRESSED IN ADULT LIVER, SIGNAL = 1.4; EXPRESSED IN FETAL LIVER, SIGNAL = 1.4; EXPRESSED IN LUNG, SIGNAL =   2; EXPRESSED IN BRAIN, SIGNAL = 1.3; NT HIT: AF135116.1, EVALUE 1.00e-100; EST_HUMAN HIT: AA099770.1, EVALUE 3.00e-92; SWISSPROT HIT: P27798, EVALUE 6.70e-02
gattcagtggtcttttctgcctcccagtcaggtttctctgctattttgttttcatcatcatcattctgctgaagtgagttctccttctgggctgacaccctttcttcattttcctcatgctgggaactatgatccacagcttcgtgcttttctcttagtaccccattctcctataaaagtacgaa

SEQ ID NO: 22287 - DNA, 387 bp, Homo sapiens
  MAP TO AC004957.1; EXPRESSED IN PLACENTA, SIGNAL = 6.9; EXPRESSED IN HELA, SIGNAL = 5.8; EXPRESSED IN HEART, SIGNAL = 7.3; EXPRESSED IN FETAL LIVER, SIGNAL = 4.5; EXPRESSED IN BRAIN, SIGNAL = 9.2; EXPRESSED IN ADULT LIVER, SIGNAL = 5.1; EXPRESSED IN LUNG, SIGNAL = 4.4; EXPRESSED IN BONE MARROW, SIGNAL = 3.3; NT HIT: AB034951.1, EVALUE 1.00e-102; EST_HUMAN HIT: W28493.1, EVALUE 1.00e-101; SWISSPROT HIT: P19120, EVALUE 3.00e-45
ttgccaatgatcagggaaaccgaaccatgccaaactatgtcacctttacggataccaaacaattgattagtgatactccaaataatcaagttccaatgaaccgtgccagcatggcttttgatgccaaatgtctgactggatgcagatttgatgatgccattgtccagtttgatatgacatattggcctttcacggtggtaaatgatgctggcaggcccaaggtccaagtagagtatgagagagacaaaaagctgctacccataggaggtgtcttctatggttctgacaaagatgaaggaaattgcaaaagtctaccttgggaagactgttaccaatgctgtggtcacagtgccagcttacttgaatgactctcagcatcagggctat

SEQ ID NO: 22288 - DNA, 90 bp, Homo sapiens
  MAP TO AC004613.1; EXPRESSED IN LUNG, SIGNAL = 2.2; EXPRESSED IN BRAIN, SIGNAL = 1.7; EXPRESSED IN ADULT LIVER, SIGNAL =   2; EXPRESSED IN PLACENTA, SIGNAL = 1.8; EXPRESSED IN HELA, SIGNAL =   2; EXPRESSED IN HEART, SIGNAL =   2; EXPRESSED IN BONE MARROW, SIGNAL = 1.7; EXPRESSED IN FETAL LIVER, SIGNAL = 1.8; EST_HUMAN HIT: Z36771.1, EVALUE 1.80e-02; NT HIT: D78589.1, EVALUE 1.20e-02
tccagaaccagaagtcctcagggcaattatcaggagcaaaagcaaggaggcaagggaggagaaaaacaggaggaggaagagaagtgaagg

SEQ ID NO: 22289 - DNA, 111 bp, Homo sapiens
  MAP TO AC004929.2; EXPRESSED IN LUNG, SIGNAL = 4.1; EXPRESSED IN HELA, SIGNAL = 3.5; EXPRESSED IN FETAL LIVER, SIGNAL = 3.9; EXPRESSED IN BRAIN, SIGNAL = 3.8; EXPRESSED IN BONE MARROW, SIGNAL = 3.8; EXPRESSED IN ADULT LIVER, SIGNAL = 3.5; EXPRESSED IN PLACENTA, SIGNAL = 3.5; EXPRESSED IN HEART, SIGNAL = 3.5; NT HIT: Z70556.1, EVALUE 9.60e-01; EST_HUMAN HIT: AI768217.1, EVALUE 5.60e+00
gaccatgaatacacgcaggatgctgaggtcaactggcacttttcaggggtccttggcagtgctagtggcataaatctgataaagctgtctaccccggtccttcccttgttg

SEQ ID NO: 22290 - DNA, 356 bp, Homo sapiens
  MAP TO AC004869.1; EXPRESSED IN PLACENTA, SIGNAL = 3.8; EXPRESSED IN LUNG, SIGNAL = 4.2; EXPRESSED IN HELA, SIGNAL =   4; EXPRESSED IN FETAL LIVER, SIGNAL = 3.5; EXPRESSED IN BONE MARROW, SIGNAL = 3.6; EXPRESSED IN ADULT LIVER, SIGNAL = 3.5; EXPRESSED IN HEART, SIGNAL =   4; EXPRESSED IN BRAIN, SIGNAL = 4.5; EST_HUMAN HIT: AA766763.1, EVALUE 1.30e+00; NT HIT: D64000.1, EVALUE 2.20e-01; SWISSPROT HIT: P36225, EVALUE 8.40e-01
caagcaaccaatattataactcatctacagaaatccaacccatcagaatggctggcagctaccaaacaaaccttactgtcatggctatggccaacaatacctccattaatagcgatgatcttaatactcatattcaggccctatgttctaaatcttcttacaaaacttacgtcttcctgcctagagactatgaaactccagatgcttctacaaatgaagcccaaaatggagacacctttcatccaaagactcttcaatcgatcccaggaggaaccctggctactttccctgcacaacatccctctccaacaggaagtagccagaaagattgtcacccaacctccctaacagcagtc

SEQ ID NO: 22291 - DNA, 88 bp, Homo sapiens
  MAP TO AC004263.1; EXPRESSED IN BONE MARROW, SIGNAL =  12; EXPRESSED IN PLACENTA, SIGNAL =  12; EXPRESSED IN LUNG, SIGNAL =  12; EXPRESSED IN HELA, SIGNAL =  17; EXPRESSED IN HEART, SIGNAL =  10; EXPRESSED IN FETAL LIVER, SIGNAL =  13; EXPRESSED IN ADULT LIVER, SIGNAL =  20; EXPRESSED IN BRAIN, SIGNAL = 7.8; SWISSPROT HIT: P19945, EVALUE 1.00e-08; NT HIT: gi4506666, EVALUE 2.00e-35; EST_HUMAN HIT: AW955368.1, EVALUE 2.00e-42
caacatgtccctgatctcagtgaggtcctccttggtgaacacaaagcccacattcccccggatatgaggcagcagtctgcaaagagaa

SEQ ID NO: 22292 - DNA, 144 bp, Homo sapiens
  MAP TO AC004847.1; EXPRESSED IN FETAL LIVER, SIGNAL = 1.6; EXPRESSED IN BRAIN, SIGNAL = 1.9; EXPRESSED IN BONE MARROW, SIGNAL = 1.6; EXPRESSED IN PLACENTA, SIGNAL = 1.8; EXPRESSED IN HELA, SIGNAL = 1.7; EXPRESSED IN HEART, SIGNAL = 1.4; EXPRESSED IN ADULT LIVER, SIGNAL =   2; EXPRESSED IN LUNG, SIGNAL =   2; NT HIT: AJ011712.1, EVALUE 2.00e-05; EST_HUMAN HIT: AL079930.1, EVALUE 2.00e-03; SWISSPROT HIT: P12878, EVALUE 3.10e+00
gaaaaagaagaaccctgtggcagttagaacagagttgatcttgaagagtcagactgtgtggctgaatccttacctggcacggtcgtaggtcttgtttataatttggtgtctttttttccccatgatcttcatgaacgcatgtaa

SEQ ID NO: 22293 - DNA, 108 bp, Homo sapiens
  MAP TO AC005726.1; EXPRESSED IN BONE MARROW, SIGNAL = 3.9; EXPRESSED IN ADULT LIVER, SIGNAL = 3.7; EXPRESSED IN PLACENTA, SIGNAL =   4; EXPRESSED IN LUNG, SIGNAL = 4.4; EXPRESSED IN HELA, SIGNAL = 4.6; EXPRESSED IN HEART, SIGNAL = 3.6; EXPRESSED IN FETAL LIVER, SIGNAL = 3.7; EXPRESSED IN BRAIN, SIGNAL =   5; NT HIT: gi11426657, EVALUE 2.00e-54; EST_HUMAN HIT: AW503765.1, EVALUE 3.00e-54; SWISSPROT HIT: P36269, EVALUE 7.20e+00
agttcctgcctgaggtgcccttgggccagcttcatgactcctaccgggcctttcgctcggagaacctcaatctctccatcaagatggatctgactcggcacagtggaa

SEQ ID NO: 22294 - DNA, 131 bp, Homo sapiens
  MAP TO AC004752.1; EXPRESSED IN PLACENTA, SIGNAL = 5.3; EXPRESSED IN LUNG, SIGNAL = 5.8; EXPRESSED IN FETAL LIVER, SIGNAL = 5.1; EXPRESSED IN HELA, SIGNAL = 5.1; EXPRESSED IN BRAIN, SIGNAL = 5.2; EXPRESSED IN BONE MARROW, SIGNAL = 5.1; EXPRESSED IN ADULT LIVER, SIGNAL = 5.3; EXPRESSED IN HEART, SIGNAL = 4.4; NT HIT: X56098.1, EVALUE 2.90e-01; EST_HUMAN HIT: N93526.1, EVALUE 4.30e-01
ggcctgccgagaaaccagattcagaacatgcgcttgctgctgccaccaccgggagggcggtgcgggtgggggtgcaggaaggcctgggggagcgccgggttatttgttatggggtgaagaggaagctgtaa

SEQ ID NO: 22295 - DNA, 210 bp, Homo sapiens
  MAP TO AC004850.2; EXPRESSED IN PLACENTA, SIGNAL = 3.5; EXPRESSED IN LUNG, SIGNAL = 4.4; EXPRESSED IN FETAL LIVER, SIGNAL =   4; EXPRESSED IN BONE MARROW, SIGNAL = 3.8; EXPRESSED IN HELA, SIGNAL =   4; EXPRESSED IN BRAIN, SIGNAL = 3.6; EXPRESSED IN ADULT LIVER, SIGNAL = 3.8; EXPRESSED IN HEART, SIGNAL = 3.1; NT HIT: gi7657676, EVALUE 1.00e-72; EST_HUMAN HIT: AU125744.1, EVALUE 2.00e-72; SWISSPROT HIT: P49754, EVALUE 1.00e-23
tatttgcataagcttttcaagagagaccaccataaggggcagcgttaccatgaaaaacagatcagtctttatgctgaatatgatcgaccaaacttacttccctttctccgagacagtacccattgcccacttgaaaaggtaaggcacagactccccgacttgtacactttggatgaagaggttgtcattgatggtaagttgtttgtcttt

SEQ ID NO: 22296 - DNA, 203 bp, Homo sapiens
  MAP TO AC005695.1; EXPRESSED IN HELA, SIGNAL = 3.5; EXPRESSED IN FETAL LIVER, SIGNAL = 3.6; EXPRESSED IN BRAIN, SIGNAL = 3.6; EXPRESSED IN BONE MARROW, SIGNAL =   4; EXPRESSED IN ADULT LIVER, SIGNAL = 3.8; EXPRESSED IN PLACENTA, SIGNAL = 3.9; EXPRESSED IN HEART, SIGNAL = 3.5; EXPRESSED IN LUNG, SIGNAL =   4; NT HIT: gi11426770, EVALUE 3.00e-79; SWISSPROT HIT: Q90922, EVALUE 1.00e-27; EST_HUMAN HIT: AI634709.1, EVALUE 1.00e-42
cctgtgattgccaccctgtgggtgctgctggcaaaacctgcaaccaaaccaccggccagtgtccctgcaaggacggcgtgacgggtatcacctgcaaccgctgcgccaaaggctaccagcagagccgctctcccatcgccccctgcataagtatgtgtggggcaccctgcttttcaagtctctggctttgtgggggacagtga

SEQ ID NO: 22297 - DNA, 134 bp, Homo sapiens
  MAP TO AC003108.1; EXPRESSED IN LUNG, SIGNAL = 1.4; EXPRESSED IN PLACENTA, SIGNAL = 1.4; EXPRESSED IN HEART, SIGNAL = 1.4; EXPRESSED IN FETAL LIVER, SIGNAL = 1.4; EXPRESSED IN BRAIN, SIGNAL = 1.4; EXPRESSED IN BONE MARROW, SIGNAL =  98; EXPRESSED IN ADULT LIVER, SIGNAL = 1.2; EST_HUMAN HIT: AW582266.1, EVALUE 1.00e-63; SWISSPROT HIT: Q13285, EVALUE 1.80e+00
attcatggggatacggtccagaaccagctggtggtccaaggagtggagctcccatcttacctccccttgtacccgcctgccatggactggatcttccagtgcatctcctaccatgcccccgaggtaactgccag

SEQ ID NO: 22298 - DNA, 138 bp, Homo sapiens
  MAP TO AC005868.1; EXPRESSED IN LUNG, SIGNAL = 2.5; EXPRESSED IN HELA, SIGNAL = 2.1; EXPRESSED IN PLACENTA, SIGNAL = 2.7; EXPRESSED IN HEART, SIGNAL = 1.9; EXPRESSED IN FETAL LIVER, SIGNAL = 2.2; EXPRESSED IN BRAIN, SIGNAL = 2.1; EXPRESSED IN ADULT LIVER, SIGNAL = 2.3; EXPRESSED IN BONE MARROW, SIGNAL = 2.3; EST_HUMAN HIT: AI381456.1, EVALUE 4.60e-01; NT HIT: AF184122.1, EVALUE 3.10e-01; SWISSPROT HIT: P27571, EVALUE 9.10e+00
aaatgttccacaatgtgcacctttgccttcatctcattttcctcctcgtctcctgcctctacgcactcaccccagggccttggctgctccctggagtgctctgctacaggtctctgtcttgacctttcttggctccag

SEQ ID NO: 22299 - DNA, 128 bp, Homo sapiens
  MAP TO AC005529.7; EXPRESSED IN LUNG, SIGNAL = 1.9; EXPRESSED IN HELA, SIGNAL = 2.1; EXPRESSED IN ADULT LIVER, SIGNAL = 2.6; EXPRESSED IN PLACENTA, SIGNAL = 1.7; EXPRESSED IN HEART, SIGNAL = 1.6; EXPRESSED IN FETAL LIVER, SIGNAL = 2.1; EXPRESSED IN BRAIN, SIGNAL = 1.9; EXPRESSED IN BONE MARROW, SIGNAL = 1.5; EST_HUMAN HIT: AU143502.1, EVALUE 4.00e-66; NT HIT: gi11417946, EVALUE 3.00e-66; SWISSPROT HIT: P39806, EVALUE 4.10e+00
actggatcttatagaggttgctggtttccttcttggacagcagggtggagtgggcatccttccggggatccactttgtgaacaaagagggagcggaaccagctgccttcattgtccttggaatagaaa

SEQ ID NO: 22300 - DNA, 131 bp, Homo sapiens
  MAP TO AC004962.1; EXPRESSED IN BONE MARROW, SIGNAL = 6.1; EXPRESSED IN PLACENTA, SIGNAL = 5.5; EXPRESSED IN LUNG, SIGNAL = 5.7; EXPRESSED IN HELA, SIGNAL = 6.3; EXPRESSED IN FETAL LIVER, SIGNAL = 6.1; EXPRESSED IN ADULT LIVER, SIGNAL = 4.9; EXPRESSED IN HEART, SIGNAL = 5.8; EXPRESSED IN BRAIN, SIGNAL = 6.4; NT HIT: gi6679662, EVALUE 2.90e-01; SWISSPROT HIT: P20908, EVALUE 5.30e+00; EST_HUMAN HIT: BE777685.1, EVALUE 1.70e+00
atgagcatgtcccgggccaggtctgagaggtagcgtttggatccactcaggaatagggatcgatatcgctgccgcctgtcctttgtctccatcagccaggtgttgaggtagcggcccacacctactgggtt

SEQ ID NO: 22301 - DNA, 104 bp, Homo sapiens
  MAP TO AC004082.1; EXPRESSED IN PLACENTA, SIGNAL = 1.7; EXPRESSED IN HELA, SIGNAL = 1.8; EXPRESSED IN HEART, SIGNAL =   3; EXPRESSED IN FETAL LIVER, SIGNAL = 1.7; EXPRESSED IN BRAIN, SIGNAL =   2; EXPRESSED IN ADULT LIVER, SIGNAL = 2.1; EXPRESSED IN LUNG, SIGNAL = 1.6; EXPRESSED IN BONE MARROW, SIGNAL = 1.7; SWISSPROT HIT: Q06708, EVALUE 1.90e+00; NT HIT: gi10048482, EVALUE 9.00e-38
ttaaatttgtatgtaatatttctgcattggagaatttcaactattagttgttcaccatctgtcttcatttccttcttcaatgcaatcttgatttctcccattac

SEQ ID NO: 22302 - DNA, 291 bp, Homo sapiens
  MAP TO AC005323.1; EXPRESSED IN HEART, SIGNAL = 3.3; EXPRESSED IN BRAIN, SIGNAL = 1.6; EXPRESSED IN FETAL LIVER, SIGNAL = 2.3; EXPRESSED IN HELA, SIGNAL = 2.5; EXPRESSED IN BONE MARROW, SIGNAL = 2.4; EXPRESSED IN LUNG, SIGNAL = 4.6; EXPRESSED IN ADULT LIVER, SIGNAL = 0.47; EXPRESSED IN PLACENTA, SIGNAL = 1.9; SWISSPROT HIT: P13535, EVALUE 3.00e-46; EST_HUMAN HIT: AA195905.1, EVALUE 0.00e+00; NT HIT: gi7669505, EVALUE 0.00e+00
gttcctatagttcctcagggcctcagcagccatgcggttggcatggttcagctggatttccatttcattgaggtctccctccatcttcttcttgagcctaatggcatcattcctgctcctgatctcagcatccagtgtgctctgcatggactccacgattctaatgtggtttctcttcatctggtcaatttcctcatctttttcagcaattttcctatcaacctcagacttgacttggttcaactcaagctggatgcgcaggatctttccctcttcatgttcaagagatgc

SEQ ID NO: 22303 - DNA, 459 bp, Homo sapiens
  MAP TO AC005950.1; EXPRESSED IN LUNG, SIGNAL = 1.7; EXPRESSED IN FETAL LIVER, SIGNAL = 1.5; EXPRESSED IN BRAIN, SIGNAL = 1.6; EXPRESSED IN BONE MARROW, SIGNAL = 1.2; EXPRESSED IN ADULT LIVER, SIGNAL = 1.5; EXPRESSED IN HELA, SIGNAL = 1.7; EXPRESSED IN PLACENTA, SIGNAL = 1.5; EXPRESSED IN HEART, SIGNAL = 1.5; NT HIT: AJ006345.1, EVALUE 0.00e+00; EST_HUMAN HIT: BE938266.1, EVALUE 8.00e-49; SWISSPROT HIT: P51787, EVALUE 3.00e-22
cattccttgcacacacacaggcgcgaccgagggccttgcagacatagggtgcacacgtgcgtgccgcctgcatacagcatgcacttgcagagacggttggcaccttcccttctctggccccaaacctgggccctgaggctgtctgcacacctgggtgcttcccaccactgactctctcgtctgcctttgtccccgcaggtgacgcagctggaccagaggctggcactcatcaccgacatgcttcaccagctgctctccttgcacggtggcagcacccccggcagcggcggcccccccagagagggcggggcccacatcacccagccctgcggcagtggcggctccgtcgaccctgagctcttcctgcccagcaacaccctgcccacctacgagcagctgaccgtgcccaggaggggccccgatgaggggtcctgaggaggggatggggctgggggatgg

SEQ ID NO: 22304 - DNA, 127 bp, Homo sapiens
  MAP TO AC004242.1; EXPRESSED IN PLACENTA, SIGNAL = 1.6; EXPRESSED IN HEART, SIGNAL = 1.6; EXPRESSED IN FETAL LIVER, SIGNAL = 2.2; EXPRESSED IN BRAIN, SIGNAL = 1.5; EXPRESSED IN ADULT LIVER, SIGNAL = 1.7; EXPRESSED IN LUNG, SIGNAL = 2.9; EXPRESSED IN BONE MARROW, SIGNAL = 1.2; EST_HUMAN HIT: AW854162.1, EVALUE 4.20e-01
acaccgtcattttacagatgtactgtattttccagctgctaatcttagatgtggaaataatgatcttcagcttcatttcccccctctattagagttgaatcctgtaattttgctcattagatttgca

SEQ ID NO: 22305 - DNA, 169 bp, Homo sapiens
  MAP TO AC004382.1; EXPRESSED IN PLACENTA, SIGNAL = 3.9; EXPRESSED IN LUNG, SIGNAL =   4; EXPRESSED IN HELA, SIGNAL =   5; EXPRESSED IN FETAL LIVER, SIGNAL = 4.8; EXPRESSED IN BRAIN, SIGNAL = 4.9; EXPRESSED IN BONE MARROW, SIGNAL = 4.7; EXPRESSED IN ADULT LIVER, SIGNAL = 3.9; EXPRESSED IN HEART, SIGNAL = 4.3; SWISSPROT HIT: Q59992, EVALUE 2.30e+00; EST_HUMAN HIT: AW672686.1, EVALUE 2.00e-90; NT HIT: AF161444.1, EVALUE 7.00e-86
tggcccgttgccgacaagccctggtgccacgtgccttccatgcttcagctgtggggctaaggtcttcagatgagcagaagcagcagcctcccaactcattttctcagcagcattctgagacacagggggcagaaaaacctgatccagagtcttctcattcaccccccag

SEQ ID NO: 22306 - DNA, 236 bp, Homo sapiens
  MAP TO AC004031.1; EXPRESSED IN LUNG, SIGNAL = 0.54; EXPRESSED IN BRAIN, SIGNAL = 0.79; EXPRESSED IN HEART, SIGNAL = 1.6; EXPRESSED IN BONE MARROW, SIGNAL = 0.56; EST_HUMAN HIT: AI553853.1, EVALUE 3.00e-93
gagcgaagagaagtgcctggtacgcagtggccttgtgcagctcatggatcgactgtgtagcttgagcaatcagaccgagtccagctccagtgagaaacagaccaagaagcagaaggtggccaccatggcctgggctgccttccaggtgcttgccaaccgctgtgttgagtgggaaaaagaggaaggtgagatgccagactcctttctagagctcactgatttcttctattggtgtg

SEQ ID NO: 22307 - DNA, 242 bp, Homo sapiens
  MAP TO AC004466.1; EXPRESSED IN LUNG, SIGNAL = 3.4; EXPRESSED IN BRAIN, SIGNAL = 2.8; EXPRESSED IN ADULT LIVER, SIGNAL = 3.4; EXPRESSED IN PLACENTA, SIGNAL = 3.2; EXPRESSED IN HELA, SIGNAL = 3.2; EXPRESSED IN HEART, SIGNAL = 3.5; EXPRESSED IN FETAL LIVER, SIGNAL = 2.4; EXPRESSED IN BONE MARROW, SIGNAL = 3.4; SWISSPROT HIT: P26928, EVALUE 9.30e-01; NT HIT: gi7705398, EVALUE 1.00e-102; EST_HUMAN HIT: AA287737.1, EVALUE 4.00e-95
gctgccccaggccctgtgcagacacaccaggccctcagccgcagcccatggacctgcgggtgggccagcggcccccagtggagcccccaccagagcccacattgctggccctgcagcgtccccagcgcctgcaccaccacctcttcctagcaggcctgcagcagcagcgctcggtggagcccatgagggtaaagatggagctccctgcatgtggggccaccttgagcttggtccccagcctc

SEQ ID NO: 22308 - DNA, 510 bp, Homo sapiens
  MAP TO AC005840.1; EXPRESSED IN BRAIN, SIGNAL = 1.2; EXPRESSED IN ADULT LIVER, SIGNAL = 1.2; EXPRESSED IN PLACENTA, SIGNAL = 1.2; EXPRESSED IN LUNG, SIGNAL = 1.3; EXPRESSED IN HEART, SIGNAL =   2; EXPRESSED IN BONE MARROW, SIGNAL = 1.3; EXPRESSED IN FETAL LIVER, SIGNAL = 1.3; SWISSPROT HIT: P30999, EVALUE 6.00e-19; EST_HUMAN HIT: AI207616.1, EVALUE 0.00e+00; NT HIT: gi4758931, EVALUE 0.00e+00
ttttgggtagtctccttcaggccatccagaaaaggagatgattatattctcggtcagcataagcaatgcttctgttatcatgagattcttgagtttgtcattagatgacaaattccacagcaaacctgttagttgttttttagtctccaagactctggtttgcttcagcacctggagcagccgagttaccccatttagttcagccacctccaatttgttgtcattgtcttcaaatagtaagtttctcaaggccccccacacagctcgctgaacatcttcattctgaacttttaggagctgcagaagcttggggatgccacaaaactggttaaccctcttcccagcttcagatttctggaagcactcgtgctgtatgaaagtggctgcggcagaaatcctggacggcggcatctggtctgcatcgagcatactccctgctcgctccagagtcatctccatgtctgcattccccagctgggagtcagtgcttctctgggtgagaagattccc

SEQ ID NO: 22309 - DNA, 180 bp, Homo sapiens
  MAP TO AC004098.1; EXPRESSED IN BONE MARROW, SIGNAL = 1.7; EXPRESSED IN PLACENTA, SIGNAL = 1.5; EXPRESSED IN LUNG, SIGNAL = 1.5; EXPRESSED IN FETAL LIVER, SIGNAL = 1.4; EXPRESSED IN ADULT LIVER, SIGNAL = 1.4; EXPRESSED IN HEART, SIGNAL = 1.6; EXPRESSED IN BRAIN, SIGNAL = 1.6; EST_HUMAN HIT: AL119606.1, EVALUE 3.00e-89; NT HIT: U03985.1, EVALUE 2.00e-89; SWISSPROT HIT: P46460, EVALUE 1.00e-26
cttggtgctaacagtggtttgcacatcatcatctttgatgaaattgatgccatctgcaagcagagagggagcatggctggtagcacgggagttcatgacactgttgtcaaccagttgctgtccaaaattgatggcgtggagcagctaaacaacatcctagtcattggtatgtttactttt

SEQ ID NO: 22310 - DNA, 543 bp, Homo sapiens
  MAP TO AC005962.1; EXPRESSED IN PLACENTA, SIGNAL =  12; EXPRESSED IN ADULT LIVER, SIGNAL =  12; EXPRESSED IN LUNG, SIGNAL =  16; EXPRESSED IN HEART, SIGNAL =  10; EXPRESSED IN FETAL LIVER, SIGNAL =  12; EXPRESSED IN BRAIN, SIGNAL =  13; EXPRESSED IN HELA, SIGNAL =  12; EXPRESSED IN BONE MARROW, SIGNAL =  12; NT HIT: X89670.1, EVALUE 5.00e-74; EST_HUMAN HIT: BF346606.1, EVALUE 8.00e+00; SWISSPROT HIT: Q95157, EVALUE 8.00e-42
gaacgtgggggaagatcctatggaaccacagaacaccacacaggtatcaatgtttgtcctcttagggttttcacagacccaagagctccagaaattcctgttccttctgttcctgttagtctatgttaccaccattgtgggaaacctccttatcatggtcacagtgacttttgactgccggctccacacacccatgtattttctgctccgaaatctagctctcatagacctctgctattccacagtcacctctccaaagatgctggtggacttcctccatgagaccaagacgatctcctaccagggctgcatggcccagatcttcttcttccaccttttgggaggtgggactgtcttttttctctcagtcatggcctatgaccgctacatagccatctcccagcccctccggtatgtcaccatcatgaacactcaattgtgtgtgggcctggtagtagccgcctgggtggggggctttgtccactccattgtccaactggctctgatacttccactgcccttctgtggccccaatatcctaga

SEQ ID NO: 22311 - DNA, 142 bp, Homo sapiens
  MAP TO AC003689.1; EXPRESSED IN LUNG, SIGNAL =   3; EXPRESSED IN FETAL LIVER, SIGNAL = 3.3; EXPRESSED IN PLACENTA, SIGNAL = 3.1; EXPRESSED IN HELA, SIGNAL = 2.5; EXPRESSED IN BRAIN, SIGNAL = 2.5; EXPRESSED IN BONE MARROW, SIGNAL = 2.7; EXPRESSED IN ADULT LIVER, SIGNAL = 2.5; EXPRESSED IN HEART, SIGNAL = 4.2; SWISSPROT HIT: P04196, EVALUE 4.00e-03; EST_HUMAN HIT: BE158750.1, EVALUE 7.40e+00; NT HIT: U17332.1, EVALUE 5.00e+00
agctcacatacataccccacatcaacatggagatcacacacctcaacacggagatcacacacatcaacatggaaatcacacacacatatcgaatggggattacacacatcaacgtggagctcatacatacaccccaacatgg

SEQ ID NO: 22312 - DNA, 260 bp, Homo sapiens
  MAP TO AC004764.1; EXPRESSED IN PLACENTA, SIGNAL = 5.4; EXPRESSED IN HEART, SIGNAL = 5.3; EXPRESSED IN FETAL LIVER, SIGNAL = 7.7; EXPRESSED IN BRAIN, SIGNAL = 5.5; EXPRESSED IN BONE MARROW, SIGNAL = 5.7; EXPRESSED IN HELA, SIGNAL = 5.7; EXPRESSED IN ADULT LIVER, SIGNAL = 5.6; EXPRESSED IN LUNG, SIGNAL = 5.3; NT HIT: AF076784.1, EVALUE 6.30e-01; SWISSPROT HIT: P35500, EVALUE 5.00e-03; EST_HUMAN HIT: AI589779.1, EVALUE 9.30e-01
ccatctgcacatctgagttgtccatgaaggtctatgtggaccccatcaactactggaagaacggctacaacctgctggatgtgatcattatcatcgttatgtttttaccctatgccctccgccagctcatgggcaaacagttcacttacctgtatatcgctgatggcatgcagtccctgcgcatcctcaagcttatcggctatagccagggcatccgggtgagtgcactgggggtgtcatggtgctgggagggcaggccg

SEQ ID NO: 22313 - DNA, 210 bp, Homo sapiens
  MAP TO AC002081.1; EXPRESSED IN PLACENTA, SIGNAL = 1.8; EXPRESSED IN BRAIN, SIGNAL = 1.7; EXPRESSED IN ADULT LIVER, SIGNAL = 1.6; EXPRESSED IN LUNG, SIGNAL = 1.8; EXPRESSED IN HEART, SIGNAL = 1.5; EXPRESSED IN FETAL LIVER, SIGNAL = 1.6; EXPRESSED IN BONE MARROW, SIGNAL = 1.6; SWISSPROT HIT: P21849, EVALUE 4.00e-03; NT HIT: X81855.1, EVALUE 1.30e-01
cccagttattggaccaattgacatcctacctttggttccatctgaaaatgttccaggaggacagggatggcaagaagatgatccattgttataaaatccagggttgcaaggcggacaatccttcttctctccagaagggggcaatctaatagcatctgtgagatcctcccggcagattttgggctctatccacttgtacattatctgtgt

SEQ ID NO: 22314 - DNA, 142 bp, Homo sapiens
  MAP TO AC004856.1; EXPRESSED IN LUNG, SIGNAL = 3.2; EXPRESSED IN ADULT LIVER, SIGNAL = 3.4; EXPRESSED IN PLACENTA, SIGNAL = 3.6; EXPRESSED IN HELA, SIGNAL = 4.3; EXPRESSED IN HEART, SIGNAL = 2.6; EXPRESSED IN FETAL LIVER, SIGNAL = 3.3; EXPRESSED IN BRAIN, SIGNAL = 2.7; EXPRESSED IN BONE MARROW, SIGNAL = 3.5; EST_HUMAN HIT: BF700517.1, EVALUE 7.40e+00
attaaccaccaagtcgtcctatactttgaaacacattgttcacaagatactagaaaaaaaattgagtaacagtgaaagtgctatctgcaataacaacaatgtgatgggaccttccaggtgggctgctgagaactctgctagg

SEQ ID NO: 22315 - DNA, 151 bp, Homo sapiens
  MAP TO AC005077.1; EXPRESSED IN ADULT LIVER, SIGNAL = 3.3; EXPRESSED IN HEART, SIGNAL =   4; EXPRESSED IN BRAIN, SIGNAL = 1.8; EXPRESSED IN PLACENTA, SIGNAL = 1.5; EXPRESSED IN LUNG, SIGNAL = 1.6; EXPRESSED IN FETAL LIVER, SIGNAL = 2.1; EXPRESSED IN BONE MARROW, SIGNAL = 1.3; SWISSPROT HIT: P40926, EVALUE 8.00e-18; EST_HUMAN HIT: AI277979.1, EVALUE 9.00e-80; NT HIT: gi11421462, EVALUE 6.00e-80
aaaaagggcatcgagaagaacctgggcatcggcaaagtctcctcttttgaggagaagatgatctcggatgccatccccgagctgaaggcctccatcaagaagggggaagatttcgtgaagaccctgaagtgagccgctgtgacgggtggcc

SEQ ID NO: 22316 - DNA, 250 bp, Homo sapiens
  MAP TO AC005697.1; EXPRESSED IN LUNG, SIGNAL = 4.9; EXPRESSED IN FETAL LIVER, SIGNAL = 4.6; EXPRESSED IN BONE MARROW, SIGNAL = 4.5; EXPRESSED IN PLACENTA, SIGNAL = 4.2; EXPRESSED IN HELA, SIGNAL = 4.3; EXPRESSED IN HEART, SIGNAL = 3.7; EXPRESSED IN BRAIN, SIGNAL = 4.2; EXPRESSED IN ADULT LIVER, SIGNAL = 4.6; NT HIT: X85764.1, EVALUE 1.00e-127; SWISSPROT HIT: O62699, EVALUE 2.00e-26
ggcacagctctgtgtggctgttccaagccatctgctcagggcctggccgcctccagctctctcccgctcaagtctaaggaagttcacctgcaggttggaccactggatcctcccaatgcagcgtggggcattgcgccaggcctgcttggtggcgaagatgagctcatctcccgtcagttggtaggttcctgttgtttctatctcctttgttaccgcttccaccctggccagatgttcctctatttttgcc

SEQ ID NO: 22317 - DNA, 252 bp, Homo sapiens
  MAP TO AC005737.1; EXPRESSED IN BONE MARROW, SIGNAL = 3.1; EXPRESSED IN ADULT LIVER, SIGNAL = 2.9; EXPRESSED IN LUNG, SIGNAL = 2.4; EXPRESSED IN PLACENTA, SIGNAL = 2.3; EXPRESSED IN HELA, SIGNAL = 2.8; EXPRESSED IN HEART, SIGNAL = 2.4; EXPRESSED IN FETAL LIVER, SIGNAL = 7.2; EXPRESSED IN BRAIN, SIGNAL = 2.5; SWISSPROT HIT: Q28640, EVALUE 2.00e-10; NT HIT: M32755.1, EVALUE 6.10e-01
cagaaggtggggtgctgagccgtgtgctgggcttctgtgcggaaagtggggtgctgagctgtgtgctgggcctgtgtgagcaaggtggggtgctgagttgtgtgctgggcctttgtgtggaaggtggggtgctgagccgtgtgctggccttctgtgcggaaggtggggtgcggaaccgtgtgctgcacttttgtgcggaaggtggggtgcttagccatgtgctgggtttctgtgaggaaggtggggtgtgga

SEQ ID NO: 22318 - DNA, 270 bp, Homo sapiens
  MAP TO AC005754.1; EXPRESSED IN LUNG, SIGNAL =   5; EXPRESSED IN HELA, SIGNAL = 5.1; EXPRESSED IN PLACENTA, SIGNAL = 4.6; EXPRESSED IN HEART, SIGNAL =   4; EXPRESSED IN FETAL LIVER, SIGNAL = 4.9; EXPRESSED IN BRAIN, SIGNAL = 5.2; EXPRESSED IN ADULT LIVER, SIGNAL = 4.2; EXPRESSED IN BONE MARROW, SIGNAL = 5.1; EST_HUMAN HIT: BE263191.1, EVALUE 1.00e-129; SWISSPROT HIT: P38810, EVALUE 2.00e+00; NT HIT: gi11416801, EVALUE 0.00e+00
atccgtagctccgcctgaaaaaactgcaagggattttctagtaacacctggaaaggtaggacacagggctctgtggggccgcacagctcctcccggtccaatttctcatttaacaacaaatccccggtctgcctatcgaactgcaaatgcattttttttcctttggaaacgaccctggcccccctcacagcaagttctcctatctccagccccaggtcttttaacaaattggccacaaaggagccactctccgtttcctcggccactgaa

SEQ ID NO: 22319 - DNA, 98 bp, Homo sapiens
  MAP TO AC004861.1; EXPRESSED IN PLACENTA, SIGNAL = 1.2; EXPRESSED IN LUNG, SIGNAL = 1.1; EXPRESSED IN HEART, SIGNAL = 1.4; EXPRESSED IN FETAL LIVER, SIGNAL =   1; EXPRESSED IN BONE MARROW, SIGNAL = 1.9; EXPRESSED IN ADULT LIVER, SIGNAL =   1; EXPRESSED IN BRAIN, SIGNAL = 0.82; NT HIT: AL161594.2, EVALUE 1.80e-01; EST_HUMAN HIT: AW963254.1, EVALUE 8.40e-01
caatctcagaggagctggtgtgtgaagggtgagcacaaggtagacaaatccagaagccaggcatgttcctctttccttcctcattgttttccatccag

SEQ ID NO: 22320 - DNA, 236 bp, Homo sapiens
  MAP TO AC004381.1; EXPRESSED IN BONE MARROW, SIGNAL = 2.1; EXPRESSED IN PLACENTA, SIGNAL =   2; EXPRESSED IN LUNG, SIGNAL =   2; EXPRESSED IN HELA, SIGNAL = 2.3; EXPRESSED IN FETAL LIVER, SIGNAL =   2; EXPRESSED IN ADULT LIVER, SIGNAL =   2; EXPRESSED IN HEART, SIGNAL =   2; EXPRESSED IN BRAIN, SIGNAL = 2.4; SWISSPROT HIT: P39062, EVALUE 3.00e-04; NT HIT: AF126145.1, EVALUE 1.00e-14
ccttggtgtcaaactgtggcagatggtggataaagactgtacaacccgctgtccatggttctaccagggtccaaatggtagccacaatccatcctgagtccgacaggcaccaggagacatcagatgtcttcaggctccgtaatttcctactaactccaaaatgcagtggcctcagctgtgtgatcatggctgatgtgatgaagggctgtgcactctggtttttagctacgaaccca

SEQ ID NO: 22321 - DNA, 107 bp, Homo sapiens
  MAP TO AC004387.1; EXPRESSED IN PLACENTA, SIGNAL = 4.9; EXPRESSED IN HELA, SIGNAL = 5.9; EXPRESSED IN HEART, SIGNAL = 4.7; EXPRESSED IN FETAL LIVER, SIGNAL = 5.7; EXPRESSED IN ADULT LIVER, SIGNAL = 4.4; EXPRESSED IN LUNG, SIGNAL = 5.2; EXPRESSED IN BRAIN, SIGNAL = 6.1; EXPRESSED IN BONE MARROW, SIGNAL = 5.1; EST_HUMAN HIT: AA085313.1, EVALUE 3.40e-01; NT HIT: AF045611.1, EVALUE 3.60e+00
caattttttcccctgaggatgaatcttggaacaacgtagtgggtgaaaagcagagcgatgggggatacgaattagtgtggaagagaatctaattacttctgaaggta

SEQ ID NO: 22322 - DNA, 83 bp, Homo sapiens
  MAP TO AC004470.1; EXPRESSED IN PLACENTA, SIGNAL = 2.2; EXPRESSED IN LUNG, SIGNAL = 2.4; EXPRESSED IN HEART, SIGNAL = 2.3; EXPRESSED IN FETAL LIVER, SIGNAL = 1.7; EXPRESSED IN BRAIN, SIGNAL = 2.2; EXPRESSED IN BONE MARROW, SIGNAL = 2.3; EXPRESSED IN ADULT LIVER, SIGNAL =   2; EXPRESSED IN HELA, SIGNAL = 2.1; SWISSPROT HIT: P13485, EVALUE 2.50e+00
atccagataattaagagattaatcagaacaaagtactcagtaatggccatggcaaaagcccaggtgatgagcattaaatttag

SEQ ID NO: 22323 - DNA, 98 bp, Homo sapiens
  MAP TO AC006515.7; EXPRESSED IN PLACENTA, SIGNAL = 0.64; EXPRESSED IN LUNG, SIGNAL = 0.79; EXPRESSED IN HEART, SIGNAL =  72; EXPRESSED IN BRAIN, SIGNAL = 0.61; EXPRESSED IN ADULT LIVER, SIGNAL = 0.69; EXPRESSED IN BONE MARROW, SIGNAL = 0.63; EST_HUMAN HIT: AA613171.1, EVALUE 2.00e-48; NT HIT: X13777.1, EVALUE 1.30e-02
gtgggagatgtggaaacactttcaacaactgaagcagcaggccaagaaaaggtgtcaatagctgtgcttttgcccacaaaaaagtgagtcttcttcat

SEQ ID NO: 22324 - DNA, 213 bp, Homo sapiens
  MAP TO AC005971.5; EXPRESSED IN PLACENTA, SIGNAL = 1.8; EXPRESSED IN LUNG, SIGNAL = 2.2; EXPRESSED IN HEART, SIGNAL =   2; EXPRESSED IN BRAIN, SIGNAL = 2.7; EXPRESSED IN ADULT LIVER, SIGNAL = 1.9; EXPRESSED IN FETAL LIVER, SIGNAL =   2; EXPRESSED IN BONE MARROW, SIGNAL =   2; EXPRESSED IN HELA, SIGNAL =   2; EST_HUMAN HIT: AI091675.1, EVALUE 3.00e-80; NT HIT: gi11425417, EVALUE 8.00e-71; SWISSPROT HIT: P49002, EVALUE 1.20e+00
aggagacaggggtctggggcagggatctgagttggggtgtccaggaatttacaatcctcaccttggcctgtgccacttctttgctgttgagcacgaagaggacatcctgcgtatgaagcagagacaagggcagatccagaagggagatgtacttgcgcagcacattcacagactgaagcgtgagcacagagcaccctggatggagaggagaca

SEQ ID NO: 22325 - DNA, 268 bp, Homo sapiens
  MAP TO AC004586.1; EXPRESSED IN LUNG, SIGNAL = 8.2; EXPRESSED IN BRAIN, SIGNAL = 6.6; EXPRESSED IN PLACENTA, SIGNAL = 7.2; EXPRESSED IN HEART, SIGNAL = 6.8; EXPRESSED IN FETAL LIVER, SIGNAL = 6.4; EXPRESSED IN BONE MARROW, SIGNAL = 7.7; EXPRESSED IN ADULT LIVER, SIGNAL = 7.1; EXPRESSED IN HELA, SIGNAL = 7.3; NT HIT: gi4506038, EVALUE 0.00e+00; EST_HUMAN HIT: BE560082.1, EVALUE 0.00e+00
gaatcttataacagtggtacgttgtcttattcaggaagaaggagagacgaccatcttgcaactagaaaaagatttgcgcacccaagtggaattgatgcgaaaacagaaaaaggagagaaaacaggaactgaagctacttcaagagcaagatcaagaactgtgcgaaattctttgtatgccccactatgatattgacagtgcctcagtgcccagcttagaagagctgaaccagttcaggcaacatgtgacaactttgagggaaacaaag

SEQ ID NO: 22326 - DNA, 487 bp, Homo sapiens
  MAP TO AC004886.1; EXPRESSED IN LUNG, SIGNAL = 1.7; EXPRESSED IN BRAIN, SIGNAL = 1.7; EXPRESSED IN BONE MARROW, SIGNAL = 1.3; EXPRESSED IN ADULT LIVER, SIGNAL = 1.3; EXPRESSED IN PLACENTA, SIGNAL = 2.5; EXPRESSED IN HEART, SIGNAL = 1.6; EXPRESSED IN FETAL LIVER, SIGNAL = 1.5; NT HIT: gi10048478, EVALUE 0.00e+00; SWISSPROT HIT: O63696, EVALUE 3.00e+00; EST_HUMAN HIT: BF242268.1, EVALUE 7.10e+00
acccaggtccactatctcatggctttctgggatgataaaagagcttgaaacaatatcttcctgaggcacaacagaatgtaagctttctaactcataaaactctttctggaggtctgtaattttctgcataggatcttcataaatctgttctgaaagtcttatcttttgctctcttcctttctgctgcataaatccattttcttcttcttgccttgttagcagactgccatctaccgatccattgtacgtgtcttctactaaagattcataaatataatcctctattagcatcccaccatacaaaggctctttttcaaacacttcatctcgttcatttgcagctggaaaagctttgtatttgtgtgttttatgcatcatttcttcatacatctcctcagcactttttaacgccttttggctaccttctttctgcataatagattgctcatctgttggtgagtataatgaaacagctgtgggcaattta

SEQ ID NO: 22327 - DNA, 384 bp, Homo sapiens
  MAP TO AC004408.1; EXPRESSED IN BONE MARROW, SIGNAL = 3.1; EXPRESSED IN PLACENTA, SIGNAL = 3.1; EXPRESSED IN LUNG, SIGNAL = 3.1; EXPRESSED IN HELA, SIGNAL = 3.3; EXPRESSED IN FETAL LIVER, SIGNAL = 3.3; EXPRESSED IN BRAIN, SIGNAL = 4.1; EXPRESSED IN ADULT LIVER, SIGNAL = 2.6; EXPRESSED IN HEART, SIGNAL =   3; EST_HUMAN HIT: AA551280.1, EVALUE 5.00e-34; SWISSPROT HIT: Q02641, EVALUE 2.00e-53; NT HIT: U86961.1, EVALUE 0.00e+00
ccttattccggccccggttccggttgtcggtcagctcttcctcatagtcttcttcctcgtcctcccaggatccctgtcgggctgggggcgtgccgccccctgcagggtctccaagccctggcccctctgaggggtcagtctccatgtccacacatgagtctcccagctccgtgtaggcagagtttcggctgccgggggtgtcggcatcaaaagtgtcttggcgggacagtgcccgtagcgtgcctgcccggcctggtgggtggctgctggggtaaaggcctgggggctggcccagctcccctgggtactcgtgcatgctggcgtgctccccggtggcccgttccagtggctggtccccggaagcaaggtagggtccctggttag

SEQ ID NO: 22328 - DNA, 178 bp, Homo sapiens
  MAP TO AC004485.1; EXPRESSED IN PLACENTA, SIGNAL = 2.4; EXPRESSED IN HELA, SIGNAL = 2.4; EXPRESSED IN HEART, SIGNAL = 2.2; EXPRESSED IN BONE MARROW, SIGNAL = 2.2; EXPRESSED IN ADULT LIVER, SIGNAL = 2.3; EXPRESSED IN BRAIN, SIGNAL = 2.2; EXPRESSED IN FETAL LIVER, SIGNAL =   2; EXPRESSED IN LUNG, SIGNAL = 2.6; NT HIT: L04808.1, EVALUE 1.60e+00; SWISSPROT HIT: P27284, EVALUE 5.10e+00; EST_HUMAN HIT: AA811387.1, EVALUE 2.40e+00
ctctagcaacaactcaactgctgggatcacaaagaggaaagtagaaagaagcaaaaatataaactatactattaccaaaaaaggcaacattaggacaggaggcaacctgctcagtattatggggacaactttactggaacctaagactttggagaagagatcttttctgcttgagcat

SEQ ID NO: 22329 - DNA, 156 bp, Homo sapiens
  MAP TO AC005040.2; EXPRESSED IN LUNG, SIGNAL = 3.4; EXPRESSED IN ADULT LIVER, SIGNAL =   4; EXPRESSED IN PLACENTA, SIGNAL = 3.5; EXPRESSED IN HELA, SIGNAL = 3.8; EXPRESSED IN HEART, SIGNAL = 4.1; EXPRESSED IN FETAL LIVER, SIGNAL =   4; EXPRESSED IN BRAIN, SIGNAL = 3.8; EXPRESSED IN BONE MARROW, SIGNAL = 3.7; NT HIT: AF020503.1, EVALUE 5.00e-28; SWISSPROT HIT: Q06885, EVALUE 3.50e-01; EST_HUMAN HIT: BE350127.1, EVALUE 8.00e-37
aacatcactgtcttccacctcccacatcttgtcccactggaaggtcttcaggggcagtaacacgcatggaactgccatcacctatgaaagcaacgccttcttctggaatcctcctgaaggacctgcctggggctgttttacaggtaactttctttt

SEQ ID NO: 22330 - DNA, 128 bp, Homo sapiens
  MAP TO AC004988.2; EXPRESSED IN PLACENTA, SIGNAL = 1.3; EXPRESSED IN LUNG, SIGNAL = 1.3; EXPRESSED IN FETAL LIVER, SIGNAL = 1.5; EXPRESSED IN BRAIN, SIGNAL = 1.9; EXPRESSED IN BONE MARROW, SIGNAL = 1.3; EXPRESSED IN ADULT LIVER, SIGNAL = 1.4; EXPRESSED IN HEART, SIGNAL = 1.4; EST_HUMAN HIT: AA455642.1, EVALUE 5.00e-07; NT HIT: U07000.1, EVALUE 1.00e-09
aaagatagatcaatagaaattattcaatctgaagaagagagagaacaaaagatagctccttcctactcaaaacaagaaataacagatcctcaggaacctattcaacaataacaaaaagtccaatattt

SEQ ID NO: 22331 - DNA, 213 bp, Homo sapiens
  MAP TO AC005740.1; EXPRESSED IN BONE MARROW, SIGNAL = 9.7; EXPRESSED IN ADULT LIVER, SIGNAL =   9; EXPRESSED IN PLACENTA, SIGNAL = 9.3; EXPRESSED IN LUNG, SIGNAL =  10; EXPRESSED IN HELA, SIGNAL = 9.3; EXPRESSED IN FETAL LIVER, SIGNAL =  10; EXPRESSED IN HEART, SIGNAL = 9.2; EXPRESSED IN BRAIN, SIGNAL =  10; SWISSPROT HIT: O88958, EVALUE 1.00e-28; NT HIT: AF035808.1, EVALUE 7.00e-99; EST_HUMAN HIT: BE395087.1, EVALUE 4.00e-95
gtgatgatccttatcacaggtgctcacaaggcatttgctctgtacaaggccatcgaggagggagtgaaccacatgtggaccgtgtctgccttccagcagcatccccgcaccgtgtttgtgtgtgacgaggatgccaccttggagctgaaagtgaagactgtcaagtatttcaaaggtgagggaggtgtgggtccaggaggaggtggtcaagct

SEQ ID NO: 22332 - DNA, 184 bp, Homo sapiens
  MAP TO AC004912.1; EXPRESSED IN LUNG, SIGNAL = 1.9; EXPRESSED IN ADULT LIVER, SIGNAL =   2; EXPRESSED IN PLACENTA, SIGNAL = 1.8; EXPRESSED IN HELA, SIGNAL = 1.8; EXPRESSED IN HEART, SIGNAL = 1.5; EXPRESSED IN FETAL LIVER, SIGNAL =   2; EXPRESSED IN BRAIN, SIGNAL = 1.8; EXPRESSED IN BONE MARROW, SIGNAL = 1.7; NT HIT: X68851.1, EVALUE 1.10e-01; SWISSPROT HIT: Q09341, EVALUE 3.00e+00
tttctaacccgtgtgttccctttacctcagtttcattatctattaattttatgttgtttgctatttttgtaaactccttgaacactttatggaacacggaacatttaaggcaaacaatttttaaaagcatcagatcatcatcatcatcatcatcatcatcatcatcatcataatggctaattga

SEQ ID NO: 22333 - DNA, 141 bp, Homo sapiens
  MAP TO AC006238.1; EXPRESSED IN LUNG, SIGNAL = 7.4; EXPRESSED IN FETAL LIVER, SIGNAL =   9; EXPRESSED IN BONE MARROW, SIGNAL = 7.2; EXPRESSED IN PLACENTA, SIGNAL = 8.1; EXPRESSED IN HELA, SIGNAL = 7.5; EXPRESSED IN BRAIN, SIGNAL = 7.4; EXPRESSED IN ADULT LIVER, SIGNAL =  10; EXPRESSED IN HEART, SIGNAL = 6.7; SWISSPROT HIT: Q16943, EVALUE 4.70e-01; NT HIT: gi4507866, EVALUE 5.00e-74; EST_HUMAN HIT: AA287076.1, EVALUE 7.00e-74
tagaaagaatccaatgaaaatggctgcaattacaacaagaagtgaaggaagaggactggtgacattatctctgaaggatgcagttgaggttgatccaggtttatccgaatgtgctacctttctgagccttaaaccttcatc

SEQ ID NO: 22334 - DNA, 293 bp, Homo sapiens
  MAP TO AC004456.1; EXPRESSED IN PLACENTA, SIGNAL =   3; EXPRESSED IN LUNG, SIGNAL = 2.5; EXPRESSED IN HELA, SIGNAL =   2; EXPRESSED IN HEART, SIGNAL = 2.1; EXPRESSED IN BRAIN, SIGNAL = 2.3; EXPRESSED IN FETAL LIVER, SIGNAL = 2.2; EXPRESSED IN ADULT LIVER, SIGNAL = 2.6; EXPRESSED IN BONE MARROW, SIGNAL = 1.8; SWISSPROT HIT: O95859, EVALUE 2.00e-51; EST_HUMAN HIT: BF338835.1, EVALUE 0.00e+00; NT HIT: gi11421193, EVALUE 0.00e+00
tcaaagtgtgtattaaagctgtttgccatggatgtgtgttcaaagattcttgacaggcttggtttcaacagttctactgagggacatgacaggtgctgagagttgtcattcttcaaggacatcatttggtctgtccccggctcccttctatcataatacagagcccagagcagagtaatggtgagaatcatggccaggatttgtgtcaccccaatggagattcccagaaacctcagcacctgcagttgtttggttcctctcaaaaaggaatacattttcttcccacaaccctg

SEQ ID NO: 22335 - DNA, 137 bp, Homo sapiens
  MAP TO AC005225.2; EXPRESSED IN ADULT LIVER, SIGNAL = 5.9; EXPRESSED IN PLACENTA, SIGNAL = 4.6; EXPRESSED IN HEART, SIGNAL = 4.1; EXPRESSED IN FETAL LIVER, SIGNAL = 4.7; EXPRESSED IN BRAIN, SIGNAL = 5.3; EXPRESSED IN BONE MARROW, SIGNAL =   5; EXPRESSED IN LUNG, SIGNAL =   5; EXPRESSED IN HELA, SIGNAL = 4.7; EST_HUMAN HIT: AI764973.1, EVALUE 4.00e-69; NT HIT: AY005822.1, EVALUE 3.00e-04; SWISSPROT HIT: P49753, EVALUE 1.00e-10
atcaccagaacgcacctttggatgctgcagcataaagtccacggcttcttcaaagtactccagatgtacatcattcagatcttcggggaggtcttcaaatctgaaataagccagggcaagcacagcaaaaccatgtc

SEQ ID NO: 22336 - DNA, 270 bp, Homo sapiens
  MAP TO AC004150.8; EXPRESSED IN PLACENTA, SIGNAL = 3.1; EXPRESSED IN LUNG, SIGNAL = 3.2; EXPRESSED IN FETAL LIVER, SIGNAL = 3.2; EXPRESSED IN BRAIN, SIGNAL = 3.1; EXPRESSED IN BONE MARROW, SIGNAL = 2.8; EXPRESSED IN ADULT LIVER, SIGNAL = 3.6; EXPRESSED IN HELA, SIGNAL = 3.2; EXPRESSED IN HEART, SIGNAL = 2.9; NT HIT: gi11525893, EVALUE 4.00e-33; EST_HUMAN HIT: BE273983.1, EVALUE 0.00e+00; SWISSPROT HIT: Q9UQL6, EVALUE 2.00e-07
aggcacttccctacagtgtgggtcccgtcggcagtggcctgagggaacctgtgctctgcgggctgcccgaccaccttcccttcggtctgctccccgcctctggcggccccctccctggcatgctgctggtgcccaaggctcaggggctcgtggagatgctgcagaccatctatgagacagaatcctgtttctcagcagatgggatgtcaggtcgggaaccatccttggaaatcctgccgcggacttctctgcacagcatccctgtgacag

SEQ ID NO: 22337 - DNA, 85 bp, Homo sapiens
  MAP TO AC004953.1; EXPRESSED IN HELA, SIGNAL = 3.5; EXPRESSED IN HEART, SIGNAL =   4; EXPRESSED IN BRAIN, SIGNAL =   4; EXPRESSED IN PLACENTA, SIGNAL = 3.8; EXPRESSED IN LUNG, SIGNAL = 3.9; EXPRESSED IN FETAL LIVER, SIGNAL = 4.2; EXPRESSED IN BONE MARROW, SIGNAL = 3.9; EXPRESSED IN ADULT LIVER, SIGNAL = 4.8; SWISSPROT HIT: Q01631, EVALUE 1.90e+00; EST_HUMAN HIT: T08756.1, EVALUE 2.00e-36; NT HIT: X74873.1, EVALUE 2.70e+00
ggcgagggggtgcagcagctgagagaggccctgaagatcctggcagagcgagtcctcatcctggagcacatgattgggatccacg

SEQ ID NO: 22338 - DNA, 116 bp, Homo sapiens
  MAP TO AC004387.1; EXPRESSED IN PLACENTA, SIGNAL = 4.4; EXPRESSED IN LUNG, SIGNAL = 5.9; EXPRESSED IN HELA, SIGNAL = 4.5; EXPRESSED IN HEART, SIGNAL = 4.3; EXPRESSED IN FETAL LIVER, SIGNAL = 4.5; EXPRESSED IN ADULT LIVER, SIGNAL = 4.8; EXPRESSED IN BRAIN, SIGNAL =   5; EXPRESSED IN BONE MARROW, SIGNAL = 5.1; SWISSPROT HIT: P09264, EVALUE 9.30e+00; NT HIT: AF248054.1, EVALUE 1.00e+00
aggctgcctcccaacgtggggccttcggcattgttctggcctttgtggttcctggaaatcacccacagcaggatctgttaggcctgaatacccatccacaagggcaggagggagag

SEQ ID NO: 22339 - DNA, 379 bp, Homo sapiens
  MAP TO AC003954.1; EXPRESSED IN PLACENTA, SIGNAL = 2.7; EXPRESSED IN HELA, SIGNAL = 2.6; EXPRESSED IN BRAIN, SIGNAL = 3.2; EXPRESSED IN ADULT LIVER, SIGNAL = 3.2; EXPRESSED IN HEART, SIGNAL = 3.3; EXPRESSED IN LUNG, SIGNAL = 2.4; EXPRESSED IN FETAL LIVER, SIGNAL = 3.3; EXPRESSED IN BONE MARROW, SIGNAL = 2.6; EST_HUMAN HIT: AW452122.1, EVALUE 8.90e-02; SWISSPROT HIT: Q05495, EVALUE 4.70e+00
gaggtctctgaagaagggcccagagtgtcggggacttggaagaggatctcgggactggaagtcagagaaagtgcaaagcttgtcactgagccttggaaaaaccttgtccctgagcaccctgagcagccgtactgaggctggggagcctgcacaggcctataagatcctagccctgtttcctgctgctgccccaaatcctgctcagggaggaggaggagggacaggaagaaatctgaacaacaactcttcttgtgacggagttgaaaagcagacctatctgtacaagtcaactctaactggaatgtcactgggttctgaaggggttgaaggaaagtgtcagtccaaacacacagaagctctggaacaaacaggagtttag

SEQ ID NO: 22340 - DNA, 209 bp, Homo sapiens
  MAP TO AC004126.1; EXPRESSED IN PLACENTA, SIGNAL = 5.2; EXPRESSED IN LUNG, SIGNAL = 4.7; EXPRESSED IN HELA, SIGNAL = 5.3; EXPRESSED IN FETAL LIVER, SIGNAL = 5.3; EXPRESSED IN BRAIN, SIGNAL = 5.4; EXPRESSED IN BONE MARROW, SIGNAL = 4.9; EXPRESSED IN ADULT LIVER, SIGNAL = 6.3; EXPRESSED IN HEART, SIGNAL = 5.2; SWISSPROT HIT: Q00193, EVALUE 5.00e-19; EST_HUMAN HIT: BE937265.1, EVALUE 4.70e-02; NT HIT: AJ289697.1, EVALUE 4.00e-11
ccgtctgacaggatgggccactggggctgctggaaggggttggcactgggagcgccccagcactggtgcagcagcaggaccaggttggggtctgtcctctgcagaagccggacctccacatggactggttctcggagcagcctcacgatgggatagtcatcctccccatagtacgagctgaaggtctcgtctgcagggagagtgactca

SEQ ID NO: 22341 - DNA, 178 bp, Homo sapiens
  MAP TO AC006007.1; EXPRESSED IN ADULT LIVER, SIGNAL = 1.7; EXPRESSED IN PLACENTA, SIGNAL = 1.3; EXPRESSED IN LUNG, SIGNAL = 1.7; EXPRESSED IN HEART, SIGNAL = 1.4; EXPRESSED IN BRAIN, SIGNAL = 1.5; EXPRESSED IN FETAL LIVER, SIGNAL = 1.5; EXPRESSED IN BONE MARROW, SIGNAL = 1.2; SWISSPROT HIT: P08547, EVALUE 1.00e-04; NT HIT: X66401.1, EVALUE 4.00e-04; EST_HUMAN HIT: AW610198.1, EVALUE 2.00e-04
ttatcagggaaatgcaaatcaaaaccacagtaagattacacttttcatgtgttataatggctactgttttaaaaagataccaagttttaatgaggatgaggagaaattggaatccttatacactgttgataggaatgacaaattgtacagctgctatggaaaatattatgcagtttcc

SEQ ID NO: 22342 - DNA, 108 bp, Homo sapiens
  MAP TO AC004594.1; EXPRESSED IN ADULT LIVER, SIGNAL =  15; EXPRESSED IN PLACENTA, SIGNAL =  11; EXPRESSED IN LUNG, SIGNAL =  11; EXPRESSED IN HEART, SIGNAL =  18; EXPRESSED IN BRAIN, SIGNAL =  14; EXPRESSED IN HELA, SIGNAL =  12; EXPRESSED IN FETAL LIVER, SIGNAL =  12; EXPRESSED IN BONE MARROW, SIGNAL =  10; EST_HUMAN HIT: BE386106.1, EVALUE 3.00e-54; NT HIT: AB046811.1, EVALUE 2.00e-54
ttgccactcccataccagcagaagaggtgaagaaagtggtcagaaaatgtctcgagaaagctgccttgatcaattacactagactcacagaatatgccaaaatagaag

SEQ ID NO: 22343 - DNA, 365 bp, Homo sapiens
  MAP TO AC003958.1; EXPRESSED IN LUNG, SIGNAL = 1.7; EXPRESSED IN HELA, SIGNAL = 2.2; EXPRESSED IN FETAL LIVER, SIGNAL = 2.3; EXPRESSED IN BRAIN, SIGNAL = 1.9; EXPRESSED IN BONE MARROW, SIGNAL = 1.8; EXPRESSED IN ADULT LIVER, SIGNAL = 2.4; EXPRESSED IN PLACENTA, SIGNAL = 2.1; EXPRESSED IN HEART, SIGNAL = 1.7; NT HIT: Y16788.1, EVALUE 0.00e+00; SWISSPROT HIT: O76009, EVALUE 3.00e-51; EST_HUMAN HIT: BF569905.1, EVALUE 0.00e+00
atgtcttacagttgtggcctgcccagcctgagctgccgcaccagctgctcctcccggccctgtgtgccccccagctgccacggctgcaccctgcccggggcctgcaacatccccgccaatgtgagcaactgcaactggttctgtgagggctccttcaatggcagtgagaaggagaccatgcagttcctgaacgaccgcctggccagctacctggagaaggtgcgtcagctggagcgggacaacgcggagctggagaacctcatccgggagcggtcacagcagcaggagcccttggtgtgtgccagctaccagtcctacttcaagaccattgaggagctccagcagaaggtgaggagtgggcgaca

SEQ ID NO: 22344 - DNA, 213 bp, Homo sapiens
  MAP TO AC005230.1; EXPRESSED IN HELA, SIGNAL = 2.7; EXPRESSED IN HEART, SIGNAL = 3.3; EXPRESSED IN BRAIN, SIGNAL = 3.2; EXPRESSED IN BONE MARROW, SIGNAL = 3.4; EXPRESSED IN PLACENTA, SIGNAL = 2.7; EXPRESSED IN LUNG, SIGNAL =   2; EXPRESSED IN FETAL LIVER, SIGNAL = 4.7; EXPRESSED IN ADULT LIVER, SIGNAL = 3.3; NT HIT: AF096286.1, EVALUE 3.00e-61; EST_HUMAN HIT: BE867469.1, EVALUE 1.00e-107; SWISSPROT HIT: Q14416, EVALUE 5.90e+00
tgaattcaagtccccgcagctgaaaagtgaccagaccattgcctatctctataaggtgtactaatgcattgagatagtcagaggcaaggatgaaacagtcccctgtactgtagtttccccaccgtcctagtagcaaatcaccacagaggctgtgctgtagggatctagttaaatgctcataaaagatggaattcagattgttgtcatctgatc

SEQ ID NO: 22345 - DNA, 154 bp, Homo sapiens
  MAP TO AC005871.2; EXPRESSED IN BRAIN, SIGNAL = 3.4; EXPRESSED IN ADULT LIVER, SIGNAL = 3.4; EXPRESSED IN BONE MARROW, SIGNAL = 3.5; EXPRESSED IN PLACENTA, SIGNAL = 3.3; EXPRESSED IN LUNG, SIGNAL = 3.4; EXPRESSED IN HELA, SIGNAL = 3.1; EXPRESSED IN FETAL LIVER, SIGNAL = 3.2; EXPRESSED IN HEART, SIGNAL = 3.1; EST_HUMAN HIT: BE382652.1, EVALUE 1.30e-01; NT HIT: gi11433478, EVALUE 8.90e-02; SWISSPROT HIT: Q01133, EVALUE 1.00e+00
atgtcatatcaggctgccctgccccagggaagaaagggccgtgaccaggaccgccatcggtgagggaggaaccagaatgcagctgctgatggaaaaacacagaacttctgggaagaggaggccagagggcggtcctgtgagtgaggcttctcct

SEQ ID NO: 22346 - DNA, 143 bp, Homo sapiens
  MAP TO AC005725.1; EXPRESSED IN BRAIN, SIGNAL = 1.9; EXPRESSED IN ADULT LIVER, SIGNAL = 1.7; EXPRESSED IN BONE MARROW, SIGNAL = 1.8; EXPRESSED IN PLACENTA, SIGNAL = 1.6; EXPRESSED IN LUNG, SIGNAL = 1.8; EXPRESSED IN HELA, SIGNAL = 1.8; EXPRESSED IN FETAL LIVER, SIGNAL =   2; EXPRESSED IN HEART, SIGNAL = 2.2; NT HIT: M93271.1, EVALUE 5.00e+00; EST_HUMAN HIT: BE926894.1, EVALUE 7.50e+00; SWISSPROT HIT: P18502, EVALUE 1.80e+00
ggcagatgtgctccctgcagctgcagagtgaatgtgacatacaggtccccatggaggtgatgatgcgagttactgcctgccctcctctgatatttctcaccactcaccaggtcctttctgccatgctgggagccagatagacg

SEQ ID NO: 22347 - DNA, 121 bp, Homo sapiens
  MAP TO AC003670.1; EXPRESSED IN FETAL LIVER, SIGNAL =   2; EXPRESSED IN BONE MARROW, SIGNAL = 2.4; EXPRESSED IN LUNG, SIGNAL = 2.1; EXPRESSED IN BRAIN, SIGNAL = 2.3; EXPRESSED IN ADULT LIVER, SIGNAL = 2.1; EXPRESSED IN PLACENTA, SIGNAL = 2.2; EXPRESSED IN HELA, SIGNAL = 1.9; EXPRESSED IN HEART, SIGNAL = 2.1; SWISSPROT HIT: Q10135, EVALUE 6.20e-01; EST_HUMAN HIT: W17135.1, EVALUE 1.60e+00; NT HIT: gi6754203, EVALUE 1.10e+00
gctacatttatgctacagaagggttgccaacctctgctgtagacagttacttggaacactttgcagagaaatgtggcaaggagaaatgtaatctctttcctagaaatatctacccaaagag

SEQ ID NO: 22348 - DNA, 179 bp, Homo sapiens
  MAP TO AC005753.1; EXPRESSED IN BRAIN, SIGNAL = 5.3; EXPRESSED IN BONE MARROW, SIGNAL =   5; EXPRESSED IN ADULT LIVER, SIGNAL = 4.5; EXPRESSED IN PLACENTA, SIGNAL = 5.1; EXPRESSED IN LUNG, SIGNAL = 4.8; EXPRESSED IN HELA, SIGNAL = 4.7; EXPRESSED IN HEART, SIGNAL = 4.7; EXPRESSED IN FETAL LIVER, SIGNAL =   5; SWISSPROT HIT: P27715, EVALUE 1.30e+00; NT HIT: M86533.1, EVALUE 1.10e-01
gctactgcctggaaccatcaaaatccctaatcccaaaaggacagcttcaaataaggcggtgtcttgcacaccttcttctcaagaaaataatggcaatgcagttgagcccttctgtcactttgatagtagctttcccttcacgcttagtaaaggtgctgcaattactatgggcacctctg

SEQ ID NO: 22349 - DNA, 162 bp, Homo sapiens
  MAP TO AC005848.1; EXPRESSED IN BRAIN, SIGNAL = 1.5; EXPRESSED IN BONE MARROW, SIGNAL = 1.5; EXPRESSED IN ADULT LIVER, SIGNAL = 1.4; EXPRESSED IN PLACENTA, SIGNAL = 1.3; EXPRESSED IN LUNG, SIGNAL = 2.1e+02; EXPRESSED IN FETAL LIVER, SIGNAL = 1.6; EXPRESSED IN HEART, SIGNAL = 1.5; SWISSPROT HIT: Q01970, EVALUE 3.00e-27; NT HIT: Z16411.1, EVALUE 2.00e-86; EST_HUMAN HIT: BE885060.1, EVALUE 3.00e-86
cttggggaagtcgaagggctcttcgtcccacacggggttgaacgagttcccctgagaggtccgggtgcggtacttgcgccgcgtatcaacagggaggccaaacatgtccacctccacgtagatgcccaccttcctgtcggacaggaactgccctgagatcac

SEQ ID NO: 22350 - DNA, 335 bp, Homo sapiens
  MAP TO AC004465.1; EXPRESSED IN BONE MARROW, SIGNAL = 1.5; EXPRESSED IN ADULT LIVER, SIGNAL = 1.5; EXPRESSED IN PLACENTA, SIGNAL = 1.4; EXPRESSED IN HEART, SIGNAL = 1.4; EXPRESSED IN LUNG, SIGNAL = 1.6; EXPRESSED IN FETAL LIVER, SIGNAL = 1.5; EXPRESSED IN BRAIN, SIGNAL = 3.2; SWISSPROT HIT: Q06846, EVALUE 6.00e-09; NT HIT: gi11436448, EVALUE 1.00e-125; EST_HUMAN HIT: AW504133.1, EVALUE 5.00e-03
ttgcttcatccgaatcgtagctgttggcttcctcttcctcctcctctgggggtggtggctggcgggctgcagcaggctggggggcagctgcagatgcttgggaatagggtccggaggggtggctcattcggtcctctctggctccaactgctgggtagcccccgactccccctgttctctcctctcggggtggggcagtggtcccagggtcgctcggagccacctctgcagggagataaggacaggaaacatgcagctgcatccctgtttcataacagcagcacctagggacattttcaaaagatgcggattcctggcttcacccggaatcagtg

SEQ ID NO: 22351 - DNA, 122 bp, Homo sapiens
  MAP TO AC005873.2; EXPRESSED IN LUNG, SIGNAL = 2.1; EXPRESSED IN PLACENTA, SIGNAL = 2.3; EXPRESSED IN HELA, SIGNAL = 2.1; EXPRESSED IN HEART, SIGNAL = 2.4; EXPRESSED IN FETAL LIVER, SIGNAL = 2.2; EXPRESSED IN BRAIN, SIGNAL = 2.5; EXPRESSED IN BONE MARROW, SIGNAL = 2.3; EXPRESSED IN ADULT LIVER, SIGNAL = 1.9; SWISSPROT HIT: Q10135, EVALUE 3.10e+00
tgttttgttcctttagagggagatttccactggtgggagcacaagagcataaaggtagggaactggctggctcttctatcatcatcatcatcatcatcatcatcatcatatgtattatctat

SEQ ID NO: 22352 - DNA, 178 bp, Homo sapiens
  MAP TO AC005729.1; EXPRESSED IN LUNG, SIGNAL = 5.2; EXPRESSED IN PLACENTA, SIGNAL =   4; EXPRESSED IN HELA, SIGNAL = 5.3; EXPRESSED IN HEART, SIGNAL = 3.7; EXPRESSED IN FETAL LIVER, SIGNAL = 7.8; EXPRESSED IN BRAIN, SIGNAL = 2.6; EXPRESSED IN BONE MARROW, SIGNAL = 4.5; EXPRESSED IN ADULT LIVER, SIGNAL =   8; SWISSPROT HIT: P49393, EVALUE 5.00e-26; NT HIT: gi11439532, EVALUE 8.00e-92; EST_HUMAN HIT: AA378336.1, EVALUE 3.00e-92
gtgtaatcctgagagattcacatggtgttgcacaagtacgttttgtgacaggcaataaaattttaagaattcttaagtctaagggacttgctcctgatcttcctgaagatctctaccatttaattaagaaagcagttgctgttcgaaagcatcttgagaggaacagaaaggtaagcta

SEQ ID NO: 22353 - DNA, 151 bp, Homo sapiens
  MAP TO AC004582.1; EXPRESSED IN PLACENTA, SIGNAL = 7.1; EXPRESSED IN LUNG, SIGNAL = 8.6; EXPRESSED IN HEART, SIGNAL = 5.6; EXPRESSED IN BRAIN, SIGNAL = 8.2; EXPRESSED IN HELA, SIGNAL =   5; EXPRESSED IN FETAL LIVER, SIGNAL = 6.7; EXPRESSED IN BONE MARROW, SIGNAL =   6; EXPRESSED IN ADULT LIVER, SIGNAL = 5.9; EST_HUMAN HIT: AW840840.1, EVALUE 8.00e-37; SWISSPROT HIT: P32483, EVALUE 2.30e+00; NT HIT: AL163282.2, EVALUE 7.00e-27
cgctccactaggcagtgccccagtagggagtctgtgtcggggctctgaccccacatttcccttccacactgctctagcagaagttctccatgaaggccccaccactgtagcaaaattttgtctgggcatccaggaatttccatacatcttc

SEQ ID NO: 22354 - DNA, 147 bp, Homo sapiens
  MAP TO AC004071.1; EXPRESSED IN LUNG, SIGNAL = 1.8; EXPRESSED IN FETAL LIVER, SIGNAL =   2; EXPRESSED IN BRAIN, SIGNAL = 1.7; EXPRESSED IN BONE MARROW, SIGNAL = 1.7; EXPRESSED IN ADULT LIVER, SIGNAL = 1.9; EXPRESSED IN PLACENTA, SIGNAL = 1.6; EXPRESSED IN HEART, SIGNAL = 1.7; SWISSPROT HIT: Q60377, EVALUE 3.10e+00; NT HIT: AL163249.2, EVALUE 1.00e-13; EST_HUMAN HIT: BF347229.1, EVALUE 2.00e-18
attcatgattcatgggaggaggtcaaaatatcaatattgacaagaacttggaagaaggtgattcccccgctcatggatgactttgaggggttcaagacttcattgaaggaagccactgtagatgttatggaagtagcaaaagaacta

SEQ ID NO: 22355 - DNA, 136 bp, Homo sapiens
  MAP TO AC000065.1; EXPRESSED IN HEART, SIGNAL = 2.1; EXPRESSED IN BRAIN, SIGNAL = 2.2; EXPRESSED IN PLACENTA, SIGNAL = 1.6; EXPRESSED IN LUNG, SIGNAL = 1.6; EXPRESSED IN HELA, SIGNAL = 1.8; EXPRESSED IN FETAL LIVER, SIGNAL = 1.7; EXPRESSED IN BONE MARROW, SIGNAL =   2; EXPRESSED IN ADULT LIVER, SIGNAL = 1.6; SWISSPROT HIT: Q00534, EVALUE 9.00e-21; EST_HUMAN HIT: AA412560.1, EVALUE 7.00e-71; NT HIT: gi4502740, EVALUE 5.00e-71
cagaagtaggtctttgcctagttcatcgatatctgttacaaacttctcaattggttgggcagattttgaatgaaaagcctgcctgggaagggcaacatctctaggccagtcttcttctcctgggagtccaatcacg

SEQ ID NO: 22356 - DNA, 201 bp, Homo sapiens
  MAP TO AC003665.1; EXPRESSED IN BONE MARROW, SIGNAL = 2.5; EXPRESSED IN PLACENTA, SIGNAL = 2.4; EXPRESSED IN LUNG, SIGNAL = 3.3; EXPRESSED IN HELA, SIGNAL = 2.7; EXPRESSED IN FETAL LIVER, SIGNAL = 2.5; EXPRESSED IN ADULT LIVER, SIGNAL = 2.9; EXPRESSED IN HEART, SIGNAL = 2.5; EXPRESSED IN BRAIN, SIGNAL =   3; EST_HUMAN HIT: BF373541.1, EVALUE 2.00e-63; NT HIT: gi10120495, EVALUE 1.90e+00; SWISSPROT HIT: P38713, EVALUE 8.70e-02
gtacctggaggaggggaacatacaggccgctgaggcccagaagagaaggatcgagcagctgcagcgagacaggcgcaaagtcatggaggaaaacaacatcgtacaccaggctcgcttcttcaggtgcctcggcctcgccctccgccctgggtctccccatgagccctgcttggagcagggcaggtgtgggaggcagcacct

SEQ ID NO: 22357 - DNA, 218 bp, Homo sapiens
  MAP TO AC006013.2; EXPRESSED IN PLACENTA, SIGNAL = 2.4; EXPRESSED IN HEART, SIGNAL = 2.3; EXPRESSED IN BONE MARROW, SIGNAL = 2.2; EXPRESSED IN ADULT LIVER, SIGNAL = 2.8; EXPRESSED IN LUNG, SIGNAL =   3; EXPRESSED IN HELA, SIGNAL = 2.3; EXPRESSED IN FETAL LIVER, SIGNAL = 2.5; EXPRESSED IN BRAIN, SIGNAL = 2.6; EST_HUMAN HIT: AU133116.1, EVALUE 1.90e-01; SWISSPROT HIT: P36332, EVALUE 2.70e+00; NT HIT: X13303.1, EVALUE 5.20e-01
attctcagcaataactgggttgcagcctgttcgccatggggctcccactgccactccagagtcagctgcgtgactcagcaccgggcttgccattggacgaacatgccactcactctcagaagccattacagcaagggctgcttctgctttctctgccttgcatgcgaagtcaagggtatctgctccatatggcactgcataatttacagcacaattta

SEQ ID NO: 22358 - DNA, 165 bp, Homo sapiens
  MAP TO AC005908.1; EXPRESSED IN LUNG, SIGNAL = 9.8; EXPRESSED IN BRAIN, SIGNAL = 9.4; EXPRESSED IN PLACENTA, SIGNAL = 8.2; EXPRESSED IN HEART, SIGNAL = 7.5; EXPRESSED IN FETAL LIVER, SIGNAL = 7.5; EXPRESSED IN BONE MARROW, SIGNAL = 8.6; EXPRESSED IN ADULT LIVER, SIGNAL = 7.7; EXPRESSED IN HELA, SIGNAL = 8.5; SWISSPROT HIT: P21414, EVALUE 8.00e-07; EST_HUMAN HIT: BE744167.1, EVALUE 5.70e-01
cccattgtttgaattaataccttctaccaggccaaatttaggtataatttgttttaagattattttgaccgcattcagggcagtggcagttgggagggagaaggcctccatccagctgaagaggtggcctaccattaccagcagatactttagtctccctatttt

SEQ ID NO: 22359 - DNA, 479 bp, Homo sapiens
  MAP TO AC004447.1; EXPRESSED IN LUNG, SIGNAL = 6.7; EXPRESSED IN BRAIN, SIGNAL = 6.9; EXPRESSED IN BONE MARROW, SIGNAL = 6.6; EXPRESSED IN PLACENTA, SIGNAL = 6.9; EXPRESSED IN HELA, SIGNAL = 6.9; EXPRESSED IN HEART, SIGNAL = 6.4; EXPRESSED IN FETAL LIVER, SIGNAL = 6.6; EXPRESSED IN ADULT LIVER, SIGNAL = 6.7; EST_HUMAN HIT: BF696135.1, EVALUE 1.00e-124; NT HIT: AB002363.1, EVALUE 1.00e-124; SWISSPROT HIT: P52559, EVALUE 1.00e+00
cttttggctcctggatgagacacactctcttgggagctggaatcatgccaaccttcaatgacttgctgctgatcctcttccgagggaagcaggtacctgaggaggcctgtgacaaggcaggtgctccagccaggtcgtcctcggcagcctcgccgggaaggccgtcggcaggggtgctgccctcagacttgcccgcccctccaggagcgggggcctcctctcccccatcctcatcgtcctcgtcctcctcctcaggcatcacctctgggctctccagctcagcctcccgcggagggggctcgtcttcaaactctgcttccccttccatgaggtccacggggctctcctgagaacccgtggtgtcaccaccaccagtgtgaaggttgtgcggagatgacgtgaaacaaattgatggacatagttcaaacactttctttcgatagaatttgaaagcagaactattttggtcatgtagaaac

SEQ ID NO: 22360 - DNA, 141 bp, Homo sapiens
  MAP TO AC004514.1; EXPRESSED IN ADULT LIVER, SIGNAL = 3.2; EXPRESSED IN PLACENTA, SIGNAL = 3.6; EXPRESSED IN LUNG, SIGNAL = 4.1; EXPRESSED IN HEART, SIGNAL = 3.4; EXPRESSED IN BRAIN, SIGNAL = 3.2; EXPRESSED IN HELA, SIGNAL = 3.5; EXPRESSED IN FETAL LIVER, SIGNAL = 3.1; EXPRESSED IN BONE MARROW, SIGNAL = 3.3; EST_HUMAN HIT: AI819504.1, EVALUE 4.70e-01; SWISSPROT HIT: Q9Z2I3, EVALUE 1.00e+00; NT HIT: AF275948.1, EVALUE 8.00e-02
agtaaaaaaaaaaaaaaaaaaaaaaaaaaatcagtgggctaattgggtccaggaccaccttgtgctggggttcatatttggagcattttacatggggatttttgactctgtcctgttgtgtgatctggccagcgtaataat

SEQ ID NO: 22361 - DNA, 497 bp, Homo sapiens
  MAP TO AC004217.1; EXPRESSED IN LUNG, SIGNAL =   2; EXPRESSED IN HEART, SIGNAL = 2.4; EXPRESSED IN FETAL LIVER, SIGNAL =   3; EXPRESSED IN BRAIN, SIGNAL = 2.5; EXPRESSED IN HELA, SIGNAL = 2.4; EXPRESSED IN BONE MARROW, SIGNAL = 2.4; EXPRESSED IN PLACENTA, SIGNAL = 2.1; EXPRESSED IN ADULT LIVER, SIGNAL = 2.3; EST_HUMAN HIT: BE084571.1, EVALUE 3.00e-48; NT HIT: gi11420390, EVALUE 3.10e-01; SWISSPROT HIT: P06333, EVALUE 4.70e-01
ctttgcacctacatccaatgcacctacttcctctgcacctacaccatctgcacctacatccactgtacttacaccctttgcacctacgtccaatgcacctacatccactgcacctacaccctctgcacctatatctactgcacctacaccttgtgtgcctacatcctctgcacctacaccatctgcatctacatccactgcacctacaccctctgcacctacatcctctgcacccacatccactccacctacaccttctgtacttaccacttgctgcgcctataccctctgcacccacatccactgcacctacaccctctgcacccacatccactgcacctacatccactgcacctacaccctctgtacctacatccactgcatctacacgctctgcacctaccactgtctgcacctaccactgtctgcacctacatccactgaacctacatccactgcacctacaccctgtgcacctaccacctgctgcacctaca

SEQ ID NO: 22362 - DNA, 80 bp, Homo sapiens
  MAP TO AC004605.1; EXPRESSED IN LUNG, SIGNAL = 2.6; EXPRESSED IN HEART, SIGNAL = 2.1; EXPRESSED IN FETAL LIVER, SIGNAL = 2.4; EXPRESSED IN BRAIN, SIGNAL = 2.2; EXPRESSED IN HELA, SIGNAL = 2.4; EXPRESSED IN BONE MARROW, SIGNAL = 2.1; EXPRESSED IN PLACENTA, SIGNAL = 2.5; EXPRESSED IN ADULT LIVER, SIGNAL = 2.7; NT HIT: U76636.1, EVALUE 9.90e+00; EST_HUMAN HIT: BF592336.1, EVALUE 2.40e-01
cgcggtggcttcattgaaggctattaagagcaaggtcacaggcagcaaatcagagaaatatttccacctaattgatggag

SEQ ID NO: 22363 - DNA, 102 bp, Homo sapiens
  MAP TO AC005703.1; EXPRESSED IN BRAIN, SIGNAL =  11; EXPRESSED IN ADULT LIVER, SIGNAL = 8.3; EXPRESSED IN BONE MARROW, SIGNAL = 7.8; EXPRESSED IN PLACENTA, SIGNAL =  10; EXPRESSED IN LUNG, SIGNAL = 8.1; EXPRESSED IN HELA, SIGNAL = 7.9; EXPRESSED IN FETAL LIVER, SIGNAL = 9.1; EXPRESSED IN HEART, SIGNAL =  12; EST_HUMAN HIT: BE676799.1, EVALUE 1.30e+00; NT HIT: X60547.1, EVALUE 8.60e-01
tactcttcttttccatttaaacagcagcagcagcagcagcagcagcagcagcagcagcaacagcaaactcatgactatcaataggttgtgtgaggaattaga

SEQ ID NO: 22364 - DNA, 254 bp, Homo sapiens
  MAP TO AC006203.1; EXPRESSED IN ADULT LIVER, SIGNAL = 2.4; EXPRESSED IN PLACENTA, SIGNAL = 2.1; EXPRESSED IN LUNG, SIGNAL = 1.6; EXPRESSED IN FETAL LIVER, SIGNAL = 3.1; EXPRESSED IN HELA, SIGNAL = 2.1; EXPRESSED IN HEART, SIGNAL = 2.5; EXPRESSED IN BRAIN, SIGNAL = 2.4; EXPRESSED IN BONE MARROW, SIGNAL = 2.3; NT HIT: AF217289.1, EVALUE 0.00e+00; SWISSPROT HIT: P55280, EVALUE 3.00e-22; EST_HUMAN HIT: F11137.1, EVALUE 1.50e-02
cccctgagttttgaaagcaagaaaagctacaccttaaaggtggagggagccaatcctcacctagagatgcgttttctgaacttgggcccatttcaggacacaacaacagtgcacatcagtgtggaagacgtggacgagccccctgtgtttgaacctggcttttactttgtggaggtgcctgaggatgtggcgattggaacaaccatacagatcatttctgccaaggacccagatgtgaccaacaactcaatcag

SEQ ID NO: 22365 - DNA, 238 bp, Homo sapiens
  MAP TO AC004587.1; EXPRESSED IN BRAIN, SIGNAL = 1.8; EXPRESSED IN ADULT LIVER, SIGNAL = 2.1; EXPRESSED IN BONE MARROW, SIGNAL = 2.4; EXPRESSED IN PLACENTA, SIGNAL = 4.7; EXPRESSED IN LUNG, SIGNAL = 5.2; EXPRESSED IN HELA, SIGNAL = 2.4; EXPRESSED IN HEART, SIGNAL = 1.9; EXPRESSED IN FETAL LIVER, SIGNAL = 2.3; SWISSPROT HIT: P46940, EVALUE 4.00e-33; EST_HUMAN HIT: BE828144.1, EVALUE 0.00e+00; NT HIT: gi4506786, EVALUE 1.00e-115
tcaatgctgaggatcctcctatggttgtggtccgaaaatttgtccacctgctggaccaaagtgaccaggattttcaggaggagcttgaccttatgaagatgcgggaagaggttatcaccctcattcgttctaaccagcagctggagaatgacctcaatctcatggatatcaaaattggactgctagtgaaaaataagattacgttgcaggtatggcccagtgccagcgggggccttgg

SEQ ID NO: 22366 - DNA, 158 bp, Homo sapiens
  MAP TO AC003669.1; EXPRESSED IN PLACENTA, SIGNAL = 1.4; EXPRESSED IN HEART, SIGNAL = 1.5; EXPRESSED IN FETAL LIVER, SIGNAL = 1.4; EXPRESSED IN BRAIN, SIGNAL = 1.7; EXPRESSED IN LUNG, SIGNAL = 1.7; EXPRESSED IN BONE MARROW, SIGNAL = 1.5; EXPRESSED IN ADULT LIVER, SIGNAL = 1.4; SWISSPROT HIT: P51813, EVALUE 1.00e-16; NT HIT: gi4502434, EVALUE 3.00e-54; EST_HUMAN HIT: AU137359.1, EVALUE 5.40e-01
tatgacaactcccaggtggttctgaaggtctcccagggccacaggctttaccggccccacctggcatcggacaccatctaccagatcatgtacagctgctggcacgaggcaagtgtattctctgggtgggctggaaggggtctcaggcacatccgggg

SEQ ID NO: 22367 - DNA, 227 bp, Homo sapiens
  MAP TO AC004945.1; EXPRESSED IN LUNG, SIGNAL =   3; EXPRESSED IN HEART, SIGNAL = 2.6; EXPRESSED IN FETAL LIVER, SIGNAL = 2.2; EXPRESSED IN BRAIN, SIGNAL = 2.6; EXPRESSED IN HELA, SIGNAL = 2.5; EXPRESSED IN BONE MARROW, SIGNAL = 2.3; EXPRESSED IN PLACENTA, SIGNAL = 2.5; EXPRESSED IN ADULT LIVER, SIGNAL = 2.6; EST_HUMAN HIT: BE780624.1, EVALUE 1.00e-05; SWISSPROT HIT: Q01901, EVALUE 2.30e+00; NT HIT: L23416.1, EVALUE 9.00e-06
gagttacataaggatctcctatattcgtctttatcttcccttgttcaacaaatatttattgagtgccaactatttgtaaagctctgcgtaaaaggctgtgaagaaaacagaaatgaaccttatttagactttttaataaagatgccccaaagaaagctgaaaaggaagttaaaatttaaatcagttaatgcaattttccagaagtgtctattaaaggcaggactgag

SEQ ID NO: 22368 - DNA, 183 bp, Homo sapiens
  MAP TO AC005912.1; EXPRESSED IN PLACENTA, SIGNAL =   2; EXPRESSED IN LUNG, SIGNAL = 1.8; EXPRESSED IN FETAL LIVER, SIGNAL = 2.1; EXPRESSED IN BRAIN, SIGNAL =   2; EXPRESSED IN BONE MARROW, SIGNAL = 1.9; EXPRESSED IN ADULT LIVER, SIGNAL = 2.1; EXPRESSED IN HELA, SIGNAL =   2; EXPRESSED IN HEART, SIGNAL =   3; SWISSPROT HIT: Q59989, EVALUE 1.70e+00; NT HIT: AF179825.1, EVALUE 4.30e-01; EST_HUMAN HIT: AV653021.1, EVALUE 2.50e+00
caagttcacacaaaaaggtcatttcccaaacaagagcactgccaaggaagaacaagagcaccatggactggcagtcagggaggacacaacgggagagagccttgagctggcactgagagctgtgcacgtgctcaagagtctagaggtgaatgcaagggcagtcgcggtcctgaccggagggcc

SEQ ID NO: 22369 - DNA, 249 bp, Homo sapiens
  MAP TO AC005042.1; EXPRESSED IN PLACENTA, SIGNAL = 1.2; EXPRESSED IN HELA, SIGNAL = 2.9; EXPRESSED IN BRAIN, SIGNAL = 2.3; EXPRESSED IN ADULT LIVER, SIGNAL = 1.1; EXPRESSED IN HEART, SIGNAL = 1.4; EXPRESSED IN LUNG, SIGNAL = 1.3; EXPRESSED IN FETAL LIVER, SIGNAL = 1.2; EXPRESSED IN BONE MARROW, SIGNAL = 0.91; SWISSPROT HIT: P23471, EVALUE 2.90e+00; NT HIT: gi11430988, EVALUE 0.00e+00; EST_HUMAN HIT: BE958636.1, EVALUE 0.00e+00
catcaacagctgtattatagtcaagatgactccaacagaaagaactttgatgcatacagattgtatttgcagtctcctcatagctatgaagatccttattttgatgaccgagttcactttccagcttctactgattactcaacacagtatggactgaaatcgaccacaaattatgtagacttttattccactaaacgaccttcttatagagcagaacagtacccagggtccccagactcatgggtgtag

SEQ ID NO: 22370 - DNA, 141 bp, Homo sapiens
  MAP TO AC004525.1; EXPRESSED IN PLACENTA, SIGNAL = 2.9; EXPRESSED IN HEART, SIGNAL = 1.9; EXPRESSED IN ADULT LIVER, SIGNAL = 2.3; EXPRESSED IN LUNG, SIGNAL =   2; EXPRESSED IN FETAL LIVER, SIGNAL = 2.3; EXPRESSED IN BRAIN, SIGNAL = 1.8; EXPRESSED IN BONE MARROW, SIGNAL = 2.7; EXPRESSED IN HELA, SIGNAL = 1.9; EST_HUMAN HIT: BE696075.1, EVALUE 7.00e-74; SWISSPROT HIT: P24394, EVALUE 8.00e-24; NT HIT: gi11431471, EVALUE 5.00e-74
cgttttcactccaaatgttgactgcataggtgagatgattatacaggtaattgtcagggggatacgggttgctccaggtcagcagcagagtgtcggagacattggtgtgaactgtcaggtttcctggggccctgggtttca

SEQ ID NO: 22371 - DNA, 122 bp, Homo sapiens
  MAP TO AC003042.1; EXPRESSED IN PLACENTA, SIGNAL = 1.1; EXPRESSED IN LUNG, SIGNAL = 1.1; EXPRESSED IN HEART, SIGNAL = 1.3; EXPRESSED IN FETAL LIVER, SIGNAL = 1.2; EXPRESSED IN BONE MARROW, SIGNAL = 1.1; EXPRESSED IN ADULT LIVER, SIGNAL = 1.1; EXPRESSED IN BRAIN, SIGNAL = 1.2; EST_HUMAN HIT: AW970610.1, EVALUE 4.00e-01; NT HIT: gi11056015, EVALUE 1.10e+00
aaatcagcacaaatacactcgtgtaaggcaaataaatctcccaatccaaatattttacagcatgcgtacaaggaggaagtggagaagtatgtgtctgcaccattcaagttttcctcagaaat

SEQ ID NO: 22372 - DNA, 166 bp, Homo sapiens
  MAP TO AC005180.1; EXPRESSED IN LUNG, SIGNAL = 5.5; EXPRESSED IN FETAL LIVER, SIGNAL = 5.1; EXPRESSED IN BONE MARROW, SIGNAL = 5.2; EXPRESSED IN PLACENTA, SIGNAL =   5; EXPRESSED IN HELA, SIGNAL = 5.3; EXPRESSED IN HEART, SIGNAL =   5; EXPRESSED IN BRAIN, SIGNAL = 5.6; EXPRESSED IN ADULT LIVER, SIGNAL = 4.8; SWISSPROT HIT: P21978, EVALUE 1.80e+00; NT HIT: AF002133.1, EVALUE 9.70e-02; EST_HUMAN HIT: AW139565.1, EVALUE 1.00e-88
gcctcatctaatgccctgtgctcctctcccccgccggcagcatcttcagagtgcccagcaccggagctttgccctggaagcccatctatatgcagaagtggacaggatcattgctcagctcagccacagctttgcagacatccctttccaggctggcctccccagg

SEQ ID NO: 22373 - DNA, 211 bp, Homo sapiens
  MAP TO AC004952.1; EXPRESSED IN PLACENTA, SIGNAL = 3.3; EXPRESSED IN LUNG, SIGNAL = 3.5; EXPRESSED IN HEART, SIGNAL = 3.3; EXPRESSED IN BRAIN, SIGNAL = 3.6; EXPRESSED IN ADULT LIVER, SIGNAL = 3.9; EXPRESSED IN FETAL LIVER, SIGNAL = 3.1; EXPRESSED IN BONE MARROW, SIGNAL = 3.1; EXPRESSED IN HELA, SIGNAL = 3.4; SWISSPROT HIT: Q12860, EVALUE 6.00e-05; NT HIT: AK024428.1, EVALUE 3.20e-02; EST_HUMAN HIT: BE620790.1, EVALUE 1.90e-01
cggcctggtgggtgcgcccctgctgggggtcactcttaggtccatctccggcggcgttgaaggctgatatgctgaccaggtacttggtatggctggtcaggttcttcagcctcaccacgggctcggggaggaagaggaccttcattttctccgtttcgttctggctgtctgcctcccagtagtaaatctgttaggaacagcaagaggttgg

SEQ ID NO: 22374 - DNA, 171 bp, Homo sapiens
  MAP TO AC002040.1; EXPRESSED IN HELA, SIGNAL = 6.9; EXPRESSED IN HEART, SIGNAL = 5.9; EXPRESSED IN BONE MARROW, SIGNAL = 0.82; EXPRESSED IN PLACENTA, SIGNAL = 0.78; EXPRESSED IN LUNG, SIGNAL = 0.7; EXPRESSED IN FETAL LIVER, SIGNAL = 0.92; EXPRESSED IN ADULT LIVER, SIGNAL = 0.86; EXPRESSED IN BRAIN, SIGNAL = 0.79; NT HIT: AF005631.1, EVALUE 1.60e+00; EST_HUMAN HIT: BE735002.1, EVALUE 9.20e+00; SWISSPROT HIT: P28592, EVALUE 1.70e+00
ctctttctttcctgcaccctgatctacagcatcgatcacaattgccacgtcacactgttctttggcccttgtgtctcctgcaggtgtgctttcaatgggctcaggttctaggtttgttgtacaaagcctgccagggcagggggaacaggacgtgattccttggcccctttg

SEQ ID NO: 22375 - DNA, 218 bp, Homo sapiens
  MAP TO AC005940.3; EXPRESSED IN PLACENTA, SIGNAL = 1.7; EXPRESSED IN LUNG, SIGNAL =   2; EXPRESSED IN HEART, SIGNAL = 1.8; EXPRESSED IN BRAIN, SIGNAL = 2.2; EXPRESSED IN BONE MARROW, SIGNAL = 1.8; EXPRESSED IN ADULT LIVER, SIGNAL =   2; EXPRESSED IN HELA, SIGNAL =   2; EXPRESSED IN FETAL LIVER, SIGNAL = 1.9; SWISSPROT HIT: P50526, EVALUE 1.00e-11; NT HIT: S83194.1, EVALUE 8.00e-74
tgcactgccagaagatcgtccacagggacatcaagccatccaacctgctcctgggggatgatgggcacgtgaagatcgccgactttggcgtcagcaaccagtttgaggggaacgacgctcagctgtccagcacggcgggaaccccagcattcatggcccccgaggccatttctgattccggccagagcttcagtgggaaggtgactcgcaggccctgg

SEQ ID NO: 22376 - DNA, 174 bp, Homo sapiens
  MAP TO AC004222.1; EXPRESSED IN PLACENTA, SIGNAL =  11; EXPRESSED IN LUNG, SIGNAL =  12; EXPRESSED IN HEART, SIGNAL = 9.1; EXPRESSED IN BRAIN, SIGNAL =  10; EXPRESSED IN ADULT LIVER, SIGNAL = 8.8; EXPRESSED IN FETAL LIVER, SIGNAL = 9.3; EXPRESSED IN BONE MARROW, SIGNAL =  11; EXPRESSED IN HELA, SIGNAL =  10; SWISSPROT HIT: Q04690, EVALUE 2.00e-29; NT HIT: gi4557792, EVALUE 1.00e-93; EST_HUMAN HIT: BE937906.1, EVALUE 5.00e-91
aaagactgcattgaagttgttgcagctgagagaaaataaaaccccagaggcagaattccgaagttcagctgcatgctggtttccttcacgacaggtgtgaagaaaatggcagatttctggcagcaactgtttgaccagcatcgtttcatctaatctcattgtgtcctttggttg

SEQ ID NO: 22377 - DNA, 260 bp, Homo sapiens
  MAP TO AC006208.3; EXPRESSED IN LUNG, SIGNAL = 4.4; EXPRESSED IN ADULT LIVER, SIGNAL = 3.6; EXPRESSED IN PLACENTA, SIGNAL = 3.5; EXPRESSED IN HEART, SIGNAL = 3.9; EXPRESSED IN FETAL LIVER, SIGNAL = 3.9; EXPRESSED IN BRAIN, SIGNAL = 4.2; EXPRESSED IN BONE MARROW, SIGNAL = 4.2; EXPRESSED IN HELA, SIGNAL = 4.1; NT HIT: L26049.2, EVALUE 6.00e-04; SWISSPROT HIT: P39057, EVALUE 3.00e-10; EST_HUMAN HIT: AU140291.1, EVALUE 1.00e-113
tgggccaggtagtggcagaggagcgacccgacctggaggaggccaagaaccagctgattatcagtaatgccaagatgcgccaggagctgaaggacattgaggaccagatcctgtaccggctcagctcctccgagggcaaccctgtagatgacatggaactcatcaaggtgctggaagcctccaagatgaaggctgctgagatccaggtcagctgctgcctgcccacccacctgccccgggagtgccccgggcctgccccc

SEQ ID NO: 22378 - DNA, 121 bp, Homo sapiens
  MAP TO AC005726.1; EXPRESSED IN FETAL LIVER, SIGNAL = 1.8; EXPRESSED IN BRAIN, SIGNAL = 1.8; EXPRESSED IN BONE MARROW, SIGNAL = 1.6; EXPRESSED IN ADULT LIVER, SIGNAL = 1.6; EXPRESSED IN LUNG, SIGNAL = 1.8; EXPRESSED IN PLACENTA, SIGNAL = 1.7; EXPRESSED IN HELA, SIGNAL = 1.6; EXPRESSED IN HEART, SIGNAL = 1.7; EST_HUMAN HIT: BE550020.1, EVALUE 3.90e-01; NT HIT: gi4506978, EVALUE 4.00e-62; SWISSPROT HIT: Q13183, EVALUE 4.00e-03
cttactggggacgaggatgggcagaggcagcaggagaatgggcacgaagaacacgatcaggtaggagcgataggcccacagggcctgccagcaggtggccatggtgtggagcagcaagggc

SEQ ID NO: 22379 - DNA, 147 bp, Homo sapiens
  MAP TO AC005041.2; EXPRESSED IN PLACENTA, SIGNAL = 1.5; EXPRESSED IN LUNG, SIGNAL = 1.6; EXPRESSED IN HEART, SIGNAL = 1.9; EXPRESSED IN BRAIN, SIGNAL = 2.4; EXPRESSED IN HELA, SIGNAL = 1.9; EXPRESSED IN FETAL LIVER, SIGNAL = 1.5; EXPRESSED IN BONE MARROW, SIGNAL = 1.6; EXPRESSED IN ADULT LIVER, SIGNAL = 1.3; NT HIT: AF086944.1, EVALUE 1.00e-77; SWISSPROT HIT: Q14203, EVALUE 8.00e-20; EST_HUMAN HIT: AA348813.1, EVALUE 2.00e-71
gtccccacaggagccatccctgggcaggctccagggtctgtgccaggcccagggctggtgaaggactcaccactgctgcttcagcagatctctgccatgaggctgcacatctcccagctccagcatgagaacagcatcctcaaggtg

SEQ ID NO: 22380 - DNA, 214 bp, Homo sapiens
  MAP TO AB019440.1; EXPRESSED IN PLACENTA, SIGNAL = 2.8; EXPRESSED IN HEART, SIGNAL = 3.1; EXPRESSED IN FETAL LIVER, SIGNAL = 3.2; EXPRESSED IN LUNG, SIGNAL = 2.9; EXPRESSED IN HELA, SIGNAL = 3.4; EXPRESSED IN BRAIN, SIGNAL = 3.8; EXPRESSED IN BONE MARROW, SIGNAL = 3.6; EXPRESSED IN ADULT LIVER, SIGNAL = 3.1; EST_HUMAN HIT: AA594178.1, EVALUE 4.00e-24; NT HIT: M32788.1, EVALUE 1.00e-04; SWISSPROT HIT: P31795, EVALUE 7.00e-20
ctgttagaagctaccgaaactggcaggccagatcttcaagatgtgctcctgagaaaggcggacgccaccgtgttcaccgacggcagcagttttctcgaacaggggatacgcaaagctggtgcagctgttaccacagagacagatgtgttgtgggttcaggctttaccggcaagcacctcagcacaaaaagctgaattgattgcccttactcaag

SEQ ID NO: 22381 - DNA, 230 bp, Homo sapiens
  MAP TO AC003098.1; EXPRESSED IN PLACENTA, SIGNAL = 3.5; EXPRESSED IN LUNG, SIGNAL = 3.5; EXPRESSED IN HELA, SIGNAL = 3.4; EXPRESSED IN FETAL LIVER, SIGNAL = 3.2; EXPRESSED IN BONE MARROW, SIGNAL = 3.6; EXPRESSED IN ADULT LIVER, SIGNAL = 3.8; EXPRESSED IN HEART, SIGNAL = 3.4; EXPRESSED IN BRAIN, SIGNAL = 3.8; NT HIT: gi4758207, EVALUE 1.00e-125; EST_HUMAN HIT: BE892660.1, EVALUE 1.00e-125; SWISSPROT HIT: P51452, EVALUE 7.00e-38
cattcttttgagccaaagcctggtcaatgaagtcggcagccctttcaaagtaagcgctgaggttgaactcctgtgtgtcgttggccttgatgcccaggtatgtgatgccggagtccttgtagaagttggcattggtgttgacgtgcatgaaggacctgccctcagccgcgttcagcacatgggtgatgcctagtttctgcagcttggggatgtcctgagccacagacctg

SEQ ID NO: 22382 - DNA, 121 bp, Homo sapiens
  MAP TO AC005088.2; EXPRESSED IN PLACENTA, SIGNAL = 4.6; EXPRESSED IN ADULT LIVER, SIGNAL = 4.8; EXPRESSED IN LUNG, SIGNAL = 2.3; EXPRESSED IN HEART, SIGNAL = 3.5; EXPRESSED IN FETAL LIVER, SIGNAL = 6.4; EXPRESSED IN BRAIN, SIGNAL = 3.9; EXPRESSED IN BONE MARROW, SIGNAL = 5.9; EXPRESSED IN HELA, SIGNAL =   4; SWISSPROT HIT: P22815, EVALUE 9.30e+00; EST_HUMAN HIT: BF208036.1, EVALUE 3.90e-01; NT HIT: gi7305088, EVALUE 1.10e+00
tatggatctgcagaaaagccggaacaaggcgagcctgtgcccctgaagcagggccatctgtgtcacccagtgtcccttcagcaatctggccagactgagttcactaccaaaatcgaattgt

SEQ ID NO: 22383 - DNA, 123 bp, Homo sapiens
  MAP TO AC005922.1; EXPRESSED IN PLACENTA, SIGNAL =  23; EXPRESSED IN HEART, SIGNAL =  21; EXPRESSED IN LUNG, SIGNAL =  26; EXPRESSED IN FETAL LIVER, SIGNAL =  20; EXPRESSED IN BRAIN, SIGNAL =  27; EXPRESSED IN BONE MARROW, SIGNAL =  23; EXPRESSED IN ADULT LIVER, SIGNAL =  21; EXPRESSED IN HELA, SIGNAL =  22; SWISSPROT HIT: P78363, EVALUE 1.20e-01; NT HIT: gi6005700, EVALUE 8.00e-54; EST_HUMAN HIT: AA029504.1, EVALUE 1.00e-53
acacctgaaaagcaaatttggcaaagactacctgctggagatgaagctgaagaacctggcacaaatggagcccctccatgcagagatcctgaggcttttcccccaggctgctcagcaggaaag

SEQ ID NO: 22384 - DNA, 470 bp, Homo sapiens
  MAP TO AC005058.1; EXPRESSED IN LUNG, SIGNAL = 0.91; EXPRESSED IN FETAL LIVER, SIGNAL = 0.96; EXPRESSED IN BONE MARROW, SIGNAL = 0.67; EXPRESSED IN PLACENTA, SIGNAL = 0.96; EXPRESSED IN HEART, SIGNAL = 1.7; EXPRESSED IN BRAIN, SIGNAL = 1.2; EXPRESSED IN ADULT LIVER, SIGNAL = 2.2; EST_HUMAN HIT: BF031742.1, EVALUE 0.00e+00; NT HIT: AF083247.1, EVALUE 0.00e+00; SWISSPROT HIT: Q05646, EVALUE 1.00e-04
catatgaaacactctcagatgctaatagacgaaaagagtatgatacacttggacacagtgcttttactagtggtaaaggacaaagaggtagtggaagttcttttgagcagtcatttaacttcaattttgatgacttatttaaagactttggcttttttggtcaaaaccaaaacactggatccaagaagcgttttgaaaatcatttccagacacgccaggatggtggttccagtagacaaaggcatcatttccaagaattttcttttggaggtggattatttgatgacatgtttgaagatatggagaaaatgttttcttttagtggttttgactctaccaatcagcatacagtacagactgaaaatagatttcatggatctagcaagcactgcaggactgtcactcaacgaagaggaaatatggttactacatacactgactgttcaggacagtagttcttattctattct

SEQ ID NO: 22385 - DNA, 396 bp, Homo sapiens
  MAP TO AC005230.1; EXPRESSED IN PLACENTA, SIGNAL = 1.8; EXPRESSED IN HEART, SIGNAL = 2.1; EXPRESSED IN ADULT LIVER, SIGNAL =   2; EXPRESSED IN LUNG, SIGNAL = 2.3; EXPRESSED IN FETAL LIVER, SIGNAL = 2.1; EXPRESSED IN BRAIN, SIGNAL = 2.2; EXPRESSED IN BONE MARROW, SIGNAL =   2; EXPRESSED IN HELA, SIGNAL = 2.1; EST_HUMAN HIT: BE504766.1, EVALUE 6.00e-40; SWISSPROT HIT: Q9ZJZ7, EVALUE 8.70e+00
atgaaaaccttttggtgttatggtccatgttttcaaactttttaaggagcttgttgagctccttaaaaagcttctgctaaagcttctgctaaaacccttcactgtgaattttcttggggtttcttctttttcttctctagctgtttccctttctctggcctgttcttcagctatgtgttcctgttccagttccaacaacccctcattagtcagttcctcaggaaccacctctaggtgctcatcaatgtcatccttgtccacaccatggttaaagttgcttgccatcccaaccacagccatgttgatttttgcaatctcttcatccttggcaaatcctttgaagtcacagatgaacctcttgagtgtcttcttccagatgccattcatacccatatt

SEQ ID NO: 22386 - DNA, 192 bp, Homo sapiens
  MAP TO AC000001.1; EXPRESSED IN BONE MARROW, SIGNAL = 1.4; EXPRESSED IN PLACENTA, SIGNAL = 1.1; EXPRESSED IN LUNG, SIGNAL = 1.3; EXPRESSED IN HEART, SIGNAL = 1.3; EXPRESSED IN FETAL LIVER, SIGNAL = 1.2; EXPRESSED IN BRAIN, SIGNAL = 1.3; EXPRESSED IN ADULT LIVER, SIGNAL = 0.92; EST_HUMAN HIT: AA262507.1, EVALUE 5.00e-94; SWISSPROT HIT: P50747, EVALUE 3.00e-28; NT HIT: U43379.1, EVALUE 1.00e-104
ttaccgccgtttggggaggatgaggtttctcagcatgtcgaaggagttgccgtccgggtgcacagtcacaacctcgccgccctcctggtgaacctggaggaagccagaatcgtccaggccaacgatggacacctttggtccctctgcgctgcccagatggacttgctgaccactgaaaaggaagaacagcgt

SEQ ID NO: 22387 - DNA, 258 bp, Homo sapiens
  MAP TO AC004691.1; EXPRESSED IN PLACENTA, SIGNAL =   2; EXPRESSED IN LUNG, SIGNAL = 2.2; EXPRESSED IN HEART, SIGNAL = 1.9; EXPRESSED IN BRAIN, SIGNAL = 1.6; EXPRESSED IN BONE MARROW, SIGNAL =   2; EXPRESSED IN ADULT LIVER, SIGNAL = 1.9; EXPRESSED IN HELA, SIGNAL = 2.3; EXPRESSED IN FETAL LIVER, SIGNAL = 2.3; EST_HUMAN HIT: AI708840.1, EVALUE 2.30e-01; SWISSPROT HIT: P01842, EVALUE 1.80e+00; NT HIT: AL161543.2, EVALUE 2.50e+00
ctcacccagccttctggttgttttgtcaaaacttctggacctttgattccacccccatcgtgaggctcaacatgacatttccaacaggagattgcccagaatgggtccagctgcttccgatggttttccatttgttctggaaaaagctccagatacctttggtcagcgctcttcctggcgtctgccttgcttgggccatttctcgcccacaccatccagaaggggttgctgtctgtaggtacctgcacatctgttcca

SEQ ID NO: 22388 - DNA, 322 bp, Homo sapiens
  MAP TO AC004775.1; EXPRESSED IN LUNG, SIGNAL = 2.1; EXPRESSED IN FETAL LIVER, SIGNAL = 1.8; EXPRESSED IN BRAIN, SIGNAL = 2.6; EXPRESSED IN BONE MARROW, SIGNAL = 1.7; EXPRESSED IN PLACENTA, SIGNAL = 1.7; EXPRESSED IN HEART, SIGNAL = 1.7; EXPRESSED IN ADULT LIVER, SIGNAL = 1.7; NT HIT: AF179995.1, EVALUE 1.00e-103; EST_HUMAN HIT: AW161406.1, EVALUE 6.00e-95; SWISSPROT HIT: Q92599, EVALUE 5.00e-33
ttggccccgagccctgagccccccaagccccaagcccctgatctcagctggcagcctcctgggtgatggagctgtctgtagttacaggcccatagttgactacatcgatgcgcagtttgaaaattatctgcaggaggagctgaagatccgccgctcgctcttcgactaccatgacacaaggatccacgtttgcctctacttcatcacgcccacagggcactccctgaagtctctagatctagtgaccatgaagaaactagacagcaaggtatccctgtccccacctgctgtcacaggctccatagtcttctgctgcgatgcg

SEQ ID NO: 22389 - DNA, 216 bp, Homo sapiens
  MAP TO AC005191.1; EXPRESSED IN LUNG, SIGNAL = 1.5; EXPRESSED IN FETAL LIVER, SIGNAL = 1.4; EXPRESSED IN BRAIN, SIGNAL = 1.5; EXPRESSED IN BONE MARROW, SIGNAL = 1.8; EXPRESSED IN PLACENTA, SIGNAL = 1.9; EXPRESSED IN HELA, SIGNAL = 1.6; EXPRESSED IN HEART, SIGNAL = 1.9; EXPRESSED IN ADULT LIVER, SIGNAL = 1.5; SWISSPROT HIT: Q9UL62, EVALUE 2.00e-37; NT HIT: gi11420764, EVALUE 1.00e-118; EST_HUMAN HIT: AA629948.1, EVALUE 1.00e-14
catccattccacgacagttgggggaggcccctgtacatgaaggtctgtcctgacaatgtgctgagaagccaggagaagcataaagaggaaggtcaaataggatgctgtgtggcagataaacttgataaagggtttcttgatgaacagcccaaggttgctcctgggtgagatcaggtaggctatagacagcatgggaaacaggaacccaatggtcat

SEQ ID NO: 22390 - DNA, 166 bp, Homo sapiens
  MAP TO AC005848.1; EXPRESSED IN PLACENTA, SIGNAL =   6; EXPRESSED IN ADULT LIVER, SIGNAL = 7.7; EXPRESSED IN LUNG, SIGNAL = 5.8; EXPRESSED IN HEART, SIGNAL =   6; EXPRESSED IN FETAL LIVER, SIGNAL = 9.2; EXPRESSED IN BRAIN, SIGNAL = 7.1; EXPRESSED IN HELA, SIGNAL = 7.2; EXPRESSED IN BONE MARROW, SIGNAL = 7.1; EST_HUMAN HIT: AI143870.1, EVALUE 9.00e-71; SWISSPROT HIT: P24736, EVALUE 4.00e-02; NT HIT: AF099144.1, EVALUE 3.80e-01
cccagttccgcggcttctctgctgaagatgtgcagcgcgtggtggacaccaataggaagcagcggttcgccctgcagctgggggatcccagcactggccttctcatccgggccaaccagggccattccctgcaggtcggggtgaggggacaagtgcgagacgagat

SEQ ID NO: 22391 - DNA, 103 bp, Homo sapiens
  MAP TO AC002064.1; EXPRESSED IN PLACENTA, SIGNAL = 1.4; EXPRESSED IN HELA, SIGNAL = 1.8; EXPRESSED IN HEART, SIGNAL = 2.7; EXPRESSED IN FETAL LIVER, SIGNAL = 1.7; EXPRESSED IN ADULT LIVER, SIGNAL = 1.4; EXPRESSED IN LUNG, SIGNAL = 1.6; EXPRESSED IN BRAIN, SIGNAL = 1.9; EXPRESSED IN BONE MARROW, SIGNAL = 1.8; EST_HUMAN HIT: BE619650.1, EVALUE 3.30e-01
aaagtatgttctccagaccaatagcatcaacattgtttgggaactggttaaaagcacatatccttgggcctcacccagacttactgaagcagagactctgcag

SEQ ID NO: 22392 - DNA, 203 bp, Homo sapiens
  MAP TO AC004828.2; EXPRESSED IN PLACENTA, SIGNAL = 1.7; EXPRESSED IN LUNG, SIGNAL = 1.8; EXPRESSED IN HEART, SIGNAL = 1.6; EXPRESSED IN BRAIN, SIGNAL = 1.6; EXPRESSED IN BONE MARROW, SIGNAL = 1.5; EXPRESSED IN FETAL LIVER, SIGNAL = 1.8; EXPRESSED IN ADULT LIVER, SIGNAL = 1.7; EST_HUMAN HIT: BF681034.1, EVALUE 7.10e-01; SWISSPROT HIT: P07086, EVALUE 1.70e+00; NT HIT: gi11423139, EVALUE 1.90e+00
gctatacaaccctggttccttcaagtgctcctcacatgaatgttttaaagagctcaagccctatcagaatcaggagtttggcaatgagtgggggcacctgtggctttccgtggaggtacgtgatttaagcagcgcgaatgggcggagtctagaccataggggtttgcaaccgtatgatggtggtgtggaaaagggtaaatgta

SEQ ID NO: 22393 - DNA, 133 bp, Homo sapiens
  MAP TO AC005738.1; EXPRESSED IN LUNG, SIGNAL = 1.2; EXPRESSED IN PLACENTA, SIGNAL = 1.1; EXPRESSED IN HEART, SIGNAL = 1.6; EXPRESSED IN FETAL LIVER, SIGNAL = 1.5; EXPRESSED IN BRAIN, SIGNAL = 1.5; EXPRESSED IN BONE MARROW, SIGNAL = 1.4; EXPRESSED IN ADULT LIVER, SIGNAL = 1.1; SWISSPROT HIT: Q28938, EVALUE 4.10e+00; NT HIT: AF221712.1, EVALUE 4.60e+00; EST_HUMAN HIT: AI198413.1, EVALUE 4.40e-01
tacacatgaacttgcagatgcagcttatgacaggagacgggaatgttgtgggcaccttactcagccactcacgtattggggacagggcagtcaatgcactgcaccgagtttgtaaggccactgggcaatgctg

SEQ ID NO: 22394 - DNA, 408 bp, Homo sapiens
  MAP TO AC004506.1; EXPRESSED IN PLACENTA, SIGNAL = 2.1; EXPRESSED IN HEART, SIGNAL = 1.8; EXPRESSED IN LUNG, SIGNAL = 2.2; EXPRESSED IN HELA, SIGNAL =   2; EXPRESSED IN FETAL LIVER, SIGNAL = 1.8; EXPRESSED IN BRAIN, SIGNAL = 1.9; EXPRESSED IN BONE MARROW, SIGNAL = 2.1; EXPRESSED IN ADULT LIVER, SIGNAL = 1.9; EST_HUMAN HIT: BE298940.1, EVALUE 2.00e-77; SWISSPROT HIT: P16884, EVALUE 1.30e+00
gaacagctcatcgctcagaagaaaggggaaattggatccaaaatgcaacagaaagccaagcagaatgaggtggccagcccacagcccccatatcccggcgaaatcacaaatgcacacaactcttcctccgtttcaaacaagtttgccaacgacggtagcttcttgcagcagtttctgaagttgcagatggcacagacgagcacagatgcccctcacccccaacgccagggcgcccagtgcccctcccggcacgcctacctcctgcgccgggaagaggtccctcctcatcagcaggcggataggcctagggctggccaacccgccaggccggtgaagagctactctactcgcacgccaagcagctgcctgtggcgcaccgcccgagtgtcttccagtcccacgacgagg

SEQ ID NO: 22395 - DNA, 219 bp, Homo sapiens
  MAP TO AC005865.1; EXPRESSED IN BRAIN, SIGNAL = 0.85; EXPRESSED IN LUNG, SIGNAL = 0.91; EXPRESSED IN FETAL LIVER, SIGNAL = 0.8; EXPRESSED IN BONE MARROW, SIGNAL = 0.53; EXPRESSED IN ADULT LIVER, SIGNAL = 0.86; EXPRESSED IN PLACENTA, SIGNAL = 1.4; EXPRESSED IN HEART, SIGNAL =   2; SWISSPROT HIT: P04954, EVALUE 1.20e+00; EST_HUMAN HIT: R08600.1, EVALUE 7.70e-01; NT HIT: gi4507106, EVALUE 8.10e+00
agacaggggcagtggtgctgatggaatgtgggggaggcccacatttgagcaaagctgccctgcccttgtcccctggcctggcttcctggtaaggagtttcagccgcctccgcaggaacccccaaagtgcagattccggagcagacacatccgggcggagagactcagcagacaagtgctgcagttgcacggtgggacccggggcctcgtgcgttttttg

SEQ ID NO: 22396 - DNA, 83 bp, Homo sapiens
  MAP TO AC004787.1; EXPRESSED IN LUNG, SIGNAL = 0.93; EXPRESSED IN FETAL LIVER, SIGNAL = 0.83; EXPRESSED IN BONE MARROW, SIGNAL = 0.93; EXPRESSED IN PLACENTA, SIGNAL = 0.79; EXPRESSED IN ADULT LIVER, SIGNAL = 0.89; EXPRESSED IN HEART, SIGNAL = 1.6; NT HIT: AE001486.1, EVALUE 6.70e-01
cagtttgccccgtgcagatggtgattgtgatcgtgactatgactgtgttcttactcatggccggtgatctctcagcagctgcc

SEQ ID NO: 22397 - DNA, 90 bp, Homo sapiens
  MAP TO AC005201.1; EXPRESSED IN HELA, SIGNAL = 4.6; EXPRESSED IN PLACENTA, SIGNAL = 1.4; EXPRESSED IN LUNG, SIGNAL = 1.4; EXPRESSED IN FETAL LIVER, SIGNAL = 1.5; EXPRESSED IN BONE MARROW, SIGNAL = 1.6; EXPRESSED IN BRAIN, SIGNAL = 1.8; EXPRESSED IN ADULT LIVER, SIGNAL = 1.5; EXPRESSED IN HEART, SIGNAL = 1.5; SWISSPROT HIT: Q60716, EVALUE 9.00e-05; NT HIT: gi11416563, EVALUE 1.20e-02; EST_HUMAN HIT: AA187381.1, EVALUE 5.00e-03
cacagcttctcatcactcacttggaagaggatgatgagtgggacatcatcaggtattataatgtcatgtctgaggaggaaatcaaaagga

SEQ ID NO: 22398 - DNA, 137 bp, Homo sapiens
  MAP TO AC002067.1; EXPRESSED IN BONE MARROW, SIGNAL = 2.1; EXPRESSED IN PLACENTA, SIGNAL = 1.6; EXPRESSED IN LUNG, SIGNAL = 1.8; EXPRESSED IN HELA, SIGNAL = 1.9; EXPRESSED IN FETAL LIVER, SIGNAL = 1.9; EXPRESSED IN BRAIN, SIGNAL = 2.3; EXPRESSED IN ADULT LIVER, SIGNAL = 1.6; EXPRESSED IN HEART, SIGNAL = 1.7; NT HIT: U82828.1, EVALUE 1.00e-12; EST_HUMAN HIT: AI142798.1, EVALUE 2.00e-12; SWISSPROT HIT: P08548, EVALUE 6.00e-03
tatggaaatacacggaacctagaatagcaaaaacaatcttgaaaaagaagagcgaagttggagaacacatacttaccaatttcaaaacttactgcaaagctacagtaatcaagactagcataaatatagcacaaggt

SEQ ID NO: 22399 - DNA, 466 bp, Homo sapiens
  MAP TO AC005070.1; EXPRESSED IN LUNG, SIGNAL = 1.7; EXPRESSED IN PLACENTA, SIGNAL = 1.7; EXPRESSED IN HEART, SIGNAL = 1.5; EXPRESSED IN FETAL LIVER, SIGNAL = 1.4; EXPRESSED IN BRAIN, SIGNAL = 3.2; EXPRESSED IN BONE MARROW, SIGNAL = 1.4; EXPRESSED IN ADULT LIVER, SIGNAL = 1.3; NT HIT: gi11420732, EVALUE 0.00e+00; SWISSPROT HIT: Q64459, EVALUE 5.60e-01; EST_HUMAN HIT: W33069.1, EVALUE 0.00e+00
tactggaggctgaaaccgttctgcttctgtcatgggatggactgctctcctcttgctcagtaagtggtgatccctcagaaagcacagagccgcaggccacaggttctaaggatccagagaacaacgaggtggaaaactctgggaactgtgactcgggaattttatgtcgtccatttggcaattcaccattgaattgttcataggagctgctatatgtgtaatcactttctgcatttggctcatcaagattatattcctcaggatttgggcagtcttcttcatcatcatcttcatcgtccagttgctgctccagtgagaatgggccattctcaatatggccattggttttaggtgattctatccacgtagggtctatgttcgcaagttcctgatctacatcatcttcatctttttcaatgttttctttctcagcatcttctttctcttcctggtcctcagcttcacc

SEQ ID NO: 22400 - DNA, 456 bp, Homo sapiens
  MAP TO AC005731.2; EXPRESSED IN PLACENTA, SIGNAL = 2.3; EXPRESSED IN ADULT LIVER, SIGNAL = 2.2; EXPRESSED IN LUNG, SIGNAL = 2.8; EXPRESSED IN HEART, SIGNAL = 2.2; EXPRESSED IN FETAL LIVER, SIGNAL = 2.2; EXPRESSED IN BRAIN, SIGNAL = 2.5; EXPRESSED IN HELA, SIGNAL = 2.3; EXPRESSED IN BONE MARROW, SIGNAL = 2.3; SWISSPROT HIT: P51816, EVALUE 3.00e-09; EST_HUMAN HIT: BE935769.1, EVALUE 2.00e-68; NT HIT: AF012618.1, EVALUE 0.00e+00
attcatggcgttcataaaatatccagggtcacctatttatcctcaagctgtgtgcattgttttctttctttttttttttttgccttctttcgtaacgtgcttgacattcaaagcatttatgacaaggtgttttaaaaagctggacctaatggaaactatttgtcctcctttttcccaggagggagacactccaaaaaaggcatcctctgccaccatcactgtcaccaatactgctattgccactgctactgtcactgctactgccattgtcaccaccactgtcacagctactgccaccgccacggccaccaccacaactactaccactaccatttccaccatcacctctaccatcactactggcctcatggatagcagtcacctggagatgacgtcctgggcggctctgccccttctatccagcagcagcactaatgtccggagacccaagctcac

SEQ ID NO: 22401 - DNA, 152 bp, Homo sapiens
  MAP TO AC004801.1; EXPRESSED IN HELA, SIGNAL = 5.7; EXPRESSED IN FETAL LIVER, SIGNAL = 5.9; EXPRESSED IN BRAIN, SIGNAL = 6.6; EXPRESSED IN BONE MARROW, SIGNAL = 6.2; EXPRESSED IN ADULT LIVER, SIGNAL = 6.2; EXPRESSED IN PLACENTA, SIGNAL = 6.1; EXPRESSED IN HEART, SIGNAL = 6.4; EXPRESSED IN LUNG, SIGNAL = 6.5; EST_HUMAN HIT: BE207189.1, EVALUE 3.00e-42; SWISSPROT HIT: P28481, EVALUE 1.80e+00; NT HIT: L10347.1, EVALUE 1.00e-80
ggagcccctggtgaagatggtcgtcctggacctccaggtcctcagggggctcgtgggcagcctggtgtcatgggtttccctggccccaaaggtgccaacgtaagtaataatttgctcttctatttccttccatgtggtgctacctacctccc

SEQ ID NO: 22402 - DNA, 426 bp, Homo sapiens
  MAP TO AC005209.1; EXPRESSED IN PLACENTA, SIGNAL = 3.4; EXPRESSED IN HELA, SIGNAL = 3.3; EXPRESSED IN HEART, SIGNAL = 3.6; EXPRESSED IN FETAL LIVER, SIGNAL = 3.1; EXPRESSED IN BRAIN, SIGNAL = 3.3; EXPRESSED IN BONE MARROW, SIGNAL = 2.8; EXPRESSED IN LUNG, SIGNAL = 3.2; EXPRESSED IN ADULT LIVER, SIGNAL = 2.8; NT HIT: AF257737.1, EVALUE 0.00e+00; SWISSPROT HIT: P23098, EVALUE 1.00e-57; EST_HUMAN HIT: BE280197.1, EVALUE 0.00e+00
accaacctgacagagctgaagtcatttggctctccgcctctggccgtcagcaatgtcagcgctgcggtgatggtactgatggctcccaggggtagggtgcccaaggaccggagctggaaggctgctaaggtcaccatggccaaagtggatggcttcctggactcgctaataaacttcaacaaagagaacattcacgagaactgcctcaaagccatcaggccgtatctgcaagaccccgagttcaatcctgagtttgtggccaccaaatcctatgcggctgcaggcctctgctcctgggtcatcaatattgtgagattttatgaggtgttctgtgatgtggaacccaagcgccaggcactgaacaaagccaccgcggacctcacagctgcccaggagaagctggctgccatcaaagccaagatcgct

SEQ ID NO: 22403 - DNA, 176 bp, Homo sapiens
  MAP TO AC005899.1; EXPRESSED IN PLACENTA, SIGNAL = 1.3; EXPRESSED IN ADULT LIVER, SIGNAL = 1.4; EXPRESSED IN LUNG, SIGNAL = 1.6; EXPRESSED IN HEART, SIGNAL = 1.6; EXPRESSED IN FETAL LIVER, SIGNAL = 1.5; EXPRESSED IN BRAIN, SIGNAL = 1.2; EXPRESSED IN BONE MARROW, SIGNAL = 1.3; NT HIT: gi11431217, EVALUE 3.00e-05; SWISSPROT HIT: P20350, EVALUE 1.70e-01; EST_HUMAN HIT: BE778475.1, EVALUE 2.00e-47
gatagaacacctgggactcaatgtggtgctgcagctgctggtgggggtgcccctggagatggtgcatggagccacccgaattgggcttgtctacgtggccggtgttgtggcaggtaggcaggtaggccccgtgtccacaaaggcacactgccccagggtggggtgggagaccctgt

SEQ ID NO: 22404 - DNA, 231 bp, Homo sapiens
  MAP TO AC005077.1; EXPRESSED IN PLACENTA, SIGNAL = 2.3; EXPRESSED IN LUNG, SIGNAL = 2.5; EXPRESSED IN FETAL LIVER, SIGNAL = 2.1; EXPRESSED IN BONE MARROW, SIGNAL = 2.2; EXPRESSED IN ADULT LIVER, SIGNAL =   4; EXPRESSED IN HELA, SIGNAL = 2.8; EXPRESSED IN HEART, SIGNAL = 5.9; EXPRESSED IN BRAIN, SIGNAL = 4.4; NT HIT: gi11421462, EVALUE 4.00e-91; SWISSPROT HIT: P40926, EVALUE 6.00e-26; EST_HUMAN HIT: W42822.1, EVALUE 1.00e-116
aacaatgctaaagtagctgtgctaggggcctctggaggcatcgggcagccactttcacttctcctgaagaacagccccttggtgagccgcctgaccctctatgatatcgcgcacacacccggagtggccgcagatctgagccacatcgagaccaaagccgctgtgaaaggtactgggcgcgctgaccctggagacttgcttcctgtccccagtaggccaggattcgagttt

SEQ ID NO: 22405 - DNA, 466 bp, Homo sapiens
  MAP TO AC005214.1; EXPRESSED IN PLACENTA, SIGNAL = 2.4; EXPRESSED IN LUNG, SIGNAL = 2.4; EXPRESSED IN HEART, SIGNAL = 2.7; EXPRESSED IN FETAL LIVER, SIGNAL = 1.9; EXPRESSED IN BONE MARROW, SIGNAL = 2.3; EXPRESSED IN ADULT LIVER, SIGNAL = 2.4; EXPRESSED IN HELA, SIGNAL = 2.7; EXPRESSED IN BRAIN, SIGNAL = 2.6; EST_HUMAN HIT: BE889610.1, EVALUE 0.00e+00; NT HIT: AE001901.1, EVALUE 7.40e-02
catggccaggccaatgagcaatgtggccaggaagaaggcggctgtgagctgcagccgtagcaggactgctgagagcacggcgttgaccaccagcgagcaggacaccacaaagaggcgtgtgatgctgctgccatgcttcatgacagcagacatgagcagtccatttagtgcctggctcagcaccacgagtgctgcccatcctgagaaaccttccaggaggcctgggccagagccgccgccagcatgcagacctagattcagaagcacaccaaaagtgtagaggaagaggttctgaagtgccaggggcagccgctgtcgcttcatgagcagctctgtgtacactgacgacaagcctgagatgaggcagtacagaatgaggagcagcaggcctagcggagtgatatgcaggggcatggggctggcagcagctgctggagggggactgggaagggtgttcccgggaact

SEQ ID NO: 22406 - DNA, 138 bp, Homo sapiens
  MAP TO AC005153.1; EXPRESSED IN PLACENTA, SIGNAL = 1.9; EXPRESSED IN LUNG, SIGNAL = 1.9; EXPRESSED IN HEART, SIGNAL = 2.4; EXPRESSED IN BRAIN, SIGNAL = 2.1; EXPRESSED IN BONE MARROW, SIGNAL = 1.9; EXPRESSED IN ADULT LIVER, SIGNAL =   2; EXPRESSED IN HELA, SIGNAL = 1.8; EXPRESSED IN FETAL LIVER, SIGNAL =   2; NT HIT: AF073367.1, EVALUE 3.00e-72; EST_HUMAN HIT: BE384766.1, EVALUE 4.00e-72; SWISSPROT HIT: Q13322, EVALUE 6.00e-22
aagatgggacaagcaaagtggtggagattctagcagacatgacagccagagacctgtgccaattgctggtttacaaaagtcactgtgtggatgacaacagctggacactagtggagcaccacccgcacctaggattag

SEQ ID NO: 22407 - DNA, 117 bp, Homo sapiens
  MAP TO AC004672.1; EXPRESSED IN PLACENTA, SIGNAL = 1.2; EXPRESSED IN HEART, SIGNAL = 1.4; EXPRESSED IN FETAL LIVER, SIGNAL =   1; EXPRESSED IN BRAIN, SIGNAL = 1.1; EXPRESSED IN BONE MARROW, SIGNAL = 0.94; EXPRESSED IN LUNG, SIGNAL = 1.1; EXPRESSED IN ADULT LIVER, SIGNAL = 1.1; NT HIT: AB029004.1, EVALUE 8.00e-60; EST_HUMAN HIT: AW392705.1, EVALUE 1.00e-59
tccttctcccgcttcagggcagccacttcctcttgggtcttcttcttagaggacgaaagctccaagagagctatattggcgtctttttcactaatggcagccagaagagcttcttgc

SEQ ID NO: 22408 - DNA, 208 bp, Homo sapiens
  MAP TO AC004812.1; EXPRESSED IN PLACENTA, SIGNAL = 2.8; EXPRESSED IN LUNG, SIGNAL = 3.4; EXPRESSED IN FETAL LIVER, SIGNAL = 3.1; EXPRESSED IN ADULT LIVER, SIGNAL = 3.3; EXPRESSED IN HELA, SIGNAL = 3.6; EXPRESSED IN HEART, SIGNAL = 3.5; EXPRESSED IN BRAIN, SIGNAL = 3.3; EXPRESSED IN BONE MARROW, SIGNAL = 3.1; SWISSPROT HIT: P33892, EVALUE 2.00e-05; EST_HUMAN HIT: BE274860.1, EVALUE 9.00e-90; NT HIT: U77700.1, EVALUE 6.00e-90
cgtctgcagtgcacagctggcgggatccttggaagatactcacggcatcccggctggtggacttcatgatctcacttaggccaatgcacacaccctgcctctcatcgctcttctgagacctcaggccttcctcaaggatggggatgatctcggggaggattttctcccctaacttccgcacaagatctcccaatgttctcgctgcaat

SEQ ID NO: 22409 - DNA, 111 bp, Homo sapiens
  MAP TO AC005218.1; EXPRESSED IN PLACENTA, SIGNAL = 2.5; EXPRESSED IN LUNG, SIGNAL = 2.5; EXPRESSED IN FETAL LIVER, SIGNAL = 2.5; EXPRESSED IN ADULT LIVER, SIGNAL = 2.4; EXPRESSED IN HELA, SIGNAL = 2.6; EXPRESSED IN HEART, SIGNAL = 2.7; EXPRESSED IN BRAIN, SIGNAL =   3; EXPRESSED IN BONE MARROW, SIGNAL = 2.1; SWISSPROT HIT: P57510, EVALUE 9.30e+00; EST_HUMAN HIT: AW881211.1, EVALUE 3.60e-01; NT HIT: AF035546.1, EVALUE 2.40e-01
gtttaaagtgccctggtggcagctgtaaacttgttcactgagactcttgtactgttgcctggcaagagtataggcctttggaaccaggacctgcaaacatgcagagtccat

SEQ ID NO: 22410 - DNA, 78 bp, Homo sapiens
  MAP TO AC005911.6; EXPRESSED IN PLACENTA, SIGNAL =   5; EXPRESSED IN HEART, SIGNAL = 4.2; EXPRESSED IN BONE MARROW, SIGNAL =   4; EXPRESSED IN ADULT LIVER, SIGNAL = 4.9; EXPRESSED IN LUNG, SIGNAL = 4.9; EXPRESSED IN HELA, SIGNAL = 4.5; EXPRESSED IN FETAL LIVER, SIGNAL = 4.4; EXPRESSED IN BRAIN, SIGNAL = 7.4; EST_HUMAN HIT: BF037586.1, EVALUE 9.20e-01; NT HIT: AE002510.1, EVALUE 2.40e+00
cctcagggcaagacccagattccgcctgttcctaacaccgtgcttgtttggacaaagacgatggcagccacgcaataa

SEQ ID NO: 22411 - DNA, 125 bp, Homo sapiens
  MAP TO AC005274.1; EXPRESSED IN PLACENTA, SIGNAL = 4.8; EXPRESSED IN HEART, SIGNAL = 4.1; EXPRESSED IN BONE MARROW, SIGNAL = 4.6; EXPRESSED IN ADULT LIVER, SIGNAL = 4.2; EXPRESSED IN LUNG, SIGNAL = 5.2; EXPRESSED IN HELA, SIGNAL = 4.5; EXPRESSED IN FETAL LIVER, SIGNAL =   4; EXPRESSED IN BRAIN, SIGNAL = 4.7; EST_HUMAN HIT: BF681393.1, EVALUE 4.10e-01; SWISSPROT HIT: P48230, EVALUE 5.40e+00; NT HIT: X52831.1, EVALUE 1.10e+00
gagccagcatttctggaagcaaatctcaaaccacttccctcaccagctatgcaaccagcagcaacaaggcactcacctgctctgagacttgtgtagaaaatgggggagacaccagaacctactct

SEQ ID NO: 22412 - DNA, 102 bp, Homo sapiens
  MAP TO AC004682.1; EXPRESSED IN PLACENTA, SIGNAL = 1.5; EXPRESSED IN LUNG, SIGNAL = 1.3; EXPRESSED IN FETAL LIVER, SIGNAL =  57; EXPRESSED IN ADULT LIVER, SIGNAL = 1.2e+02; EXPRESSED IN HEART, SIGNAL = 2.3; EXPRESSED IN BRAIN, SIGNAL = 1.6; EXPRESSED IN BONE MARROW, SIGNAL = 2.8; NT HIT: X01788.1, EVALUE 6.00e-51; EST_HUMAN HIT: AV698541.1, EVALUE 9.00e-51; SWISSPROT HIT: P00739, EVALUE 2.00e-15
catctccttctgtgcgcagtctgtagtagttcttacactggtagcgaaacaagtgctccacatagccatttgcaatctcagggggcttcgggaagcggtcat

SEQ ID NO: 22413 - DNA, 226 bp, Homo sapiens
  MAP TO AC005165.1; EXPRESSED IN PLACENTA, SIGNAL = 3.6; EXPRESSED IN HEART, SIGNAL = 3.5; EXPRESSED IN BRAIN, SIGNAL = 3.7; EXPRESSED IN BONE MARROW, SIGNAL = 3.2; EXPRESSED IN ADULT LIVER, SIGNAL = 3.3; EXPRESSED IN LUNG, SIGNAL = 4.2; EXPRESSED IN HELA, SIGNAL =   3; EXPRESSED IN FETAL LIVER, SIGNAL =   3; NT HIT: U55184.1, EVALUE 9.00e-03; EST_HUMAN HIT: AV653544.1, EVALUE 5.00e-05
gtctgataagagctctcttcttgggttgcagatggccaatttttcactgtttcttcacatggtgaagagagagagcaagaggaagaaaagagagaatgagtgctctgatgtctctcccaataaggacactaattctatcaatcagagccccacccacatgacctcatctagcctgaattacttctgtaatggccttgtcaccaaatacagtcacatacttagtggt

SEQ ID NO: 22414 - DNA, 111 bp, Homo sapiens
  MAP TO AC005291.1; EXPRESSED IN BRAIN, SIGNAL = 5.2; EXPRESSED IN PLACENTA, SIGNAL = 7.2; EXPRESSED IN LUNG, SIGNAL =  11; EXPRESSED IN HEART, SIGNAL =   8; EXPRESSED IN BONE MARROW, SIGNAL =  14; EXPRESSED IN ADULT LIVER, SIGNAL =  13; EXPRESSED IN HELA, SIGNAL =  12; EXPRESSED IN FETAL LIVER, SIGNAL =  18; NT HIT: AJ249895.1, EVALUE 2.40e-01; EST_HUMAN HIT: W56037.1, EVALUE 9.00e-02; SWISSPROT HIT: P55388, EVALUE 5.40e+00
ctgggattctattgctccatgatgtagcatcttcttgcagccaccagttaagatcataggctttgggggaagggtcagatttaactgactcagcaccacgtctgcctgcat

SEQ ID NO: 22415 - DNA, 403 bp, Homo sapiens
  MAP TO AC002426.1; EXPRESSED IN PLACENTA, SIGNAL = 1.7; EXPRESSED IN LUNG, SIGNAL = 1.3; EXPRESSED IN FETAL LIVER, SIGNAL = 1.5; EXPRESSED IN BONE MARROW, SIGNAL = 1.5; EXPRESSED IN ADULT LIVER, SIGNAL = 1.5; EXPRESSED IN HEART, SIGNAL = 1.6; EXPRESSED IN BRAIN, SIGNAL = 1.1; EST_HUMAN HIT: AI003019.1, EVALUE 1.00e-102; NT HIT: gi11433071, EVALUE 0.00e+00; SWISSPROT HIT: Q02563, EVALUE 3.00e-27
gccatcagggccaaacccaagacgaaaaagaggatccactggaagcggccatggccacactcatccatgatggtctcgtactggtgggccaactgctcctcatcttccagcctctcagccatcaggtctgtctggccccgaaggctgtccattctggagggcgccatcttggcctgcttggccttgacatcatctgggtgagggataccctggtactcgccctcatagatctcgtcttcctcatcatggccttcggtgacatcactctgtgcatcttcttctgggttggactcattgccgcggtaatagccatcactgggagcatagcccccataattgtcctgatacttgtagtcatccattccttggttctgcgactgcctggttgccccttgagctatat

SEQ ID NO: 22416 - DNA, 102 bp, Homo sapiens
  MAP TO AC005244.1; EXPRESSED IN PLACENTA, SIGNAL = 8.2; EXPRESSED IN LUNG, SIGNAL = 6.1; EXPRESSED IN HEART, SIGNAL = 6.7; EXPRESSED IN FETAL LIVER, SIGNAL =  12; EXPRESSED IN BRAIN, SIGNAL = 9.9; EXPRESSED IN BONE MARROW, SIGNAL = 8.3; EXPRESSED IN ADULT LIVER, SIGNAL = 9.7; EXPRESSED IN HELA, SIGNAL = 6.4; EST_HUMAN HIT: AU140569.1, EVALUE 9.00e-51; NT HIT: AF070083.1, EVALUE 6.00e-51; SWISSPROT HIT: Q07192, EVALUE 2.00e-13
ataaaactgaacaatgtatgggcaatcactactccgcattactacatccaaatccataagaagttgtttttgttctttttcatccactgttgaccgaattct

SEQ ID NO: 22417 - DNA, 206 bp, Homo sapiens
  MAP TO AC005015.2; EXPRESSED IN PLACENTA, SIGNAL = 4.1; EXPRESSED IN HEART, SIGNAL = 3.7; EXPRESSED IN BRAIN, SIGNAL = 3.7; EXPRESSED IN BONE MARROW, SIGNAL = 3.6; EXPRESSED IN ADULT LIVER, SIGNAL = 4.3; EXPRESSED IN LUNG, SIGNAL = 5.1; EXPRESSED IN HELA, SIGNAL = 4.3; EXPRESSED IN FETAL LIVER, SIGNAL = 3.5; EST_HUMAN HIT: BF081645.1, EVALUE 7.00e-69; SWISSPROT HIT: P54882, EVALUE 5.70e-01; NT HIT: gi7427512, EVALUE 1.00e-101
ctgggccttgtcagggcagctcctcatggcctccatcagcttctccacctgctgagcctggtccagcgcatcccgcagggcgtcctccgtgctcatcagctggtgctgcagccgcagaagctcgggcgccgaggaccggtcgatgagggagtagcgcctctgatccgacagggatttctctttgtcctggaagtggcaggagagtg

SEQ ID NO: 22418 - DNA, 75 bp, Homo sapiens
  MAP TO AC005252.1; EXPRESSED IN PLACENTA, SIGNAL = 1.7; EXPRESSED IN LUNG, SIGNAL = 1.8; EXPRESSED IN FETAL LIVER, SIGNAL = 1.4; EXPRESSED IN BRAIN, SIGNAL = 3.1; EXPRESSED IN ADULT LIVER, SIGNAL = 1.7; EXPRESSED IN HELA, SIGNAL = 1.9; EXPRESSED IN HEART, SIGNAL = 1.9; EXPRESSED IN BONE MARROW, SIGNAL = 1.7; NT HIT: gi6753659, EVALUE 1.50e-01; EST_HUMAN HIT: BF312038.1, EVALUE 8.70e-01
gattcttagggcctcagattccatctgcacatcctctgcagcctgagcctgcctcttatgcttgtctgcaatggg

SEQ ID NO: 22419 - DNA, 125 bp, Homo sapiens
  MAP TO AC005154.1; EXPRESSED IN PLACENTA, SIGNAL = 2.3; EXPRESSED IN LUNG, SIGNAL = 2.4; EXPRESSED IN HEART, SIGNAL = 2.6; EXPRESSED IN FETAL LIVER, SIGNAL = 2.3; EXPRESSED IN BRAIN, SIGNAL = 2.8; EXPRESSED IN BONE MARROW, SIGNAL = 2.2; EXPRESSED IN ADULT LIVER, SIGNAL = 2.1; EXPRESSED IN HELA, SIGNAL = 2.7; SWISSPROT HIT: P41250, EVALUE 2.00e-19; NT HIT: U09587.1, EVALUE 2.00e-64; EST_HUMAN HIT: AU124387.1, EVALUE 2.00e-64
gactttgggccagttggctgtgctttgaagaacaatattattcagacctggaggcagcactttatccaagaggaacagatcctggagatcgattgcaccatgctcacccctgagccagttttaaa

SEQ ID NO: 22420 - DNA, 151 bp, Homo sapiens
  MAP TO AC005273.1; EXPRESSED IN LUNG, SIGNAL = 1.8; EXPRESSED IN BRAIN, SIGNAL =   2; EXPRESSED IN PLACENTA, SIGNAL = 2.2; EXPRESSED IN HEART, SIGNAL = 2.1; EXPRESSED IN FETAL LIVER, SIGNAL = 2.4; EXPRESSED IN BONE MARROW, SIGNAL = 1.7; EXPRESSED IN ADULT LIVER, SIGNAL = 2.3; EXPRESSED IN HELA, SIGNAL = 1.9; SWISSPROT HIT: P87117, EVALUE 3.10e+00; EST_HUMAN HIT: BE735394.1, EVALUE 5.10e-01; NT HIT: L02971.1, EVALUE 3.40e-01
agatgattccaccaaggttggtttcactggcaatgataatctgggtgtcatggcccagctttcccgccagcttttgggccttctccaattcactaaatacttcctcataattttcttccaattcaagaataagggggaaaactatagcact

SEQ ID NO: 22421 - DNA, 85 bp, Homo sapiens
  MAP TO AC005164.1; EXPRESSED IN PLACENTA, SIGNAL = 2.7; EXPRESSED IN LUNG, SIGNAL =   3; EXPRESSED IN HEART, SIGNAL = 3.3; EXPRESSED IN BRAIN, SIGNAL = 3.5; EXPRESSED IN FETAL LIVER, SIGNAL = 3.4; EXPRESSED IN BONE MARROW, SIGNAL =   3; EXPRESSED IN ADULT LIVER, SIGNAL = 3.1; EXPRESSED IN HELA, SIGNAL = 3.5; SWISSPROT HIT: P54742, EVALUE 9.60e+00; EST_HUMAN HIT: BE875422.1, EVALUE 1.00e-40; NT HIT: gi11419208, EVALUE 7.00e-41
ctgcctggccgcagcgcgccggagggcaggtccccaggacacagagcagcaagaagggcacggacacagccactgccgcctgcat

SEQ ID NO: 22422 - DNA, 138 bp, Homo sapiens
  MAP TO AC004930.1; EXPRESSED IN HELA, SIGNAL = 7.4; EXPRESSED IN HEART, SIGNAL = 6.7; EXPRESSED IN BONE MARROW, SIGNAL = 5.9; EXPRESSED IN PLACENTA, SIGNAL = 7.1; EXPRESSED IN LUNG, SIGNAL = 8.4; EXPRESSED IN FETAL LIVER, SIGNAL = 6.5; EXPRESSED IN BRAIN, SIGNAL = 7.9; EXPRESSED IN ADULT LIVER, SIGNAL = 7.8; NT HIT: AJ271736.1, EVALUE 1.00e-28; EST_HUMAN HIT: BE164930.1, EVALUE 4.00e-29
cttggaagctttgaagccagtcattggcttctctctagcgagaaaagtcctagatggcatcttcttccaatagaaggctatatggtctacattgaaaatctgttgtttagtgtagctaccttcatcaatgatcttagt

SEQ ID NO: 22423 - DNA, 260 bp, Homo sapiens
  MAP TO AC003684.1; EXPRESSED IN LUNG, SIGNAL = 4.8; EXPRESSED IN HELA, SIGNAL = 4.2; EXPRESSED IN HEART, SIGNAL = 4.2; EXPRESSED IN FETAL LIVER, SIGNAL =   4; EXPRESSED IN BONE MARROW, SIGNAL = 3.6; EXPRESSED IN PLACENTA, SIGNAL = 4.1; EXPRESSED IN BRAIN, SIGNAL = 4.2; EXPRESSED IN ADULT LIVER, SIGNAL = 4.3; SWISSPROT HIT: P02843, EVALUE 2.40e+00; NT HIT: U11882.1, EVALUE 9.80e+00
cctgcacatccaaattcttgaaagctgcctggcagctttcaatttttttgcctttttgtactggcaaggttggagcttcgtgatacactccttccaacactcccaaggcagggctgcatgcctccactttgctcccattgtgaacattctcagactgcacattcctctgtattttatgatagagacaaacccacaatcgccttttgggaggcatgctcctataagttaatattctgaattctggttcatggaagcttctc

SEQ ID NO: 22424 - DNA, 148 bp, Homo sapiens
  MAP TO AC005533.2; EXPRESSED IN FETAL LIVER, SIGNAL = 5.6; EXPRESSED IN BONE MARROW, SIGNAL = 6.3; EXPRESSED IN HELA, SIGNAL = 6.7; EXPRESSED IN PLACENTA, SIGNAL = 6.6; EXPRESSED IN LUNG, SIGNAL = 7.3; EXPRESSED IN HEART, SIGNAL = 5.3; EXPRESSED IN BRAIN, SIGNAL =   7; EXPRESSED IN ADULT LIVER, SIGNAL = 5.4; SWISSPROT HIT: Q98879, EVALUE 5.30e+00; NT HIT: AF233885.1, EVALUE 8.50e-02
gaatttgaaggactttggggtagaagacagggaactgagaagctaacatatcaaatgggtccccttcatggataatggtgtcaccaaggataatggcaggtttggggtggagaataaggttgtgatccaggtgccaaagtctaccctg

SEQ ID NO: 22425 - DNA, 99 bp, Homo sapiens
  MAP TO AC005538.2; EXPRESSED IN PLACENTA, SIGNAL = 4.7; EXPRESSED IN BONE MARROW, SIGNAL = 4.8; EXPRESSED IN ADULT LIVER, SIGNAL = 4.6; EXPRESSED IN LUNG, SIGNAL = 4.8; EXPRESSED IN HELA, SIGNAL = 4.5; EXPRESSED IN HEART, SIGNAL = 4.3; EXPRESSED IN FETAL LIVER, SIGNAL = 4.8; EXPRESSED IN BRAIN, SIGNAL = 5.4; EST_HUMAN HIT: AW408800.1, EVALUE 3.00e-47
atggagggcgaggacgtggaagacgaccagctgctgcagaagctcagggccagtcgccgccgcttccagaggcgcatgcagcggctgatagagaaggtg

SEQ ID NO: 22426 - DNA, 118 bp, Homo sapiens
  MAP TO AC005342.1; EXPRESSED IN FETAL LIVER, SIGNAL = 1.3; EXPRESSED IN PLACENTA, SIGNAL = 1.4; EXPRESSED IN LUNG, SIGNAL = 1.9; EXPRESSED IN HEART, SIGNAL = 1.4; EXPRESSED IN BRAIN, SIGNAL = 1.4; EXPRESSED IN BONE MARROW, SIGNAL = 1.5; EXPRESSED IN ADULT LIVER, SIGNAL = 1.4; SWISSPROT HIT: P95174, EVALUE 3.60e-01; EST_HUMAN HIT: AW954476.1, EVALUE 9.70e-02
atgtcggaaagtttcatgggggagctggcattcttattggcctattcagtggtggatggatggaaacagttgctggctggaagaagtatgagtataaatgatcaacaatttgaagaag

SEQ ID NO: 22427 - DNA, 103 bp, Homo sapiens
  MAP TO AC006529.1; EXPRESSED IN PLACENTA, SIGNAL = 3.5; EXPRESSED IN BRAIN, SIGNAL = 3.7; EXPRESSED IN BONE MARROW, SIGNAL = 4.2; EXPRESSED IN ADULT LIVER, SIGNAL = 3.2; EXPRESSED IN LUNG, SIGNAL = 3.8; EXPRESSED IN HELA, SIGNAL = 3.7; EXPRESSED IN HEART, SIGNAL =   3; EXPRESSED IN FETAL LIVER, SIGNAL = 3.3; EST_HUMAN HIT: BE782015.1, EVALUE 2.00e-51; NT HIT: gi11422113, EVALUE 2.00e-51
ctgaggctcttgtcagcaaaggtctagccacagtgatcagataccggcaggatgatgaccagagatcatcacactacgatgaactgcttgctgcagaggccag

SEQ ID NO: 22428 - DNA, 517 bp, Homo sapiens
  MAP TO AC005544.1; EXPRESSED IN ADULT LIVER, SIGNAL = 1.3; EXPRESSED IN PLACENTA, SIGNAL = 1.3; EXPRESSED IN LUNG, SIGNAL = 1.4; EXPRESSED IN HEART, SIGNAL = 1.3; EXPRESSED IN BRAIN, SIGNAL = 1.2; EXPRESSED IN BONE MARROW, SIGNAL = 1.4; EXPRESSED IN FETAL LIVER, SIGNAL = 1.4; SWISSPROT HIT: P42694, EVALUE 3.00e-55; NT HIT: gi11425218, EVALUE 0.00e+00; EST_HUMAN HIT: AA193506.1, EVALUE 0.00e+00
gtttcaagacttaatcagagaactgtctcatcgtgatcaaagtgaaacacgggaactagctgaaatgccaccacctcaatcaagacttttgcaatatagacaagtacagagtagaagcccaccagcagtcccatctcccccatccagtacagaccacagtagccacttttctaactttaatgataacagcagagacattgaagtagccagcaacccagcatttccacagcgcctcccaccccagatattcaactcacctttctcgttgccatctgaacaccttgcccctcctcccttgaaatacctggcacctgatggagcatggacttttgctaacttgcaacagaatcacctaatggggccaggttttccctatggcctacctccattgcctcacaggccaccgcagaacccttttgtacaaatacagaatcatcaacatgctattggtcaagagccatttcacccattgtcatctcgaacagtatcttcttcttcgctccctagcttagaagag

SEQ ID NO: 22429 - DNA, 188 bp, Homo sapiens
  MAP TO AC003957.1; EXPRESSED IN PLACENTA, SIGNAL =   3; EXPRESSED IN LUNG, SIGNAL = 3.9; EXPRESSED IN HEART, SIGNAL = 3.6; EXPRESSED IN FETAL LIVER, SIGNAL = 3.4; EXPRESSED IN BRAIN, SIGNAL = 3.3; EXPRESSED IN BONE MARROW, SIGNAL = 3.1; EXPRESSED IN ADULT LIVER, SIGNAL = 3.4; EXPRESSED IN HELA, SIGNAL = 3.5; NT HIT: AL163302.2, EVALUE 6.90e+00; EST_HUMAN HIT: R67180.1, EVALUE 2.60e+00; SWISSPROT HIT: Q9TTR8, EVALUE 1.70e+00
ggcattgggcctcctgggttctgcagctgcatcttcgaggcctcaaggccgcccagcagaggcctgtccatcagtaagatgcacagggaccactgggctccctccttcacttgggagctgggctgtgtggcctgcgcagattccaggctgctgggctgggagctgcccgtcggctttgacaacggtac

SEQ ID NO: 22430 - DNA, 103 bp, Homo sapiens
  MAP TO AC004993.1; EXPRESSED IN PLACENTA, SIGNAL = 7.6; EXPRESSED IN LUNG, SIGNAL = 8.2; EXPRESSED IN HELA, SIGNAL = 9.7; EXPRESSED IN HEART, SIGNAL = 7.8; EXPRESSED IN BONE MARROW, SIGNAL = 8.3; EXPRESSED IN FETAL LIVER, SIGNAL = 7.5; EXPRESSED IN BRAIN, SIGNAL = 7.6; EXPRESSED IN ADULT LIVER, SIGNAL = 8.5; EST_HUMAN HIT: AW362834.1, EVALUE 1.30e+00; NT HIT: AF289199.1, EVALUE 3.40e+00
gacaagtgaattatatgaagccatgcacttattccttagaagtatcaactgtagagacatgaatttgtcaatctccagagctgagaattgttctagaagcata

SEQ ID NO: 22431 - DNA, 152 bp, Homo sapiens
  MAP TO AC000057.1; EXPRESSED IN FETAL LIVER, SIGNAL = 2.6; EXPRESSED IN BONE MARROW, SIGNAL = 2.6; EXPRESSED IN HELA, SIGNAL = 2.5; EXPRESSED IN PLACENTA, SIGNAL = 2.8; EXPRESSED IN LUNG, SIGNAL = 2.8; EXPRESSED IN HEART, SIGNAL = 4.1; EXPRESSED IN BRAIN, SIGNAL = 2.7; EXPRESSED IN ADULT LIVER, SIGNAL = 3.2; NT HIT: X07699.1, EVALUE 1.00e-03; SWISSPROT HIT: P15196, EVALUE 9.00e+00; EST_HUMAN HIT: T79901.1, EVALUE 3.30e-02
gccgcaatcagcttatccatgaagagcaagaggctcactgtggcttgatcctcaaaggccccatagtgcttctagtcatacttcagattcatgtagacctgggttcaaatcccagcacatcacttcttgctaactgtgtgtccatggacaag

SEQ ID NO: 22432 - DNA, 131 bp, Homo sapiens
  MAP TO AC004901.1; EXPRESSED IN PLACENTA, SIGNAL = 6.1; EXPRESSED IN BRAIN, SIGNAL = 6.4; EXPRESSED IN BONE MARROW, SIGNAL =   5; EXPRESSED IN ADULT LIVER, SIGNAL = 5.7; EXPRESSED IN LUNG, SIGNAL = 6.4; EXPRESSED IN HELA, SIGNAL = 5.1; EXPRESSED IN HEART, SIGNAL = 4.7; EXPRESSED IN FETAL LIVER, SIGNAL = 5.6; NT HIT: AL163278.2, EVALUE 5.00e-12; EST_HUMAN HIT: AU146388.1, EVALUE 5.00e-10; SWISSPROT HIT: P80297, EVALUE 3.10e+00
tggagttctcccaagatctggttgtttaaaagtgtgtggcacttcccccttctctttatctttcctgctccccaatagtaaagtgtgcttgcttccccttcatcttctgccatgattgtaagtttcctgag

SEQ ID NO: 22433 - DNA, 156 bp, Homo sapiens
  MAP TO AC000066.1; EXPRESSED IN PLACENTA, SIGNAL = 1.3; EXPRESSED IN BONE MARROW, SIGNAL = 1.3; EXPRESSED IN ADULT LIVER, SIGNAL = 1.1; EXPRESSED IN LUNG, SIGNAL = 1.4; EXPRESSED IN HEART, SIGNAL = 2.1; EXPRESSED IN FETAL LIVER, SIGNAL = 1.2; EXPRESSED IN BRAIN, SIGNAL = 1.5; SWISSPROT HIT: O67368, EVALUE 8.90e+00; EST_HUMAN HIT: BE002098.1, EVALUE 8.00e-68; NT HIT: AJ010770.1, EVALUE 6.00e-83
actttatgcagtgtccttggtgaatattatactcctgctttaaaatgtgaagtaaatgcagaagacaaagagaattctggtgattacatttctgaaaatgaagatccagaattacaagattatagatatgaagttcaaggtaataaaagcttacca

SEQ ID NO: 22434 - DNA, 175 bp, Homo sapiens
  MAP TO AC003678.1; EXPRESSED IN PLACENTA, SIGNAL =  13; EXPRESSED IN HEART, SIGNAL =  11; EXPRESSED IN FETAL LIVER, SIGNAL =  11; EXPRESSED IN BONE MARROW, SIGNAL =  12; EXPRESSED IN ADULT LIVER, SIGNAL =  12; EXPRESSED IN HELA, SIGNAL =  12; EXPRESSED IN LUNG, SIGNAL =  14; EXPRESSED IN BRAIN, SIGNAL =  14; NT HIT: AF274875.1, EVALUE 1.00e-01
gactgggagagttaatgtgtaaaaggcccggaagagtgaaaacttttaaagtgttggtgatggtgacagtgatggtgatgatgatggtgacggtgatggtgatgatgatggtgacggtgatagagatggaaggagaggagaggaactgctgctcatctggggaccagacaggcac

SEQ ID NO: 22435 - DNA, 191 bp, Homo sapiens
  MAP TO AC005773.1; EXPRESSED IN BRAIN, SIGNAL = 1.7; EXPRESSED IN PLACENTA, SIGNAL = 1.7; EXPRESSED IN LUNG, SIGNAL = 1.5; EXPRESSED IN HEART, SIGNAL = 1.5; EXPRESSED IN BONE MARROW, SIGNAL = 1.6; EXPRESSED IN ADULT LIVER, SIGNAL = 1.6; EXPRESSED IN FETAL LIVER, SIGNAL = 1.8; SWISSPROT HIT: Q00955, EVALUE 6.60e+00; NT HIT: AJ007973.1, EVALUE 1.10e-01; EST_HUMAN HIT: H84563.1, EVALUE 2.60e+00
tgcttcctgcccctgagtgtgagtctcaagttctggttctcagaaggcctgtgcttccatcaaaggacccagtaaacatcatgctgaactttaaattgcatttaccacatggtcactttgggtttctcatgccaatagaccagcaattaaagaaagtagttaccatgtgtcttgtgaggggctatagccta

SEQ ID NO: 22436 - DNA, 196 bp, Homo sapiens
  MAP TO AC005137.1; EXPRESSED IN PLACENTA, SIGNAL = 4.6; EXPRESSED IN ADULT LIVER, SIGNAL = 4.5; EXPRESSED IN LUNG, SIGNAL = 5.3; EXPRESSED IN HEART, SIGNAL = 3.6; EXPRESSED IN FETAL LIVER, SIGNAL = 4.3; EXPRESSED IN BRAIN, SIGNAL = 4.7; EXPRESSED IN BONE MARROW, SIGNAL = 6.6; EXPRESSED IN HELA, SIGNAL =   4; NT HIT: gi7305360, EVALUE 1.00e-38; SWISSPROT HIT: P04275, EVALUE 1.00e-03
accagcactgcctgatgcatatgtccaggtgcctccggagtcattctgtgagctgtggatccgggacaccaagtacgtgcagcagccctgcgtggccctgactgtgtacgtggccatgtgccacaaatttcatgtgtgcatcgagtggcggcgctctgactactgccgtgagtttgcggggcagggggaccctcca

SEQ ID NO: 22437 - DNA, 119 bp, Homo sapiens
  MAP TO AC005803.1; EXPRESSED IN LUNG, SIGNAL = 3.3; EXPRESSED IN HELA, SIGNAL = 3.2; EXPRESSED IN HEART, SIGNAL = 2.9; EXPRESSED IN FETAL LIVER, SIGNAL = 3.1; EXPRESSED IN PLACENTA, SIGNAL =   3; EXPRESSED IN BRAIN, SIGNAL = 3.4; EXPRESSED IN BONE MARROW, SIGNAL = 3.1; EXPRESSED IN ADULT LIVER, SIGNAL = 3.2; EST_HUMAN HIT: BF663298.1, EVALUE 8.00e-61; SWISSPROT HIT: P40259, EVALUE 1.00e-05; NT HIT: S79249.1, EVALUE 6.00e-61
cttgtccagcagcaggaagataggcacgatgatgaagaggatgatcagcagcgtctggatcatgatgataccatccttcagcgtgttcctctgcttcagctgtgccaaggtgctgaatc

SEQ ID NO: 22438 - DNA, 204 bp, Homo sapiens
  MAP TO AC004837.1; EXPRESSED IN PLACENTA, SIGNAL = 2.1; EXPRESSED IN HEART, SIGNAL = 1.7; EXPRESSED IN BONE MARROW, SIGNAL = 1.5; EXPRESSED IN LUNG, SIGNAL = 1.9; EXPRESSED IN FETAL LIVER, SIGNAL = 1.6; EXPRESSED IN BRAIN, SIGNAL =   2; EXPRESSED IN ADULT LIVER, SIGNAL = 1.8; EST_HUMAN HIT: AI344679.1, EVALUE 1.00e-111; SWISSPROT HIT: P05810, EVALUE 4.00e-34; NT HIT: gi11420697, EVALUE 1.00e-111
gtcagctgtagctgcaaaggattccatttctgtaatagagaaaacacagaggaacccctccccacttcggaagtagttgtctctaattgcagcgtagtcctcctgcccagctgtatctaagatatcgatctggacttcctccccatctagcactaccttcttccgatagctgtctgctttggtaggctcatagtcctccacaaa

SEQ ID NO: 22439 - DNA, 273 bp, Homo sapiens
  MAP TO AC002041.1; EXPRESSED IN PLACENTA, SIGNAL =  31; EXPRESSED IN LUNG, SIGNAL =  37; EXPRESSED IN HEART, SIGNAL =  28; EXPRESSED IN BRAIN, SIGNAL =  34; EXPRESSED IN BONE MARROW, SIGNAL =  32; EXPRESSED IN ADULT LIVER, SIGNAL =  30; EXPRESSED IN HELA, SIGNAL =  32; EXPRESSED IN FETAL LIVER, SIGNAL =  30; NT HIT: gi7305214, EVALUE 9.00e-25; EST_HUMAN HIT: BF115266.1, EVALUE 2.00e-57
ctccagggtctgtatctcctgctgggtgaggtcactggacacagcgcacttggtgcacagcccgcacaggctgccaatgaagatgacgatgagcttctggagctgcccgcactgctgcagcgcccggctggccgcagcccctgtgccaccctccgtggccgccgcatcacccccaccaccaccatccttcttctcccccatcgcctccgcaggcagcgccgctctatgcaggccacaggggcctaggcaaggagcccggggcgccggcaccta

SEQ ID NO: 22440 - DNA, 216 bp, Homo sapiens
  MAP TO AC004736.1; EXPRESSED IN LUNG, SIGNAL =  12; EXPRESSED IN HEART, SIGNAL =  10; EXPRESSED IN FETAL LIVER, SIGNAL =  11; EXPRESSED IN BRAIN, SIGNAL =  12; EXPRESSED IN BONE MARROW, SIGNAL =  11; EXPRESSED IN ADULT LIVER, SIGNAL =  11; EXPRESSED IN PLACENTA, SIGNAL =  12; EXPRESSED IN HELA, SIGNAL =  12; EST_HUMAN HIT: BE295843.1, EVALUE 4.00e-86; SWISSPROT HIT: Q29116, EVALUE 3.20e-01; NT HIT: AB008681.1, EVALUE 2.00e+00
gcgagggcaatggctctgcctgcccagtgcctcagctcagtgcccagatccctgccgcttatccctccagacctcgtctgggccctgcctttgttctcatgcagcaactgtctccaggagatggagatgacatcagaatagccggagcaggtgtgatccaaggttctgcaaggaaaaggaaggatggtgtggagtgtgttgctgcagggaaggctt

SEQ ID NO: 22441 - DNA, 166 bp, Homo sapiens
  MAP TO AC003049.1; EXPRESSED IN PLACENTA, SIGNAL = 5.2; EXPRESSED IN ADULT LIVER, SIGNAL = 5.2; EXPRESSED IN LUNG, SIGNAL = 6.2; EXPRESSED IN HEART, SIGNAL = 5.5; EXPRESSED IN FETAL LIVER, SIGNAL = 5.1; EXPRESSED IN BRAIN, SIGNAL = 5.5; EXPRESSED IN BONE MARROW, SIGNAL = 5.6; EXPRESSED IN HELA, SIGNAL = 5.5; EST_HUMAN HIT: BE971806.1, EVALUE 8.90e+00
tcatgactcaactgaagacaagaagggtcctttactaaactccagatctctttcctcctcctcctcctcctcttccttctcctcctccttctcgtattcctcttcctcctcctcctcttcctcctcgtcttcctccttctcctcctcctcctccctactctctgac

SEQ ID NO: 22442 - DNA, 207 bp, Homo sapiens
  MAP TO AC005809.1; EXPRESSED IN BRAIN, SIGNAL = 3.1; EXPRESSED IN ADULT LIVER, SIGNAL = 2.6; EXPRESSED IN PLACENTA, SIGNAL = 2.7; EXPRESSED IN LUNG, SIGNAL = 2.8; EXPRESSED IN HELA, SIGNAL = 3.1; EXPRESSED IN HEART, SIGNAL = 2.5; EXPRESSED IN BONE MARROW, SIGNAL = 2.7; EXPRESSED IN FETAL LIVER, SIGNAL = 2.3; NT HIT: AF020931.1, EVALUE 4.90e-01; EST_HUMAN HIT: AA703592.1, EVALUE 7.30e-01
tttctctgtcctgcaggacttcctctggctttattgttttaagttggtggttgggccaacagccagcttcaattacactcctcgcctcctcctcctcctcctcctcctcctcctcctcctcctccacctcttccagcccttctctgccctaggcccaggggtgggccttgggctacagctgactgtggtacccaggcaaaacagccc

SEQ ID NO: 22443 - DNA, 412 bp, Homo sapiens
  MAP TO AC003689.1; EXPRESSED IN LUNG, SIGNAL =  10; EXPRESSED IN FETAL LIVER, SIGNAL =  13; EXPRESSED IN BRAIN, SIGNAL =  17; EXPRESSED IN BONE MARROW, SIGNAL =  12; EXPRESSED IN HELA, SIGNAL = 9.4; EXPRESSED IN PLACENTA, SIGNAL =  10; EXPRESSED IN HEART, SIGNAL =  13; EXPRESSED IN ADULT LIVER, SIGNAL =  13; SWISSPROT HIT: P30203, EVALUE 3.00e-46; NT HIT: U34625.1, EVALUE 0.00e+00
gggagcggcttccggtccgtctgacaaacgggagcagcagctgcagcgggacggtggaggtgcggctcgaggcgtcctgggagcccgcgtgcggggcgctctgggacagccgcgccgccgaggccgtgtgccgagcactgggctgcggcggggcggaggccgcctctcagctcgccccgccgacccctgagctgccgcccccgcctgcagccgggaacaccagcgtagcagctaatgccactctggccggggcgcccgccctcctgtgcagcggcgccgagtggcggctctgcgaggtggtggagcacgcgtgccgcagcgacgggaggcgggcccgtgtcacctgtgcaggtacgagcgcaccccctacacgggcccccacctgccccactccccaggccttcagccactg

SEQ ID NO: 22444 - DNA, 198 bp, Homo sapiens
  MAP TO AC005410.1; EXPRESSED IN LUNG, SIGNAL = 4.4; EXPRESSED IN BRAIN, SIGNAL = 4.2; EXPRESSED IN BONE MARROW, SIGNAL = 3.8; EXPRESSED IN PLACENTA, SIGNAL =   4; EXPRESSED IN HELA, SIGNAL =   4; EXPRESSED IN HEART, SIGNAL = 4.3; EXPRESSED IN FETAL LIVER, SIGNAL = 4.3; EXPRESSED IN ADULT LIVER, SIGNAL = 4.4; NT HIT: gi6756060, EVALUE 2.00e-09; SWISSPROT HIT: O95125, EVALUE 2.00e-19; EST_HUMAN HIT: AW968635.1, EVALUE 9.00e-99
ataccctctgcttacccattgccacagtctctgggggtcccccttcaagctttccacaagggtcactgcctcttctccacttcctggacactgtttccgcacccacatctggatctccccaggcaggatggtcagaaactgctccaacatgaggatctctaggatctgctctttggtgtgaacctctggctgtagcca

SEQ ID NO: 22445 - DNA, 211 bp, Homo sapiens
  MAP TO AC005609.1; EXPRESSED IN LUNG, SIGNAL = 1.7; EXPRESSED IN HELA, SIGNAL = 1.8; EXPRESSED IN BRAIN, SIGNAL = 1.9; EXPRESSED IN BONE MARROW, SIGNAL = 1.7; EXPRESSED IN ADULT LIVER, SIGNAL =   2; EXPRESSED IN PLACENTA, SIGNAL = 1.6; EXPRESSED IN HEART, SIGNAL = 1.8; EXPRESSED IN FETAL LIVER, SIGNAL =   2; NT HIT: gi4507974, EVALUE 2.00e-06; SWISSPROT HIT: Q9Y2G7, EVALUE 1.00e-12; EST_HUMAN HIT: BE714172.1, EVALUE 2.00e-07
gtaaggcagaattaactttatatattttcctacatttcttacattcatcaagtttctcatcagtttgaattctctgatattgagcaatgtgtccagacacaataaaggctttactacattctttacattcataaagtttgtcaccagtatgaattatctgtttctcagaagaactcaaatcagattaaagaccttatgttccttacattca

SEQ ID NO: 22446 - DNA, 168 bp, Homo sapiens
  MAP TO AC005722.1; EXPRESSED IN LUNG, SIGNAL =   4; EXPRESSED IN FETAL LIVER, SIGNAL = 3.7; EXPRESSED IN BRAIN, SIGNAL =   4; EXPRESSED IN BONE MARROW, SIGNAL = 3.9; EXPRESSED IN HELA, SIGNAL = 3.9; EXPRESSED IN PLACENTA, SIGNAL =   4; EXPRESSED IN HEART, SIGNAL =   4; EXPRESSED IN ADULT LIVER, SIGNAL =   5; SWISSPROT HIT: Q28849, EVALUE 1.30e+00; NT HIT: gi8922708, EVALUE 7.00e-46; EST_HUMAN HIT: AU133139.1, EVALUE 1.00e-45
agcttcggcagccccaacaagaagcacgtgggcgtgatcctgcagcggggcgcgctggtcctgctcctctgctgcctcccttgctgggcgctcttcctcaacacccagcacatcctgctgctcttccggcaggacccggacgtgtccaggtgcgctgggctccggctg

SEQ ID NO: 22447 - DNA, 244 bp, Homo sapiens
  MAP TO AC004741.1; EXPRESSED IN PLACENTA, SIGNAL = 2.2; EXPRESSED IN HELA, SIGNAL = 2.1; EXPRESSED IN HEART, SIGNAL = 1.9; EXPRESSED IN BONE MARROW, SIGNAL =   2; EXPRESSED IN LUNG, SIGNAL = 2.4; EXPRESSED IN FETAL LIVER, SIGNAL =   2; EXPRESSED IN BRAIN, SIGNAL = 1.9; EXPRESSED IN ADULT LIVER, SIGNAL = 2.2; SWISSPROT HIT: Q04338, EVALUE 2.70e+00; NT HIT: AJ276505.1, EVALUE 1.50e-01; EST_HUMAN HIT: BF362489.1, EVALUE 3.40e+00
ttagtatttaggaatttggatggggccactgatgacaacacaggagaggcagaccttggtgtcagcttctctaattgggctcggttgcttcctgtgctctgaggttaaatagtattgctgactgtgctctggtaagatcactggctcaactttgtcgtcagttgaggctgtcacctgagttctgcaatcatctgtgatttggcagagttgtggattgtcgtctttttctgggcagtaccagaat

SEQ ID NO: 22448 - DNA, 132 bp, Homo sapiens
  MAP TO AC006504.1; EXPRESSED IN ADULT LIVER, SIGNAL = 2.4; EXPRESSED IN PLACENTA, SIGNAL = 2.8; EXPRESSED IN LUNG, SIGNAL = 2.9; EXPRESSED IN HEART, SIGNAL = 2.4; EXPRESSED IN BRAIN, SIGNAL =   3; EXPRESSED IN HELA, SIGNAL = 2.6; EXPRESSED IN FETAL LIVER, SIGNAL = 2.3; EXPRESSED IN BONE MARROW, SIGNAL =   3; SWISSPROT HIT: O00507, EVALUE 5.00e-03; EST_HUMAN HIT: AV752323.1, EVALUE 4.40e-01; NT HIT: gi7524759, EVALUE 2.90e-01
gctaggatttagattaccataactatattttatgattaactgaatagcttcattagcaatttcttcatcaggtaatttcatggttattttccaaatgaaatctattcccatcaacttcagcttttctacatt

SEQ ID NO: 22449 - DNA, 408 bp, Homo sapiens
  MAP TO AC003070.1; EXPRESSED IN ADULT LIVER, SIGNAL = 4.5; EXPRESSED IN PLACENTA, SIGNAL = 4.3; EXPRESSED IN LUNG, SIGNAL = 4.3; EXPRESSED IN HEART, SIGNAL = 4.4; EXPRESSED IN BRAIN, SIGNAL = 4.5; EXPRESSED IN HELA, SIGNAL = 4.8; EXPRESSED IN FETAL LIVER, SIGNAL = 4.4; EXPRESSED IN BONE MARROW, SIGNAL = 4.5; SWISSPROT HIT: P46942, EVALUE 5.40e-02; NT HIT: L47285.1, EVALUE 4.00e+00; EST_HUMAN HIT: BE247284.1, EVALUE 4.00e-87
ccgcgggtcccctgggctgccagggctcaggcccggctgcatctccaactcctcctcgggctcgttctcggcctcgtcctcccaggccgtctcgcccgtcagcgggttgtagaagaacaccctgcggctctcctcatcccagtactggccccactcggtctcaaggctcacgtggctgtccaccgaggcaggggaggtggctgggctggcggcaccctcggcagcctcaaagggcgactcccaggtggtaactcccgtgtctgggttgtagtagtaggggcgcccggtgcccgcgtccgtgtgcgtctcccacaccgggctgggaaggggggctgcagcggcgcccggtgaagtggcccggggctgcctctctatgttcgcgtacacgggctccggtgggtcgtccac

SEQ ID NO: 22450 - DNA, 134 bp, Homo sapiens
  MAP TO AC000002.1; EXPRESSED IN BRAIN, SIGNAL = 1.8; EXPRESSED IN PLACENTA, SIGNAL = 1.4; EXPRESSED IN LUNG, SIGNAL = 1.5; EXPRESSED IN HEART, SIGNAL = 1.8; EXPRESSED IN BONE MARROW, SIGNAL = 1.5; EXPRESSED IN ADULT LIVER, SIGNAL = 1.8; EXPRESSED IN HELA, SIGNAL = 1.7; EXPRESSED IN FETAL LIVER, SIGNAL = 1.6; EST_HUMAN HIT: BE769152.1, EVALUE 1.10e-01; NT HIT: gi11431489, EVALUE 1.20e+00
gcagcatctgctgtagtgtgagccgcaaccctgcctggccctccaccaagcctgaggaggacgcgagctcggctgcggctgacagcattcagcagcagaactccaagcaagggggtcacctgcccaggagacta

SEQ ID NO: 22451 - DNA, 151 bp, Homo sapiens
  MAP TO AC005846.1; EXPRESSED IN PLACENTA, SIGNAL = 1.7; EXPRESSED IN LUNG, SIGNAL = 1.6; EXPRESSED IN HEART, SIGNAL = 1.6; EXPRESSED IN BRAIN, SIGNAL = 1.4; EXPRESSED IN ADULT LIVER, SIGNAL = 1.6; EXPRESSED IN FETAL LIVER, SIGNAL = 1.4; EXPRESSED IN BONE MARROW, SIGNAL = 1.4; NT HIT: M25844.1, EVALUE 1.00e-77; EST_HUMAN HIT: AU140938.1, EVALUE 2.00e-71; SWISSPROT HIT: P04275, EVALUE 4.00e-24
actgctcctagtgtctgtcaggaccggaagtggaactgcacagaccatgtgtgtgatgccacgtgctccacgatcggcatggcccactacctcaccttcgacgggctcaaatacctgttccccggggagtgccagtacgttctggtgcagg

SEQ ID NO: 22452 - DNA, 187 bp, Homo sapiens
  MAP TO AC004650.1; EXPRESSED IN PLACENTA, SIGNAL = 2.2; EXPRESSED IN LUNG, SIGNAL = 4.4; EXPRESSED IN FETAL LIVER, SIGNAL = 6.6; EXPRESSED IN BRAIN, SIGNAL = 4.2; EXPRESSED IN BONE MARROW, SIGNAL = 3.1; EXPRESSED IN ADULT LIVER, SIGNAL =  18; EXPRESSED IN HELA, SIGNAL = 4.9; EXPRESSED IN HEART, SIGNAL = 1.7; SWISSPROT HIT: P49773, EVALUE 3.00e-28; EST_HUMAN HIT: AA722434.1, EVALUE 5.00e-94; NT HIT: gi4885412, EVALUE 3.00e-88
ttaaccaggaggccaatgcatttgccgacctccaagaacatggagatgaacgtgatagacagactgtccaccatctgaaccttcattcaccaccattcgataacccttattcaggcccagatcagcagcacatttcttgccaacaatcattaagtgtccaagaagctggaaaaggaaaaaaagtttc

SEQ ID NO: 22453 - DNA, 222 bp, Homo sapiens
  MAP TO AC005690.7; EXPRESSED IN LUNG, SIGNAL = 1.9; EXPRESSED IN BRAIN, SIGNAL = 1.8; EXPRESSED IN ADULT LIVER, SIGNAL = 1.8; EXPRESSED IN PLACENTA, SIGNAL = 1.9; EXPRESSED IN HELA, SIGNAL = 1.9; EXPRESSED IN HEART, SIGNAL = 1.4; EXPRESSED IN BONE MARROW, SIGNAL = 2.1; EXPRESSED IN FETAL LIVER, SIGNAL = 1.6
gatgatgatgacgataatggtggtcatggtgttggtaatgatgttggtgataacgatgatgatgctgttgacaatgattttggtgatgatgatgatgttgatgaagatgataatgaagaggaagacgttactggtgatgatgatgccggtgatgagaatgattttaatgaagattatgatgaagatgatgacattattggtgatgatgatgctggtagatga

SEQ ID NO: 22454 - DNA, 80 bp, Homo sapiens
  MAP TO AC004752.1; EXPRESSED IN LUNG, SIGNAL =  21; EXPRESSED IN BRAIN, SIGNAL =  18; EXPRESSED IN HEART, SIGNAL =  13; EXPRESSED IN FETAL LIVER, SIGNAL =  14; EXPRESSED IN BONE MARROW, SIGNAL =  15; EXPRESSED IN ADULT LIVER, SIGNAL =  15; EXPRESSED IN PLACENTA, SIGNAL =  17; EXPRESSED IN HELA, SIGNAL =  16; NT HIT: AJ239028.1, EVALUE 9.90e+00
ctgattcacttcctctgcttccacagccaacatcttctcagcaccagagagaaacctaattcgcccttactcctgggttg

SEQ ID NO: 22455 - DNA, 189 bp, Homo sapiens
  MAP TO AC005826.1; EXPRESSED IN HELA, SIGNAL =   3; EXPRESSED IN HEART, SIGNAL = 2.9; EXPRESSED IN BONE MARROW, SIGNAL =   3; EXPRESSED IN PLACENTA, SIGNAL = 3.1; EXPRESSED IN LUNG, SIGNAL = 3.6; EXPRESSED IN FETAL LIVER, SIGNAL = 3.4; EXPRESSED IN BRAIN, SIGNAL = 3.4; EXPRESSED IN ADULT LIVER, SIGNAL = 3.4; NT HIT: gi10048417, EVALUE 8.00e-49; SWISSPROT HIT: Q9UMR3, EVALUE 1.00e-11; EST_HUMAN HIT: AW663406.1, EVALUE 7.00e-07
ctgcccgacttggtgatgatcatctcggtgcccagctcatggaatttgtcccaaagctccttggtctccaggctgcaggcaattttggccatttcctcactggggatgatgggggtggtggggatcagtggctcagtgcacagagaggaggaggacgggctgctgccactgcctccaccaaactcccca

SEQ ID NO: 22456 - DNA, 77 bp, Homo sapiens
  MAP TO AC005164.1; EXPRESSED IN PLACENTA, SIGNAL = 2.5; EXPRESSED IN LUNG, SIGNAL = 2.9; EXPRESSED IN HEART, SIGNAL = 2.2; EXPRESSED IN BRAIN, SIGNAL = 2.3; EXPRESSED IN BONE MARROW, SIGNAL = 2.5; EXPRESSED IN ADULT LIVER, SIGNAL = 2.5; EXPRESSED IN HELA, SIGNAL = 2.6; EXPRESSED IN FETAL LIVER, SIGNAL = 2.2; NT HIT: gi11497041, EVALUE 4.00e-36; SWISSPROT HIT: P40099, EVALUE 7.40e+00; EST_HUMAN HIT: BE875422.1, EVALUE 6.00e-36
tgatttagcacgacatcgagaatgaatgacgttccaaaggcatcaacctggaagcttgcttggtcaacatgagtcaa

SEQ ID NO: 22457 - DNA, 95 bp, Homo sapiens
  MAP TO AC005730.1; EXPRESSED IN PLACENTA, SIGNAL =   6; EXPRESSED IN LUNG, SIGNAL = 6.5; EXPRESSED IN HEART, SIGNAL = 5.3; EXPRESSED IN BRAIN, SIGNAL = 6.3; EXPRESSED IN BONE MARROW, SIGNAL = 5.5; EXPRESSED IN ADULT LIVER, SIGNAL = 6.2; EXPRESSED IN HELA, SIGNAL = 5.9; EXPRESSED IN FETAL LIVER, SIGNAL = 6.5; EST_HUMAN HIT: BF104065.1, EVALUE 2.90e-01; NT HIT: U15300.1, EVALUE 2.00e-01
gtggacagcgacagtggtgggccctggccagacttttcatgctcaaaggtggtggttgttcttcctacttcttgtccctccagggcttcctttgc

SEQ ID NO: 22458 - DNA, 142 bp, Homo sapiens
  MAP TO AC002536.1; EXPRESSED IN LUNG, SIGNAL = 2.2; EXPRESSED IN FETAL LIVER, SIGNAL = 3.7; EXPRESSED IN BRAIN, SIGNAL = 3.3; EXPRESSED IN BONE MARROW, SIGNAL = 3.9; EXPRESSED IN ADULT LIVER, SIGNAL = 4.5; EXPRESSED IN PLACENTA, SIGNAL = 3.7; EXPRESSED IN HELA, SIGNAL = 4.1; EXPRESSED IN HEART, SIGNAL = 3.6; NT HIT: AL163246.2, EVALUE 5.00e-06; SWISSPROT HIT: P35441, EVALUE 6.10e-01; EST_HUMAN HIT: AA490128.1, EVALUE 3.00e-02
aaatggttctgctcagtatgcagacactaccggaaagtggacagctgcagccctgtagcccctgggggatatccctcagacagtggtgaagaggaatcttccccgtgggtagaacttccggcatgcacctgtgtgtgctccg

SEQ ID NO: 22459 - DNA, 164 bp, Homo sapiens
  MAP TO AC000055.1; EXPRESSED IN BRAIN, SIGNAL = 9.8; EXPRESSED IN ADULT LIVER, SIGNAL = 7.5; EXPRESSED IN PLACENTA, SIGNAL = 9.4; EXPRESSED IN LUNG, SIGNAL = 9.4; EXPRESSED IN HELA, SIGNAL = 9.2; EXPRESSED IN HEART, SIGNAL = 9.1; EXPRESSED IN BONE MARROW, SIGNAL = 8.8; EXPRESSED IN FETAL LIVER, SIGNAL = 9.1; EST_HUMAN HIT: BE250383.1, EVALUE 2.20e+00; SWISSPROT HIT: Q09625, EVALUE 5.20e+00
agttttggcatcccaagattctgtagtgttgtctgtagaataagatgctttattcttgtcttttgtatgtgcagagaaggtattagtacctatacttggggtagaactttcctcatatacattatcagagctaccacatttctagccaaaataagaatgaaact

SEQ ID NO: 22460 - DNA, 132 bp, Homo sapiens
  MAP TO AC003661.1; EXPRESSED IN LUNG, SIGNAL = 9.4; EXPRESSED IN HELA, SIGNAL = 7.9; EXPRESSED IN HEART, SIGNAL =   7; EXPRESSED IN FETAL LIVER, SIGNAL = 7.8; EXPRESSED IN BONE MARROW, SIGNAL =   8; EXPRESSED IN PLACENTA, SIGNAL = 7.7; EXPRESSED IN BRAIN, SIGNAL = 9.4; EXPRESSED IN ADULT LIVER, SIGNAL = 8.2; SWISSPROT HIT: P34474, EVALUE 3.10e+00; EST_HUMAN HIT: AW853699.1, EVALUE 1.10e-01
agatggagaggagtcacagtattcaatagggaggtcaaagtgggcatcactgagaatgggatttttgaccagatacttaaagaacatgtgggacttaaagaaacagatattttggggaaaggtgttccaggc

SEQ ID NO: 22461 - DNA, 94 bp, Homo sapiens
  MAP TO AC006538.1; EXPRESSED IN PLACENTA, SIGNAL = 2.3; EXPRESSED IN LUNG, SIGNAL = 2.3; EXPRESSED IN HEART, SIGNAL = 2.3; EXPRESSED IN BRAIN, SIGNAL = 2.3; EXPRESSED IN ADULT LIVER, SIGNAL = 2.1; EXPRESSED IN FETAL LIVER, SIGNAL = 2.3; EXPRESSED IN BONE MARROW, SIGNAL = 2.5; EXPRESSED IN HELA, SIGNAL = 2.4; NT HIT: AF115856.1, EVALUE 7.80e-01
ggtgccgggactgggggagtgacgtggctgcttcagagccacgagactgatgacggccaggccgggcgtgacctggaacaggctccactgcacc

SEQ ID NO: 22462 - DNA, 288 bp, Homo sapiens
  MAP TO AC005833.1; EXPRESSED IN PLACENTA, SIGNAL = 2.6; EXPRESSED IN LUNG, SIGNAL =   3; EXPRESSED IN FETAL LIVER, SIGNAL = 2.4; EXPRESSED IN BRAIN, SIGNAL = 2.6; EXPRESSED IN BONE MARROW, SIGNAL = 2.4; EXPRESSED IN ADULT LIVER, SIGNAL = 2.4; EXPRESSED IN HELA, SIGNAL = 2.4; EXPRESSED IN HEART, SIGNAL = 2.1; NT HIT: gi11525737, EVALUE 1.00e-113; SWISSPROT HIT: P94926, EVALUE 3.80e+00
atgttttggaggaaactccccaaagccctcttcattgggctgactctggccattgctgtcaatctccttctggtattttctagcaaggggactttacaaaacctgtttacgggtggtctccacagggagcttcctttacatctgaataaacgctacggggcagtgataaagagactctcccacttggaggtggaattgcaggatctgagtaagtttacaatgctaacctggaaggtgtgtgtgtgggtgtgtgtgtttggggcacttaggaaaaagggatatggaagg

SEQ ID NO: 22463 - DNA, 197 bp, Homo sapiens
  MAP TO AC004706.1; EXPRESSED IN BONE MARROW, SIGNAL = 2.7; EXPRESSED IN ADULT LIVER, SIGNAL =   5; EXPRESSED IN PLACENTA, SIGNAL = 2.6; EXPRESSED IN HELA, SIGNAL = 2.4; EXPRESSED IN HEART, SIGNAL = 2.4; EXPRESSED IN FETAL LIVER, SIGNAL = 3.5; EXPRESSED IN BRAIN, SIGNAL = 2.4; EXPRESSED IN LUNG, SIGNAL = 2.9; NT HIT: U12186.1, EVALUE 1.00e-19; SWISSPROT HIT: P70545, EVALUE 3.00e-11; EST_HUMAN HIT: BE791100.1, EVALUE 1.70e-01
ctggcagctccttggccttgcccttgtccaccagctccaggccggcctcggtggctgcgcttgtggcttccatctgctgcaatatggcctccacgatgggcaccatcatggccgtggttgccgtgttactgatccacatggacaggagggctgtgacgcccatgaagcccagcatcagcctgcagaggaggggcagg

SEQ ID NO: 22464 - DNA, 151 bp, Homo sapiens
  MAP TO AC005701.1; EXPRESSED IN LUNG, SIGNAL = 3.6; EXPRESSED IN BRAIN, SIGNAL = 3.4; EXPRESSED IN PLACENTA, SIGNAL = 3.4; EXPRESSED IN HEART, SIGNAL = 2.6; EXPRESSED IN FETAL LIVER, SIGNAL = 3.2; EXPRESSED IN BONE MARROW, SIGNAL = 3.1; EXPRESSED IN ADULT LIVER, SIGNAL = 2.9; EXPRESSED IN HELA, SIGNAL = 3.2; EST_HUMAN HIT: BE079397.1, EVALUE 8.00e+00; NT HIT: AJ404468.1, EVALUE 6.00e-80; SWISSPROT HIT: P39057, EVALUE 2.00e-04
caagttctgcttcctcctggacgtgctgactgtagatcatcctcactgcatccagatctttgttgaacatttggatgaggaccaggtatttatcagatgtatccctcgctaccagcggtctttcaaggaggtttcctgctatgtctagcag

SEQ ID NO: 22465 - DNA, 255 bp, Homo sapiens
  MAP TO AC005866.3; EXPRESSED IN LUNG, SIGNAL = 1.4; EXPRESSED IN HEART, SIGNAL = 1.3; EXPRESSED IN FETAL LIVER, SIGNAL = 1.5; EXPRESSED IN BRAIN, SIGNAL = 1.2; EXPRESSED IN BONE MARROW, SIGNAL = 1.4; EXPRESSED IN PLACENTA, SIGNAL = 1.3; EXPRESSED IN ADULT LIVER, SIGNAL = 1.4; EST_HUMAN HIT: AA927640.1, EVALUE 2.00e-29; NT HIT: Z26273.1, EVALUE 3.00e-64; SWISSPROT HIT: Q01815, EVALUE 3.00e-20
gctgctgtaccgctccatcgactcccacacggaagacaagggccccatctacaactaccgtgtggagatctccatcttcttcatcatctacatcatcatcatcgccttcttcatgatgaacatcttcgtgggcttcgtcatcgtcacctttcaggagcagggggagcaggagtacaagaactgtgagctggacaagaaccaggtagcttcctaggaaggagcggagggaagcggggcccacggagggaatggcag

SEQ ID NO: 22466 - DNA, 114 bp, Homo sapiens
  MAP TO AC003668.1; EXPRESSED IN PLACENTA, SIGNAL = 4.2; EXPRESSED IN BRAIN, SIGNAL = 4.1; EXPRESSED IN BONE MARROW, SIGNAL = 3.6; EXPRESSED IN ADULT LIVER, SIGNAL = 3.6; EXPRESSED IN LUNG, SIGNAL = 4.1; EXPRESSED IN HELA, SIGNAL = 3.8; EXPRESSED IN HEART, SIGNAL = 3.2; EXPRESSED IN FETAL LIVER, SIGNAL = 3.4; NT HIT: U22180.1, EVALUE 4.00e-03; EST_HUMAN HIT: AA317553.1, EVALUE 1.50e+00
tgtcagtgggtccggggattgaggtgtagagggtggtggtgcagtggccataaatgagcattgtgcttgcttcagagtctctcttagaagctggtgtcttcattcccttggggc

SEQ ID NO: 22467 - DNA, 112 bp, Homo sapiens
  MAP TO AC004228.2; EXPRESSED IN LUNG, SIGNAL = 2.5; EXPRESSED IN BRAIN, SIGNAL = 2.5; EXPRESSED IN PLACENTA, SIGNAL = 2.5; EXPRESSED IN HEART, SIGNAL = 2.1; EXPRESSED IN FETAL LIVER, SIGNAL = 2.3; EXPRESSED IN BONE MARROW, SIGNAL =   2; EXPRESSED IN ADULT LIVER, SIGNAL = 2.1; EXPRESSED IN HELA, SIGNAL = 2.5; NT HIT: gi7661801, EVALUE 2.40e-01; EST_HUMAN HIT: BE171199.1, EVALUE 3.60e-01; SWISSPROT HIT: P10181, EVALUE 4.20e+00
atgtgagccacactgttgcacgcacatgtgcaccctgtttgccttcatgggcaggtactgtcccccgaggcaccacctcctgccacggcagccgtatgcccggggtcctggg

SEQ ID NO: 22468 - DNA, 234 bp, Homo sapiens
  MAP TO AC001228.1; EXPRESSED IN PLACENTA, SIGNAL = 3.8; EXPRESSED IN LUNG, SIGNAL = 4.9; EXPRESSED IN HEART, SIGNAL = 2.9; EXPRESSED IN FETAL LIVER, SIGNAL = 4.8; EXPRESSED IN BONE MARROW, SIGNAL = 4.3; EXPRESSED IN ADULT LIVER, SIGNAL = 4.8; EXPRESSED IN HELA, SIGNAL = 4.4; EXPRESSED IN BRAIN, SIGNAL = 3.7; NT HIT: AJ006345.1, EVALUE 1.00e-129; EST_HUMAN HIT: BF542075.1, EVALUE 8.30e-01
ctggggcctggagaatgagaagggtctggaggctaaggagaggggtggatgctccaggaggcagggccagcccatgtgagggtcctgaggtaggaaccagaggaaaccggctctggggcgagaagggcagcgcccagggggccacaggggccggcggcgagggaccctcagccgaggctggtatctcgagaacagcagggatgcctcaaaggttctcgcccagcaagtggacat

SEQ ID NO: 22469 - DNA, 360 bp, Homo sapiens
  MAP TO AC004685.1; EXPRESSED IN LUNG, SIGNAL = 3.4; EXPRESSED IN HEART, SIGNAL = 3.4; EXPRESSED IN FETAL LIVER, SIGNAL = 4.9; EXPRESSED IN BRAIN, SIGNAL = 3.9; EXPRESSED IN BONE MARROW, SIGNAL = 4.3; EXPRESSED IN HELA, SIGNAL = 4.3; EXPRESSED IN PLACENTA, SIGNAL = 4.3; EXPRESSED IN ADULT LIVER, SIGNAL = 5.5; SWISSPROT HIT: P49454, EVALUE 5.00e-01; EST_HUMAN HIT: AA307123.1, EVALUE 5.00e-37; NT HIT: gi11424026, EVALUE 8.90e-01
aagtaacagcgagagctccttccagacatcactcagcttcctgttcacgtccttgaagagtattttgtcctggcttgctgttagaaacctgcagatattggatctattgctgaacttttctatctccccattagcctcctccagggcagccttgaagcggttcatggctgtggttaacttctcagagggcacgctcctctttccttggtcctggagcatctccagaggcttgatcaggccgaggacgcggtggcccaggcgccggcactgtttcttgcagtatttcatctcttcacaccgtttgtggatgacctggccaagggtgataatatgcttcaaattttccatgcctggaagaaa

SEQ ID NO: 22470 - DNA, 540 bp, Homo sapiens
  MAP TO AC004743.1; EXPRESSED IN PLACENTA, SIGNAL = 4.7; EXPRESSED IN HELA, SIGNAL = 4.1; EXPRESSED IN FETAL LIVER, SIGNAL = 5.8; EXPRESSED IN LUNG, SIGNAL = 4.8; EXPRESSED IN HEART, SIGNAL = 4.4; EXPRESSED IN BRAIN, SIGNAL = 4.7; EXPRESSED IN BONE MARROW, SIGNAL = 4.2; EXPRESSED IN ADULT LIVER, SIGNAL = 4.7; SWISSPROT HIT: Q01850, EVALUE 7.90e+00; NT HIT: Y10826.1, EVALUE 8.60e-02; EST_HUMAN HIT: AF117823.1, EVALUE 2.00e+00
gtacctgaggaccaaaatccattttcatttacatgcaaggcctccaggtacttccaaacgggaagctacactctttggggctatatgccaagagggagtagagtcaggatttcgtgccttgtgacatctaaagttttcactacagaggagagcccgttggtaaacaagtcagaagcctcactttcaacagtcctgactgtggtgttaccatacctctgcctgaaaaggaggctgagaaactctcacagtgtacaagaatcttcccaagtaaaagttcttgggactatgaagacagttttctgctcaattcctctggcagttaaggaattctgctgtcttattagtctctttgggtacaggaaacagtatgtacctcaccttggcattctacttggtgctttactttggttagtttgcaaaccagcaaccttggagcatagcccagagtccccattggaaaccaaccagcaagctgtggcacactctcaacctctggcactccacagactcacgacgagtctctacgatgagttgggaatc

SEQ ID NO: 22471 - DNA, 91 bp, Homo sapiens
  MAP TO AC005669.1; EXPRESSED IN FETAL LIVER, SIGNAL = 1.7; EXPRESSED IN BONE MARROW, SIGNAL = 1.6; EXPRESSED IN ADULT LIVER, SIGNAL = 1.5; EXPRESSED IN PLACENTA, SIGNAL = 1.8; EXPRESSED IN LUNG, SIGNAL = 1.6; EXPRESSED IN HEART, SIGNAL = 1.4; EXPRESSED IN BRAIN, SIGNAL = 1.9; NT HIT: gi11449901, EVALUE 2.00e-44; EST_HUMAN HIT: T56727.1, EVALUE 1.10e+00; SWISSPROT HIT: P51686, EVALUE 5.00e-09
agtagaagtcagtgaagttgaagttaacgtagtcttccatggaagatgtggattcagagccatagtcatcagccatgttaggaatagggct

SEQ ID NO: 22472 - DNA, 92 bp, Homo sapiens
  MAP TO AC005753.1; EXPRESSED IN LUNG, SIGNAL = 4.6; EXPRESSED IN HELA, SIGNAL =   4; EXPRESSED IN HEART, SIGNAL =   4; EXPRESSED IN FETAL LIVER, SIGNAL = 4.8; EXPRESSED IN BONE MARROW, SIGNAL = 4.5; EXPRESSED IN PLACENTA, SIGNAL = 5.3; EXPRESSED IN BRAIN, SIGNAL = 4.9; EXPRESSED IN ADULT LIVER, SIGNAL =   4; NT HIT: AF059510.1, EVALUE 7.60e-01
ggaaagccaggtttatctcttctcccctggagtatctgttcccttaagagccaagaagagacaaggaaggtgggaacctgcagaaaacataa

SEQ ID NO: 22473 - DNA, 243 bp, Homo sapiens
  MAP TO AC004924.2; EXPRESSED IN FETAL LIVER, SIGNAL =  13; EXPRESSED IN BONE MARROW, SIGNAL =  19; EXPRESSED IN HELA, SIGNAL =  15; EXPRESSED IN PLACENTA, SIGNAL = 8.4; EXPRESSED IN LUNG, SIGNAL = 7.5; EXPRESSED IN HEART, SIGNAL = 6.8; EXPRESSED IN BRAIN, SIGNAL = 4.9; EXPRESSED IN ADULT LIVER, SIGNAL =  20; EST_HUMAN HIT: BF679574.1, EVALUE 1.00e-106; NT HIT: gi11446188, EVALUE 1.00e-79; SWISSPROT HIT: P97351, EVALUE 2.00e-33
aatgatgaagttgcatttagaaaattcaagctgattactgaagatgttcagggcaaaaattgcctgactaacttctatggcatgggtcttacctgtgacaaaatatgttccaaggttgaaaaatgttcaacaatgatcgaagctcatgttgatgtcaagactaccgatggttacttctttcttatgttttgtgttggttttactaaaaaacacaacaatctgatactgaagacctcttatgct

SEQ ID NO: 22474 - DNA, 136 bp, Homo sapiens
  MAP TO AC005874.2; EXPRESSED IN PLACENTA, SIGNAL =   2; EXPRESSED IN BRAIN, SIGNAL = 1.3; EXPRESSED IN BONE MARROW, SIGNAL = 2.2; EXPRESSED IN ADULT LIVER, SIGNAL = 1.9; EXPRESSED IN LUNG, SIGNAL = 1.9; EXPRESSED IN HELA, SIGNAL = 1.9; EXPRESSED IN HEART, SIGNAL = 1.9; EXPRESSED IN FETAL LIVER, SIGNAL =   2; EST_HUMAN HIT: BF311999.1, EVALUE 1.80e+00; SWISSPROT HIT: P50527, EVALUE 5.30e+00
tcgtgctttgttcaccgtccccctgccccccgcctctatacccccatgcctttgcttctgtagtcagaagctgtccaaacaccccatctgcaacacacatcccctcactgtacttctcagtctcgttgaaggattg

SEQ ID NO: 22475 - DNA, 117 bp, Homo sapiens
  MAP TO AC005022.1; EXPRESSED IN ADULT LIVER, SIGNAL = 2.9; EXPRESSED IN PLACENTA, SIGNAL = 2.7; EXPRESSED IN LUNG, SIGNAL = 3.2; EXPRESSED IN HELA, SIGNAL = 3.1; EXPRESSED IN HEART, SIGNAL = 2.7; EXPRESSED IN BRAIN, SIGNAL = 3.1; EXPRESSED IN FETAL LIVER, SIGNAL = 2.7; EXPRESSED IN BONE MARROW, SIGNAL = 2.6; SWISSPROT HIT: Q9RXL3, EVALUE 7.10e+00; EST_HUMAN HIT: BE910039.1, EVALUE 9.60e-02
tctgggccctgggaagtcctcttcacaaagccaatacacttggcctgcgtgtgaggcctctcctcacagtcagggcgaagccgcggctgctccaggccccctggtgccacctgaggc

SEQ ID NO: 22476 - DNA, 228 bp, Homo sapiens
  MAP TO AC006197.1; EXPRESSED IN PLACENTA, SIGNAL = 0.94; EXPRESSED IN LUNG, SIGNAL = 0.94; EXPRESSED IN FETAL LIVER, SIGNAL = 1.4; EXPRESSED IN BRAIN, SIGNAL = 0.96; EXPRESSED IN ADULT LIVER, SIGNAL = 1.2; EXPRESSED IN HEART, SIGNAL = 1.7; EXPRESSED IN BONE MARROW, SIGNAL = 1.2; SWISSPROT HIT: Q10444, EVALUE 7.90e-01; NT HIT: AF134858.1, EVALUE 1.40e-01; EST_HUMAN HIT: AI830965.1, EVALUE 5.20e-02
cactcctgcaggaagccgtgattgccagcaaaccaccaggcacgctgctggtggctctgcgacagaagcgacacagcacacctccagcgtccaacacgtggcattccctcaggccggcctgcttgcccccacactcctcatcctccttccccatctggttgctcttcacaacagctctgctgacttcatgctcaatgtcttgggccttcctgctgtgggccatgggac

SEQ ID NO: 22477 - DNA, 365 bp, Homo sapiens
  MAP TO AC004626.1; EXPRESSED IN ADULT LIVER, SIGNAL = 2.3; EXPRESSED IN PLACENTA, SIGNAL = 1.8; EXPRESSED IN LUNG, SIGNAL = 1.8; EXPRESSED IN HEART, SIGNAL = 2.6; EXPRESSED IN BRAIN, SIGNAL = 2.4; EXPRESSED IN HELA, SIGNAL =   2; EXPRESSED IN FETAL LIVER, SIGNAL = 2.5; EXPRESSED IN BONE MARROW, SIGNAL = 1.9; SWISSPROT HIT: P52588, EVALUE 2.60e+00; EST_HUMAN HIT: AW204505.1, EVALUE 3.40e-01
cctgggagtagcagaatagccttcgagtatcacatcaattgcctggcctgggtacagctccatgctggcggggtggagatgaaacacggggctctgtggatccctgggctcctgagagccactgggctggggttggacatgagcatgtcccttcttaacccggcccttcttactcagcttggcctggggtcggaagctatcattcatccagaacaactgttggatccgacgtcccttgttgatcaacttaaagtggtaatagtgggtatccaggctggaaaagacgaggcaggtgttgagaggattccatttagggatgttctgttcagctctacacccttgggatttactcttctggaagtatt

SEQ ID NO: 22478 - DNA, 195 bp, Homo sapiens
  MAP TO AC004757.1; EXPRESSED IN BRAIN, SIGNAL = 3.6; EXPRESSED IN ADULT LIVER, SIGNAL = 4.9; EXPRESSED IN PLACENTA, SIGNAL = 3.9; EXPRESSED IN HELA, SIGNAL = 3.7; EXPRESSED IN HEART, SIGNAL = 3.2; EXPRESSED IN FETAL LIVER, SIGNAL = 4.1; EXPRESSED IN BONE MARROW, SIGNAL = 3.8; EXPRESSED IN LUNG, SIGNAL = 3.7; SWISSPROT HIT: P23477, EVALUE 2.00e-03; EST_HUMAN HIT: BE078122.1, EVALUE 4.40e-02
ctttcctcctctcatgatgaatgaatcgtccatgtgtctgtctgaggccagcccctcctctcgcacactggatcccttcttctcttgcttgttaaaaagcatcactccagcaattatccactctctcatctgcagcatcaaattttccatctcaactggatcattcccatcagcatactgataggatataataac

SEQ ID NO: 22479 - DNA, 406 bp, Homo sapiens
  MAP TO AC005815.1; EXPRESSED IN FETAL LIVER, SIGNAL = 5.4; EXPRESSED IN BONE MARROW, SIGNAL = 4.2; EXPRESSED IN HELA, SIGNAL = 3.4; EXPRESSED IN PLACENTA, SIGNAL = 2.6; EXPRESSED IN LUNG, SIGNAL = 2.8; EXPRESSED IN HEART, SIGNAL = 7.6; EXPRESSED IN BRAIN, SIGNAL = 4.2; EXPRESSED IN ADULT LIVER, SIGNAL = 5.3; NT HIT: AF052733.1, EVALUE 6.40e-02; SWISSPROT HIT: P52132, EVALUE 2.30e+00; EST_HUMAN HIT: N29160.1, EVALUE 5.90e+00
aagtgcacagttcagagggatgcccagccacagaggtgccgaaacgcagaactggaaccaatcacctgctccaacagagagaaggcgaaagcactgggcagcgtgctcagaatgtgctcttgcttctttgtaacgaaatatcagaagacagattgtaacgttgttcagcaagctattttttgtactgaaacatcagaaggcattatgaaactgttcagcaaatcatctctaaacaatgtcataaagggttacctagtttggggtaagcccggaatgaatatctgcaccatcattcctcacactaacaaacatgtccatctatgtgaagcagaattcccaacacaccaccatctccaaaccaacaccaaaccactgccaaacaaagctgaagaggaaaaccagaaag

SEQ ID NO: 22480 - DNA, 150 bp, Homo sapiens
  MAP TO AC004254.1; EXPRESSED IN PLACENTA, SIGNAL = 4.8; EXPRESSED IN HELA, SIGNAL = 4.7; EXPRESSED IN HEART, SIGNAL = 4.8; EXPRESSED IN FETAL LIVER, SIGNAL = 4.4; EXPRESSED IN BONE MARROW, SIGNAL = 4.5; EXPRESSED IN LUNG, SIGNAL = 4.7; EXPRESSED IN BRAIN, SIGNAL = 4.7; EXPRESSED IN ADULT LIVER, SIGNAL = 5.2; NT HIT: gi4506342, EVALUE 1.30e+00; SWISSPROT HIT: P04501, EVALUE 1.00e+00; EST_HUMAN HIT: BF691812.1, EVALUE 2.00e+00
agtaggggttttcacaaaagggtggaaaagcagtggactctgagtagcactgggaagcatcctcatctcctgacagtacataggtgtaagaatatgagcggatctctcttgagggagctgcagggtaagtggtgtagagagagccaggtt

SEQ ID NO: 22481 - DNA, 282 bp, Homo sapiens
  MAP TO AC005725.1; EXPRESSED IN PLACENTA, SIGNAL = 1.7; EXPRESSED IN BRAIN, SIGNAL = 1.5; EXPRESSED IN BONE MARROW, SIGNAL = 1.8; EXPRESSED IN ADULT LIVER, SIGNAL = 1.9; EXPRESSED IN LUNG, SIGNAL = 1.3; EXPRESSED IN HELA, SIGNAL = 1.6; EXPRESSED IN HEART, SIGNAL = 1.4; EXPRESSED IN FETAL LIVER, SIGNAL = 1.6; EST_HUMAN HIT: AW452782.1, EVALUE 1.00e+00
ccctctccttttccttaacatcatcatcatcgttgtcaccaccaccaccaccatcatcatcctcaccatcaccaataccatcatcatcctcaccatgaccatcaccactgccattgacatcaccaccaccatcatcaccatcaccaccattatcatcatcaccactgctgtcaacaccatcatcaccacgaccatcatcaccatcatcatcatcatcatttttgaaccatgtgagaacaagttgccaatattatgactcttcattcaggacgacttcaatag

SEQ ID NO: 22482 - DNA, 115 bp, Homo sapiens
  MAP TO AC003962.1; EXPRESSED IN PLACENTA, SIGNAL = 2.2; EXPRESSED IN BONE MARROW, SIGNAL = 1.9; EXPRESSED IN ADULT LIVER, SIGNAL =   2; EXPRESSED IN LUNG, SIGNAL = 1.6; EXPRESSED IN HELA, SIGNAL = 1.8; EXPRESSED IN HEART, SIGNAL = 1.7; EXPRESSED IN FETAL LIVER, SIGNAL = 2.1; EXPRESSED IN BRAIN, SIGNAL = 1.9; NT HIT: Y11368.1, EVALUE 1.00e+00; EST_HUMAN HIT: AI124874.1, EVALUE 2.00e-58
cgaataggtggtgaaaccaatgggccaaatgtctctaaatcaaatcgtccagtccgggattgagccttcaataaccaatagcgtttctcaagatcaatgatgtctgattcctcca

SEQ ID NO: 22483 - DNA, 375 bp, Homo sapiens
  MAP TO AC004578.3; EXPRESSED IN LUNG, SIGNAL = 4.7; EXPRESSED IN HELA, SIGNAL = 4.5; EXPRESSED IN ADULT LIVER, SIGNAL = 4.8; EXPRESSED IN PLACENTA, SIGNAL = 4.3; EXPRESSED IN HEART, SIGNAL = 3.9; EXPRESSED IN FETAL LIVER, SIGNAL = 5.3; EXPRESSED IN BRAIN, SIGNAL = 4.7; EXPRESSED IN BONE MARROW, SIGNAL = 4.7; SWISSPROT HIT: Q06852, EVALUE 2.00e-13; NT HIT: AL161586.2, EVALUE 5.90e-02
cctgagtggactaacacagcatctgatgctaacccggcgcctgataccagcacagcatgtgacgctaacacagaatctgaacccagtacagagcatgaccccaacacagagcctgaccctaacactgcgtctgaccctaaagtggctcatgacactaacacggagcctgaccccaagacggagcctgaccccaagatggtgcctgaccccaacaaagctcctgacccaaacacagcacctgaccccaacacggagcctgaccccaacacgaagcctgaccccaacacggcgcctgaccccaacacagagcctgaccccaacacacagcacctgaccccaacacacagctcctgaccccaacacagtgcctgaccc

SEQ ID NO: 22484 - DNA, 113 bp, Homo sapiens
  MAP TO AC002527.1; EXPRESSED IN ADULT LIVER, SIGNAL = 3.4; EXPRESSED IN PLACENTA, SIGNAL = 3.2; EXPRESSED IN LUNG, SIGNAL = 3.5; EXPRESSED IN HEART, SIGNAL = 3.3; EXPRESSED IN BRAIN, SIGNAL = 3.2; EXPRESSED IN HELA, SIGNAL = 3.4; EXPRESSED IN FETAL LIVER, SIGNAL = 3.2; EXPRESSED IN BONE MARROW, SIGNAL = 3.5; EST_HUMAN HIT: BE796537.1, EVALUE 3.00e-57
agctcctccacggagatattagccagctgttcgctgtcactgccagcagagagcgatcggttgaggtaattccccttgtacaacaagccggcggtcacatggtggaacggcat

SEQ ID NO: 22485 - DNA, 130 bp, Homo sapiens
  MAP TO AC004783.1; EXPRESSED IN PLACENTA, SIGNAL = 4.9; EXPRESSED IN LUNG, SIGNAL =   5; EXPRESSED IN HEART, SIGNAL = 4.2; EXPRESSED IN BRAIN, SIGNAL = 5.5; EXPRESSED IN ADULT LIVER, SIGNAL =   5; EXPRESSED IN FETAL LIVER, SIGNAL = 5.2; EXPRESSED IN BONE MARROW, SIGNAL = 4.9; EXPRESSED IN HELA, SIGNAL = 4.8; EST_HUMAN HIT: BF240758.1, EVALUE 2.00e-67; SWISSPROT HIT: P16789, EVALUE 4.10e+00; NT HIT: AF091740.1, EVALUE 2.00e-67
cagagctcattgagtttgatctgtaaccccggcttgttctcggcattatgatgctttctcttctggatgcttgccggcttcttgctcagcccactggctctggcaggtcctagaggtttgatcttggttg

SEQ ID NO: 22486 - DNA, 86 bp, Homo sapiens
  MAP TO AC005823.1; EXPRESSED IN PLACENTA, SIGNAL = 1.7; EXPRESSED IN ADULT LIVER, SIGNAL = 1.7; EXPRESSED IN LUNG, SIGNAL = 1.8; EXPRESSED IN HEART, SIGNAL = 1.5; EXPRESSED IN FETAL LIVER, SIGNAL = 1.8; EXPRESSED IN BRAIN, SIGNAL = 2.1; EXPRESSED IN BONE MARROW, SIGNAL = 1.6; EXPRESSED IN HELA, SIGNAL = 1.6; SWISSPROT HIT: P01977, EVALUE 9.60e+00; EST_HUMAN HIT: AI769247.1, EVALUE 1.70e-02; NT HIT: AF099810.1, EVALUE 4.50e-02
ctgtaaaatggagctaatggtagcatctgtctcatagcactgtgagtgtgtgggatgaattgaatgggatgatttttgcaaagcat

SEQ ID NO: 22487 - DNA, 218 bp, Homo sapiens
  MAP TO AC005919.1; EXPRESSED IN PLACENTA, SIGNAL = 6.7; EXPRESSED IN HELA, SIGNAL = 6.8; EXPRESSED IN HEART, SIGNAL = 7.2; EXPRESSED IN BRAIN, SIGNAL = 7.7; EXPRESSED IN ADULT LIVER, SIGNAL = 6.6; EXPRESSED IN LUNG, SIGNAL = 7.3; EXPRESSED IN FETAL LIVER, SIGNAL = 5.8; EXPRESSED IN BONE MARROW, SIGNAL = 7.4; NT HIT: gi7106336, EVALUE 9.00e-46; EST_HUMAN HIT: AI150703.1, EVALUE 1.00e-119; SWISSPROT HIT: P13645, EVALUE 5.00e-12
ccatcatctcctcctataaggagacagtaggtctcaatttctttttccaggtggagcttgatgtccaggagctgctcatactccagcttctggccctcggtctcggttctgacctggtgcagctgctcctccagggccccgatctgagcctggatctgcgccagctgcgcacagtagttgctctcggtctctgtcaaggagcactccagggagtgttt

SEQ ID NO: 22488 - DNA, 102 bp, Homo sapiens
  MAP TO AC004381.1; EXPRESSED IN PLACENTA, SIGNAL =  12; EXPRESSED IN HEART, SIGNAL = 8.9; EXPRESSED IN LUNG, SIGNAL =  12; EXPRESSED IN FETAL LIVER, SIGNAL = 9.3; EXPRESSED IN BRAIN, SIGNAL =  11; EXPRESSED IN BONE MARROW, SIGNAL =  10; EXPRESSED IN ADULT LIVER, SIGNAL =  11; EXPRESSED IN HELA, SIGNAL = 9.6; NT HIT: D16350.1, EVALUE 6.00e-45; EST_HUMAN HIT: AI635448.1, EVALUE 6.00e-46; SWISSPROT HIT: O67293, EVALUE 5.50e+00
aaatggcaatgttctacctcctggacaagaaggagatattggcattcaagttctacccaaccgaccatttggcctttttactcattacgtagtaagtgactt

SEQ ID NO: 22489 - DNA, 135 bp, Homo sapiens
  MAP TO AC004087.1; EXPRESSED IN PLACENTA, SIGNAL = 2.6; EXPRESSED IN HEART, SIGNAL = 1.9; EXPRESSED IN FETAL LIVER, SIGNAL = 1.8; EXPRESSED IN BONE MARROW, SIGNAL = 2.3; EXPRESSED IN ADULT LIVER, SIGNAL = 2.2; EXPRESSED IN HELA, SIGNAL = 2.1; EXPRESSED IN LUNG, SIGNAL =   2; EXPRESSED IN BRAIN, SIGNAL = 2.2; SWISSPROT HIT: P54309, EVALUE 9.10e+00; NT HIT: AF048727.1, EVALUE 1.00e-31; EST_HUMAN HIT: AA203124.1, EVALUE 2.00e-28
atggtaatctctggtacctccaaagccaaagaggtcaggtcaggcaatacaggaaaacagagctttcatcctaagaagaatctgtccatgactcttgaaactccacaaagaaaacagaacaccccctacaaagag

SEQ ID NO: 22490 - DNA, 160 bp, Homo sapiens
  MAP TO AC005104.1; EXPRESSED IN LUNG, SIGNAL =   6; EXPRESSED IN HELA, SIGNAL = 5.2; EXPRESSED IN BRAIN, SIGNAL = 5.7; EXPRESSED IN BONE MARROW, SIGNAL = 5.7; EXPRESSED IN ADULT LIVER, SIGNAL = 6.5; EXPRESSED IN PLACENTA, SIGNAL = 4.9; EXPRESSED IN HEART, SIGNAL = 6.9; EXPRESSED IN FETAL LIVER, SIGNAL = 6.5; NT HIT: gi7662309, EVALUE 3.00e-85; EST_HUMAN HIT: BE819663.1, EVALUE 3.50e-02; SWISSPROT HIT: Q42258, EVALUE 5.20e+00
ctcaatgtcaaatatttccatggtgttgtccagcagctttactctgaggtgcaggtgcttctcttgcattctgggcaagagagtctgcccaggctcaagggtgctaactcccacaggggtctgggcacccaagcgcatccctgcagtctgcaggactctg

SEQ ID NO: 22491 - DNA, 82 bp, Homo sapiens
  MAP TO AC005728.1; EXPRESSED IN PLACENTA, SIGNAL = 1.1; EXPRESSED IN BONE MARROW, SIGNAL = 1.1; EXPRESSED IN FETAL LIVER, SIGNAL = 1.1; EXPRESSED IN HEART, SIGNAL = 3.3; EXPRESSED IN HELA, SIGNAL = 3.4; EXPRESSED IN LUNG, SIGNAL = 0.99; EXPRESSED IN BRAIN, SIGNAL = 1.2; EXPRESSED IN ADULT LIVER, SIGNAL = 1.1; SWISSPROT HIT: P36047, EVALUE 9.60e+00; EST_HUMAN HIT: BF210736.1, EVALUE 6.30e-02
aatatagcaaggaaacccaaaacaacagaaagacaagaggagctggaggaaaaagctgtttggaactatgaatcatcccaag

SEQ ID NO: 22492 - DNA, 423 bp, Homo sapiens
  MAP TO AC004130.1; EXPRESSED IN PLACENTA, SIGNAL = 1.3; EXPRESSED IN LUNG, SIGNAL = 1.5; EXPRESSED IN HEART, SIGNAL = 1.4; EXPRESSED IN BRAIN, SIGNAL = 1.4; EXPRESSED IN BONE MARROW, SIGNAL = 1.2; EXPRESSED IN FETAL LIVER, SIGNAL = 1.2; EXPRESSED IN ADULT LIVER, SIGNAL = 1.3; SWISSPROT HIT: P26012, EVALUE 3.00e-85; NT HIT: gi11421995, EVALUE 0.00e+00; EST_HUMAN HIT: AU137772.1, EVALUE 0.00e+00
gttcttttcaatgtaacagttacaatgaaaaaatgtgatgtcacaggaggaaaaaactatgcaataatcaaacctattggttttaatgaaaccgctaaaattcatatacacagaaactgcagctgtcagtgtgaggacaacagaggacctaaaggaaagtgtgtagatgaaacttttctagattccaagtgtttccagtgtgatgagaataaatgtcattttgatgaagatcagttttcttctgagagttgcaagtcacacaaggatcagcctgtttgcagtggtcgaggagtttgtgtttgtgggaaatgttcatgtcacaaaattaagcttggaaaagtgtatggaaaatactgtgaaaaggatgacttttcttgtccatatcaccatggaaatctgtgtgctggtgagtataaatatata

SEQ ID NO: 22493 - DNA, 103 bp, Homo sapiens
  MAP TO AC004583.1; EXPRESSED IN PLACENTA, SIGNAL = 2.3; EXPRESSED IN LUNG, SIGNAL = 2.2; EXPRESSED IN HELA, SIGNAL = 2.3; EXPRESSED IN HEART, SIGNAL =   2; EXPRESSED IN FETAL LIVER, SIGNAL = 2.7; EXPRESSED IN ADULT LIVER, SIGNAL = 2.3; EXPRESSED IN BRAIN, SIGNAL = 2.1; EXPRESSED IN BONE MARROW, SIGNAL =   2; NT HIT: gi5729867, EVALUE 1.00e-33; EST_HUMAN HIT: BE874052.1, EVALUE 1.00e-34
gatgccctctgaatctttctgtttggctgcccaggctcgcctcgactccaaatggttgaaaacagatatacaggtggggtttgacatgtctttttcttggtgt

SEQ ID NO: 22494 - DNA, 272 bp, Homo sapiens
  MAP TO AC005666.1; EXPRESSED IN PLACENTA, SIGNAL = 6.1; EXPRESSED IN HEART, SIGNAL = 5.1; EXPRESSED IN FETAL LIVER, SIGNAL = 5.8; EXPRESSED IN BRAIN, SIGNAL = 6.1; EXPRESSED IN BONE MARROW, SIGNAL = 6.3; EXPRESSED IN HELA, SIGNAL = 5.8; EXPRESSED IN ADULT LIVER, SIGNAL = 5.9; EXPRESSED IN LUNG, SIGNAL = 7.2; SWISSPROT HIT: Q13496, EVALUE 5.20e-01; NT HIT: AF264717.1, EVALUE 1.00e-108; EST_HUMAN HIT: AW501961.1, EVALUE 5.00e-61
caatgaagccaaggagggggcctgctccctggggggttagcatcatccacaccttaccaaagtcagcatcacacgcctcgctggtatcattattcccggtgctgagggagcccccagtggcccttgtccccgggtccagggcacaggctttagcaatggacgtgaccaggtactcatcatcagcattgcgccagccccaccagctgatctctggctggctgcagcgggcgatggcagccccattgcgcaagtgtctgacaaaacagaagaaa

SEQ ID NO: 22495 - DNA, 398 bp, Homo sapiens
  MAP TO AC004940.1; EXPRESSED IN LUNG, SIGNAL = 3.3; EXPRESSED IN HELA, SIGNAL = 3.6; EXPRESSED IN FETAL LIVER, SIGNAL = 3.2; EXPRESSED IN BRAIN, SIGNAL = 3.9; EXPRESSED IN PLACENTA, SIGNAL = 3.5; EXPRESSED IN HEART, SIGNAL = 3.2; EXPRESSED IN BONE MARROW, SIGNAL = 3.2; EXPRESSED IN ADULT LIVER, SIGNAL =   4; SWISSPROT HIT: Q22516, EVALUE 5.10e+00; EST_HUMAN HIT: BE885755.1, EVALUE 8.00e-64; NT HIT: Z79582.1, EVALUE 2.50e-01
tttacaattcaagcgctctgaagtttctgaagaagttacagaaaatggcactgaggaagctgctaaaaaacctaaaaagaagaaaaagaagaaagacccagagacatatgaagtggacagtggtaccacaaagctagcagatgatgcagatgacactccaatggaagagtcagccctgcagaatactaataatgcgaatggcatctgggaggaggagccaaagaaaaagaagaagaagaaaaagcaccaggaagttcaggaccaggaccctgttttccaaggcagtgactccagtggttaccaaagtgaccataaaaagaaaaaaaagaaaagaaaacacagtgaagaggccgaatttaccccacctttgaaatgctcaccaaaaagaaaagggaaaa

SEQ ID NO: 22496 - DNA, 203 bp, Homo sapiens
  MAP TO AC004801.1; EXPRESSED IN PLACENTA, SIGNAL = 3.9; EXPRESSED IN BONE MARROW, SIGNAL = 3.7; EXPRESSED IN ADULT LIVER, SIGNAL = 3.7; EXPRESSED IN LUNG, SIGNAL = 4.2; EXPRESSED IN HELA, SIGNAL = 4.3; EXPRESSED IN HEART, SIGNAL = 4.5; EXPRESSED IN FETAL LIVER, SIGNAL = 3.3; EXPRESSED IN BRAIN, SIGNAL =   5; NT HIT: M59724.1, EVALUE 2.00e-95; EST_HUMAN HIT: AU133013.1, EVALUE 2.00e-90; SWISSPROT HIT: P08237, EVALUE 5.00e-26
ctctgggcagtggtagtgatggcatctacaatttccatgatccgatgcagggcagagtcagtgccaatggtcatatcggtgccacagaagtcattgtcaattgacccaaccaggcccacaatgttcaggtagctggacttcgtagcctcctcatctgtgatcttacctgacaatgagaagcaaaccaggagccactgggtgag

SEQ ID NO: 22497 - DNA, 147 bp, Homo sapiens
  MAP TO AC005243.1; EXPRESSED IN PLACENTA, SIGNAL = 5.6; EXPRESSED IN LUNG, SIGNAL = 7.6; EXPRESSED IN HELA, SIGNAL = 5.4; EXPRESSED IN FETAL LIVER, SIGNAL = 5.9; EXPRESSED IN BRAIN, SIGNAL = 7.9; EXPRESSED IN BONE MARROW, SIGNAL = 5.7; EXPRESSED IN ADULT LIVER, SIGNAL = 5.5; EXPRESSED IN HEART, SIGNAL = 4.8; SWISSPROT HIT: Q9ZN49, EVALUE 4.00e+00; NT HIT: AL163281.2, EVALUE 3.00e-04; EST_HUMAN HIT: AI766930.1, EVALUE 5.00e-01
aggacatcagtcgtattggaaatgggctcacccatatcaccttgttttaccttaattacctctttgaaggccttttctagaaatacagctgtgctttcaaaatatcgaggcttcttctggtcactgggctaagcacaagtggaaaat

SEQ ID NO: 22498 - DNA, 433 bp, Homo sapiens
  MAP TO AC005849.1; EXPRESSED IN PLACENTA, SIGNAL = 3.3; EXPRESSED IN LUNG, SIGNAL = 3.4; EXPRESSED IN FETAL LIVER, SIGNAL = 3.2; EXPRESSED IN BRAIN, SIGNAL = 3.1; EXPRESSED IN ADULT LIVER, SIGNAL =   3; EXPRESSED IN HELA, SIGNAL = 3.4; EXPRESSED IN HEART, SIGNAL = 3.2; EXPRESSED IN BONE MARROW, SIGNAL = 3.1; EST_HUMAN HIT: BE707146.1, EVALUE 2.60e-02; SWISSPROT HIT: P26694, EVALUE 1.00e-09
gtggggcctgcgcccggggccgcctctggcggggtgctgctggggctttctccttcagaggcaggaggtgtggctgggtcctcaagggcccctggggtaggatgcgaggatggggttggggaagcttcatcacagggactgggcacagaactggcagcaggtgcaggggtctggacgttagtgtctgcctgtggctgggccacagaatctgactgtggctgggccatgaggttcagctgtggctgggctgtgggatccgactgtggctgggccgtagggttcagctgtggctgagctgtgggatccgatcgtggctggagtgtggggttcacctgaggctgggccacaggatccatctgtgactgggcctctgccatcggctctggcagagttggaccctcagaatctagctgggtctgtggctcagtgggcg

SEQ ID NO: 22499 - DNA, 154 bp, Homo sapiens
  MAP TO AC005799.1; EXPRESSED IN LUNG, SIGNAL = 1.5; EXPRESSED IN ADULT LIVER, SIGNAL = 1.7; EXPRESSED IN PLACENTA, SIGNAL = 1.8; EXPRESSED IN HEART, SIGNAL = 3.1; EXPRESSED IN FETAL LIVER, SIGNAL = 1.8; EXPRESSED IN BRAIN, SIGNAL = 1.8; EXPRESSED IN BONE MARROW, SIGNAL = 1.5; NT HIT: L03357.1, EVALUE 1.00e-81; EST_HUMAN HIT: BF674641.1, EVALUE 1.00e-81; SWISSPROT HIT: P10644, EVALUE 8.00e-24
tcagaatctgcagaaagcaggcactcgtacagactcaagggaggatgagatttctcctcctccacccaacccagtggttaaaggtaggaggcgacgaggtgctatcagcgctgaggtctacacggaggaagatgcggcatcctatgttagaaag

SEQ ID NO: 22500 - DNA, 527 bp, Homo sapiens
  MAP TO AC004977.1; EXPRESSED IN LUNG, SIGNAL = 1.5; EXPRESSED IN BRAIN, SIGNAL = 1.5; EXPRESSED IN ADULT LIVER, SIGNAL = 1.6; EXPRESSED IN PLACENTA, SIGNAL = 1.4; EXPRESSED IN HEART, SIGNAL = 1.7; EXPRESSED IN FETAL LIVER, SIGNAL = 1.6; EXPRESSED IN BONE MARROW, SIGNAL = 1.4; EST_HUMAN HIT: BF677910.1, EVALUE 4.00e-85; NT HIT: gi11430364, EVALUE 3.30e-01; SWISSPROT HIT: P51915, EVALUE 1.00e-22
atgtgtggcaggttcctgcggcggctgctggcggaggagagccggcgctccacccccgtggggcgcctcttgcttcccgtgctcctgggattccgccttgtgctgctggctgccagtgggcctggagtctatggtgatgagcagagtgaattcgtgtgtcacacccagcagccgggctgcaaggctgcctgcttcgatgccttccaccccctctccccgctgcgtttctgggtcttccaggtcatcttggtggctgtacccagcgccctctatatgggtttcactctgtatcacgtgatctggcactgggaattatcaggaaaggggaaggaggaggagaccctgatccagggacgggagggcaacacagatgtcccaggggctggaagcctcaggctgctctgggcttatgtggctcagctgggggctcggcttgtcctggagggggcagccctggggttgcagtaccacctgtatgggttccagatgcccagctcctttgcatgtcgccgagaaccttgccttgg

SEQ ID NO: 22501 - DNA, 133 bp, Homo sapiens
  MAP TO AC004553.1; EXPRESSED IN LUNG, SIGNAL = 2.2; EXPRESSED IN FETAL LIVER, SIGNAL = 2.2; EXPRESSED IN PLACENTA, SIGNAL = 2.5; EXPRESSED IN HELA, SIGNAL = 2.5; EXPRESSED IN BRAIN, SIGNAL = 2.5; EXPRESSED IN BONE MARROW, SIGNAL = 2.4; EXPRESSED IN ADULT LIVER, SIGNAL = 2.2; EXPRESSED IN HEART, SIGNAL = 2.5; NT HIT: X74885.1, EVALUE 1.20e+00
cagccccgaacaacaggaaaggcttttcttctccttctcctccttctcctccttctccctcttctcccctttctcccccccccctcctcttcttcctcttcctctccttctccttcttcttcttcttccactt

SEQ ID NO: 22502 - DNA, 126 bp, Homo sapiens
  MAP TO AC004139.1; EXPRESSED IN PLACENTA, SIGNAL =   5; EXPRESSED IN HEART, SIGNAL = 3.9; EXPRESSED IN BONE MARROW, SIGNAL = 4.2; EXPRESSED IN ADULT LIVER, SIGNAL = 4.3; EXPRESSED IN LUNG, SIGNAL = 4.2; EXPRESSED IN HELA, SIGNAL = 4.4; EXPRESSED IN FETAL LIVER, SIGNAL = 4.4; EXPRESSED IN BRAIN, SIGNAL = 4.6; EST_HUMAN HIT: W04767.1, EVALUE 6.00e-65; NT HIT: AB033093.1, EVALUE 4.00e-65; SWISSPROT HIT: P46388, EVALUE 4.10e+00
tggaaatgggctgcagaccgggcagctattgtcagccgctggaactggcttcaggctcatgtttctgacttggaatatcgaattcgtcagcaaacagacatttacaaacagatacgtgctaataag

SEQ ID NO: 22503 - DNA, 495 bp, Homo sapiens
  MAP TO AC005669.1; EXPRESSED IN PLACENTA, SIGNAL = 3.3; EXPRESSED IN LUNG, SIGNAL =   4; EXPRESSED IN FETAL LIVER, SIGNAL = 3.4; EXPRESSED IN BONE MARROW, SIGNAL = 3.7; EXPRESSED IN ADULT LIVER, SIGNAL = 3.5; EXPRESSED IN HELA, SIGNAL = 3.4; EXPRESSED IN HEART, SIGNAL = 3.4; EXPRESSED IN BRAIN, SIGNAL = 3.8; EST_HUMAN HIT: AW363686.1, EVALUE 4.60e-01; SWISSPROT HIT: P51686, EVALUE 4.00e-85; NT HIT: U45982.1, EVALUE 0.00e+00
atgatgatggtatagcagcaagccatgaccacgaagggaaggaagaaccccagaatgaccttcagggtcaagacagctgacttcagtttggtgctctcatcgctagggtaaaccatggtgcagatagcaatgccggattcctccttgatttggctgtataagatttctgggatgcagagagcagctgccaatacccagatggtaaagcaaaccattttgctgtacaaaagccttttctccctccaagtatgtgctctcatggcctgggcaatggcaatgtacctgtccacgctgatgcacatgatcagcaacacacagctgtagaagttcatcttgtacatgctgttgaccaccttgcacatgaaggtctggaacttccactggtcagcagcagcaatggcccagaagggaagagtgacaagaaagaggaggtcagcaattgccaaattcaaaaggaacatgtcggtcatggtcttcactcttgtgcagtaccag

SEQ ID NO: 22504 - DNA, 230 bp, Homo sapiens
  MAP TO AC004477.1; EXPRESSED IN PLACENTA, SIGNAL = 2.2; EXPRESSED IN LUNG, SIGNAL = 2.4; EXPRESSED IN HELA, SIGNAL = 2.2; EXPRESSED IN HEART, SIGNAL = 2.7; EXPRESSED IN FETAL LIVER, SIGNAL = 2.2; EXPRESSED IN ADULT LIVER, SIGNAL = 2.1; EXPRESSED IN BRAIN, SIGNAL = 2.2; EXPRESSED IN BONE MARROW, SIGNAL = 1.9; NT HIT: X84060.1, EVALUE 1.00e-127; SWISSPROT HIT: Q14494, EVALUE 1.00e-38; EST_HUMAN HIT: BE897190.1, EVALUE 1.00e-116
gacatagatctgattgacatcctttggcgacaggatattgatctgggggctgggcgtgaggtttttgactatagtcaccgccagaaggagcaggatgtggagaaggagctgcgagatggaggcgagcaggacacctgggcaggcgagggcgcggaagctctggcacggaacctgctagtggatggagagactggggagagcttccctgcacaggtaccatcgcccctgct

SEQ ID NO: 22505 - DNA, 138 bp, Homo sapiens
  MAP TO AC004671.1; EXPRESSED IN PLACENTA, SIGNAL = 4.5; EXPRESSED IN BONE MARROW, SIGNAL = 4.8; EXPRESSED IN ADULT LIVER, SIGNAL = 4.5; EXPRESSED IN LUNG, SIGNAL = 4.9; EXPRESSED IN HELA, SIGNAL = 4.5; EXPRESSED IN HEART, SIGNAL = 4.4; EXPRESSED IN FETAL LIVER, SIGNAL = 4.5; EXPRESSED IN BRAIN, SIGNAL = 4.8; NT HIT: AB029004.1, EVALUE 3.00e-72; SWISSPROT HIT: P54493, EVALUE 5.30e+00
cttcaggatgagttagagaaaggtgaacgggacaatgcagaactgcaggagtttgccaacgccattcttcagcagatagcagaccattgtcccgacatcctagagcaagtggtcaacgccctggaagagtcctcttga

SEQ ID NO: 22506 - DNA, 144 bp, Homo sapiens
  MAP TO AC005057.1; EXPRESSED IN BONE MARROW, SIGNAL = 4.8; EXPRESSED IN ADULT LIVER, SIGNAL = 5.9; EXPRESSED IN PLACENTA, SIGNAL = 5.8; EXPRESSED IN HELA, SIGNAL = 5.1; EXPRESSED IN HEART, SIGNAL = 5.4; EXPRESSED IN FETAL LIVER, SIGNAL = 5.7; EXPRESSED IN BRAIN, SIGNAL = 6.4; EXPRESSED IN LUNG, SIGNAL = 5.7; SWISSPROT HIT: P53667, EVALUE 2.00e-22; NT HIT: gi11421442, EVALUE 8.00e-76; EST_HUMAN HIT: AU130378.1, EVALUE 1.00e-75
gctgcccgcctccccgctgggagtataagccggagagctcagggggctggtctcaggccccagcccgtggcccagtgtatcgtgagggtcatgctcgagggtcagctggagcaggcggctggtttcctgaatcagcaggtcaat

SEQ ID NO: 22507 - DNA, 394 bp, Homo sapiens
  MAP TO AC004590.1; EXPRESSED IN LUNG, SIGNAL = 1.9; EXPRESSED IN BONE MARROW, SIGNAL = 1.6; EXPRESSED IN PLACENTA, SIGNAL = 1.9; EXPRESSED IN HELA, SIGNAL = 1.7; EXPRESSED IN HEART, SIGNAL = 1.3; EXPRESSED IN FETAL LIVER, SIGNAL = 1.7; EXPRESSED IN BRAIN, SIGNAL = 1.7; EXPRESSED IN ADULT LIVER, SIGNAL = 1.7; EST_HUMAN HIT: BE787143.1, EVALUE 2.00e-77; NT HIT: AE001938.1, EVALUE 2.00e-05; SWISSPROT HIT: Q09214, EVALUE 3.00e-31
tcgggtactccacctgccactggtgccacatgatggaagaggagtccttccagaatgaggagattggccgcctgctcagtgaggactttgtgagtgtgaaggtagaccgtgaggagcggcctgacgtggacaaggtgtacatgacgttcgtgcaggtgagcagccctcctcgggagtgtatgcgccacatgggctcagagcagctcccctcaccctcgccctctctccgccaggccaccagcagcggcgggggctggcccatgaatgtgtggctgactcccaacctccagccctttgtcgggggcacctatttccctcctgaggatggcttgacccgagtcggcttccgcacagtgttgctgagaatacgagaacaggtgggtgtgcctccggg

SEQ ID NO: 22508 - DNA, 155 bp, Homo sapiens
  MAP TO AC002542.1; EXPRESSED IN PLACENTA, SIGNAL = 4.6; EXPRESSED IN LUNG, SIGNAL = 5.1; EXPRESSED IN HEART, SIGNAL =   5; EXPRESSED IN BRAIN, SIGNAL = 4.7; EXPRESSED IN BONE MARROW, SIGNAL =   5; EXPRESSED IN ADULT LIVER, SIGNAL = 4.5; EXPRESSED IN HELA, SIGNAL = 5.3; EXPRESSED IN FETAL LIVER, SIGNAL = 4.8; NT HIT: AF234882.1, EVALUE 2.00e-82; SWISSPROT HIT: P00926, EVALUE 5.20e+00; EST_HUMAN HIT: BE545086.1, EVALUE 2.00e-68
gtgtgcaactgcttatattctcttggctgaagaggaagcaacaaccattgctgaagcagaaaaattatttaagcaggccctgaaggctggagatggctgttaccgacgctctcagcagctacaacatcatggatcccagtatgaagcccaacata

SEQ ID NO: 22509 - DNA, 156 bp, Homo sapiens
  MAP TO AC004812.1; EXPRESSED IN PLACENTA, SIGNAL = 3.6; EXPRESSED IN HEART, SIGNAL = 3.4; EXPRESSED IN BONE MARROW, SIGNAL = 3.6; EXPRESSED IN ADULT LIVER, SIGNAL = 3.6; EXPRESSED IN LUNG, SIGNAL = 4.1; EXPRESSED IN HELA, SIGNAL = 3.5; EXPRESSED IN FETAL LIVER, SIGNAL = 3.3; EXPRESSED IN BRAIN, SIGNAL = 3.6; SWISSPROT HIT: Q01149, EVALUE 6.00e-01; EST_HUMAN HIT: BF092116.1, EVALUE 2.00e-22; NT HIT: AJ131674.1, EVALUE 3.60e-01
atcaagatgctgtcagatcggaaacgggagctggagcatcgtctcagcgctactttagaggaaaatgacctgctccaagggaccgtggaggagctacaggaccgggtgctaatcctggagaggcagggccatgacaaggacctacaggtactgggg

SEQ ID NO: 22510 - DNA, 259 bp, Homo sapiens
  MAP TO AC004836.2; EXPRESSED IN LUNG, SIGNAL = 6.7; EXPRESSED IN BRAIN, SIGNAL = 6.9; EXPRESSED IN HEART, SIGNAL = 5.9; EXPRESSED IN FETAL LIVER, SIGNAL = 5.7; EXPRESSED IN BONE MARROW, SIGNAL =   6; EXPRESSED IN ADULT LIVER, SIGNAL = 6.1; EXPRESSED IN PLACENTA, SIGNAL = 6.5; EXPRESSED IN HELA, SIGNAL =   6; EST_HUMAN HIT: H23072.1, EVALUE 5.00e-58; SWISSPROT HIT: Q9VRM7, EVALUE 4.70e-01; NT HIT: gi4502288, EVALUE 6.20e-01
gtaacgtcaacaatcatttcaccttctctcccaatgctggttccaatgtcacacgcctgctgcttacatctcgctttgactatgctggtgggtttgataagatctgggactacaagctacttgtctacgtaactgatgacaacttgatgtctgacaggaagaaagcggaggctcttgttgagacaggaacagtgacactgagtattaaagtcattccccacccaaccactatcatcaccacgacccccagggtaagggc

SEQ ID NO: 22511 - DNA, 147 bp, Homo sapiens
  MAP TO AC005255.1; EXPRESSED IN LUNG, SIGNAL = 2.5; EXPRESSED IN FETAL LIVER, SIGNAL =  60; EXPRESSED IN BONE MARROW, SIGNAL = 1.9; EXPRESSED IN PLACENTA, SIGNAL = 2.7; EXPRESSED IN HELA, SIGNAL =   2; EXPRESSED IN BRAIN, SIGNAL = 2.3; EXPRESSED IN ADULT LIVER, SIGNAL =  28; EXPRESSED IN HEART, SIGNAL = 1.7; NT HIT: AB002059.1, EVALUE 9.00e-05; SWISSPROT HIT: P08548, EVALUE 2.00e-05; EST_HUMAN HIT: BF184739.1, EVALUE 3.00e-21
ggtttagctgctcattataattatcctgtgaaagaagatgtacaaatactactgtataaagaagtacaaggcttgtacattgaaaattatgaaacattgttggaagaagttaaagatctaaagaaatggaaagacatcccatgttca

SEQ ID NO: 22512 - DNA, 193 bp, Homo sapiens
  MAP TO AC004414.1; EXPRESSED IN PLACENTA, SIGNAL = 1.5; EXPRESSED IN ADULT LIVER, SIGNAL = 1.6; EXPRESSED IN LUNG, SIGNAL = 1.5; EXPRESSED IN HEART, SIGNAL = 1.4; EXPRESSED IN FETAL LIVER, SIGNAL = 1.4; EXPRESSED IN BRAIN, SIGNAL = 1.5; EXPRESSED IN BONE MARROW, SIGNAL = 1.2; SWISSPROT HIT: P87553, EVALUE 1.30e+00; EST_HUMAN HIT: AI806418.1, EVALUE 2.00e-29
ctgcatgggttttctctggctgcgctcatgtcctcccatgtccccagactgcacatgttagggtcactggggtgtccgaattgtccccatgtgggtgagtataagtgcacctgcaatgggatgggggccagtccagggctggcttctaccttgccccctgtgctgccacggtaggctgcggccacctgtgacc

SEQ ID NO: 22513 - DNA, 186 bp, Homo sapiens
  MAP TO AC005865.1; EXPRESSED IN PLACENTA, SIGNAL = 2.8; EXPRESSED IN LUNG, SIGNAL =   3; EXPRESSED IN FETAL LIVER, SIGNAL = 2.7; EXPRESSED IN BRAIN, SIGNAL = 2.5; EXPRESSED IN BONE MARROW, SIGNAL = 2.5; EXPRESSED IN ADULT LIVER, SIGNAL = 2.6; EXPRESSED IN HELA, SIGNAL = 2.8; EXPRESSED IN HEART, SIGNAL = 2.7; SWISSPROT HIT: P47312, EVALUE 2.90e+00; EST_HUMAN HIT: AW577113.1, EVALUE 1.00e-02; NT HIT: AF217796.1, EVALUE 1.70e+00
cacttgtctctcagcaaggctagtgaagaaggtagcttcttcccctcctctctcctctccatccctccaaacctggagggcagcagggagtgtgaccactgccttcagcttggagactcggtgctgagggctctgttaatccacctcggggcctcagggtcacagctgaaatgtggcttaggaggt

SEQ ID NO: 22514 - DNA, 78 bp, Homo sapiens
  MAP TO AC005885.1; EXPRESSED IN HELA, SIGNAL = 5.3; EXPRESSED IN HEART, SIGNAL = 5.9; EXPRESSED IN BRAIN, SIGNAL = 4.2; EXPRESSED IN PLACENTA, SIGNAL = 4.3; EXPRESSED IN LUNG, SIGNAL =  11; EXPRESSED IN FETAL LIVER, SIGNAL =   4; EXPRESSED IN BONE MARROW, SIGNAL = 3.9; EXPRESSED IN ADULT LIVER, SIGNAL =   4; NT HIT: D50686.1, EVALUE 1.60e-01; EST_HUMAN HIT: AI867714.1, EVALUE 1.00e-36
gaacagcaagaatggactccaggcatcgggactgcacctccaagtccagtagctcctccaagccttgatcttcagcaa

SEQ ID NO: 22515 - DNA, 169 bp, Homo sapiens
  MAP TO AC004047.1; EXPRESSED IN PLACENTA, SIGNAL = 1.7; EXPRESSED IN HEART, SIGNAL = 1.3; EXPRESSED IN BRAIN, SIGNAL = 1.1; EXPRESSED IN BONE MARROW, SIGNAL = 1.8; EXPRESSED IN ADULT LIVER, SIGNAL = 2.2; EXPRESSED IN LUNG, SIGNAL = 1.5; EXPRESSED IN FETAL LIVER, SIGNAL = 2.4; EST_HUMAN HIT: D78659.1, EVALUE 5.80e-01; NT HIT: AB019534.1, EVALUE 1.50e+00
tgaaaagcagctggagagttggagagagagtctctgcctcaaagaaaaaaaaaaggaaagaaagaagaaagaaagaaaagaaagaaagagagaaagaaaggaaggaaagaatggaacacaaaagagggctcagagtgaagatatggattgatcagatgactgagactag

SEQ ID NO: 22516 - DNA, 170 bp, Homo sapiens
  MAP TO AC005189.1; EXPRESSED IN HEART, SIGNAL =   4; EXPRESSED IN BONE MARROW, SIGNAL = 3.7; EXPRESSED IN ADULT LIVER, SIGNAL = 4.3; EXPRESSED IN PLACENTA, SIGNAL = 4.1; EXPRESSED IN HELA, SIGNAL = 3.6; EXPRESSED IN FETAL LIVER, SIGNAL = 5.3; EXPRESSED IN BRAIN, SIGNAL = 4.2; EXPRESSED IN LUNG, SIGNAL = 3.7; SWISSPROT HIT: P16342, EVALUE 6.70e+00; NT HIT: gi7662177, EVALUE 2.00e-09; EST_HUMAN HIT: AA345220.1, EVALUE 7.00e-10
tatcatcacgctcattttgcagatgagtaaactgaggcacagaaaggttaagtaacatgcccaaaggtgcactaataagtgaataagtggtagaactgggattcaaattcatgcagtctggctccagcatctgctctttcaaccactgtggtacacgagctttaagatat

SEQ ID NO: 22517 - DNA, 425 bp, Homo sapiens
  MAP TO AC005815.1; EXPRESSED IN PLACENTA, SIGNAL = 4.3; EXPRESSED IN LUNG, SIGNAL = 4.9; EXPRESSED IN FETAL LIVER, SIGNAL = 4.1; EXPRESSED IN ADULT LIVER, SIGNAL = 4.2; EXPRESSED IN HELA, SIGNAL = 4.1; EXPRESSED IN HEART, SIGNAL = 4.1; EXPRESSED IN BRAIN, SIGNAL = 4.5; EXPRESSED IN BONE MARROW, SIGNAL = 4.5; NT HIT: gi11421595, EVALUE 0.00e+00; SWISSPROT HIT: Q62786, EVALUE 1.00e-15; EST_HUMAN HIT: AA204740.1, EVALUE 0.00e+00
tcagagggactgaccagttggctggacgttgaccacggctccctcggaacgctttcgggtcatagcataccacgacccatccggatcctggatccactcggcggcctcgcagtagaattcgccctggtcagaaggctgcaggtggaagatggtgaggcggaaggtggtcctccccagcttgtccagccgcacctcccccaggctctgcctctgggcatattcgctgctggagtgaagcatgaaatctcggctcagggagatgacctccacgggcttctcgccaactttctgccggagccaggccacagacaggtggctgtgctgaatggtctctgaggccacctcacaagtgagctccagcgggtcctgctccactctgtgcagagtctggggcatggcagtggtctgcagggagtctgggatca

SEQ ID NO: 22518 - DNA, 319 bp, Homo sapiens
  MAP TO AC004707.1; EXPRESSED IN HELA, SIGNAL = 3.9; EXPRESSED IN HEART, SIGNAL = 3.6; EXPRESSED IN BONE MARROW, SIGNAL =   4; EXPRESSED IN LUNG, SIGNAL = 3.9; EXPRESSED IN FETAL LIVER, SIGNAL = 3.7; EXPRESSED IN BRAIN, SIGNAL =   4; EXPRESSED IN ADULT LIVER, SIGNAL = 3.9; EXPRESSED IN PLACENTA, SIGNAL = 3.9; SWISSPROT HIT: P03204, EVALUE 3.10e-01; NT HIT: gi11545913, EVALUE 0.00e+00; EST_HUMAN HIT: BE245503.1, EVALUE 1.00e-116
gtttgcggttgaaggtcaagggcagcacaaggaagcgggtctcacccagcggttcccagaactgaaggagtcgaacagtccagggccctggccgcaggggccggctcagtgggggcttgtattgcgtgacctcagtctccgtatctactgtgatgtcataagatgtggccaccacataggttgggtcgatccagaccactgtggctgtgaggttggggccccgggcccagcgctgcacggccacaggctcgtccagcggccccagtaaccccccaaagttccggaaaagacgctctttggggtcccaatcagtgccaac

SEQ ID NO: 22519 - DNA, 159 bp, Homo sapiens
  MAP TO AC005155.1; EXPRESSED IN FETAL LIVER, SIGNAL = 1.5; EXPRESSED IN BRAIN, SIGNAL = 1.4; EXPRESSED IN BONE MARROW, SIGNAL = 1.4; EXPRESSED IN PLACENTA, SIGNAL = 2.8; EXPRESSED IN HEART, SIGNAL = 1.5; EXPRESSED IN ADULT LIVER, SIGNAL = 1.2; EXPRESSED IN LUNG, SIGNAL = 1.4; EST_HUMAN HIT: BF477059.1, EVALUE 2.00e-84; SWISSPROT HIT: P29972, EVALUE 3.00e-24; NT HIT: S73482.1, EVALUE 1.00e-84
attcatcgggggagccctggctgtactcatctacgacttcatcctggccccacgcagcagtgacctcacagaccgcgtgaaggtgtggaccagcggccaggtggaggagtatgacctggatgccgacgacatcaactccagggtggagatgaagcccaa

SEQ ID NO: 22520 - DNA, 112 bp, Homo sapiens
  MAP TO AC005741.1; EXPRESSED IN PLACENTA, SIGNAL = 8.8; EXPRESSED IN HEART, SIGNAL = 8.6; EXPRESSED IN FETAL LIVER, SIGNAL = 8.3; EXPRESSED IN BONE MARROW, SIGNAL = 8.4; EXPRESSED IN ADULT LIVER, SIGNAL = 8.6; EXPRESSED IN HELA, SIGNAL = 9.1; EXPRESSED IN LUNG, SIGNAL = 9.4; EXPRESSED IN BRAIN, SIGNAL = 8.8; NT HIT: gi11526176, EVALUE 1.00e-03; EST_HUMAN HIT: BE965608.2, EVALUE 3.60e-01
gaatgaagaaggtgaaaaaaagcaggaggggaaggaagtagataaatgggaggaggaggaggaggaagaagaacaaaaccaagactaacaagaagaacaagaaggtggagga

SEQ ID NO: 22521 - DNA, 118 bp, Homo sapiens
  MAP TO AC004158.1; EXPRESSED IN PLACENTA, SIGNAL = 4.9; EXPRESSED IN LUNG, SIGNAL = 5.3; EXPRESSED IN HEART, SIGNAL = 4.5; EXPRESSED IN BONE MARROW, SIGNAL = 4.7; EXPRESSED IN ADULT LIVER, SIGNAL = 4.8; EXPRESSED IN HELA, SIGNAL = 4.6; EXPRESSED IN FETAL LIVER, SIGNAL = 4.9; EXPRESSED IN BRAIN, SIGNAL =   5; EST_HUMAN HIT: BE670128.1, EVALUE 2.50e-02; SWISSPROT HIT: P14248, EVALUE 3.20e+00; NT HIT: gi8393069, EVALUE 4.10e+00
cccatttgtgaatatttgagtttccattttgactattttgaacaaagctgttgtgaatattcttgtacaaatcttttgtatctaggtttttatttctctggtaattgctggagaaagg

SEQ ID NO: 22522 - DNA, 171 bp, Homo sapiens
  MAP TO AC004593.1; EXPRESSED IN PLACENTA, SIGNAL = 3.5; EXPRESSED IN LUNG, SIGNAL = 3.1; EXPRESSED IN HELA, SIGNAL =  28; EXPRESSED IN FETAL LIVER, SIGNAL = 3.2; EXPRESSED IN ADULT LIVER, SIGNAL = 3.1; EXPRESSED IN HEART, SIGNAL = 2.4; EXPRESSED IN BRAIN, SIGNAL = 3.1; EXPRESSED IN BONE MARROW, SIGNAL = 3.2; NT HIT: gi8567391, EVALUE 1.60e+00; EST_HUMAN HIT: BE727658.1, EVALUE 1.50e-01; SWISSPROT HIT: P07131, EVALUE 7.80e-01
cgctctaaggagtttaagcagaaaatgacttatgacagggttttagggaccttagagaaccacgactgctccagtagtaactcccttgtcaccaccactcacacccagcattggttaccggggactggacatgagaatctctgcgagctgccccagaaaaatcacacatac

SEQ ID NO: 22523 - DNA, 143 bp, Homo sapiens
  MAP TO AC002525.1; EXPRESSED IN BONE MARROW, SIGNAL = 2.7; EXPRESSED IN HELA, SIGNAL =   2; EXPRESSED IN FETAL LIVER, SIGNAL = 1.8; EXPRESSED IN BRAIN, SIGNAL = 1.9; EXPRESSED IN ADULT LIVER, SIGNAL = 1.9; EXPRESSED IN PLACENTA, SIGNAL = 1.9; EXPRESSED IN LUNG, SIGNAL = 2.1; EXPRESSED IN HEART, SIGNAL = 1.7; SWISSPROT HIT: Q9ZDI2, EVALUE 6.10e-01; NT HIT: U67594.1, EVALUE 3.20e-01; EST_HUMAN HIT: BE620945.1, EVALUE 1.20e-01
cactgttccagagaatggtgtttggaactatgttaagaaatggaatctggcagcattgcctaggattagagaaaagggtggggagactgaaggagggaagccagataagaatgcagataaagataatgagagcaggaagtagg

SEQ ID NO: 22524 - DNA, 85 bp, Homo sapiens
  MAP TO AC005751.1; EXPRESSED IN PLACENTA, SIGNAL =   2; EXPRESSED IN HELA, SIGNAL = 2.2; EXPRESSED IN HEART, SIGNAL = 1.9; EXPRESSED IN ADULT LIVER, SIGNAL =   2; EXPRESSED IN BONE MARROW, SIGNAL = 1.8; EXPRESSED IN BRAIN, SIGNAL = 2.3; EXPRESSED IN FETAL LIVER, SIGNAL = 1.9; EXPRESSED IN LUNG, SIGNAL = 2.1; EST_HUMAN HIT: AI582557.1, EVALUE 2.60e-01
actccacacttattactgatgggaattttcactggatacttgtggaagatccgaagctctgaagttcctgttccccttatcttgt

SEQ ID NO: 22525 - DNA, 127 bp, Homo sapiens
  MAP TO AC005243.1; EXPRESSED IN BONE MARROW, SIGNAL = 1.7; EXPRESSED IN PLACENTA, SIGNAL = 1.6; EXPRESSED IN LUNG, SIGNAL = 1.6; EXPRESSED IN FETAL LIVER, SIGNAL = 1.8; EXPRESSED IN ADULT LIVER, SIGNAL = 1.8; EXPRESSED IN HEART, SIGNAL = 1.5; EXPRESSED IN BRAIN, SIGNAL = 1.7; NT HIT: X13414.1, EVALUE 4.40e+00; SWISSPROT HIT: P07665, EVALUE 9.20e+00
gcagatgcaggtgcatctccttgtgattccagttggtgaaaggcatgatgcagaagataatgcagaaaaagcttccctgtgccatgccatgcagaaatgggatcatgcaggcagggatcatgaatgc

SEQ ID NO: 22526 - DNA, 442 bp, Homo sapiens
  MAP TO AC005899.1; EXPRESSED IN LUNG, SIGNAL =   5; EXPRESSED IN ADULT LIVER, SIGNAL =   2; EXPRESSED IN PLACENTA, SIGNAL = 2.1; EXPRESSED IN HELA, SIGNAL = 1.9; EXPRESSED IN HEART, SIGNAL = 2.8; EXPRESSED IN FETAL LIVER, SIGNAL = 1.9; EXPRESSED IN BRAIN, SIGNAL = 2.5; EXPRESSED IN BONE MARROW, SIGNAL =   4; NT HIT: AJ272344.1, EVALUE 1.80e-02; SWISSPROT HIT: P20350, EVALUE 3.00e-10
tgagcatggagtttgggcgggccgtgtggctccgcttccacccgtcggcctatcccccgtgccctcacccaagctttgtggcgcacttgggtggcgtggccgtgggcatcaccctgggcgtggtggtcctgaggaactacgagcagaggctccaggaccagtcactgtggtggatttttgtggccatgtacaccgtcttcgtgctgttcgctgtcttctggaacatctttgcctacaccctgctggacttaaagctgccgcctcccccctgagggctggaggcccaaggtcggggaggggagggaaaagcagcacccacagggagcgcctgcgaggtttcttctcatcaccagctcagctaggccgggcagacaaggacagaagactctgggccactgtaatgtttgtgtttagatttggacacacagtggagacccttttc

SEQ ID NO: 22527 - DNA, 171 bp, Homo sapiens
  MAP TO AC001237.1; EXPRESSED IN LUNG, SIGNAL = 1.5; EXPRESSED IN FETAL LIVER, SIGNAL = 1.2; EXPRESSED IN BRAIN, SIGNAL = 1.3; EXPRESSED IN BONE MARROW, SIGNAL = 1.1; EXPRESSED IN ADULT LIVER, SIGNAL = 1.6; EXPRESSED IN PLACENTA, SIGNAL = 1.2; EXPRESSED IN HEART, SIGNAL = 1.4; SWISSPROT HIT: P10775, EVALUE 4.00e-05; NT HIT: AF310105.1, EVALUE 2.00e-70
gaccttgcctttgggctgagagccaaccagaccctgaccgagctggacctgagcttcaatgtgctcacggatgctggagccaaacacctttgccagagactgagacagccgagctgcaagctacagcgactgcagtaattgttcttggtgggcagggggaggtggagggaa

SEQ ID NO: 22528 - DNA, 120 bp, Homo sapiens
  MAP TO AC005208.1; EXPRESSED IN PLACENTA, SIGNAL = 3.7; EXPRESSED IN LUNG, SIGNAL = 3.7; EXPRESSED IN HELA, SIGNAL = 4.3; EXPRESSED IN FETAL LIVER, SIGNAL = 4.3; EXPRESSED IN HEART, SIGNAL = 3.9; EXPRESSED IN BRAIN, SIGNAL = 4.1; EXPRESSED IN BONE MARROW, SIGNAL = 4.4; EXPRESSED IN ADULT LIVER, SIGNAL = 4.4; NT HIT: AF120995.1, EVALUE 2.70e-01; SWISSPROT HIT: Q9Y9H1, EVALUE 7.10e+00; EST_HUMAN HIT: BE746888.1, EVALUE 2.50e-02
ttacacttatccgttctgttacagatgaactttacgggagagattttaaaaagatgaatgtattagcatttaagcagtcagagaataatacaccaacccaagtaagagaggtctatgaag

SEQ ID NO: 22529 - DNA, 212 bp, Homo sapiens
  MAP TO AC005828.1; EXPRESSED IN PLACENTA, SIGNAL = 2.1; EXPRESSED IN LUNG, SIGNAL = 2.1; EXPRESSED IN HELA, SIGNAL = 1.9; EXPRESSED IN FETAL LIVER, SIGNAL = 1.8; EXPRESSED IN ADULT LIVER, SIGNAL = 1.8; EXPRESSED IN HEART, SIGNAL = 1.7; EXPRESSED IN BRAIN, SIGNAL = 1.8; EXPRESSED IN BONE MARROW, SIGNAL = 1.8; EST_HUMAN HIT: BE009356.1, EVALUE 9.00e-19; NT HIT: AB046856.1, EVALUE 1.00e-116; SWISSPROT HIT: P29994, EVALUE 2.60e+00
gaagcctctgctctttgaagtgcccagcatcactacagagtcagtgtttgttggccgagattgggttttccacgaaatagatgctcaacttcaaagttcaaatgccagcgtgaaccaaggagtagtgattgtgggaaacattggattcggcaaaactgccatcatctccagactggtggccctcagctgccatggtacaaggatgagacaga

SEQ ID NO: 22530 - DNA, 97 bp, Homo sapiens
  MAP TO AC005165.1; EXPRESSED IN LUNG, SIGNAL = 4.2; EXPRESSED IN HELA, SIGNAL =   4; EXPRESSED IN FETAL LIVER, SIGNAL =   4; EXPRESSED IN BRAIN, SIGNAL = 4.4; EXPRESSED IN BONE MARROW, SIGNAL = 4.1; EXPRESSED IN ADULT LIVER, SIGNAL = 4.2; EXPRESSED IN PLACENTA, SIGNAL = 3.8; EXPRESSED IN HEART, SIGNAL = 3.3; EST_HUMAN HIT: BE003113.1, EVALUE 1.20e+00
gtttgctgaatttcctgtcattctgaggctgtttcacttgctcagtggttctcagctgggtgcgtggcaatgtctggagttgtgtttggttatcaaa

SEQ ID NO: 22531 - DNA, 127 bp, Homo sapiens
  MAP TO AC003682.1; EXPRESSED IN PLACENTA, SIGNAL = 1.6; EXPRESSED IN HEART, SIGNAL = 1.4; EXPRESSED IN BONE MARROW, SIGNAL =   2; EXPRESSED IN ADULT LIVER, SIGNAL = 1.5; EXPRESSED IN LUNG, SIGNAL = 1.5; EXPRESSED IN FETAL LIVER, SIGNAL = 1.6; EXPRESSED IN BRAIN, SIGNAL = 1.5; SWISSPROT HIT: Q08624, EVALUE 4.10e+00; NT HIT: AF003124.1, EVALUE 2.80e-01
gcacagctggaggagctgatgcttggctattggaggccccagataagggatggggaggtagagcatccagaagttgcatttgagggggttttctgactttgcggtgttgtccactgtgggcttgtct

SEQ ID NO: 22532 - DNA, 125 bp, Homo sapiens
  MAP TO AC005284.1; EXPRESSED IN PLACENTA, SIGNAL = 6.8; EXPRESSED IN LUNG, SIGNAL = 7.2; EXPRESSED IN FETAL LIVER, SIGNAL = 6.3; EXPRESSED IN HELA, SIGNAL = 6.9; EXPRESSED IN BRAIN, SIGNAL = 7.3; EXPRESSED IN BONE MARROW, SIGNAL = 6.4; EXPRESSED IN ADULT LIVER, SIGNAL =   7; EXPRESSED IN HEART, SIGNAL = 6.9; NT HIT: AF037561.1, EVALUE 4.30e+00; EST_HUMAN HIT: AI206030.1, EVALUE 2.60e-02
ccagctgatgctgttgtgggcaatctcatggcattaataatattgagtgagaagacctgggattgaatctcagctccaactctctccagcttcatgaccatgggcatgttacttcacttctctga

SEQ ID NO: 22533 - DNA, 121 bp, Homo sapiens
  MAP TO AC005876.2; EXPRESSED IN PLACENTA, SIGNAL = 2.4; EXPRESSED IN ADULT LIVER, SIGNAL = 1.9; EXPRESSED IN LUNG, SIGNAL = 2.3; EXPRESSED IN HEART, SIGNAL =   2; EXPRESSED IN FETAL LIVER, SIGNAL = 2.1; EXPRESSED IN BRAIN, SIGNAL = 2.1; EXPRESSED IN HELA, SIGNAL = 2.2; EXPRESSED IN BONE MARROW, SIGNAL =   2; EST_HUMAN HIT: BE886618.1, EVALUE 5.00e-59; NT HIT: gi8924074, EVALUE 3.00e-59; SWISSPROT HIT: O04425, EVALUE 1.00e-04
ccttatgattctgcagatgactggtctgagcatattagctcttctgggaaaaagtactactacaattgtcgaacagaagtttcacaatgggaaaaaccaaaagagtggcttgaaaggtaat

SEQ ID NO: 22534 - DNA, 228 bp, Homo sapiens
  MAP TO AC004060.1; EXPRESSED IN PLACENTA, SIGNAL = 1.8; EXPRESSED IN LUNG, SIGNAL = 1.3; EXPRESSED IN FETAL LIVER, SIGNAL = 2.1; EXPRESSED IN BRAIN, SIGNAL = 1.8; EXPRESSED IN BONE MARROW, SIGNAL = 1.7; EXPRESSED IN ADULT LIVER, SIGNAL = 1.6; EXPRESSED IN HELA, SIGNAL = 1.7; EXPRESSED IN HEART, SIGNAL = 1.9; SWISSPROT HIT: P27398, EVALUE 6.80e+00; NT HIT: J01238.1, EVALUE 3.50e-02
aaggcaaacactgcgattggtgggcttctgcttcataagagatcagtgctgttgccaagcccaggcctcacttctgccatgagttctgctgaatcttcagggctaggggaggcctcagaggggagaaacttgaaaagagcccaaggcctttctccctgttctgtttttagtgctcctgctcctggcccaagtccagagcaggatagaaccattagcacacctattcat

SEQ ID NO: 22535 - DNA, 164 bp, Homo sapiens
  MAP TO AC005153.1; EXPRESSED IN BONE MARROW, SIGNAL = 1.9; EXPRESSED IN PLACENTA, SIGNAL = 1.6; EXPRESSED IN LUNG, SIGNAL = 7.3; EXPRESSED IN HELA, SIGNAL =   2; EXPRESSED IN FETAL LIVER, SIGNAL = 2.2; EXPRESSED IN ADULT LIVER, SIGNAL = 2.6; EXPRESSED IN HEART, SIGNAL = 3.4; EXPRESSED IN BRAIN, SIGNAL = 1.9; NT HIT: AF073371.1, EVALUE 1.00e-87; EST_HUMAN HIT: BE894863.1, EVALUE 7.00e-56; SWISSPROT HIT: Q13322, EVALUE 4.00e-16
gaacccagacacctgcagctgctggccgacctggaggacagcaacatcttctccctgatcgctggcaggaagcagtacaacgcccctacagaccacgggctctgcataaaggtacccacgagctgtccacagacggcgcgcatgctcagcagcccacaggagac

SEQ ID NO: 22536 - DNA, 361 bp, Homo sapiens
  MAP TO AC006078.1; EXPRESSED IN PLACENTA, SIGNAL = 3.2; EXPRESSED IN HEART, SIGNAL = 2.8; EXPRESSED IN BONE MARROW, SIGNAL = 3.7; EXPRESSED IN ADULT LIVER, SIGNAL = 3.7; EXPRESSED IN LUNG, SIGNAL =   3; EXPRESSED IN HELA, SIGNAL = 4.7; EXPRESSED IN FETAL LIVER, SIGNAL = 3.6; EXPRESSED IN BRAIN, SIGNAL = 2.9; SWISSPROT HIT: Q15034, EVALUE 2.00e-07; NT HIT: AB040903.1, EVALUE 0.00e+00; EST_HUMAN HIT: BE257173.1, EVALUE 0.00e+00
tcaccaaggagtgtgagtagcccatggcgaccggctctgagaaaatgccatgcagagtcttcacctcctgggctgcagtggaagacttgggcttgtgatccctgtagcccagttccccaaaggtcggtgatgggccccagctgatggtgctctcatcggctgccacaatgatgctgctcttcccacaagccaggctccagattctccagctgcagaggtcctgcactgcttttgggtacatggtagattcatgggaggtgttggtggccccccagaaaaacagaccacccacttcactgacggcaaaggagcaggtgtaaccagcatagatctgggaagccccatgcccagggaagtcaaa

SEQ ID NO: 22537 - DNA, 151 bp, Homo sapiens
  MAP TO AC005911.6; EXPRESSED IN HEART, SIGNAL = 3.8; EXPRESSED IN BRAIN, SIGNAL = 4.7; EXPRESSED IN BONE MARROW, SIGNAL = 3.8; EXPRESSED IN PLACENTA, SIGNAL = 4.1; EXPRESSED IN LUNG, SIGNAL = 4.6; EXPRESSED IN HELA, SIGNAL =   4; EXPRESSED IN FETAL LIVER, SIGNAL = 4.1; EXPRESSED IN ADULT LIVER, SIGNAL = 4.1; NT HIT: gi11436736, EVALUE 6.00e-80; SWISSPROT HIT: O75386, EVALUE 3.00e-12; EST_HUMAN HIT: AI733479.1, EVALUE 9.00e-80
gatccattccccttttatcccggattatccgacatcttactgtgacaccttgaggggcaggactatacacaaagtcctccaggtcgtctatgtctcccaggaggttatcagctggttgggcggcagtagcagaaccggaagtgcctgtatc

SEQ ID NO: 22538 - DNA, 88 bp, Homo sapiens
  MAP TO AC002288.1; EXPRESSED IN PLACENTA, SIGNAL = 3.7; EXPRESSED IN LUNG, SIGNAL = 3.2; EXPRESSED IN HEART, SIGNAL = 3.6; EXPRESSED IN FETAL LIVER, SIGNAL = 3.8; EXPRESSED IN BONE MARROW, SIGNAL = 4.5; EXPRESSED IN HELA, SIGNAL = 3.4; EXPRESSED IN BRAIN, SIGNAL = 3.5; EXPRESSED IN ADULT LIVER, SIGNAL = 3.4; EST_HUMAN HIT: W21328.1, EVALUE 4.20e+00; NT HIT: X61624.1, EVALUE 4.60e-02
ctactctaggtgagaacgaagggccatgccacaagaccaacagcgtcttccccaaccttggcagaaaggacttatgacttggagtccc

SEQ ID NO: 22539 - DNA, 87 bp, Homo sapiens
  MAP TO AC005157.1; EXPRESSED IN PLACENTA, SIGNAL = 1.6; EXPRESSED IN HEART, SIGNAL = 1.5; EXPRESSED IN FETAL LIVER, SIGNAL = 1.7; EXPRESSED IN BRAIN, SIGNAL = 1.6; EXPRESSED IN LUNG, SIGNAL = 1.7; EXPRESSED IN HELA, SIGNAL = 1.6; EXPRESSED IN BONE MARROW, SIGNAL = 1.6; EXPRESSED IN ADULT LIVER, SIGNAL = 1.5; EST_HUMAN HIT: AW849992.1, EVALUE 1.10e+00; SWISSPROT HIT: P34244, EVALUE 9.60e+00; NT HIT: AJ400877.1, EVALUE 4.50e-02
ggattattccagaattttgctgctacgaacaatgctgctaagatgagtgtcttcaatcacttgcacaattgtttctctagtctataa

SEQ ID NO: 22540 - DNA, 230 bp, Homo sapiens
  MAP TO AC006084.1; EXPRESSED IN PLACENTA, SIGNAL = 2.9; EXPRESSED IN BRAIN, SIGNAL = 3.2; EXPRESSED IN ADULT LIVER, SIGNAL = 3.4; EXPRESSED IN LUNG, SIGNAL = 4.1; EXPRESSED IN HELA, SIGNAL = 4.1; EXPRESSED IN HEART, SIGNAL = 3.7; EXPRESSED IN FETAL LIVER, SIGNAL = 3.5; EXPRESSED IN BONE MARROW, SIGNAL = 3.2; SWISSPROT HIT: P11799, EVALUE 3.00e-08; EST_HUMAN HIT: AA460075.1, EVALUE 1.00e-126; NT HIT: gi11417306, EVALUE 1.00e-114
gtgagtggactgccagctcctgatgtgtcatggtatctaaatggaagaacagttcaatcagatgatttgcacaaaatgatagtgtctgagaagggtcttcattcactcatctttgaagtagtcagagcttcagatgcaggggcttatgcatgtgttgccaagaatagagcaggagaagccaccttcactgtgcagctggatgtccttggtaagcctccaaagagaccctt

SEQ ID NO: 22541 - DNA, 107 bp, Homo sapiens
  MAP TO AC005179.1; EXPRESSED IN PLACENTA, SIGNAL = 1.7; EXPRESSED IN LUNG, SIGNAL = 1.6; EXPRESSED IN HEART, SIGNAL = 1.5; EXPRESSED IN FETAL LIVER, SIGNAL = 1.6; EXPRESSED IN BONE MARROW, SIGNAL = 1.8; EXPRESSED IN HELA, SIGNAL = 1.9; EXPRESSED IN BRAIN, SIGNAL = 1.8; EXPRESSED IN ADULT LIVER, SIGNAL = 1.8; EST_HUMAN HIT: AL120544.1, EVALUE 3.40e-01
aggcaagggagtaggacaaggcagcaggacaagcagaagcagcatctgggtagagtgaaggcatcaggccagcagcagcccatgtgggggtgcccagcaggggacct

SEQ ID NO: 22542 - DNA, 132 bp, Homo sapiens
  MAP TO AC005293.1; EXPRESSED IN LUNG, SIGNAL = 1.9; EXPRESSED IN PLACENTA, SIGNAL = 1.7; EXPRESSED IN HEART, SIGNAL = 1.8; EXPRESSED IN FETAL LIVER, SIGNAL = 1.7; EXPRESSED IN BRAIN, SIGNAL = 1.8; EXPRESSED IN BONE MARROW, SIGNAL = 1.9; EXPRESSED IN HELA, SIGNAL = 1.9; EXPRESSED IN ADULT LIVER, SIGNAL = 1.6; SWISSPROT HIT: P30205, EVALUE 9.20e+00; EST_HUMAN HIT: AW080795.1, EVALUE 4.40e-01
attagaggtgtacatctctgcccaggtgtcaggcactgtcagggccgtgcactcagtggtgagcaggccagatggggcccctgagattaggtagcttggaagcagatggataaataagagggaagaatgctt

SEQ ID NO: 22543 - DNA, 143 bp, Homo sapiens
  MAP TO AC004064.1; EXPRESSED IN LUNG, SIGNAL = 0.82; EXPRESSED IN BRAIN, SIGNAL = 1.5; EXPRESSED IN ADULT LIVER, SIGNAL = 1.1; EXPRESSED IN PLACENTA, SIGNAL = 1.2; EXPRESSED IN HEART, SIGNAL = 1.3; EXPRESSED IN FETAL LIVER, SIGNAL = 1.5; EXPRESSED IN BONE MARROW, SIGNAL = 1.4; SWISSPROT HIT: P29364, EVALUE 1.20e-01; NT HIT: AF113708.1, EVALUE 2.00e-64; EST_HUMAN HIT: AW239565.1, EVALUE 1.20e-01
ctgttttggccctgaagctgctggagcttctgcctctgtagcagcagctggttctccagcttgttggtggacagaaaggtctctggcatctgggcatccattcttgatgtctggttcaggagctgccccagcaagcagaagca

SEQ ID NO: 22544 - DNA, 271 bp, Homo sapiens
  MAP TO AC003043.1; EXPRESSED IN PLACENTA, SIGNAL = 1.3; EXPRESSED IN HEART, SIGNAL = 1.5; EXPRESSED IN BRAIN, SIGNAL = 1.5; EXPRESSED IN BONE MARROW, SIGNAL = 1.3; EXPRESSED IN ADULT LIVER, SIGNAL = 1.5; EXPRESSED IN LUNG, SIGNAL = 1.4; EXPRESSED IN FETAL LIVER, SIGNAL = 1.4; SWISSPROT HIT: P02730, EVALUE 5.00e-31; NT HIT: L35930.1, EVALUE 0.00e+00; EST_HUMAN HIT: N58147.1, EVALUE 5.00e-95
gctgattgtcagcaaacctgagcgcaagatggtcaagggctccggcttccacctggacctgctgctggtagtaggcatgggtggggtggccgccctctttgggatgccctggctcagtgccaccaccgtgcgttccgtcacccatgccaacgccctcactgtcatgggcaaagccagcaccccaggggctgcagcccagatccaggaggtcaaagagcagcggatcagtggactcctggtcgctgtgcttgtgggtgagtgaaagctgggt

SEQ ID NO: 22545 - DNA, 75 bp, Homo sapiens
  MAP TO AC005358.1; EXPRESSED IN PLACENTA, SIGNAL =   2; EXPRESSED IN LUNG, SIGNAL = 2.4; EXPRESSED IN FETAL LIVER, SIGNAL = 1.9; EXPRESSED IN ADULT LIVER, SIGNAL =   2; EXPRESSED IN HELA, SIGNAL = 1.9; EXPRESSED IN HEART, SIGNAL = 1.7; EXPRESSED IN BRAIN, SIGNAL = 1.8; EXPRESSED IN BONE MARROW, SIGNAL = 1.9; EST_HUMAN HIT: BE962394.2, EVALUE 2.20e-01; NT HIT: gi4506396, EVALUE 1.50e-01
tagagggactagaattcgtggactatttagaagaaatagaggaagatggctttgtgggtgagggatgtatggctg

SEQ ID NO: 22546 - DNA, 105 bp, Homo sapiens
  MAP TO AC004223.1; EXPRESSED IN PLACENTA, SIGNAL = 1.3; EXPRESSED IN LUNG, SIGNAL = 1.2; EXPRESSED IN FETAL LIVER, SIGNAL = 1.3; EXPRESSED IN BRAIN, SIGNAL = 1.4; EXPRESSED IN ADULT LIVER, SIGNAL = 1.3; EXPRESSED IN HEART, SIGNAL = 1.3; EXPRESSED IN BONE MARROW, SIGNAL = 1.3; EST_HUMAN HIT: H10095.1, EVALUE 1.30e+00; NT HIT: X60986.1, EVALUE 8.90e-01
ctgtctctgttcctacccttcatgaggtcagtcaccaaaattatgatgtggtgactgctttggggtccttggagaaagagcttggggaggtaagagctgagcaca

SEQ ID NO: 22547 - DNA, 103 bp, Homo sapiens
  MAP TO AC003687.1; EXPRESSED IN BRAIN, SIGNAL = 1.4; EXPRESSED IN PLACENTA, SIGNAL = 1.6; EXPRESSED IN LUNG, SIGNAL = 1.7; EXPRESSED IN HEART, SIGNAL = 1.7; EXPRESSED IN BONE MARROW, SIGNAL = 1.5; EXPRESSED IN ADULT LIVER, SIGNAL = 1.5; EXPRESSED IN HELA, SIGNAL = 2.1; EXPRESSED IN FETAL LIVER, SIGNAL = 1.4; EST_HUMAN HIT: AL119051.1, EVALUE 5.00e-06; NT HIT: AF280107.1, EVALUE 2.00e-10
gtttgcctggttgccacagtgcctgcttttctccctctgtcacctccactgcctcctgagtaacagtctcgagtttgtctatggcttctgcagggagccgggg

SEQ ID NO: 22548 - DNA, 142 bp, Homo sapiens
  MAP TO AC005162.1; EXPRESSED IN BONE MARROW, SIGNAL = 5.8; EXPRESSED IN PLACENTA, SIGNAL = 4.9; EXPRESSED IN LUNG, SIGNAL = 6.1; EXPRESSED IN HELA, SIGNAL = 5.5; EXPRESSED IN HEART, SIGNAL = 6.3; EXPRESSED IN FETAL LIVER, SIGNAL = 5.8; EXPRESSED IN ADULT LIVER, SIGNAL = 5.8; EXPRESSED IN BRAIN, SIGNAL =   6; SWISSPROT HIT: P53304, EVALUE 4.70e-01; EST_HUMAN HIT: AV756084.1, EVALUE 6.00e-56; NT HIT: AF217508.1, EVALUE 4.00e-56
ttcaaaggcctcaaaccagttctgcttcctgatgtgttctatgcattcatggcactgcttctggaagtactttttttgcttctcatccaacaagccaatttggtacaggaattctgcatagccccctataatctgaggacaa

SEQ ID NO: 22549 - DNA, 198 bp, Homo sapiens
  MAP TO AC002066.1; EXPRESSED IN PLACENTA, SIGNAL = 1.2; EXPRESSED IN LUNG, SIGNAL = 1.4; EXPRESSED IN FETAL LIVER, SIGNAL = 1.2; EXPRESSED IN BONE MARROW, SIGNAL = 1.2; EXPRESSED IN ADULT LIVER, SIGNAL = 1.3; EXPRESSED IN HEART, SIGNAL = 1.4; EXPRESSED IN BRAIN, SIGNAL = 1.3; EST_HUMAN HIT: AL042641.1, EVALUE 4.40e-02; NT HIT: AJ133269.1, EVALUE 1.00e-108
atctccctcatgggtagtggggaagggagcccctgctgctgaggaggagtccactggtgagaacaaggagccgtattcttagcttcctcagtcaaaagacatcttggtacgagaccataacgatttgatgtaggcccactgccaaagagaatatgtgtgtctttctgcacttgctctttagcaaaaggccaagaagca

SEQ ID NO: 22550 - DNA, 104 bp, Homo sapiens
  MAP TO AC005741.1; EXPRESSED IN FETAL LIVER, SIGNAL = 1.8; EXPRESSED IN BRAIN, SIGNAL =   2; EXPRESSED IN ADULT LIVER, SIGNAL = 1.8; EXPRESSED IN PLACENTA, SIGNAL = 1.9; EXPRESSED IN LUNG, SIGNAL = 1.9; EXPRESSED IN BONE MARROW, SIGNAL =   2; EXPRESSED IN HELA, SIGNAL = 1.8; EXPRESSED IN HEART, SIGNAL = 2.1; NT HIT: AF055066.1, EVALUE 2.00e-17; SWISSPROT HIT: P26808, EVALUE 5.00e-03; EST_HUMAN HIT: BF526421.1, EVALUE 5.10e+00
tgcaagcctgtttcctatagcttctacagtattccctatctgatgatcatttacatgaactatggctacctctgctggaagtaggaggctttctaaaacctgtt

SEQ ID NO: 22551 - DNA, 158 bp, Homo sapiens
  MAP TO AC005368.1; EXPRESSED IN LUNG, SIGNAL = 2.3; EXPRESSED IN PLACENTA, SIGNAL = 2.1; EXPRESSED IN HEART, SIGNAL = 2.4; EXPRESSED IN FETAL LIVER, SIGNAL = 2.2; EXPRESSED IN BRAIN, SIGNAL = 1.9; EXPRESSED IN BONE MARROW, SIGNAL = 1.9; EXPRESSED IN ADULT LIVER, SIGNAL = 3.2; EXPRESSED IN HELA, SIGNAL =   2; EST_HUMAN HIT: AW181923.1, EVALUE 3.00e-73; NT HIT: AF059650.1, EVALUE 4.00e-84; SWISSPROT HIT: O15379, EVALUE 5.00e-21
ctctcctctgcatcagcctcatcagtcctgtcataggtcaggaggtctgcaggcacgtcatgaatctggacactaggtgcatggttcagcatcttcaggttttcaaagattgtctggcggatctggtccagatactggttggaaatgaggaatacaga

SEQ ID NO: 22552 - DNA, 168 bp, Homo sapiens
  MAP TO AC002544.1; EXPRESSED IN LUNG, SIGNAL = 6.2; EXPRESSED IN HELA, SIGNAL = 5.7; EXPRESSED IN HEART, SIGNAL = 4.3; EXPRESSED IN ADULT LIVER, SIGNAL = 5.3; EXPRESSED IN BONE MARROW, SIGNAL = 6.4; EXPRESSED IN BRAIN, SIGNAL = 5.8; EXPRESSED IN FETAL LIVER, SIGNAL = 5.3; EXPRESSED IN PLACENTA, SIGNAL = 5.2; SWISSPROT HIT: Q99613, EVALUE 5.00e-20; EST_HUMAN HIT: BE261545.1, EVALUE 6.00e-75; NT HIT: gi5579457, EVALUE 4.00e-75
agatgagcctcttcactgctctcaccttcatgtaggttgccaggttggggttgtagtcatagagagaggcgatgatattgaacttgatcttgacaatgacgccctctcccaggttgttttccgctgcaatctgaaccagcagttgcagcagctcaatctgggcagcac

SEQ ID NO: 22553 - DNA, 129 bp, Homo sapiens
  MAP TO AC004134.1; EXPRESSED IN LUNG, SIGNAL =   2; EXPRESSED IN BRAIN, SIGNAL =   2; EXPRESSED IN PLACENTA, SIGNAL = 1.7; EXPRESSED IN HEART, SIGNAL =   2; EXPRESSED IN FETAL LIVER, SIGNAL = 1.8; EXPRESSED IN BONE MARROW, SIGNAL = 1.9; EXPRESSED IN ADULT LIVER, SIGNAL = 1.8; EXPRESSED IN HELA, SIGNAL = 1.9; SWISSPROT HIT: P21851, EVALUE 9.00e-19; EST_HUMAN HIT: BF090407.1, EVALUE 1.00e-66; NT HIT: gi11425572, EVALUE 7.00e-67
tccaccaggtgccatgcctatccctgtggagagttcaaacaggtcattcagtccactgctgaccacagcaggtgtaggtgaaggagcaaaggttgcaggcaccgatgatgggatgaaggattgtcccac

SEQ ID NO: 22554 - DNA, 110 bp, Homo sapiens
  MAP TO AC004583.1; EXPRESSED IN LUNG, SIGNAL =   8; EXPRESSED IN FETAL LIVER, SIGNAL = 7.2; EXPRESSED IN BONE MARROW, SIGNAL =   7; EXPRESSED IN PLACENTA, SIGNAL = 7.3; EXPRESSED IN HELA, SIGNAL = 6.7; EXPRESSED IN BRAIN, SIGNAL = 6.8; EXPRESSED IN ADULT LIVER, SIGNAL = 6.5; EXPRESSED IN HEART, SIGNAL = 5.8; NT HIT: gi11433046, EVALUE 1.00e-55; SWISSPROT HIT: P34664, EVALUE 7.00e-04; EST_HUMAN HIT: AW896010.1, EVALUE 2.00e-55
tggatccagattcaaatgcagaaactgtgatgactttgatttttgtgaaacgtgtttcaagaccaaaaaacacaataccaggcatacatttggcagaataaatgaaccag

SEQ ID NO: 22555 - DNA, 319 bp, Homo sapiens
  MAP TO AC004126.1; EXPRESSED IN HEART, SIGNAL = 1.4; EXPRESSED IN FETAL LIVER, SIGNAL = 1.5; EXPRESSED IN BONE MARROW, SIGNAL = 1.8; EXPRESSED IN ADULT LIVER, SIGNAL = 1.8; EXPRESSED IN PLACENTA, SIGNAL = 1.3; EXPRESSED IN LUNG, SIGNAL = 1.2; EXPRESSED IN BRAIN, SIGNAL = 1.1; EXPRESSED IN HELA, SIGNAL = 1.7; SWISSPROT HIT: P46032, EVALUE 4.00e-11; NT HIT: gi11435630, EVALUE 0.00e+00; EST_HUMAN HIT: AA448980.1, EVALUE 2.00e-54
gtgatggatctcggccgcgacgccacccgccgcttcttcaactggttttactggagcatcaacctgggtgctgtgctgtcgctgctggtggtggcgtttattcagcagaacatcagcttcctgctgggctacagcatccctgtgggctgtgtgggcctggcatttttcatcttcctctttgccacccccgtcttcatcaccaagcccccgatgggcagccaagtgtcctctatgcttaagctcgctctccaaaactgctgcccccagctgtggcaacgacactcggccaggtaaggaggggctctgggtgcagggagcc

SEQ ID NO: 22556 - DNA, 86 bp, Homo sapiens
  MAP TO AC004472.1; EXPRESSED IN LUNG, SIGNAL = 3.7; EXPRESSED IN FETAL LIVER, SIGNAL = 2.7; EXPRESSED IN BRAIN, SIGNAL = 2.7; EXPRESSED IN BONE MARROW, SIGNAL = 3.1; EXPRESSED IN PLACENTA, SIGNAL = 3.1; EXPRESSED IN HELA, SIGNAL = 2.7; EXPRESSED IN HEART, SIGNAL = 2.4; EXPRESSED IN ADULT LIVER, SIGNAL = 2.6; SWISSPROT HIT: Q13472, EVALUE 1.40e+00; NT HIT: AF161185.1, EVALUE 2.80e+00
catggctcggcctccgagatgccatcctgggccggcagggcaggttcagcttctgcccctcgggactcgatctcacctctggccgc

SEQ ID NO: 22557 - DNA, 462 bp, Homo sapiens
  MAP TO AC005924.2; EXPRESSED IN PLACENTA, SIGNAL = 4.3; EXPRESSED IN HEART, SIGNAL = 3.8; EXPRESSED IN FETAL LIVER, SIGNAL = 4.2; EXPRESSED IN BRAIN, SIGNAL = 4.2; EXPRESSED IN LUNG, SIGNAL = 3.8; EXPRESSED IN HELA, SIGNAL = 3.9; EXPRESSED IN BONE MARROW, SIGNAL = 3.5; EXPRESSED IN ADULT LIVER, SIGNAL = 3.8; NT HIT: AB040958.1, EVALUE 1.00e-126; EST_HUMAN HIT: AA331675.1, EVALUE 1.00e-118; SWISSPROT HIT: P37370, EVALUE 4.20e-01
cacttgcttctcagatgctgctgctgctgctgctgttgctgttgaggtggtggtggcggcagcagcagccaccgtctgtctgcccagtcctgcagtgctggtacaatcaggcggtgcagctttcacactcggcaagtagactgggggagggccagctttaggagctgttctggagtggaacagcgaatgattacagggataagaaaatgaacgtgaagggtgctgactgggaggtctttgcttccagcctgctttgagttggttatggattggggtagctggggggtggtagggaggtggtggagggggcaagggtggatggaaggccacaaaagagtccagatctgtaaacatggtttctgcaggaggtgtactgtttacgcgacatctcccaggctgtctcattgtcaagagtggactttcatccccaaaacgttcatcaggaaagaatttgtgaggatt

SEQ ID NO: 22558 - DNA, 139 bp, Homo sapiens
  MAP TO AC002069.1; EXPRESSED IN PLACENTA, SIGNAL = 1.3; EXPRESSED IN HEART, SIGNAL = 1.9; EXPRESSED IN FETAL LIVER, SIGNAL = 1.4; EXPRESSED IN BRAIN, SIGNAL = 1.5; EXPRESSED IN BONE MARROW, SIGNAL = 1.4; EXPRESSED IN LUNG, SIGNAL = 1.6; EXPRESSED IN ADULT LIVER, SIGNAL = 1.6; SWISSPROT HIT: P46681, EVALUE 2.40e+00; NT HIT: X89084.1, EVALUE 1.20e+00
agaataaaggagtgggcagtggttgaggggatagggttgcagcagggatccatgttacaaggctggaagtaatcaaggtggaaggtgatggtgccccaggccagtaggagcagtaaaggtgatgagaagtggttgaatt

SEQ ID NO: 22559 - DNA, 136 bp, Homo sapiens
  MAP TO AC004844.1; EXPRESSED IN PLACENTA, SIGNAL = 6.6; EXPRESSED IN LUNG, SIGNAL = 7.2; EXPRESSED IN HEART, SIGNAL = 6.5; EXPRESSED IN BONE MARROW, SIGNAL = 7.3; EXPRESSED IN ADULT LIVER, SIGNAL = 6.2; EXPRESSED IN HELA, SIGNAL = 6.9; EXPRESSED IN FETAL LIVER, SIGNAL = 6.5; EXPRESSED IN BRAIN, SIGNAL = 7.4; SWISSPROT HIT: P72535, EVALUE 5.30e+00; NT HIT: Y10724.1, EVALUE 1.20e+00; EST_HUMAN HIT: BF032233.1, EVALUE 2.90e-02
ctggcctctgggcagaagcagatgctgttgctgctttagcagctggaactgctctgggttccagggatccatcccccctgggcctcctccacctgccaccctgtcctcctctcttctacctctaaatgccagaacc

SEQ ID NO: 22560 - DNA, 188 bp, Homo sapiens
  MAP TO AC005091.1; EXPRESSED IN PLACENTA, SIGNAL = 2.8; EXPRESSED IN HELA, SIGNAL = 2.8; EXPRESSED IN HEART, SIGNAL = 2.5; EXPRESSED IN FETAL LIVER, SIGNAL = 2.9; EXPRESSED IN ADULT LIVER, SIGNAL = 2.6; EXPRESSED IN LUNG, SIGNAL = 3.4; EXPRESSED IN BRAIN, SIGNAL = 2.9; EXPRESSED IN BONE MARROW, SIGNAL = 2.7; NT HIT: gi11421737, EVALUE 1.00e-102; SWISSPROT HIT: P29868, EVALUE 3.40e-01; EST_HUMAN HIT: AI459825.1, EVALUE 1.00e-102
gatattaccttccaaatgatgatggagaattttatcagttctgttacgttacccataagggtgaaattcgtggagcaagtacacctttccagtttcgagcttcttctccagttgaagagctgcttactatggaagatgaaggaaattctgacatgttagtggtgaccacaaaagcaggccttcttgag

SEQ ID NO: 22561 - DNA, 91 bp, Homo sapiens
  MAP TO AC003962.1; EXPRESSED IN PLACENTA, SIGNAL = 2.1; EXPRESSED IN HEART, SIGNAL = 1.9; EXPRESSED IN FETAL LIVER, SIGNAL = 1.3; EXPRESSED IN BRAIN, SIGNAL = 1.6; EXPRESSED IN ADULT LIVER, SIGNAL = 1.9; EXPRESSED IN LUNG, SIGNAL = 1.3; EXPRESSED IN BONE MARROW, SIGNAL = 1.3; SWISSPROT HIT: Q09711, EVALUE 1.50e-02; EST_HUMAN HIT: BE279997.1, EVALUE 1.10e+00; NT HIT: AF286477.1, EVALUE 1.90e-01
aggggtcccctgcaacaggctgataacccacaggatatctccttaaaatctatgtgattgtcacgattttcatcaaaagcattaaacaaac

SEQ ID NO: 22562 - DNA, 171 bp, Homo sapiens
  MAP TO AC006330.2; EXPRESSED IN LUNG, SIGNAL = 2.1; EXPRESSED IN ADULT LIVER, SIGNAL =   2; EXPRESSED IN PLACENTA, SIGNAL = 1.7; EXPRESSED IN HEART, SIGNAL = 2.2; EXPRESSED IN FETAL LIVER, SIGNAL = 2.3; EXPRESSED IN BRAIN, SIGNAL = 2.5; EXPRESSED IN BONE MARROW, SIGNAL = 2.2; EXPRESSED IN HELA, SIGNAL = 2.4; SWISSPROT HIT: P37040, EVALUE 1.00e-19; EST_HUMAN HIT: AU125143.1, EVALUE 3.00e-67; NT HIT: AB051763.1, EVALUE 2.00e-67
gggaggaacatcatcgtgttctacggctcccagacggggactgcagaggagtttgccaaccgcctgtccaaggacgcccaccgctacgggatgcgaggcatgtcagcggaccctgaggagtatgacctggtaagctgccaccgcgtgctggccccagatggaggcagtggg

SEQ ID NO: 22563 - DNA, 121 bp, Homo sapiens
  MAP TO AC006121.1; EXPRESSED IN LUNG, SIGNAL = 2.6; EXPRESSED IN BRAIN, SIGNAL = 1.9; EXPRESSED IN ADULT LIVER, SIGNAL = 3.6; EXPRESSED IN PLACENTA, SIGNAL = 2.8; EXPRESSED IN HELA, SIGNAL = 2.7; EXPRESSED IN HEART, SIGNAL = 2.4; EXPRESSED IN BONE MARROW, SIGNAL = 2.5; EXPRESSED IN FETAL LIVER, SIGNAL = 2.6; SWISSPROT HIT: Q93008, EVALUE 6.00e-20; NT HIT: gi11420654, EVALUE 4.00e-62; EST_HUMAN HIT: AU149922.1, EVALUE 5.00e-62
gaggtggggatacttcttcactgccttcataattttcttgtgctcgttggccagttctctgagggttgttcatgtgatgtgctgctgggcctgtatatggctgtccatgcacatggttatt

SEQ ID NO: 22564 - DNA, 163 bp, Homo sapiens
  MAP TO AC004743.1; EXPRESSED IN PLACENTA, SIGNAL = 3.2; EXPRESSED IN BRAIN, SIGNAL =   3; EXPRESSED IN ADULT LIVER, SIGNAL =   3; EXPRESSED IN LUNG, SIGNAL = 3.4; EXPRESSED IN HELA, SIGNAL =   3; EXPRESSED IN HEART, SIGNAL = 2.7; EXPRESSED IN FETAL LIVER, SIGNAL = 2.7; EXPRESSED IN BONE MARROW, SIGNAL = 2.9; SWISSPROT HIT: P21014, EVALUE 6.80e+00; NT HIT: AF251268.1, EVALUE 1.50e+00; EST_HUMAN HIT: BE326891.1, EVALUE 1.40e-01
actgcgagtgagatatgctaaggaaatgcgagagctgcaccacacagagatgtcagcagcacctcacactcttctcctgtatatcaggatgacctacagtttacctgtgcccaggaaagcaaaactacagattattcagttttgcataatcttcacaaaatgg

SEQ ID NO: 22565 - DNA, 146 bp, Homo sapiens
  MAP TO AC005234.1; EXPRESSED IN LUNG, SIGNAL = 2.4; EXPRESSED IN HELA, SIGNAL = 2.3; EXPRESSED IN BRAIN, SIGNAL = 2.3; EXPRESSED IN BONE MARROW, SIGNAL = 2.2; EXPRESSED IN ADULT LIVER, SIGNAL = 2.2; EXPRESSED IN PLACENTA, SIGNAL = 2.3; EXPRESSED IN HEART, SIGNAL = 2.2; EXPRESSED IN FETAL LIVER, SIGNAL = 2.4; SWISSPROT HIT: P54491, EVALUE 1.80e+00; EST_HUMAN HIT: AW845275.1, EVALUE 1.20e-01
gtgctggtccccttggcacacggtctccaggtacatctctttggggtaccagagtggcacgtcccctgcaatctgcttgtaaccctgagcaaagacttcacgctgctgaccaggcccatggcccatgtgccctgtcaggcctctgc

SEQ ID NO: 22566 - DNA, 187 bp, Homo sapiens
  MAP TO AC004128.1; EXPRESSED IN PLACENTA, SIGNAL = 2.6; EXPRESSED IN LUNG, SIGNAL = 2.8; EXPRESSED IN HEART, SIGNAL = 2.4; EXPRESSED IN BRAIN, SIGNAL = 2.5; EXPRESSED IN BONE MARROW, SIGNAL =   3; EXPRESSED IN HELA, SIGNAL =   3; EXPRESSED IN FETAL LIVER, SIGNAL = 2.9; EXPRESSED IN ADULT LIVER, SIGNAL =   3; SWISSPROT HIT: Q00534, EVALUE 4.00e-26; EST_HUMAN HIT: BF111705.1, EVALUE 5.00e-91; NT HIT: gi4502740, EVALUE 3.00e-91
cactgaggttagagccatctggaaactatagatgcgggcaaggccgaagtcagcgagttttatttgtccgctgctggtcaccagaatgttctgtggttttagatcgcgatgcactactcggtgtgaatgaagaaagtccagacctcggagaagctgaaacatcatatcctaataaaattaaaaaaag

SEQ ID NO: 22567 - DNA, 504 bp, Homo sapiens
  MAP TO AC005509.1; EXPRESSED IN LUNG, SIGNAL = 1.7; EXPRESSED IN BRAIN, SIGNAL = 1.8; EXPRESSED IN HEART, SIGNAL = 2.1; EXPRESSED IN BONE MARROW, SIGNAL = 1.7; EXPRESSED IN ADULT LIVER, SIGNAL = 1.9; EXPRESSED IN PLACENTA, SIGNAL = 1.9; EXPRESSED IN HELA, SIGNAL = 1.8; EXPRESSED IN FETAL LIVER, SIGNAL = 1.9; SWISSPROT HIT: P18931, EVALUE 3.20e+00
taatacaagaatctccagaggaaggagtcagatggtccataatgagcttgacaggcatttcttccaaagacgctggggattacaaatgtaaggccaaaaatctggctgggatgtcagaagctgtggttactgtgacagtgcttggcattaccacaactccaataccaccagacacttctgaaagaactggagatcatcctgagtgggatgtccagccgggatctggaagatctacatctgtatctagcgcatcatcatatctttggtcctcttccttctcccccacatcttctttttctgcttctactttgtctcctccctctactgcttccttctctttatctcctttctcctcctccactgtttcttcaaccacaactctgagcacaagcatctcagcaagtaccaccatggccaacaagcgatcattccagctccaccaaggtgggaaaagaaatttaaaggtggcaaagaatggaagtaagcttcctccagccagcacaa

SEQ ID NO: 22568 - DNA, 87 bp, Homo sapiens
  MAP TO AC004988.2; EXPRESSED IN PLACENTA, SIGNAL = 1.8; EXPRESSED IN BONE MARROW, SIGNAL = 1.8; EXPRESSED IN ADULT LIVER, SIGNAL = 1.7; EXPRESSED IN LUNG, SIGNAL = 1.2; EXPRESSED IN HELA, SIGNAL = 1.9; EXPRESSED IN HEART, SIGNAL = 1.8; EXPRESSED IN FETAL LIVER, SIGNAL = 1.9; EXPRESSED IN BRAIN, SIGNAL = 1.6; NT HIT: AF029156.1, EVALUE 1.80e-01; EST_HUMAN HIT: BE548453.1, EVALUE 4.00e-03
ggctgttctctgtatccctgtcaatgtagatgcagagggtcttggcgatgatgtggttaaagtagtgaaaactcagccttacactag

SEQ ID NO: 22569 - DNA, 273 bp, Homo sapiens
  MAP TO AC004148.1; EXPRESSED IN ADULT LIVER, SIGNAL = 1.8; EXPRESSED IN PLACENTA, SIGNAL =   2; EXPRESSED IN LUNG, SIGNAL = 1.7; EXPRESSED IN HEART, SIGNAL = 1.8; EXPRESSED IN BRAIN, SIGNAL = 1.9; EXPRESSED IN HELA, SIGNAL = 1.7; EXPRESSED IN FETAL LIVER, SIGNAL =   2; EXPRESSED IN BONE MARROW, SIGNAL = 1.7; NT HIT: gi9632275, EVALUE 1.70e-01; EST_HUMAN HIT: AA581028.1, EVALUE 2.00e-11; SWISSPROT HIT: O00268, EVALUE 2.10e-01
gtccaggtttcggagctgggccaacagttgcccccgcgcttggaagatgggcagactccggcgctgcagctccacagcttcagggtagggactggccgagggctgggccaggggcggctgctgcctccggcctcctcctcctcctctgccgccgctgcccgcagtcagcagcatcaccacttgcctcccgggagggaaggacccagcgcggctcggaggtccagagcctggccggaatctcttggccggcgggaagcccgcctcctccggcat

SEQ ID NO: 22570 - DNA, 155 bp, Homo sapiens
  MAP TO AC004590.1; EXPRESSED IN LUNG, SIGNAL = 2.7; EXPRESSED IN FETAL LIVER, SIGNAL = 2.5; EXPRESSED IN BONE MARROW, SIGNAL = 2.2; EXPRESSED IN PLACENTA, SIGNAL = 2.5; EXPRESSED IN HELA, SIGNAL = 2.5; EXPRESSED IN HEART, SIGNAL =   2; EXPRESSED IN BRAIN, SIGNAL = 2.2; EXPRESSED IN ADULT LIVER, SIGNAL = 2.7; SWISSPROT HIT: O15438, EVALUE 4.00e-10; NT HIT: gi9955973, EVALUE 6.00e-43; EST_HUMAN HIT: BF338184.1, EVALUE 3.00e-15
gccagtgtgtctctgaaacggatccagcaattcctgagccaagaggaacttgacccccagagtgtggaaagaaagaccatctccccaggtctagagagcccctacctgggctgcctgccccagtccttgctccagaaaaacctctgtttcaagct

SEQ ID NO: 22571 - DNA, 210 bp, Homo sapiens
  MAP TO AC004389.1; EXPRESSED IN PLACENTA, SIGNAL = 2.1; EXPRESSED IN LUNG, SIGNAL = 2.6; EXPRESSED IN HEART, SIGNAL = 1.6; EXPRESSED IN BRAIN, SIGNAL = 1.6; EXPRESSED IN BONE MARROW, SIGNAL = 1.8; EXPRESSED IN ADULT LIVER, SIGNAL = 2.3; EXPRESSED IN HELA, SIGNAL = 1.7; EXPRESSED IN FETAL LIVER, SIGNAL = 1.7; NT HIT: AJ229041.1, EVALUE 2.00e-15; EST_HUMAN HIT: AW662772.1, EVALUE 6.00e-17; SWISSPROT HIT: P11260, EVALUE 3.30e-01
tcagcaacagaatcaaacaagtagaagaaagaatgacagagcttgcagacaaggcttttgagttaacccaatccaacaaagagaaaaaaaagattaaaaaaaatgagcaaagcctccaagatgtttgggattatgttaaacaacaaaacctaaaaataattggcattgctgaggaagaagagtaatctaaaagtttggaaattatatttg

SEQ ID NO: 22572 - DNA, 124 bp, Homo sapiens
  MAP TO AC004894.1; EXPRESSED IN BRAIN, SIGNAL = 1.5; EXPRESSED IN PLACENTA, SIGNAL = 1.7; EXPRESSED IN LUNG, SIGNAL = 1.6; EXPRESSED IN HEART, SIGNAL = 1.5; EXPRESSED IN BONE MARROW, SIGNAL = 1.4; EXPRESSED IN ADULT LIVER, SIGNAL = 1.6; EXPRESSED IN HELA, SIGNAL = 1.7; EXPRESSED IN FETAL LIVER, SIGNAL = 1.4; SWISSPROT HIT: P10299, EVALUE 7.10e+00; NT HIT: AF049236.1, EVALUE 7.00e-02; EST_HUMAN HIT: W68251.1, EVALUE 7.00e-03
aagtaaagaggcatatgatgaacaactgctctttgcaggtaaacaagttcatctacttttaactcctccacatcttgtttctgtttggatttgtagaagtagtaactgaggaaacacacaaaaa

SEQ ID NO: 22573 - DNA, 268 bp, Homo sapiens
  MAP TO AC006531.1; EXPRESSED IN PLACENTA, SIGNAL = 0.68; EXPRESSED IN BONE MARROW, SIGNAL = 0.89; EXPRESSED IN FETAL LIVER, SIGNAL = 0.71; EXPRESSED IN HEART, SIGNAL = 2.1; EXPRESSED IN LUNG, SIGNAL = 0.77; EXPRESSED IN BRAIN, SIGNAL = 0.8; EXPRESSED IN ADULT LIVER, SIGNAL = 0.76; NT HIT: gi6006002, EVALUE 1.00e-113; SWISSPROT HIT: Q00959, EVALUE 6.00e-36; EST_HUMAN HIT: BE832017.1, EVALUE 2.00e-36
ttgattttgacgaacttccgacatggcacggtgttcctcacacacgtctcggtcagggggtctatgtcttccacgatgacgaatggggcctcctccagggtgacgatgctgagatggttgtcatccggctcacagtcggagaaggacttgtacctgggccacacggcgtgcctcaggctcagcgtatggttctcccacttgcccacctgcagcacaaacacaaagacacagctgtgctttcttccgccgctgatttctggagaggcaa

SEQ ID NO: 22574 - DNA, 101 bp, Homo sapiens
  MAP TO AC006191.1; EXPRESSED IN ADULT LIVER, SIGNAL = 3.2; EXPRESSED IN PLACENTA, SIGNAL = 2.9; EXPRESSED IN LUNG, SIGNAL = 1.7; EXPRESSED IN FETAL LIVER, SIGNAL = 7.5; EXPRESSED IN HELA, SIGNAL = 3.8; EXPRESSED IN HEART, SIGNAL = 3.5; EXPRESSED IN BRAIN, SIGNAL = 5.2; EXPRESSED IN BONE MARROW, SIGNAL = 4.4; EST_HUMAN HIT: AW665853.1, EVALUE 2.00e-18; NT HIT: AF111167.2, EVALUE 1.00e-15
gttatcagcagagattgacagtcgagttggtggactggaagaggaagacccaccctcaatgtgagtgggcaccataaaatcagctgccagcatggctagaa

SEQ ID NO: 22575 - DNA, 115 bp, Homo sapiens
  MAP TO AC006015.2; EXPRESSED IN PLACENTA, SIGNAL =  10; EXPRESSED IN LUNG, SIGNAL =  13; EXPRESSED IN FETAL LIVER, SIGNAL = 9.3; EXPRESSED IN BRAIN, SIGNAL = 8.9; EXPRESSED IN BONE MARROW, SIGNAL = 9.6; EXPRESSED IN ADULT LIVER, SIGNAL =  10; EXPRESSED IN HELA, SIGNAL = 9.5; EXPRESSED IN HEART, SIGNAL = 8.8; EST_HUMAN HIT: F08688.1, EVALUE 8.00e-30; NT HIT: AF181897.1, EVALUE 1.00e-21
cttctggataacttgctgcagcttccaacaaagcatttgctgcttcaccttgcacttttgtgttatggagatgaattctttccttaaacatcatgaaccaacctccgctagcttc

SEQ ID NO: 22576 - DNA, 230 bp, Homo sapiens
  MAP TO AC004130.1; EXPRESSED IN BONE MARROW, SIGNAL = 5.5; EXPRESSED IN PLACENTA, SIGNAL = 5.7; EXPRESSED IN LUNG, SIGNAL = 5.9; EXPRESSED IN HELA, SIGNAL = 6.1; EXPRESSED IN FETAL LIVER, SIGNAL = 5.9; EXPRESSED IN ADULT LIVER, SIGNAL = 6.1; EXPRESSED IN HEART, SIGNAL = 6.8; EXPRESSED IN BRAIN, SIGNAL = 5.3; NT HIT: gi4504778, EVALUE 1.00e-127; EST_HUMAN HIT: AW131039.1, EVALUE 1.00e-126; SWISSPROT HIT: P26012, EVALUE 2.00e-40
atgctgaaagttcatcctctgaagaaatatcctgtggatctttattatcttgttgatgtctcagcatcaatgcacaataatatagaaaaattaaattccgttggaaacgatttatctagaaaaatggcatttttctcccgtgactttcgtcttggatttggctcatacgttgataaaacagtttcaccatacattagcatccaccccgaaaggattcataatcaatgcag

SEQ ID NO: 22577 - DNA, 83 bp, Homo sapiens
  MAP TO AC006347.2; EXPRESSED IN PLACENTA, SIGNAL = 1.3; EXPRESSED IN LUNG, SIGNAL = 1.4; EXPRESSED IN FETAL LIVER, SIGNAL = 1.5; EXPRESSED IN BONE MARROW, SIGNAL = 1.3; EXPRESSED IN HEART, SIGNAL = 1.4; EXPRESSED IN BRAIN, SIGNAL = 1.2; EXPRESSED IN ADULT LIVER, SIGNAL = 1.9; NT HIT: gi9635035, EVALUE 6.70e-01; EST_HUMAN HIT: T78020.1, EVALUE 3.90e+00; SWISSPROT HIT: P28992, EVALUE 7.30e+00
cttttgtgtctctagagcattcagttttattcttgttatctccacttctttctcttgttgtgtcatagatccttggagaactt

SEQ ID NO: 22578 - DNA, 132 bp, Homo sapiens
  MAP TO AC004757.1; EXPRESSED IN PLACENTA, SIGNAL = 2.2; EXPRESSED IN LUNG, SIGNAL = 2.8; EXPRESSED IN HEART, SIGNAL = 2.2; EXPRESSED IN BONE MARROW, SIGNAL = 2.3; EXPRESSED IN ADULT LIVER, SIGNAL = 2.5; EXPRESSED IN HELA, SIGNAL = 2.5; EXPRESSED IN FETAL LIVER, SIGNAL = 2.3; EXPRESSED IN BRAIN, SIGNAL = 2.4; SWISSPROT HIT: Q39575, EVALUE 7.00e+00; NT HIT: U03420.1, EVALUE 2.90e-01; EST_HUMAN HIT: BE904092.1, EVALUE 4.40e-01
gagctggaggaacttctcttttggagagattgctgctggtcttccctgcttctctcatcccctcctcccgaaggcagagcagaggaattctcggcttcttccagttaccctcagcctgcaaagaaaacatag

SEQ ID NO: 22579 - DNA, 216 bp, Homo sapiens
  MAP TO AC005242.1; EXPRESSED IN PLACENTA, SIGNAL = 4.9; EXPRESSED IN LUNG, SIGNAL = 3.9; EXPRESSED IN HELA, SIGNAL = 5.3; EXPRESSED IN HEART, SIGNAL = 6.3; EXPRESSED IN FETAL LIVER, SIGNAL = 6.4; EXPRESSED IN BRAIN, SIGNAL = 9.8; EXPRESSED IN ADULT LIVER, SIGNAL = 4.1; EXPRESSED IN BONE MARROW, SIGNAL = 3.7; NT HIT: D45887.1, EVALUE 4.00e-85; SWISSPROT HIT: P02593, EVALUE 5.00e-30; EST_HUMAN HIT: BE567193.1, EVALUE 2.00e-87
cggactctcctgaatttctgacaatgatggcaagaaaaatgaaagacacacaaagtgaagaagaaattagagaagcattccttgtgtttgataaggatggcaatggctatatcagtgcagcagaactttgccatgtgatgacaaaccctggagagaagctaacagatgacaaggttgatgaaatgatcagggaagcaggtattgatggtgatggtc

SEQ ID NO: 22580 - DNA, 193 bp, Homo sapiens
  MAP TO AC004585.1; EXPRESSED IN BONE MARROW, SIGNAL =  13; EXPRESSED IN ADULT LIVER, SIGNAL =  15; EXPRESSED IN PLACENTA, SIGNAL =  13; EXPRESSED IN LUNG, SIGNAL =  12; EXPRESSED IN HELA, SIGNAL =  11; EXPRESSED IN HEART, SIGNAL =  12; EXPRESSED IN FETAL LIVER, SIGNAL =  21; EXPRESSED IN BRAIN, SIGNAL =  13; NT HIT: AJ400878.1, EVALUE 4.50e-01; SWISSPROT HIT: O67289, EVALUE 1.30e+00; EST_HUMAN HIT: H72118.1, EVALUE 1.70e-01
ccatcagccctgcttctgtagtggctgaccacctcctcttctgggtttccacgtgagaccccaccctggttcttcagtttttcctgggatctcgtctctctgagaccaagaagcagtcttagctttgagatattgagttggatggtccttgaatgcccccttgtggacagctggctttctttcactctttcag

SEQ ID NO: 22581 - DNA, 145 bp, Homo sapiens
  MAP TO AC006199.1; EXPRESSED IN LUNG, SIGNAL = 2.6; EXPRESSED IN ADULT LIVER, SIGNAL = 4.2; EXPRESSED IN PLACENTA, SIGNAL =   3; EXPRESSED IN HEART, SIGNAL = 4.3; EXPRESSED IN FETAL LIVER, SIGNAL = 5.2; EXPRESSED IN BRAIN, SIGNAL = 5.1; EXPRESSED IN BONE MARROW, SIGNAL = 6.5; EXPRESSED IN HELA, SIGNAL = 6.1; SWISSPROT HIT: P41997, EVALUE 2.40e-02; NT HIT: AF029308.1, EVALUE 2.00e-24; EST_HUMAN HIT: BF212905.1, EVALUE 2.00e-28
aactcgcaacatcaacagcacatttgacccagaaccactaatgaaaatacagttcattggtggttcaagaagttttgcaaaggagacaagagccttgaatatgaagagcacagtggtcagccatcagaagctgacaacgacaaat

SEQ ID NO: 22582 - DNA, 82 bp, Homo sapiens
  MAP TO AC004851.1; EXPRESSED IN BRAIN, SIGNAL = 4.3; EXPRESSED IN ADULT LIVER, SIGNAL = 4.2; EXPRESSED IN PLACENTA, SIGNAL = 3.8; EXPRESSED IN LUNG, SIGNAL = 4.8; EXPRESSED IN HELA, SIGNAL = 4.3; EXPRESSED IN HEART, SIGNAL =   4; EXPRESSED IN BONE MARROW, SIGNAL = 3.8; EXPRESSED IN FETAL LIVER, SIGNAL = 4.2; NT HIT: gi6680577, EVALUE 6.60e-01; EST_HUMAN HIT: BE566729.1, EVALUE 9.80e-01; SWISSPROT HIT: P50643, EVALUE 5.60e+00
ctggagccaatgcagcagccccaccgtcacgtcctgtctctggccctacgcttctgtccaaatcaccgtcctccagggccat

SEQ ID NO: 22583 - DNA, 98 bp, Homo sapiens
  MAP TO AC005145.1; EXPRESSED IN LUNG, SIGNAL =  41; EXPRESSED IN HELA, SIGNAL =  37; EXPRESSED IN BRAIN, SIGNAL =  40; EXPRESSED IN BONE MARROW, SIGNAL =  39; EXPRESSED IN ADULT LIVER, SIGNAL =  31; EXPRESSED IN PLACENTA, SIGNAL =  36; EXPRESSED IN HEART, SIGNAL =  33; EXPRESSED IN FETAL LIVER, SIGNAL =  35; EST_HUMAN HIT: AA759254.1, EVALUE 1.20e+00
ctaaagtcttcaccgagtttacaactgccatgtttgtgtttttctcatcttccattgtagattcttcttcctacattcagtcctcattaattcagcag

SEQ ID NO: 22584 - DNA, 87 bp, Homo sapiens
  MAP TO AC002485.1; EXPRESSED IN LUNG, SIGNAL = 1.2; EXPRESSED IN BONE MARROW, SIGNAL = 1.1; EXPRESSED IN ADULT LIVER, SIGNAL = 1.1; EXPRESSED IN PLACENTA, SIGNAL = 1.1; EXPRESSED IN HEART, SIGNAL = 1.3; EXPRESSED IN FETAL LIVER, SIGNAL = 1.2; EXPRESSED IN BRAIN, SIGNAL = 1.1; EST_HUMAN HIT: T87761.1, EVALUE 1.00e-03; NT HIT: AJ251973.1, EVALUE 1.10e-02; SWISSPROT HIT: Q9ZMM2, EVALUE 7.30e+00
gacttgcacaacaaggtagagagttccctgtgtttttgtgtttttttcttcatatattccagacttggatttgaagaagttggcaac

SEQ ID NO: 22585 - DNA, 129 bp, Homo sapiens
  MAP TO AC005245.1; EXPRESSED IN LUNG, SIGNAL = 2.1; EXPRESSED IN FETAL LIVER, SIGNAL =   2; EXPRESSED IN PLACENTA, SIGNAL = 1.9; EXPRESSED IN HELA, SIGNAL =   2; EXPRESSED IN BRAIN, SIGNAL = 2.3; EXPRESSED IN BONE MARROW, SIGNAL =   4; EXPRESSED IN ADULT LIVER, SIGNAL = 2.1; EXPRESSED IN HEART, SIGNAL =   2; SWISSPROT HIT: P18190, EVALUE 1.80e+00; EST_HUMAN HIT: BE069189.1, EVALUE 4.00e-04; NT HIT: U07561.1, EVALUE 5.00e-06
atctgtagaagcagggggcactggatgccatgtagggccacacagggaagcaccaggtgggtcaggaggcagagggagagggggaagtataagtaagggcctttactggggtttccacagaaggaacag

SEQ ID NO: 22586 - DNA, 292 bp, Homo sapiens
  MAP TO AC006064.9; EXPRESSED IN PLACENTA, SIGNAL = 9.3; EXPRESSED IN LUNG, SIGNAL =   8; EXPRESSED IN BONE MARROW, SIGNAL = 8.5; EXPRESSED IN HELA, SIGNAL = 8.8; EXPRESSED IN ADULT LIVER, SIGNAL = 6.9; EXPRESSED IN HEART, SIGNAL = 8.1; EXPRESSED IN FETAL LIVER, SIGNAL = 8.1; EXPRESSED IN BRAIN, SIGNAL = 8.6; SWISSPROT HIT: Q14839, EVALUE 4.00e-35; NT HIT: gi4557452, EVALUE 0.00e+00; EST_HUMAN HIT: AV650020.1, EVALUE 0.00e+00
cgtacaacggggacagagccattcaccgttggggatctctggaagtgggggattcaggcagtggatgtggtaggaagaaggacaggtatcacagcagagcagttccccaccatccttgcagacccgacagaattccatatggtggtcatcctcctcttcgaggtctcccccaacctcttccaggatctcctcaccctccgaattgtcctctttagcttcccactggatgccttccttctcctgcagtaaaggaccacagattcagattattacccccacccgcccaccgcag

SEQ ID NO: 22587 - DNA, 157 bp, Homo sapiens
  MAP TO AC002524.1; EXPRESSED IN PLACENTA, SIGNAL = 2.5; EXPRESSED IN LUNG, SIGNAL = 2.8; EXPRESSED IN HEART, SIGNAL = 2.2; EXPRESSED IN FETAL LIVER, SIGNAL = 2.5; EXPRESSED IN BONE MARROW, SIGNAL = 2.5; EXPRESSED IN HELA, SIGNAL = 2.5; EXPRESSED IN BRAIN, SIGNAL = 2.4; EXPRESSED IN ADULT LIVER, SIGNAL = 2.3; EST_HUMAN HIT: AA878448.1, EVALUE 1.00e-78; NT HIT: gi5454145, EVALUE 9.00e-79; SWISSPROT HIT: P52483, EVALUE 3.00e-24
atctgatgaaaatgtgatatccagaaaaaacacaccaccttcatatacagaacccagtggaccaagtatagttgatctccattcacaaatgttatctcctttaggcccagcactgcaattaggaggaggatcaagggttatttcagctagctccttc

SEQ ID NO: 22588 - DNA, 86 bp, Homo sapiens
  MAP TO AC004168.2; EXPRESSED IN LUNG, SIGNAL = 1.9; EXPRESSED IN HEART, SIGNAL = 1.8; EXPRESSED IN FETAL LIVER, SIGNAL = 1.7; EXPRESSED IN BRAIN, SIGNAL = 2.1; EXPRESSED IN HELA, SIGNAL = 1.7; EXPRESSED IN BONE MARROW, SIGNAL = 1.7; EXPRESSED IN PLACENTA, SIGNAL = 1.7; EXPRESSED IN ADULT LIVER, SIGNAL = 1.7; NT HIT: AF134907.1, EVALUE 1.50e-01; EST_HUMAN HIT: BE173306.1, EVALUE 2.80e+00
gttgccagtaatacaaagccaaactgcaccaacaatgccaagctcagttggaagaacatttccaccaacgtaaataatatttattt

SEQ ID NO: 22589 - DNA, 197 bp, Homo sapiens
  MAP TO AC005908.1; EXPRESSED IN HELA, SIGNAL = 2.1; EXPRESSED IN BRAIN, SIGNAL = 2.2; EXPRESSED IN BONE MARROW, SIGNAL =  15; EXPRESSED IN ADULT LIVER, SIGNAL = 2.2; EXPRESSED IN PLACENTA, SIGNAL = 2.3; EXPRESSED IN HEART, SIGNAL = 1.8; EXPRESSED IN FETAL LIVER, SIGNAL = 2.4; EXPRESSED IN LUNG, SIGNAL = 2.3; SWISSPROT HIT: Q95203, EVALUE 2.00e-03; NT HIT: gi11439393, EVALUE 7.20e+00
gggccagatgggagccaagccaaggctgcagcagccagctacctggctgagcctccaggcagccccacacctgggccgttctcctacacaaaagcctctgtggtcctattcctccctaacccaaggcccaatatttttaaactgcattccaaagaacaactcgctgagtgccaccaatacctgcaaagcaatatgag

SEQ ID NO: 22590 - DNA, 315 bp, Homo sapiens
  MAP TO AC004098.1; EXPRESSED IN LUNG, SIGNAL = 3.7; EXPRESSED IN HEART, SIGNAL = 2.8; EXPRESSED IN FETAL LIVER, SIGNAL = 3.2; EXPRESSED IN BRAIN, SIGNAL = 3.1; EXPRESSED IN HELA, SIGNAL = 3.3; EXPRESSED IN BONE MARROW, SIGNAL = 3.7; EXPRESSED IN ADULT LIVER, SIGNAL = 3.6; EXPRESSED IN PLACENTA, SIGNAL = 3.5; EST_HUMAN HIT: AW575598.1, EVALUE 0.00e+00; NT HIT: gi4506740, EVALUE 0.00e+00; SWISSPROT HIT: P23821, EVALUE 7.00e-50
aagtttcaaccttgtgttccacattgttctgctgtgctttgtccaaatgaacctttatgagccggctgctatctagtttgacggggattctcttgcccacaatttcgcttgggaagaccaagtcctcaaggaaggcatcgtgcacagctgtcagagtacggctcctgggacacttttgcttattttttgtacggcttttttgagttggcttaggcagaattctcctctgagcgataaagacgacatgcttcccactgaactttttctccaattcgcgtactagccggacttggattttctggaaagatttcagtt

SEQ ID NO: 22591 - DNA, 165 bp, Homo sapiens
  MAP TO AC004477.1; EXPRESSED IN BONE MARROW, SIGNAL = 7.4; EXPRESSED IN ADULT LIVER, SIGNAL = 7.9; EXPRESSED IN LUNG, SIGNAL =   8; EXPRESSED IN HELA, SIGNAL =   7; EXPRESSED IN PLACENTA, SIGNAL = 7.6; EXPRESSED IN HEART, SIGNAL = 7.1; EXPRESSED IN FETAL LIVER, SIGNAL =   7; EXPRESSED IN BRAIN, SIGNAL = 7.5; SWISSPROT HIT: P34715, EVALUE 5.20e+00; NT HIT: M69197.1, EVALUE 2.40e-02; EST_HUMAN HIT: BF308187.1, EVALUE 2.00e-03
ttttccttcccctttccttctccccgtcttcttcctccttctccgccatctgtcctacattaaccaaatccatccctttcagcatctcctctgtgagcctcctttctggtgtgtttcccttaacccctgccatctccttttgcttcatccacttagcacaaacaa

SEQ ID NO: 22592 - DNA, 494 bp, Homo sapiens
  MAP TO AC001226.1; EXPRESSED IN PLACENTA, SIGNAL = 4.5; EXPRESSED IN BRAIN, SIGNAL = 6.3; EXPRESSED IN BONE MARROW, SIGNAL =   5; EXPRESSED IN ADULT LIVER, SIGNAL = 5.8; EXPRESSED IN LUNG, SIGNAL = 3.6; EXPRESSED IN HELA, SIGNAL = 3.9; EXPRESSED IN HEART, SIGNAL = 4.2; EXPRESSED IN FETAL LIVER, SIGNAL = 5.3; NT HIT: gi5729771, EVALUE 0.00e+00; SWISSPROT HIT: O75503, EVALUE 2.00e-96; EST_HUMAN HIT: H01255.1, EVALUE 0.00e+00
tggcaaagtgggtgaaacaggacaatgaaacaggaatttattatgagacatggaatgtaaaagccagcccagaaaagggggcagagacatggtttgattcctacgactgttccaaatttgtgttaaggacctttaacaagttggctgaatttggagcagagttcaagaacatagaaaccaactatacaagaatatttctttacagtggagaacctacttatctgggaaatgaaacatctgtttttgggccaacaggaaacaagactcttggtttagccataaaaagattttattaccccttcaaaccacatttgccaactaaagaatttctgttgagtctcttgcaaatttttgatgcagtgattgtgcacaaacagttctatttgttttataattttgaatattggtttttacctatgaaattcccttttattaaaataacatatgaagaaatccctttacctatcagaaacaaaacactctctggtttataa

SEQ ID NO: 22593 - DNA, 77 bp, Homo sapiens
  MAP TO AC005181.1; EXPRESSED IN BONE MARROW, SIGNAL = 3.1; EXPRESSED IN PLACENTA, SIGNAL = 3.6; EXPRESSED IN LUNG, SIGNAL = 4.1; EXPRESSED IN HELA, SIGNAL = 3.4; EXPRESSED IN FETAL LIVER, SIGNAL = 2.9; EXPRESSED IN ADULT LIVER, SIGNAL = 2.9; EXPRESSED IN HEART, SIGNAL = 3.3; EXPRESSED IN BRAIN, SIGNAL = 3.4; EST_HUMAN HIT: BE302970.1, EVALUE 3.00e-10; NT HIT: gi7661625, EVALUE 4.00e-08
aaagctttggctgcatggtcacccaccaattggaccagctatttgaccatgaattggaccccctcaaggtgctgaag

SEQ ID NO: 22594 - DNA, 294 bp, Homo sapiens
  MAP TO AC002038.1; EXPRESSED IN PLACENTA, SIGNAL = 4.4; EXPRESSED IN HELA, SIGNAL = 5.2; EXPRESSED IN HEART, SIGNAL = 6.1; EXPRESSED IN FETAL LIVER, SIGNAL = 5.2; EXPRESSED IN BRAIN, SIGNAL = 6.5; EXPRESSED IN ADULT LIVER, SIGNAL =   4; EXPRESSED IN LUNG, SIGNAL = 5.8; EXPRESSED IN BONE MARROW, SIGNAL = 5.6; EST_HUMAN HIT: AU123641.1, EVALUE 1.00e-68; NT HIT: gi9966912, EVALUE 7.00e-69; SWISSPROT HIT: P32391, EVALUE 2.00e-32
caacattcttatacagtggacaatgcacatcagtgggacagttttgtattcatcaacaacattcaagatggattccataaagtctgggttggcaaactctgggtaaaaaaatatttcaggttgcaggaaccttttgtaaccaacgtttattatgaacttctcctggttgatcacattgatacctgtgtactgtttcatccacttccagggatccacatcatacttagcaaattctttgactatatcagggcaaatgtaacagtatttctccttaatgacttttgtggtctccag

SEQ ID NO: 22595 - DNA, 188 bp, Homo sapiens
  MAP TO AC006206.3; EXPRESSED IN PLACENTA, SIGNAL = 2.9; EXPRESSED IN LUNG, SIGNAL = 2.5; EXPRESSED IN HELA, SIGNAL = 4.2; EXPRESSED IN FETAL LIVER, SIGNAL = 4.3; EXPRESSED IN HEART, SIGNAL = 3.3; EXPRESSED IN BRAIN, SIGNAL = 3.9; EXPRESSED IN BONE MARROW, SIGNAL = 3.9; EXPRESSED IN ADULT LIVER, SIGNAL = 3.1; SWISSPROT HIT: Q00335, EVALUE 2.20e+00; EST_HUMAN HIT: W23075.1, EVALUE 2.60e+00
gtaaagctgtggggactccctcttttacaagtggctcccagaacttcaggaatggcttggacagtagctgttcctttactccaagccattcggacataactgagactgttggcaatctcactagaggcatcaaaatccctgccaagagctcctttcccaaaccccttctgcatagctgtaaattgaca

SEQ ID NO: 22596 - DNA, 166 bp, Homo sapiens
  MAP TO AC006241.1; EXPRESSED IN PLACENTA, SIGNAL = 4.4; EXPRESSED IN LUNG, SIGNAL = 5.1; EXPRESSED IN HEART, SIGNAL = 3.7; EXPRESSED IN FETAL LIVER, SIGNAL = 3.7; EXPRESSED IN BRAIN, SIGNAL = 5.1; EXPRESSED IN BONE MARROW, SIGNAL = 4.4; EXPRESSED IN ADULT LIVER, SIGNAL = 4.2; EXPRESSED IN HELA, SIGNAL = 4.4; SWISSPROT HIT: Q61508, EVALUE 3.90e+00; EST_HUMAN HIT: BF035413.1, EVALUE 5.70e-01; NT HIT: AF110520.1, EVALUE 1.50e+00
atggcagatctggaccacactgagaacagatccaacccagttctcttcccgagtcttgggtcagtcttcagctggcaacacggacaagggcccaccttgcacacagctcttacgggacagaagtcggcggctctgtcctgccaggaggcattgcagtcgggaccag

SEQ ID NO: 22597 - DNA, 290 bp, Homo sapiens
  MAP TO AC005151.1; EXPRESSED IN PLACENTA, SIGNAL = 1.6; EXPRESSED IN HEART, SIGNAL = 1.7; EXPRESSED IN BRAIN, SIGNAL = 2.2; EXPRESSED IN ADULT LIVER, SIGNAL = 1.9; EXPRESSED IN LUNG, SIGNAL = 1.6; EXPRESSED IN FETAL LIVER, SIGNAL = 2.1; EXPRESSED IN BONE MARROW, SIGNAL = 1.9; NT HIT: gi7305360, EVALUE 3.00e-43; SWISSPROT HIT: P18834, EVALUE 6.00e-03; EST_HUMAN HIT: F35514.1, EVALUE 6.70e-02
ccagaaggcggaagagtgtgccccggcggaacacctctgtgtgttcgtacagccgcagggccagcaccgcgcccgacacatagaggaaggagctgggcttggccagggactccagggccaccaggcctgcctgccgtgtcccccggtgcagcaagaaggaggcatgctgttggaaggtgtcacggccctgccacttagccagctccagagacccgttggctgtgacgtgaaggaagaagttgggtctgtctgctgcctccagggacaccacatctgggtctgcagagaac

SEQ ID NO: 22598 - DNA, 257 bp, Homo sapiens
  MAP TO AC004687.1; EXPRESSED IN LUNG, SIGNAL =   2; EXPRESSED IN BRAIN, SIGNAL = 1.6; EXPRESSED IN ADULT LIVER, SIGNAL = 1.7; EXPRESSED IN PLACENTA, SIGNAL = 1.7; EXPRESSED IN HELA, SIGNAL = 1.7; EXPRESSED IN HEART, SIGNAL =   2; EXPRESSED IN BONE MARROW, SIGNAL = 8.1; EXPRESSED IN FETAL LIVER, SIGNAL = 3.3; EST_HUMAN HIT: AW467424.1, EVALUE 1.00e-119; SWISSPROT HIT: P05164, EVALUE 6.00e-43; NT HIT: X15377.1, EVALUE 0.00e+00
gatacaatgcctggaggcgcttctgtgggctcccgcagcctgaaactgtgggccagctgggcacggtgctgaggaacctgaaattggcgaggaaactgatggagcagtatggcacgcccaacaacatcgacatctggatgggcggcgtgtccgagcctctgaagcgcaaaggccgcgtgggcccactcctcgcctgcatcatcggtacccagttcaggaagctccgggatggtgatcggtgaggaggggcaggcgtc

SEQ ID NO: 22599 - DNA, 204 bp, Homo sapiens
  MAP TO AC005252.1; EXPRESSED IN LUNG, SIGNAL = 1.6; EXPRESSED IN FETAL LIVER, SIGNAL = 1.6; EXPRESSED IN BRAIN, SIGNAL = 1.5; EXPRESSED IN BONE MARROW, SIGNAL = 1.4; EXPRESSED IN PLACENTA, SIGNAL = 1.5; EXPRESSED IN HEART, SIGNAL = 1.6; EXPRESSED IN ADULT LIVER, SIGNAL = 1.6; NT HIT: M26925.1, EVALUE 1.20e-01; SWISSPROT HIT: P08572, EVALUE 7.20e-01
acagctggtaggcactgccctataccaggttctctgctgggagctgagccctgcctccttagagcttgccacccagaggaagagggtgctcccagtgactctctgaaagatataaagcctgggaagccactgacctttggtctgagcagtagaaaagacactatccctcaaactggcatcatcccaattgtccatagtctgcct

SEQ ID NO: 22600 - DNA, 145 bp, Homo sapiens
  MAP TO AC004593.1; EXPRESSED IN BRAIN, SIGNAL = 3.1; EXPRESSED IN BONE MARROW, SIGNAL = 2.5; EXPRESSED IN LUNG, SIGNAL = 3.2; EXPRESSED IN ADULT LIVER, SIGNAL = 3.5; EXPRESSED IN PLACENTA, SIGNAL = 2.9; EXPRESSED IN HELA, SIGNAL = 2.5; EXPRESSED IN HEART, SIGNAL = 2.8; EXPRESSED IN FETAL LIVER, SIGNAL = 3.1; SWISSPROT HIT: P39066, EVALUE 3.10e+00; NT HIT: AF052683.1, EVALUE 8.30e-02
aatggaaaatgaggataacaattctcacttcaggattgttatgggtatatgacaatgtatacaaagtgtttagcatgatcctggcacataggaaatgattacttaaggagagtgacttttctatatcactaatggcagaaagcat

SEQ ID NO: 22601 - DNA, 173 bp, Homo sapiens
  MAP TO AC002303.1; EXPRESSED IN PLACENTA, SIGNAL =   2; EXPRESSED IN BRAIN, SIGNAL =   2; EXPRESSED IN ADULT LIVER, SIGNAL = 1.7; EXPRESSED IN LUNG, SIGNAL = 1.9; EXPRESSED IN HELA, SIGNAL = 1.6; EXPRESSED IN HEART, SIGNAL = 1.5; EXPRESSED IN FETAL LIVER, SIGNAL = 1.9; EXPRESSED IN BONE MARROW, SIGNAL = 1.7; NT HIT: gi11141868, EVALUE 2.00e-52; EST_HUMAN HIT: AW505250.1, EVALUE 3.00e-52; SWISSPROT HIT: Q04996, EVALUE 7.70e-01
gggatggagaggaagctctgcagtcccaagccaccccccaccaaggcctctctccccactgaccctccaggctggggctgccccgacctcgtctgctacaccgattacctccagacggtcatctgcatcctggaaatgtggaacctccaccccagcacgctcacccttacctg

SEQ ID NO: 22602 - DNA, 210 bp, Homo sapiens
  MAP TO AC004827.1; EXPRESSED IN PLACENTA, SIGNAL = 8.2; EXPRESSED IN LUNG, SIGNAL =  10; EXPRESSED IN FETAL LIVER, SIGNAL = 7.5; EXPRESSED IN BRAIN, SIGNAL = 9.6; EXPRESSED IN ADULT LIVER, SIGNAL =   9; EXPRESSED IN HELA, SIGNAL = 8.2; EXPRESSED IN HEART, SIGNAL = 7.8; EXPRESSED IN BONE MARROW, SIGNAL =   8; EST_HUMAN HIT: BF031411.1, EVALUE 5.00e-76; SWISSPROT HIT: Q99972, EVALUE 9.70e-01; NT HIT: AF286598.1, EVALUE 3.00e-76
gtggagacagaaatccagcgcgtctcggaggcatatgagaacctcgtgaagtcatcctccaaaagagaggccctagagaaagccatgagaaacaagctagagggcgagattcggaggatgcatgatttcaacagggatctgagaggtgagggaaccaacagacttgtctttgtacttctgaagcagctgcagggtggtgaagggaagggc

SEQ ID NO: 22603 - DNA, 264 bp, Homo sapiens
  MAP TO AC004150.8; EXPRESSED IN PLACENTA, SIGNAL = 4.3; EXPRESSED IN LUNG, SIGNAL = 4.3; EXPRESSED IN HELA, SIGNAL = 4.4; EXPRESSED IN FETAL LIVER, SIGNAL = 4.2; EXPRESSED IN BRAIN, SIGNAL = 4.7; EXPRESSED IN BONE MARROW, SIGNAL = 3.9; EXPRESSED IN ADULT LIVER, SIGNAL = 4.5; EXPRESSED IN HEART, SIGNAL = 4.2; SWISSPROT HIT: P35575, EVALUE 9.00e-05; EST_HUMAN HIT: BE735989.1, EVALUE 0.00e+00
cacttgaagatgaggttgagccactcggtgatgaggctgatccagagcaccgcgatgcccacacggcgggaggcgtagtaggccgcggggaagtagaacagaaagaggatcttgggatcgcccagaaaggtgatccagagccacacgttctccagccaggctagctggttctgtagcgcctcggctatcacgatgcccgcgcccagcgtggactccatggcggcccagctgccgaccaggccccggcttgctccagggcggaaa

SEQ ID NO: 22604 - DNA, 83 bp, Homo sapiens
  MAP TO AC005959.1; EXPRESSED IN PLACENTA, SIGNAL = 1.7; EXPRESSED IN LUNG, SIGNAL = 1.9; EXPRESSED IN BONE MARROW, SIGNAL = 1.6; EXPRESSED IN ADULT LIVER, SIGNAL = 1.5; EXPRESSED IN HELA, SIGNAL = 1.8; EXPRESSED IN HEART, SIGNAL = 1.8; EXPRESSED IN FETAL LIVER, SIGNAL = 1.7; EXPRESSED IN BRAIN, SIGNAL = 1.7; NT HIT: gi11036653, EVALUE 6.70e-01; EST_HUMAN HIT: T95763.1, EVALUE 1.00e-15
tatttattgatgatgatgatgatgatgatgatgatgatgacaaagaaatacaaggaaatgtcaacaccttaacagtgcattca

SEQ ID NO: 22605 - DNA, 135 bp, Homo sapiens
  MAP TO AC005529.7; EXPRESSED IN LUNG, SIGNAL =   2; EXPRESSED IN HEART, SIGNAL = 3.9; EXPRESSED IN FETAL LIVER, SIGNAL = 2.4; EXPRESSED IN BRAIN, SIGNAL = 1.7; EXPRESSED IN BONE MARROW, SIGNAL = 1.3; EXPRESSED IN ADULT LIVER, SIGNAL =   3; EXPRESSED IN PLACENTA, SIGNAL = 1.7; SWISSPROT HIT: Q9UDW1, EVALUE 5.00e-13; EST_HUMAN HIT: BF685233.1, EVALUE 3.00e-70; NT HIT: AF161500.1, EVALUE 3.00e-66
gacctccaccttcgccctcaccatcatcgtgggcgtcatgttcttcgagcgcgccttcgatcaaggcgcggacgctatctacgaccacatcaacgagggggtgagggcctgtgccatccctgaccttggacccgc

SEQ ID NO: 22606 - DNA, 150 bp, Homo sapiens
  MAP TO AC006078.1; EXPRESSED IN BONE MARROW, SIGNAL = 1.5; EXPRESSED IN ADULT LIVER, SIGNAL = 1.5; EXPRESSED IN HEART, SIGNAL = 1.5; EXPRESSED IN FETAL LIVER, SIGNAL = 1.6; EXPRESSED IN BRAIN, SIGNAL = 1.6; EXPRESSED IN PLACENTA, SIGNAL = 1.3; EXPRESSED IN LUNG, SIGNAL = 1.7; SWISSPROT HIT: P07129, EVALUE 6.90e+00; NT HIT: J00440.1, EVALUE 8.60e-02
aagccaaggtccacagtacgctgttaaaagtcccacctttccccccataatctttgctttccctcttttcagctctactcttttcttcctcaatatgcggaatagaggacatttgaaagatgagagggcagacgttgagaaggaaggcct

SEQ ID NO: 22607 - DNA, 473 bp, Homo sapiens
  MAP TO AC005913.1; EXPRESSED IN LUNG, SIGNAL =  15; EXPRESSED IN FETAL LIVER, SIGNAL = 1.7e+02; EXPRESSED IN BONE MARROW, SIGNAL =  28; EXPRESSED IN PLACENTA, SIGNAL =  52; EXPRESSED IN HELA, SIGNAL =  23; EXPRESSED IN HEART, SIGNAL =  12; EXPRESSED IN BRAIN, SIGNAL =  16; EXPRESSED IN ADULT LIVER, SIGNAL = 1.3e+02; SWISSPROT HIT: P02792, EVALUE 1.00e-72; EST_HUMAN HIT: AU119245.1, EVALUE 0.00e+00; NT HIT: M11147.1, EVALUE 0.00e+00
cgtttttgtggttagctccttcttgccgaccaaccatgagctcccagattcgtcagaattattccactgacgtggacgcagccgtcaacagcctggtcaatttgtacctgcaggcctcctacacctacctctctctgggcttctatttcgacggcgatcatgtggctctggaaggcgtgagccacttcttccgcgaattggctgaggaaaagtgcaagggctacgagcgtctcctgaagatgcaaaaccagcgtggcagccgtgctctcttccaggacatcaagaagccagctgaagatgagtggggtaagaccccggacaccatgaaagccgccatggccccggagagaaaactgaatcaggctcttttggatcttcatgccctgggttctgctcgcacggacccccatctctgtgacttcctggagagtcacttcctagatgagtaagtgaagttcatcaagaagatgggt

SEQ ID NO: 22608 - DNA, 272 bp, Homo sapiens
  MAP TO AC002539.1; EXPRESSED IN PLACENTA, SIGNAL =   2; EXPRESSED IN LUNG, SIGNAL = 2.6; EXPRESSED IN FETAL LIVER, SIGNAL = 1.9; EXPRESSED IN BONE MARROW, SIGNAL = 2.2; EXPRESSED IN ADULT LIVER, SIGNAL = 2.1; EXPRESSED IN HELA, SIGNAL = 2.2; EXPRESSED IN HEART, SIGNAL = 1.7; EXPRESSED IN BRAIN, SIGNAL = 2.3; NT HIT: AB019788.1, EVALUE 8.70e+00
tcactgtgttggagcaagtatgatggagctgctgctcttcttcttctcttcttcttcttcttcttcttcttcttcttcttcctcctccccctccccctccccctcccctctcctcctccttctcctcctcttcttcttcttcttattcttccttctcctccccttcccctccccctcctcttcttcttcttcttcttccttctcctcctcctcctcctcctcctcctctttctccttctccttcttccaaggatagaactaaacaaaaaaaa

SEQ ID NO: 22609 - DNA, 401 bp, Homo sapiens
  MAP TO AC006210.1; EXPRESSED IN BONE MARROW, SIGNAL = 1.6; EXPRESSED IN ADULT LIVER, SIGNAL = 1.2; EXPRESSED IN LUNG, SIGNAL = 0.84; EXPRESSED IN HELA, SIGNAL = 1.7; EXPRESSED IN PLACENTA, SIGNAL = 1.2; EXPRESSED IN HEART, SIGNAL = 1.5; EXPRESSED IN FETAL LIVER, SIGNAL = 1.7; EXPRESSED IN BRAIN, SIGNAL = 1.6; SWISSPROT HIT: Q19196, EVALUE 1.30e+00; NT HIT: AB037808.1, EVALUE 3.00e-41; EST_HUMAN HIT: AA303189.1, EVALUE 3.00e-17
agatcatttgtttaattattacattaatgaaaaggtcactatctttgcacacgtgagcttctgaaattataaattctcggatcctggatggactgtactccactagataagcacatataactgcagcagctgaccttacttgcaaatcatccctgatcattacgattttaagagcaggaagaactcccaactgtatcaacgtttcaaatagtgcatccttgctttgaggctgtaatgcctgagaaaatgaacataactccttgaaaaaaaatagcaattcacaccgtctatcatcatgtgtagtctcatcctttaactgtgcaaaaacttcatacaaaaatttgtgatctttctgcagcatgcttactatctcagccttgttggagaaaataaaagttgta

SEQ ID NO: 22610 - DNA, 154 bp, Homo sapiens
  MAP TO AC004502.1; EXPRESSED IN PLACENTA, SIGNAL = 2.2; EXPRESSED IN LUNG, SIGNAL = 2.5; EXPRESSED IN HELA, SIGNAL = 2.1; EXPRESSED IN FETAL LIVER, SIGNAL = 2.2; EXPRESSED IN HEART, SIGNAL = 2.2; EXPRESSED IN BRAIN, SIGNAL = 2.4; EXPRESSED IN BONE MARROW, SIGNAL = 2.3; EXPRESSED IN ADULT LIVER, SIGNAL = 2.6; SWISSPROT HIT: Q9UKP4, EVALUE 2.00e-03; NT HIT: gi4503766, EVALUE 1.40e+00; EST_HUMAN HIT: AA300352.1, EVALUE 5.20e-01
tcttcccagcttgtgtgtgtccacatgaagaggggctcaggtgctttagagctctggttttctggaagagggtctgatgggatagtgtattcatagtgaagaccataattctgatcctgaaacaggagcacctatagtatacaaaaatgatcaa

SEQ ID NO: 22611 - DNA, 105 bp, Homo sapiens
  MAP TO AC004166.4; EXPRESSED IN LUNG, SIGNAL = 2.4; EXPRESSED IN BRAIN, SIGNAL = 2.5; EXPRESSED IN BONE MARROW, SIGNAL = 2.4; EXPRESSED IN PLACENTA, SIGNAL = 2.3; EXPRESSED IN HELA, SIGNAL = 2.8; EXPRESSED IN HEART, SIGNAL = 2.1; EXPRESSED IN FETAL LIVER, SIGNAL = 2.2; EXPRESSED IN ADULT LIVER, SIGNAL = 2.2; EST_HUMAN HIT: AA740470.1, EVALUE 2.00e-52; SWISSPROT HIT: P45444, EVALUE 5.50e+00; NT HIT: U38964.1, EVALUE 1.00e-52
aactttattccaatgctaatggcagacatcaggaaggaggagaggaaccatttgtgcagatcatctagaagaacctggaccattcttgacagagctgaatacagt

SEQ ID NO: 22612 - DNA, 211 bp, Homo sapiens
  MAP TO AC004703.1; EXPRESSED IN PLACENTA, SIGNAL = 9.5; EXPRESSED IN LUNG, SIGNAL =  15; EXPRESSED IN FETAL LIVER, SIGNAL =  21; EXPRESSED IN BRAIN, SIGNAL = 9.8; EXPRESSED IN ADULT LIVER, SIGNAL =  19; EXPRESSED IN HELA, SIGNAL =  15; EXPRESSED IN HEART, SIGNAL =  13; EXPRESSED IN BONE MARROW, SIGNAL =  19; NT HIT: gi11426038, EVALUE 1.00e-115; SWISSPROT HIT: P02383, EVALUE 2.00e-25; EST_HUMAN HIT: BF244299.1, EVALUE 1.00e-110
gcttcacatacagtttgggaagcacataggcatcgaagacgctcacttcagaaatgtccctgactgctgcggcctccactatgtttcgaatgacgaatttcttaatggccttgtccttgggcacgcatcgggcacagttagtgcagcgaataggctgcacgtggccgcggccctttttggcacgaccattgttccttcttttctttgtcat

SEQ ID NO: 22613 - DNA, 237 bp, Homo sapiens
  MAP TO AC006329.2; EXPRESSED IN ADULT LIVER, SIGNAL = 9.5; EXPRESSED IN LUNG, SIGNAL = 6.1; EXPRESSED IN HEART, SIGNAL =  73; EXPRESSED IN FETAL LIVER, SIGNAL =   2; SWISSPROT HIT: Q64726, EVALUE 6.00e-27; EST_HUMAN HIT: BF677910.1, EVALUE 1.00e-116; NT HIT: X70170.1, EVALUE 1.00e-116
tgatgttgttcagggtctccataaagatgtcctccctggccttctgaacttggctctgcttctcccagtcctctactccttccacgtgtctccatggtcccaggggctcaggcttcctgtcttcactgttgtagtggaagaaggcacggccattgaggaagacagtaccctgcagcctgtgggtgcctttgccaggcctggacagcccagtgtagagataggtcagagagtaatgac

SEQ ID NO: 22614 - DNA, 376 bp, Homo sapiens
  MAP TO AC004797.1; EXPRESSED IN PLACENTA, SIGNAL = 1.7; EXPRESSED IN LUNG, SIGNAL = 1.8; EXPRESSED IN FETAL LIVER, SIGNAL =   2; EXPRESSED IN BONE MARROW, SIGNAL = 1.6; EXPRESSED IN ADULT LIVER, SIGNAL = 1.9; EXPRESSED IN HEART, SIGNAL = 1.6; EXPRESSED IN BRAIN, SIGNAL = 1.5; EST_HUMAN HIT: AI989483.1, EVALUE 0.00e+00; SWISSPROT HIT: P30852, EVALUE 2.10e+00; NT HIT: gi11425359, EVALUE 0.00e+00
attgggccacttaccaatgagccacacagccagttcttgtcaggagctggttgaaaactgtgctgtgcatgtagcaggaatggcacaagaagatagccgtcgtggtcaagtgccatcttccttttatcatggtgccaaccaagaacttgacctgtccaccaaagtgtacaaaagggaatcaggaagtccttattctgtgttagtggacaccaagatgagcaaaccgcatctccatgaaacagaagaacagccatatttcagggagacaagagcagtgtctgacgtgcatgctgttaaggaagaccgggagaattctgatgacacagaggaggaagaggaagaagtctcttacaaaagggagcagatcatagtggag

SEQ ID NO: 22615 - DNA, 77 bp, Homo sapiens
  MAP TO AC005972.1; EXPRESSED IN BONE MARROW, SIGNAL = 1.5; EXPRESSED IN ADULT LIVER, SIGNAL = 1.5; EXPRESSED IN HEART, SIGNAL = 1.5; EXPRESSED IN FETAL LIVER, SIGNAL = 1.5; EXPRESSED IN BRAIN, SIGNAL = 1.4; EXPRESSED IN PLACENTA, SIGNAL = 1.5; EXPRESSED IN LUNG, SIGNAL = 1.4; NT HIT: AJ289880.1, EVALUE 2.00e-04; EST_HUMAN HIT: N72829.1, EVALUE 6.00e-05
agaaggccctcaccagattcagtgccttgatcttggacttctcaacctctagaaccatgagccaaatcaatttattt

SEQ ID NO: 22616 - DNA, 116 bp, Homo sapiens
  MAP TO AC006095.1; EXPRESSED IN HEART, SIGNAL = 2.7; EXPRESSED IN BONE MARROW, SIGNAL = 2.7; EXPRESSED IN ADULT LIVER, SIGNAL = 2.3; EXPRESSED IN HELA, SIGNAL = 2.8; EXPRESSED IN FETAL LIVER, SIGNAL = 2.7; EXPRESSED IN BRAIN, SIGNAL =   3; EXPRESSED IN PLACENTA, SIGNAL = 2.4; EXPRESSED IN LUNG, SIGNAL = 2.8; EST_HUMAN HIT: R17879.1, EVALUE 1.50e+00; SWISSPROT HIT: P09762, EVALUE 2.40e+00
cagtgcaaaggaagcaccaaggggttcgatgggaccatttatgaagcatgtccagcaaggacttgctgacattgcgcaagatctggtggcatcccatgtctaacatctccgtggtg

SEQ ID NO: 22617 - DNA, 81 bp, Homo sapiens
  MAP TO AC004633.1; EXPRESSED IN PLACENTA, SIGNAL = 1.7; EXPRESSED IN HEART, SIGNAL = 1.4; EXPRESSED IN BONE MARROW, SIGNAL = 1.7; EXPRESSED IN ADULT LIVER, SIGNAL = 1.6; EXPRESSED IN FETAL LIVER, SIGNAL = 1.4; EXPRESSED IN LUNG, SIGNAL = 1.7; EXPRESSED IN BRAIN, SIGNAL = 1.7; EST_HUMAN HIT: AW902585.1, EVALUE 1.00e-03; NT HIT: AL163284.2, EVALUE 3.00e-03
gttggtggtaaaacactgtctccctgagaagcagacatttgaacaaagacttgaaggaggtgagggagtgagtcaagaacc

SEQ ID NO: 22618 - DNA, 88 bp, Homo sapiens
  MAP TO AC005544.1; EXPRESSED IN PLACENTA, SIGNAL = 2.2; EXPRESSED IN ADULT LIVER, SIGNAL = 3.4; EXPRESSED IN LUNG, SIGNAL = 2.1; EXPRESSED IN HEART, SIGNAL = 1.9; EXPRESSED IN FETAL LIVER, SIGNAL = 2.3; EXPRESSED IN BRAIN, SIGNAL = 1.7; EXPRESSED IN BONE MARROW, SIGNAL = 2.3; EXPRESSED IN HELA, SIGNAL = 1.8; EST_HUMAN HIT: AA359454.1, EVALUE 5.00e-09; SWISSPROT HIT: P54793, EVALUE 7.30e+00; NT HIT: AF213884.1, EVALUE 5.00e-05
acagcatatccatttacagcatggtttaacccatgttttaaacccactattgagacctactgctttgctggtgggcgggggagggggg

SEQ ID NO: 22619 - DNA, 372 bp, Homo sapiens
  MAP TO AC006226.4; EXPRESSED IN PLACENTA, SIGNAL = 4.1; EXPRESSED IN LUNG, SIGNAL = 2.8; EXPRESSED IN HELA, SIGNAL = 4.2; EXPRESSED IN FETAL LIVER, SIGNAL = 2.8; EXPRESSED IN HEART, SIGNAL = 4.8; EXPRESSED IN BRAIN, SIGNAL = 6.9; EXPRESSED IN BONE MARROW, SIGNAL = 1.8; EXPRESSED IN ADULT LIVER, SIGNAL = 2.5; SWISSPROT HIT: P08238, EVALUE 2.00e-57; EST_HUMAN HIT: BE293153.1, EVALUE 0.00e+00; NT HIT: gi11419018, EVALUE 0.00e+00
atgcctgaggaagtgcaccttggagagaaggaggtggagacttttgcctttcaggcagaaattgcccaactcatgtctcttatcatcaataccttctattccaacaaggagattttcctttgggagttgatctctaatgcttctgatgccttggacaagattcgctatgaaagcctaacagacccttccaagttggacagtggtaaagagctgaaaattgacatcatccccaatactcaggaacataccctgactttggtagacacaggcattggcatgaccaaagctgatctcataaataatttgggaaccattgccaagtttcgtacgaaagcattcatggaggctttttaggctggcgcagacatctcc

SEQ ID NO: 22620 - DNA, 147 bp, Homo sapiens
  MAP TO AC004836.2; EXPRESSED IN PLACENTA, SIGNAL = 2.8; EXPRESSED IN LUNG, SIGNAL = 3.2; EXPRESSED IN FETAL LIVER, SIGNAL = 2.3; EXPRESSED IN BRAIN, SIGNAL = 2.7; EXPRESSED IN BONE MARROW, SIGNAL = 2.6; EXPRESSED IN ADULT LIVER, SIGNAL = 2.9; EXPRESSED IN HELA, SIGNAL = 2.6; EXPRESSED IN HEART, SIGNAL = 2.7; NT HIT: AF042801.1, EVALUE 5.20e+00; SWISSPROT HIT: Q92777, EVALUE 1.40e+00
ctaggacacaggcatgtgacataggctctgtggattggatgcagtatgatgagatttcagtctggaagagtgaaaagccagggagaagctgctgcatggaattgttcttggtgatggggcggaacatggtggagggacatggaaccc

SEQ ID NO: 22621 - DNA, 180 bp, Homo sapiens
  MAP TO AC002529.1; EXPRESSED IN PLACENTA, SIGNAL = 1.4; EXPRESSED IN LUNG, SIGNAL = 1.7; EXPRESSED IN HELA, SIGNAL = 1.7; EXPRESSED IN FETAL LIVER, SIGNAL = 1.5; EXPRESSED IN BRAIN, SIGNAL = 1.6; EXPRESSED IN ADULT LIVER, SIGNAL = 1.2; EXPRESSED IN HEART, SIGNAL = 1.9; EXPRESSED IN BONE MARROW, SIGNAL = 1.4; EST_HUMAN HIT: AA355186.1, EVALUE 1.60e-01; NT HIT: X94451.1, EVALUE 2.00e-03
cccaaagaagaagagaagaaaataagaaggcaaaggaaaaggagcaggagggggaaaaaaaacagtaacaaaataactatggaatttaccattgactgcctgaatacaaattatatactgataacaattaaatctgtattcatcactctgcaaaacatgctcagctattccggtaagcaa

SEQ ID NO: 22622 - DNA, 247 bp, Homo sapiens
  MAP TO AC004664.1; EXPRESSED IN PLACENTA, SIGNAL = 4.5; EXPRESSED IN LUNG, SIGNAL = 4.9; EXPRESSED IN HELA, SIGNAL = 4.6; EXPRESSED IN HEART, SIGNAL = 4.6; EXPRESSED IN FETAL LIVER, SIGNAL = 4.6; EXPRESSED IN ADULT LIVER, SIGNAL = 4.5; EXPRESSED IN BRAIN, SIGNAL = 5.5; EXPRESSED IN BONE MARROW, SIGNAL = 4.9; EST_HUMAN HIT: AA559030.1, EVALUE 1.40e-02; NT HIT: M13792.1, EVALUE 1.50e-01; SWISSPROT HIT: P34529, EVALUE 2.10e+00
cctggagaggagctcactatctacatggggacacagatcccatacagggccatctataggtgttgtgaagcattgtggaaggaagccccctttctgggagtgcctcaggtaaactacacgaagaatagaacgttgcacctgagcctggagggccgagcagcaggctgtgtcagtgaagggtgttggaagcagaaggaacagcatgtgctcaggcttgaggtgcagtgccagtgctgtagggatttta

SEQ ID NO: 22623 - DNA, 171 bp, Homo sapiens
  MAP TO AC004169.3; EXPRESSED IN PLACENTA, SIGNAL =   1; EXPRESSED IN BRAIN, SIGNAL = 1.3; EXPRESSED IN ADULT LIVER, SIGNAL = 1.3; EXPRESSED IN HEART, SIGNAL = 1.8; EXPRESSED IN LUNG, SIGNAL =   1; EXPRESSED IN FETAL LIVER, SIGNAL = 1.3; EXPRESSED IN BONE MARROW, SIGNAL = 1.2
caccatcaccactaccaccaccatcaccactaccaccatcacctccaccatcatcactgccatcaccaccaccatcaccaccatcaccatcctcaccagcaccatcaccaccatcatcaccaacaccaccaccatcaccactactaccaccatccattcccaccaatacta

SEQ ID NO: 22624 - DNA, 148 bp, Homo sapiens
  MAP TO AC004520.1; EXPRESSED IN BONE MARROW, SIGNAL = 1.1; EXPRESSED IN BRAIN, SIGNAL = 1.3; EXPRESSED IN ADULT LIVER, SIGNAL = 1.6; EXPRESSED IN PLACENTA, SIGNAL = 1.1; EXPRESSED IN LUNG, SIGNAL = 1.3; EXPRESSED IN FETAL LIVER, SIGNAL = 1.2; EXPRESSED IN HEART, SIGNAL = 1.3; NT HIT: M33496.1, EVALUE 1.30e+00; EST_HUMAN HIT: H73101.1, EVALUE 2.00e+00; SWISSPROT HIT: P26676, EVALUE 9.00e+00
ttctcagcaggaggaaattaaggaggaccaggaccagacatctatagatctgtccgtttctagagaacaagtacattttacaggactctacaaaagacagttcgcagcactgtacttcagagcagagtcaaaagaccaagtcacgtga

SEQ ID NO: 22625 - DNA, 234 bp, Homo sapiens
  MAP TO AC006377.3; EXPRESSED IN BONE MARROW, SIGNAL = 1.9; EXPRESSED IN ADULT LIVER, SIGNAL = 1.7; EXPRESSED IN PLACENTA, SIGNAL = 1.5; EXPRESSED IN LUNG, SIGNAL = 1.3; EXPRESSED IN HELA, SIGNAL = 1.8; EXPRESSED IN FETAL LIVER, SIGNAL = 2.1; EXPRESSED IN HEART, SIGNAL = 2.7; EXPRESSED IN BRAIN, SIGNAL = 2.6; EST_HUMAN HIT: AI903153.1, EVALUE 1.00e-92; NT HIT: gi11420965, EVALUE 1.00e-128; SWISSPROT HIT: Q14123, EVALUE 2.00e-20
cattctgttgctgttctcctgatgacttctcggctttggagtttttcccacgagggttgtcacttttgtttgcccgtgttccattgacttgattcttagtttctccagacgtctttttctcagctttgccagatgcgccttcttcagcctggcttttggcttccatttccttttgctgctcctctgcggccaggcgagccttttcctctgcttccttcttggccttctcctctg

SEQ ID NO: 22626 - DNA, 195 bp, Homo sapiens
  MAP TO AC004707.1; EXPRESSED IN LUNG, SIGNAL =  16; EXPRESSED IN BRAIN, SIGNAL =  18; EXPRESSED IN PLACENTA, SIGNAL =  16; EXPRESSED IN HEART, SIGNAL =  16; EXPRESSED IN FETAL LIVER, SIGNAL =  19; EXPRESSED IN BONE MARROW, SIGNAL =  17; EXPRESSED IN ADULT LIVER, SIGNAL =  18; EXPRESSED IN HELA, SIGNAL =  19; SWISSPROT HIT: P16968, EVALUE 2.00e-01; NT HIT: gi11545913, EVALUE 1.00e-106; EST_HUMAN HIT: BF680863.1, EVALUE 1.70e-01
ggggcacagccttgggcatgaggctcccagcctggtgcaggcacaccacattggcgatctcctgctggcactgcttggtgctggcccgggccagtgcagacagtgcgtccttgcccacgatctcgcacttgggggtgaagccattgtccgtgggctggggggcgccctccacgctccctgtatctccgtgtggtg

SEQ ID NO: 22627 - DNA, 171 bp, Homo sapiens
  MAP TO AC005284.1; EXPRESSED IN PLACENTA, SIGNAL = 3.2; EXPRESSED IN LUNG, SIGNAL = 3.6; EXPRESSED IN HEART, SIGNAL = 4.2; EXPRESSED IN FETAL LIVER, SIGNAL = 4.1; EXPRESSED IN BONE MARROW, SIGNAL = 3.4; EXPRESSED IN HELA, SIGNAL = 3.2; EXPRESSED IN BRAIN, SIGNAL =   4; EXPRESSED IN ADULT LIVER, SIGNAL = 3.6; NT HIT: AF223391.1, EVALUE 9.00e-33; EST_HUMAN HIT: AI192063.1, EVALUE 1.00e-29; SWISSPROT HIT: P08548, EVALUE 7.00e-08
gacactattccacaagatagagaaagaggaaacataacccaaaaagaaaactatagactgatatccctgattagcgtagatgctaaaatccttaacaaagtactagctaatcgaattcaacaacatatcaaaaagataatccaccatgatcaagtaggtttcatatcagga

SEQ ID NO: 22628 - DNA, 214 bp, Homo sapiens
  MAP TO AC004804.1; EXPRESSED IN LUNG, SIGNAL = 1.6; EXPRESSED IN BONE MARROW, SIGNAL = 1.8; EXPRESSED IN PLACENTA, SIGNAL = 1.5; EXPRESSED IN HEART, SIGNAL = 1.7; EXPRESSED IN FETAL LIVER, SIGNAL = 1.5; EXPRESSED IN BRAIN, SIGNAL =   2; EXPRESSED IN ADULT LIVER, SIGNAL = 1.4; EST_HUMAN HIT: BE812769.1, EVALUE 5.00e-82; NT HIT: AB029004.1, EVALUE 6.00e-87; SWISSPROT HIT: P34537, EVALUE 6.80e-01
ttcatctccagaacttcctctaagtgtttccttctctctgcccgaagattagtcaagtgagtttccttttctgccagagactgctgggtggaggacagctttgctttcatggattctagttcctgctttaccttctccatggccatcagtaactcctccacctatcataaatatgggaaagagaacaacagagtgtcttgatcaatcagagtca

SEQ ID NO: 22629 - DNA, 89 bp, Homo sapiens
  MAP TO AC006238.1; EXPRESSED IN BRAIN, SIGNAL = 1.8; EXPRESSED IN BONE MARROW, SIGNAL =   1; EXPRESSED IN LUNG, SIGNAL = 1.1; EXPRESSED IN ADULT LIVER, SIGNAL = 1.1; EXPRESSED IN PLACENTA, SIGNAL = 1.4; EXPRESSED IN HELA, SIGNAL = 1.8; EXPRESSED IN HEART, SIGNAL = 1.6; EXPRESSED IN FETAL LIVER, SIGNAL = 1.5; SWISSPROT HIT: Q04235, EVALUE 9.50e+00; NT HIT: AF132028.1, EVALUE 7.30e-01; EST_HUMAN HIT: AI277492.1, EVALUE 2.00e-33
tcttttacttcttttacaccattttcatacagtgtagtattgttctggtcgtataaatactcatccatcacctttacataaacacgtac

SEQ ID NO: 22630 - DNA, 431 bp, Homo sapiens
  MAP TO AC005178.1; EXPRESSED IN LUNG, SIGNAL =   2; EXPRESSED IN ADULT LIVER, SIGNAL = 2.3; EXPRESSED IN PLACENTA, SIGNAL =   2; EXPRESSED IN HELA, SIGNAL = 2.1; EXPRESSED IN HEART, SIGNAL = 2.1; EXPRESSED IN FETAL LIVER, SIGNAL = 2.3; EXPRESSED IN BRAIN, SIGNAL = 1.9; EXPRESSED IN BONE MARROW, SIGNAL = 1.9; EST_HUMAN HIT: BE621748.1, EVALUE 2.60e-02; SWISSPROT HIT: Q00451, EVALUE 9.90e-02
cttccatcatcaaatgccccttgcttcaaagacccatctcataccctgagcagcgctttgctccccaaacatgccctgaggtcaaccagtcccgccgcaggggacccagccaacctcctgcttcaagtctcaagtcagtctgctctaaaaacaacctcgtggccccagagcacagccacgaaaacccagatatgctaaacttctccccacccccacaaacacacacacacacaccattgtgcaaggacaacactggcccacaggctcttccttcacacaagagtccagcaacacctatagctgagccaaagcaagtgcaacttggctcattccaatcctatgtggccctccgctcatctctgagcacgggcccatcccagaccctactgctcagcatatttgctttttctcaggtgattttctccttctga

SEQ ID NO: 22631 - DNA, 157 bp, Homo sapiens
  MAP TO AC002537.1; EXPRESSED IN LUNG, SIGNAL = 0.83; EXPRESSED IN BRAIN, SIGNAL = 0.98; EXPRESSED IN BONE MARROW, SIGNAL = 0.92; EXPRESSED IN ADULT LIVER, SIGNAL = 0.97; EXPRESSED IN PLACENTA, SIGNAL = 0.88; EXPRESSED IN HEART, SIGNAL = 1.7; EXPRESSED IN FETAL LIVER, SIGNAL = 0.85; SWISSPROT HIT: Q9Z1G4, EVALUE 3.00e-18; NT HIT: gi11426166, EVALUE 2.00e-61; EST_HUMAN HIT: AU126143.1, EVALUE 3.00e-61
gcgcatgagcgaggctgagggcccagagccgcaagtaggaggcagtgttggagatgcagcccaggcagtactcgatggtgtggatggcctggtggaccatggtgtccccaaagtcaaactgtcgtgggaggaaaccagagagaagatataaggctag

SEQ ID NO: 22632 - DNA, 181 bp, Homo sapiens
  MAP TO AC004217.1; EXPRESSED IN LUNG, SIGNAL = 2.8; EXPRESSED IN HELA, SIGNAL = 2.5; EXPRESSED IN FETAL LIVER, SIGNAL = 2.4; EXPRESSED IN BRAIN, SIGNAL = 2.5; EXPRESSED IN BONE MARROW, SIGNAL = 2.5; EXPRESSED IN ADULT LIVER, SIGNAL = 2.4; EXPRESSED IN PLACENTA, SIGNAL = 2.7; EXPRESSED IN HEART, SIGNAL = 2.2; SWISSPROT HIT: P46907, EVALUE 3.90e+00; NT HIT: AL161508.2, EVALUE 4.20e-01; EST_HUMAN HIT: BE566486.1, EVALUE 1.00e-97
gcgatgtgcatacaccaactcaatcttcttgccaccaaccccaatcttccaatcacaagtgtcttgggcaagcagcatccaattgaagcacatcatcttagcagtatttgtgacattatggagaaggccatggttaatggagatacctgtattatacgctgcattctcgttgtctttcagg

SEQ ID NO: 22633 - DNA, 81 bp, Homo sapiens
  MAP TO AC002479.1; EXPRESSED IN PLACENTA, SIGNAL = 2.1; EXPRESSED IN ADULT LIVER, SIGNAL = 1.8; EXPRESSED IN LUNG, SIGNAL =   2; EXPRESSED IN HELA, SIGNAL =   2; EXPRESSED IN HEART, SIGNAL = 2.2; EXPRESSED IN FETAL LIVER, SIGNAL =   2; EXPRESSED IN BRAIN, SIGNAL = 2.4; EXPRESSED IN BONE MARROW, SIGNAL =   2; EST_HUMAN HIT: BE162649.1, EVALUE 9.70e-01; NT HIT: AL161588.2, EVALUE 1.60e-01
gacgtagaggaacatactcatcccgtctgagccccacatctcctggctgtgaaatccatggcttcttctcaggaggagaat

SEQ ID NO: 22634 - DNA, 95 bp, Homo sapiens
  MAP TO AC005293.1; EXPRESSED IN HELA, SIGNAL = 3.3; EXPRESSED IN HEART, SIGNAL = 4.3; EXPRESSED IN BRAIN, SIGNAL = 3.2; EXPRESSED IN BONE MARROW, SIGNAL = 3.1; EXPRESSED IN PLACENTA, SIGNAL =  48; EXPRESSED IN LUNG, SIGNAL = 3.4; EXPRESSED IN FETAL LIVER, SIGNAL = 3.9; EXPRESSED IN ADULT LIVER, SIGNAL = 4.1; NT HIT: X61033.1, EVALUE 2.00e-01; SWISSPROT HIT: P07357, EVALUE 9.50e+00
aggcaggcagaagggtcctggagctgctgaagctcttggagaagtgagtttctgcactgtcgatgctctgggccccactctcagcatagcccaag

SEQ ID NO: 22635 - DNA, 154 bp, Homo sapiens
  MAP TO AC005348.1; EXPRESSED IN PLACENTA, SIGNAL =  26; EXPRESSED IN LUNG, SIGNAL =  19; EXPRESSED IN HEART, SIGNAL =  18; EXPRESSED IN BRAIN, SIGNAL =  27; EXPRESSED IN ADULT LIVER, SIGNAL =  19; EXPRESSED IN FETAL LIVER, SIGNAL =  27; EXPRESSED IN BONE MARROW, SIGNAL =  20; EXPRESSED IN HELA, SIGNAL =  15; EST_HUMAN HIT: BF245995.1, EVALUE 3.30e-02; SWISSPROT HIT: Q09763, EVALUE 4.00e+00; NT HIT: U20940.1, EVALUE 1.40e+00
agacaaaagtcagggagcaaaagcagacaaaagggattctgtttccgaataaccaaggattgactgtcctgtcctacccagtcctgctgtataaaatcatagatgtcttcgaagttaacgggagctcagagtcacagagtctgctcctctcatt

SEQ ID NO: 22636 - DNA, 135 bp, Homo sapiens
  MAP TO AC005549.1; EXPRESSED IN FETAL LIVER, SIGNAL = 1.4; EXPRESSED IN BONE MARROW, SIGNAL = 1.3; EXPRESSED IN ADULT LIVER, SIGNAL = 1.4; EXPRESSED IN PLACENTA, SIGNAL = 1.5; EXPRESSED IN LUNG, SIGNAL = 1.4; EXPRESSED IN HEART, SIGNAL = 1.4; EXPRESSED IN BRAIN, SIGNAL = 1.3; EST_HUMAN HIT: AF035746.1, EVALUE 1.10e-01; SWISSPROT HIT: P27782, EVALUE 1.40e+00; NT HIT: U16263.1, EVALUE 1.20e+00
caggagcaagcaggtatttctgattgacctcagtgatggtcctcaccacacctgctctttagatctctgggaagatgagagggtcaagctcctctgtggactctctcttcatgccctgcccatggatgcaccaat

SEQ ID NO: 22637 - DNA, 142 bp, Homo sapiens
  MAP TO AC006381.2; EXPRESSED IN LUNG, SIGNAL =  21; EXPRESSED IN HELA, SIGNAL =  26; EXPRESSED IN PLACENTA, SIGNAL =  18; EXPRESSED IN HEART, SIGNAL =  24; EXPRESSED IN FETAL LIVER, SIGNAL =  28; EXPRESSED IN BRAIN, SIGNAL =  28; EXPRESSED IN BONE MARROW, SIGNAL =  26; EXPRESSED IN ADULT LIVER, SIGNAL =  22; NT HIT: U45983.1, EVALUE 1.00e-16; EST_HUMAN HIT: AA481166.1, EVALUE 4.00e-14
ctacatcgccacctttttcatcatcatcactgaatacagtttcaggccagatattgtgccaggcatgcacaactgtgtctttagtcactgtgttcccagcatttgcaacagcatatacagcacccttcatgctaaacttttt

SEQ ID NO: 22638 - DNA, 159 bp, Homo sapiens
  MAP TO AC004674.1; EXPRESSED IN LUNG, SIGNAL = 5.6; EXPRESSED IN BRAIN, SIGNAL = 5.5; EXPRESSED IN BONE MARROW, SIGNAL = 5.4; EXPRESSED IN PLACENTA, SIGNAL = 5.6; EXPRESSED IN HELA, SIGNAL = 5.4; EXPRESSED IN HEART, SIGNAL = 5.1; EXPRESSED IN FETAL LIVER, SIGNAL = 4.9; EXPRESSED IN ADULT LIVER, SIGNAL = 5.7; SWISSPROT HIT: P19965, EVALUE 6.80e+00; EST_HUMAN HIT: AI819424.1, EVALUE 2.00e-06; NT HIT: U50871.1, EVALUE 6.00e-06
aatgagatccgtggtattaatgagtgtgatgctaaaatattgtatgaggaaaatctgcatagctcaacaaaccaatatattcctaacaaccaacatggtgttacaaaattgtgcatgggtaaaggatacattcaaaatgcaagatgtgccaatgggttt

SEQ ID NO: 22639 - DNA, 141 bp, Homo sapiens
  MAP TO AC002350.1; EXPRESSED IN PLACENTA, SIGNAL = 2.6; EXPRESSED IN LUNG, SIGNAL = 1.8; EXPRESSED IN HELA, SIGNAL = 2.6; EXPRESSED IN FETAL LIVER, SIGNAL = 5.5; EXPRESSED IN BONE MARROW, SIGNAL = 2.9; EXPRESSED IN ADULT LIVER, SIGNAL = 2.2; EXPRESSED IN HEART, SIGNAL = 2.9; EXPRESSED IN BRAIN, SIGNAL = 3.6; EST_HUMAN HIT: AW750372.1, EVALUE 4.00e-63; NT HIT: AF109718.1, EVALUE 8.00e-02; SWISSPROT HIT: P38797, EVALUE 5.40e-02
aaacctgggcgattcaggcttcctggttgtcaggggtggtgaagtcgtgcaccgatcagatgagcagcagcattacttcaacactccattccagctctcaatcgctccccctgaagccgagggagtcgtcttgagcgacag

SEQ ID NO: 22640 - DNA, 209 bp, Homo sapiens
  MAP TO AC004583.1; EXPRESSED IN ADULT LIVER, SIGNAL =   2; EXPRESSED IN PLACENTA, SIGNAL = 2.3; EXPRESSED IN HELA, SIGNAL = 2.5; EXPRESSED IN HEART, SIGNAL =   3; EXPRESSED IN LUNG, SIGNAL = 2.7; EXPRESSED IN FETAL LIVER, SIGNAL = 4.7; EXPRESSED IN BRAIN, SIGNAL = 3.1; EXPRESSED IN BONE MARROW, SIGNAL = 2.9; NT HIT: gi11433046, EVALUE 2.00e-71; SWISSPROT HIT: P40223, EVALUE 6.50e+00; EST_HUMAN HIT: AW947061.1, EVALUE 8.00e-78
gtgtggaagccttggtcgggtggctgctggaccactccgacatacaggtcacggagctctcagatgcagacacggtgtccgacgagtattctgacgaggaggtggtggaggacgtggatgatgccgcctactccatggtcagtgcctcccatgtgaccgcccgcacctgggccgctgtccgtctagcgctctaacagtcttacaccttg

SEQ ID NO: 22641 - DNA, 175 bp, Homo sapiens
  MAP TO AB003151.1; EXPRESSED IN LUNG, SIGNAL = 4.6; EXPRESSED IN FETAL LIVER, SIGNAL = 5.2; EXPRESSED IN BONE MARROW, SIGNAL = 4.9; EXPRESSED IN HELA, SIGNAL = 5.6; EXPRESSED IN BRAIN, SIGNAL =   4; EXPRESSED IN ADULT LIVER, SIGNAL = 4.2; EXPRESSED IN PLACENTA, SIGNAL = 3.8; EXPRESSED IN HEART, SIGNAL = 4.2; SWISSPROT HIT: P38732, EVALUE 3.90e+00; EST_HUMAN HIT: AA887484.1, EVALUE 5.00e-94; NT HIT: gi11526228, EVALUE 3.00e-94
ctcttgagacataaacacaagcatgaggattatggacagaaacaaatccgtattccaggaacagccgttgattatcgtgagggccgtaacagatgaatacctcttcatgctttctccaacgtgaagtcgttctaatttcgtaagaatgagtttcttcattaaacgctgcttttac

SEQ ID NO: 22642 - DNA, 94 bp, Homo sapiens
  MAP TO AC006143.1; EXPRESSED IN BRAIN, SIGNAL = 1.3; EXPRESSED IN BONE MARROW, SIGNAL =   1; EXPRESSED IN ADULT LIVER, SIGNAL = 2.1; EXPRESSED IN HELA, SIGNAL = 2.8; EXPRESSED IN FETAL LIVER, SIGNAL = 1.6; EXPRESSED IN HEART, SIGNAL = 2.8; EXPRESSED IN PLACENTA, SIGNAL = 1.5; EXPRESSED IN LUNG, SIGNAL = 1.1; NT HIT: AE000868.1, EVALUE 2.00e-01; EST_HUMAN HIT: AA779977.1, EVALUE 7.30e-02
tgcccctggagctgcagctcgaatgtgctccttgcctctgttctcagcagtttccaaattggtatcagtcctatcagcagtctatgtcaagtgg

SEQ ID NO: 22643 - DNA, 188 bp, Homo sapiens
  MAP TO AC001237.1; EXPRESSED IN HELA, SIGNAL = 3.9; EXPRESSED IN HEART, SIGNAL = 3.2; EXPRESSED IN BRAIN, SIGNAL =   4; EXPRESSED IN ADULT LIVER, SIGNAL = 4.1; EXPRESSED IN LUNG, SIGNAL = 4.5; EXPRESSED IN FETAL LIVER, SIGNAL =   4; EXPRESSED IN BONE MARROW, SIGNAL = 3.9; EXPRESSED IN PLACENTA, SIGNAL = 3.8; SWISSPROT HIT: P98105, EVALUE 2.00e-01; EST_HUMAN HIT: AV748559.1, EVALUE 1.00e-36; NT HIT: AF310105.1, EVALUE 9.00e-92
tgtgatgagagaagcggtgaccgttgagattgaattctgtgtgtgggaccagttcctgggtgagatcaacccacagcacagctggatggtggcagggcctctgctggacatcaaggctgagcctggagctgtggaagctgtgcacctccctcactttgtggctctccaaggtaaacaacagggaagga

SEQ ID NO: 22644 - DNA, 94 bp, Homo sapiens
  MAP TO AC006070.1; EXPRESSED IN BRAIN, SIGNAL = 1.5; EXPRESSED IN ADULT LIVER, SIGNAL = 1.2; EXPRESSED IN HEART, SIGNAL = 1.3; EXPRESSED IN BONE MARROW, SIGNAL = 1.3; EXPRESSED IN LUNG, SIGNAL = 1.5; EXPRESSED IN FETAL LIVER, SIGNAL = 1.4; EXPRESSED IN PLACENTA, SIGNAL = 1.3; NT HIT: AL163280.2, EVALUE 1.00e-18; EST_HUMAN HIT: AW811652.1, EVALUE 2.00e-17
ggctcgcttcttccgtgccccactgctcacacttctaggggaagcatgcagatgggcaggctttggggctctgaccccacggcagcgtctaggg

SEQ ID NO: 22645 - DNA, 249 bp, Homo sapiens
  MAP TO AC004682.1; EXPRESSED IN PLACENTA, SIGNAL = 2.1; EXPRESSED IN LUNG, SIGNAL = 2.1; EXPRESSED IN HELA, SIGNAL =   2; EXPRESSED IN FETAL LIVER, SIGNAL = 1.9; EXPRESSED IN BRAIN, SIGNAL = 2.3; EXPRESSED IN ADULT LIVER, SIGNAL = 2.2; EXPRESSED IN HEART, SIGNAL = 2.1; EXPRESSED IN BONE MARROW, SIGNAL = 1.9; EST_HUMAN HIT: AU158225.1, EVALUE 8.90e-01; NT HIT: AF092090.1, EVALUE 7.00e-19; SWISSPROT HIT: Q10022, EVALUE 5.70e-01
gacaagaagcaagcacaggcattagcattcgaggagtcagaggtggaatttgggtccagtaaacagtgtcatctgagacaactccagcaactgaagaaaaaattgctggtccttcaacaagaactggagtttcacacagaggagttgcagacttcttactattctctccgccagtatcagtccatcctagagaagcagacttccgacctggttcttctgcaccatcactgcaaactgaaagaagatgag

SEQ ID NO: 22646 - DNA, 151 bp, Homo sapiens
  MAP TO AC002464.1; EXPRESSED IN LUNG, SIGNAL = 0.45; EXPRESSED IN ADULT LIVER, SIGNAL = 0.97; EXPRESSED IN HEART, SIGNAL = 4.7; EXPRESSED IN BRAIN, SIGNAL = 0.69; EXPRESSED IN BONE MARROW, SIGNAL = 0.68; NT HIT: AL163280.2, EVALUE 6.00e-09; SWISSPROT HIT: Q03696, EVALUE 3.10e+00; EST_HUMAN HIT: AW468468.1, EVALUE 1.00e-17
caccaaactctccttgagaaaccgtagcctccaaattttctgggaggctgatttgagtaataataaaactttggtctcctatgtagctggctctatgtgtattaaactcttcctctattgcaattcccctgccttggtaagtcggctttat

SEQ ID NO: 22647 - DNA, 221 bp, Homo sapiens
  MAP TO AC004586.1; EXPRESSED IN FETAL LIVER, SIGNAL = 2.8; EXPRESSED IN BONE MARROW, SIGNAL = 2.7; EXPRESSED IN LUNG, SIGNAL = 2.6; EXPRESSED IN BRAIN, SIGNAL = 2.6; EXPRESSED IN ADULT LIVER, SIGNAL = 2.9; EXPRESSED IN PLACENTA, SIGNAL = 2.4; EXPRESSED IN HELA, SIGNAL = 2.4; EXPRESSED IN HEART, SIGNAL = 2.8; EST_HUMAN HIT: AW748687.1, EVALUE 5.00e-02; NT HIT: X06292.1, EVALUE 1.00e-119; SWISSPROT HIT: P07332, EVALUE 1.00e-36
ctccctccaccgctgcagctcattccggaggtgcagaagcccctgcatgagcagctgtggtaccatggggccatcccgagggcagaggtggctgagctgctggtgcactctggggacttcctggtgcgggagagccagggcaagcaggagtacgtgctgtcggtgctgtgggatggtctgccccggcacttcatcatccagtccttggatgtgagtggggc

SEQ ID NO: 22648 - DNA, 112 bp, Homo sapiens
  MAP TO AC004141.1; EXPRESSED IN LUNG, SIGNAL =  12; EXPRESSED IN PLACENTA, SIGNAL =  13; EXPRESSED IN HEART, SIGNAL =  12; EXPRESSED IN FETAL LIVER, SIGNAL =  12; EXPRESSED IN BRAIN, SIGNAL =  13; EXPRESSED IN BONE MARROW, SIGNAL =  13; EXPRESSED IN HELA, SIGNAL =  13; EXPRESSED IN ADULT LIVER, SIGNAL =  11; SWISSPROT HIT: Q64751, EVALUE 1.80e+00; NT HIT: AB023177.1, EVALUE 8.00e-57; EST_HUMAN HIT: W29120.1, EVALUE 5.60e+00
gatgtttccacaagcctgccattttgatcgtagcatgccattgcttggtaacgatatccttgtccgcattccttgatgtctccttgtactttcattcccagcaacacttcca

SEQ ID NO: 22649 - DNA, 248 bp, Homo sapiens
  MAP TO AC002468.1; EXPRESSED IN LUNG, SIGNAL = 1.5; EXPRESSED IN HELA, SIGNAL =   5; EXPRESSED IN BONE MARROW, SIGNAL = 1.4; EXPRESSED IN ADULT LIVER, SIGNAL = 2.3; EXPRESSED IN PLACENTA, SIGNAL =   2; EXPRESSED IN HEART, SIGNAL = 2.1; EXPRESSED IN FETAL LIVER, SIGNAL = 1.5; EXPRESSED IN BRAIN, SIGNAL = 1.6; SWISSPROT HIT: P11455, EVALUE 6.50e+00; NT HIT: AF065440.2, EVALUE 5.90e-01
caaggctgcttctctatttggatggagatctgtgaccaagaccaaaccaaacttgtggtctgcttaattcacacccggccacacatcgtggctgaagcacaggacagcggcgatctcaccacttgcaggagcatttcaggagccaagacaaccagctcctctgtatcaccatggttctcgagcttcttcctccttggcacatctggtgacaacatttaaacccacaagagattctagtgggcgtcctg

SEQ ID NO: 22650 - DNA, 138 bp, Homo sapiens
  MAP TO AC004485.1; EXPRESSED IN ADULT LIVER, SIGNAL = 1.4; EXPRESSED IN PLACENTA, SIGNAL = 1.3; EXPRESSED IN HEART, SIGNAL = 1.3; EXPRESSED IN LUNG, SIGNAL = 1.3; EXPRESSED IN FETAL LIVER, SIGNAL = 2.6; EXPRESSED IN BRAIN, SIGNAL = 1.3; EXPRESSED IN BONE MARROW, SIGNAL = 2.7; EST_HUMAN HIT: AW983549.1, EVALUE 3.10e-01; NT HIT: AF158101.3, EVALUE 1.00e+00
tgagatgtttccttctcccctcctccaatctccgcgccatcagcccctgttccctgtgatatgcattctcctttgctgcaataagtgagagaaagtcatctaacttgttcaagtacagctgtttctggtggtcttttg

SEQ ID NO: 22651 - DNA, 193 bp, Homo sapiens
  MAP TO AC005500.1; EXPRESSED IN PLACENTA, SIGNAL = 8.5; EXPRESSED IN HELA, SIGNAL = 8.4; EXPRESSED IN BRAIN, SIGNAL = 9.5; EXPRESSED IN BONE MARROW, SIGNAL =  24; EXPRESSED IN ADULT LIVER, SIGNAL = 7.8; EXPRESSED IN HEART, SIGNAL = 8.5; EXPRESSED IN LUNG, SIGNAL = 8.7; EXPRESSED IN FETAL LIVER, SIGNAL = 8.3; SWISSPROT HIT: Q04652, EVALUE 2.00e-06; NT HIT: AJ239047.1, EVALUE 1.80e+00; EST_HUMAN HIT: AI768797.1, EVALUE 1.00e-104
gtatgacccacggcacaaccgctggttccagatccagtccctgcagcaggagcacgccgacctgtccgtgtgtgttgtaggcaggtacatctacgctgtggcgggccgtgactaccacaatgacctgaatgctgtggagcgctacgaccctgccaccaactcctgggcatacgtggccccactcaagagggag

SEQ ID NO: 22652 - DNA, 233 bp, Homo sapiens
  MAP TO AC005950.1; EXPRESSED IN BRAIN, SIGNAL = 1.8; EXPRESSED IN BONE MARROW, SIGNAL =   2; EXPRESSED IN ADULT LIVER, SIGNAL = 1.6; EXPRESSED IN HELA, SIGNAL = 1.9; EXPRESSED IN HEART, SIGNAL = 1.8; EXPRESSED IN FETAL LIVER, SIGNAL = 2.3; EXPRESSED IN PLACENTA, SIGNAL = 1.5; EXPRESSED IN LUNG, SIGNAL = 1.8; EST_HUMAN HIT: BE409676.1, EVALUE 7.00e-94; NT HIT: gi11440670, EVALUE 4.00e-94; SWISSPROT HIT: P19071, EVALUE 4.30e+00
ctcctgggtctccctgctgcgcctgtccaggatgcagggagctcgggctcccagggaccagggccagtcccccggcaggatgagcgctctaggccggtcctcggtcatcttgcttacctacgtgctggccgccacagaacttacctgcctcttcatgcagttctccatcgtgccagtgagtaacacaccccagcccctgcagccccagccagggctgaaccgctgttcctcct

SEQ ID NO: 22653 - DNA, 224 bp, Homo sapiens
  MAP TO AC006075.1; EXPRESSED IN HELA, SIGNAL =   2; EXPRESSED IN FETAL LIVER, SIGNAL = 2.1; EXPRESSED IN PLACENTA, SIGNAL = 1.9; EXPRESSED IN LUNG, SIGNAL = 2.1; EXPRESSED IN HEART, SIGNAL = 2.3; EXPRESSED IN BRAIN, SIGNAL = 2.6; EXPRESSED IN BONE MARROW, SIGNAL =   2; EXPRESSED IN ADULT LIVER, SIGNAL = 1.9; NT HIT: gi8922072, EVALUE 1.00e-123; SWISSPROT HIT: Q09457, EVALUE 8.00e-03; EST_HUMAN HIT: AU118435.1, EVALUE 1.00e-123
ctgcccctgacacaatggctcagccttacgcttcggcccagtttgctcccccgcagaacggtatccccgcggaatacacggcccctcatccccaccccgcgccagagtacacaggccagaccacggttcccgagcacacattaaacctgtaccctcccgcccagacgcactccgagcagagcccggcggacacgagcgctcagaccgtctctggcaccgccaca

SEQ ID NO: 22654 - DNA, 114 bp, Homo sapiens
  MAP TO AC002365.1; EXPRESSED IN PLACENTA, SIGNAL =   1; EXPRESSED IN LUNG, SIGNAL = 0.91; EXPRESSED IN FETAL LIVER, SIGNAL = 1.2; EXPRESSED IN ADULT LIVER, SIGNAL = 0.94; EXPRESSED IN HEART, SIGNAL = 1.5; EXPRESSED IN BRAIN, SIGNAL = 1.6; EXPRESSED IN BONE MARROW, SIGNAL = 1.2; EST_HUMAN HIT: BF057621.1, EVALUE 7.00e-58; SWISSPROT HIT: Q13796, EVALUE 9.00e-15; NT HIT: gi11421330, EVALUE 5.00e-58
actggctggagatgagatcgtcggcatcaatgacattggtctctcagggtttagacaggaagcgatttgcctggtgaaggggtcccataagaccctgaagctggtcgtcaaaag

SEQ ID NO: 22655 - DNA, 221 bp, Homo sapiens
  MAP TO AC004590.1; EXPRESSED IN LUNG, SIGNAL = 4.1; EXPRESSED IN FETAL LIVER, SIGNAL = 4.9; EXPRESSED IN BRAIN, SIGNAL = 4.7; EXPRESSED IN BONE MARROW, SIGNAL =   5; EXPRESSED IN ADULT LIVER, SIGNAL = 4.5; EXPRESSED IN HELA, SIGNAL = 4.3; EXPRESSED IN PLACENTA, SIGNAL =   4; EXPRESSED IN HEART, SIGNAL = 4.3; SWISSPROT HIT: O15438, EVALUE 2.00e-31; NT HIT: gi9955971, EVALUE 1.00e-114; EST_HUMAN HIT: AW974193.1, EVALUE 1.00e-119
gtaaagcaaatgaaattgaaggactcgcgcatcaagctgatgagtgagatcctgaacggcatcaaggtgctgaagctgtacgcctgggagcccagcttcctgaagcaggtggagggcatcaggcagggtgagctccagctgctgcgcacggcggcctacctccacaccacaaccaccttcacctggatgtgcagccccttcctggtgaggcttggcacagg

SEQ ID NO: 22656 - DNA, 173 bp, Homo sapiens
  MAP TO AC002302.1; EXPRESSED IN ADULT LIVER, SIGNAL =  31; EXPRESSED IN LUNG, SIGNAL =  38; EXPRESSED IN HEART, SIGNAL =  28; EXPRESSED IN FETAL LIVER, SIGNAL =  30; EXPRESSED IN BRAIN, SIGNAL =  33; EXPRESSED IN BONE MARROW, SIGNAL =  32; EXPRESSED IN PLACENTA, SIGNAL =  34; EXPRESSED IN HELA, SIGNAL =  31; NT HIT: gi11545810, EVALUE 3.00e-63; SWISSPROT HIT: Q99653, EVALUE 1.00e-11; EST_HUMAN HIT: AA298640.1, EVALUE 9.00e-31
gttctccgtctgatggttggggtacaggtgacagaagagcagctggagaacatcgctgaccgcacggtgcaggaggctgatgaagatggggatggggctgtgtccttcgtggagttcaccaaggtcagagtgcccttggggattggggagttgagatcaggagttctggggca

SEQ ID NO: 22657 - DNA, 145 bp, Homo sapiens
  MAP TO AC004148.1; EXPRESSED IN PLACENTA, SIGNAL = 3.3; EXPRESSED IN LUNG, SIGNAL = 2.7; EXPRESSED IN FETAL LIVER, SIGNAL = 3.5; EXPRESSED IN BONE MARROW, SIGNAL = 3.3; EXPRESSED IN ADULT LIVER, SIGNAL = 2.7; EXPRESSED IN HELA, SIGNAL = 3.3; EXPRESSED IN HEART, SIGNAL = 2.9; EXPRESSED IN BRAIN, SIGNAL = 3.2; SWISSPROT HIT: P20095, EVALUE 4.00e-11; EST_HUMAN HIT: AA581028.1, EVALUE 5.00e-10
gttctcttctcatctgagactctagtagcaagagagatggcagctactcgacgaggctgggtcacagcaatgatgccctggcggctgatccctccttcatacaggtactgagggatctgagttgtcttcccagagccagtttccc

SEQ ID NO: 22658 - DNA, 138 bp, Homo sapiens
  MAP TO AC002478.1; EXPRESSED IN BONE MARROW, SIGNAL = 1.8; EXPRESSED IN PLACENTA, SIGNAL = 2.1; EXPRESSED IN LUNG, SIGNAL = 1.9; EXPRESSED IN HELA, SIGNAL = 1.9; EXPRESSED IN HEART, SIGNAL = 2.2; EXPRESSED IN FETAL LIVER, SIGNAL = 1.5; EXPRESSED IN ADULT LIVER, SIGNAL = 2.6; EXPRESSED IN BRAIN, SIGNAL = 2.8; EST_HUMAN HIT: AW971857.1, EVALUE 2.00e-12; NT HIT: AF177765.1, EVALUE 4.80e+00; SWISSPROT HIT: P39157, EVALUE 1.80e+00
atcaaacaaagagggcagaaggaaacttttggaggtgattgaaatgattatggtgttgattgtggtgatagcttcacaggtgtacacttatctccaaactcatcaagttgtgtgcattaaagatgcacagcgtttcaa

SEQ ID NO: 22659 - DNA, 157 bp, Homo sapiens
  MAP TO AC004499.1; EXPRESSED IN FETAL LIVER, SIGNAL = 1.7; EXPRESSED IN BONE MARROW, SIGNAL = 1.8; EXPRESSED IN PLACENTA, SIGNAL = 1.6; EXPRESSED IN LUNG, SIGNAL = 1.7; EXPRESSED IN BRAIN, SIGNAL = 1.7; EXPRESSED IN ADULT LIVER, SIGNAL = 1.5; EXPRESSED IN HELA, SIGNAL = 1.6; EXPRESSED IN HEART, SIGNAL = 1.6; NT HIT: Y10196.1, EVALUE 3.60e-01
gattgcgaacggcaatgtgtctggagcagttgtcagcccaggagaagggaacaagacaaagagggtaggaaacagaagactggaaacattttcttattttttctctgaatctctaggagttgatatgagatccttttctgaatacaggaaaccagag

SEQ ID NO: 22660 - DNA, 86 bp, Homo sapiens
  MAP TO AC005291.1; EXPRESSED IN PLACENTA, SIGNAL = 5.5; EXPRESSED IN HEART, SIGNAL =  19; EXPRESSED IN ADULT LIVER, SIGNAL =   5; EXPRESSED IN LUNG, SIGNAL = 7.3; EXPRESSED IN FETAL LIVER, SIGNAL = 5.7; EXPRESSED IN BRAIN, SIGNAL = 5.3; EXPRESSED IN BONE MARROW, SIGNAL = 6.9; EXPRESSED IN HELA, SIGNAL = 5.7; NT HIT: Z38133.1, EVALUE 2.00e-32; EST_HUMAN HIT: BF576813.1, EVALUE 3.00e-16
cctgaaaagggcagacacagtctggaaagaagagccctttttcttagcacctttcttcgcgctgctatctgaggtaaaaagaaaac

SEQ ID NO: 22661 - DNA, 294 bp, Homo sapiens
  MAP TO AC002308.1; EXPRESSED IN LUNG, SIGNAL = 1.4; EXPRESSED IN BRAIN, SIGNAL = 1.9; EXPRESSED IN BONE MARROW, SIGNAL = 1.2; EXPRESSED IN ADULT LIVER, SIGNAL = 1.5; EXPRESSED IN PLACENTA, SIGNAL = 1.8; EXPRESSED IN HEART, SIGNAL = 1.4; EXPRESSED IN FETAL LIVER, SIGNAL = 1.1; NT HIT: X14616.1, EVALUE 0.00e+00; EST_HUMAN HIT: AW406348.1, EVALUE 0.00e+00; SWISSPROT HIT: P01705, EVALUE 4.00e-45
ctgcctccgtgtctgggtctcctggacagtcgatcaccatctcctgcactggaaccagcagtgatgttgggagttataaccttgtctcctggtaccaacagcacccaggcaaagcccccaaactcatgatttatgagggcagtaagcggccctcaggggtttctaatcgcttctctggctccaagtctggcaacacggcctccctgacaatctctgggctccaggctgaggacgaggctgattattactgctgctcatatgcaggtagtagcactttccacagtggtccaagtt

SEQ ID NO: 22662 - DNA, 140 bp, Homo sapiens
  MAP TO AC004594.1; EXPRESSED IN PLACENTA, SIGNAL = 5.5; EXPRESSED IN LUNG, SIGNAL = 6.2; EXPRESSED IN BRAIN, SIGNAL = 6.3; EXPRESSED IN ADULT LIVER, SIGNAL = 7.1; EXPRESSED IN HELA, SIGNAL = 6.2; EXPRESSED IN HEART, SIGNAL = 7.6; EXPRESSED IN FETAL LIVER, SIGNAL = 6.4; EXPRESSED IN BONE MARROW, SIGNAL = 6.4; NT HIT: AB046811.1, EVALUE 2.00e-73
tcagaagaccttttttggaagcttgatgcactgcaaatgtttgtctttgatctgcactggccagaacaggaatttgcccaccacttagagcaaagacttaaactaatggccagtgatatgctagaggcctgtgtcaaaag

SEQ ID NO: 22663 - DNA, 158 bp, Homo sapiens
  MAP TO AC004160.1; EXPRESSED IN PLACENTA, SIGNAL = 4.5; EXPRESSED IN HELA, SIGNAL = 4.8; EXPRESSED IN HEART, SIGNAL = 5.6; EXPRESSED IN FETAL LIVER, SIGNAL = 6.4; EXPRESSED IN BRAIN, SIGNAL = 5.6; EXPRESSED IN BONE MARROW, SIGNAL = 5.1; EXPRESSED IN LUNG, SIGNAL =   4; EXPRESSED IN ADULT LIVER, SIGNAL = 4.3; EST_HUMAN HIT: AU117147.1, EVALUE 1.40e-01; NT HIT: gi6755816, EVALUE 1.40e+00
tgtagcatagatcacctgaactccctttccatctggcttctcattgagtcttggtaccagaagaaatggtaggaaatctgaaagcaggagaatagaatggttgagagtatttgtttcccctatcttctgtccttcctgcattgccacagtttgttact

SEQ ID NO: 22664 - DNA, 217 bp, Homo sapiens
  MAP TO AC006080.1; EXPRESSED IN LUNG, SIGNAL = 9.8; EXPRESSED IN FETAL LIVER, SIGNAL =  16; EXPRESSED IN BRAIN, SIGNAL =  15; EXPRESSED IN ADULT LIVER, SIGNAL =  17; EXPRESSED IN PLACENTA, SIGNAL =  19; EXPRESSED IN BONE MARROW, SIGNAL =  17; EXPRESSED IN HEART, SIGNAL =  13; EXPRESSED IN HELA, SIGNAL =  15; SWISSPROT HIT: P37846, EVALUE 2.20e+00; NT HIT: AB031326.1, EVALUE 1.30e-01
atcaaaaatccaaaggtaaatttgccactatatgtagctgaaatcaggtccataaacaatgcggtcaaaaatcttactctctcttcatttttcagttttgctttccttagtttggcttcattctccaaggttcttaaacatggagccttaaaagatactgcacaccaagtagctccaagtttacttgtctttacaggcaatgatcatcgtgaaaaaa

SEQ ID NO: 22665 - DNA, 91 bp, Homo sapiens
  MAP TO AC005971.5; EXPRESSED IN HELA, SIGNAL = 1.6; EXPRESSED IN LUNG, SIGNAL = 1.8; EXPRESSED IN HEART, SIGNAL = 1.5; EXPRESSED IN FETAL LIVER, SIGNAL =   2; EXPRESSED IN BRAIN, SIGNAL =   2; EXPRESSED IN BONE MARROW, SIGNAL = 1.9; EXPRESSED IN ADULT LIVER, SIGNAL = 1.6; EXPRESSED IN PLACENTA, SIGNAL = 1.6; EST_HUMAN HIT: AW935039.1, EVALUE 1.00e-34; NT HIT: gi11425417, EVALUE 7.00e-35
ttctatgtgctgaaggaggactctggccacgtgctctgtgtcccactgcatgcctgggtcatctgggaaatccctacaagagagaagcaca

SEQ ID NO: 22666 - DNA, 125 bp, Homo sapiens
  MAP TO AC006088.1; EXPRESSED IN LUNG, SIGNAL = 4.8; EXPRESSED IN BRAIN, SIGNAL = 5.2; EXPRESSED IN HELA, SIGNAL = 4.1; EXPRESSED IN ADULT LIVER, SIGNAL = 5.3; EXPRESSED IN BONE MARROW, SIGNAL =   4; EXPRESSED IN FETAL LIVER, SIGNAL = 4.4; EXPRESSED IN HEART, SIGNAL =   5; EXPRESSED IN PLACENTA, SIGNAL =   5; NT HIT: AF043385.1, EVALUE 5.00e-03; SWISSPROT HIT: P08539, EVALUE 1.80e+00; EST_HUMAN HIT: BF668537.1, EVALUE 2.00e-64
aggaaggctgtgctgctactggctgctcacttctccatcaacctcaccctctgcaccactaaccaagaccttgtcctcttgcctgtctcgctgctttcacagctgcaacgattgtgtctgcctca

SEQ ID NO: 22667 - DNA, 235 bp, Homo sapiens
  MAP TO AC005553.1; EXPRESSED IN PLACENTA, SIGNAL = 2.7; EXPRESSED IN ADULT LIVER, SIGNAL = 2.6; EXPRESSED IN LUNG, SIGNAL = 2.8; EXPRESSED IN HEART, SIGNAL = 2.4; EXPRESSED IN FETAL LIVER, SIGNAL = 2.6; EXPRESSED IN BRAIN, SIGNAL = 2.7; EXPRESSED IN HELA, SIGNAL = 2.7; EXPRESSED IN BONE MARROW, SIGNAL = 2.6; NT HIT: AL163246.2, EVALUE 4.00e-20; SWISSPROT HIT: P45335, EVALUE 2.50e+00; EST_HUMAN HIT: AL079752.1, EVALUE 1.00e-21
atggaagcagtccagtgtaatcaacctgatgctggatagctcgctgatcactccaggaaatagtgccatatcttggggttccgtgttagcctctatttctgccagattgaacaacagtggtggccacaggcaggtcagccttggtgagtggaagtctatgttgctgagcccatgcataagctccatctctaccaccatggctattttggtcataagcctattgggcaatgacaga

SEQ ID NO: 22668 - DNA, 117 bp, Homo sapiens
  MAP TO AC005521.1; EXPRESSED IN LUNG, SIGNAL = 2.1; EXPRESSED IN FETAL LIVER, SIGNAL = 1.8; EXPRESSED IN BONE MARROW, SIGNAL = 2.1; EXPRESSED IN PLACENTA, SIGNAL =   2; EXPRESSED IN HELA, SIGNAL = 1.9; EXPRESSED IN BRAIN, SIGNAL =   2; EXPRESSED IN ADULT LIVER, SIGNAL = 2.1; EXPRESSED IN HEART, SIGNAL = 2.2; NT HIT: U75902.1, EVALUE 1.00e+00
ggatacatctatgaaaatctgaactgcattgtggttgaagtttcagtaggcttcagtatcagaataatgttcccaaatggcatatttcctattattagtcaacagtatgagctttga

SEQ ID NO: 22669 - DNA, 96 bp, Homo sapiens
  MAP TO AC004580.2; EXPRESSED IN ADULT LIVER, SIGNAL =  10; EXPRESSED IN PLACENTA, SIGNAL =  10; EXPRESSED IN HEART, SIGNAL = 9.1; EXPRESSED IN LUNG, SIGNAL =  12; EXPRESSED IN FETAL LIVER, SIGNAL = 9.6; EXPRESSED IN BRAIN, SIGNAL =  11; EXPRESSED IN BONE MARROW, SIGNAL = 9.5; EXPRESSED IN HELA, SIGNAL =  10; SWISSPROT HIT: P11369, EVALUE 4.30e-02; NT HIT: X87344.1, EVALUE 2.00e-04; EST_HUMAN HIT: AW974760.1, EVALUE 5.00e-12
atggctactaagcacaggaaaagatgctcaatgttgttagtcattagggaaatgcaaattaaaatgaaaacaagttgctatcacacatccacaaag

SEQ ID NO: 22670 - DNA, 118 bp, Homo sapiens
  MAP TO AC002528.1; EXPRESSED IN PLACENTA, SIGNAL = 1.3; EXPRESSED IN LUNG, SIGNAL = 1.6; EXPRESSED IN HEART, SIGNAL = 1.6; EXPRESSED IN FETAL LIVER, SIGNAL = 1.7; EXPRESSED IN BONE MARROW, SIGNAL = 1.5; EXPRESSED IN ADULT LIVER, SIGNAL = 1.4; EXPRESSED IN BRAIN, SIGNAL = 1.9; SWISSPROT HIT: P40349, EVALUE 4.10e+00; NT HIT: AF004877.1, EVALUE 2.00e-60; EST_HUMAN HIT: AA852900.1, EVALUE 3.00e-54
ggctctgctgggccccaaggtcctcctggtcccagtggtgaagaaggaaagagaggccctaatggggaagctggatctgccggccctccaggacctcctgggctgagagtaggtttca

SEQ ID NO: 22671 - DNA, 160 bp, Homo sapiens
  MAP TO AC004874.1; EXPRESSED IN LUNG, SIGNAL = 2.9; EXPRESSED IN FETAL LIVER, SIGNAL = 3.1; EXPRESSED IN BRAIN, SIGNAL = 3.3; EXPRESSED IN BONE MARROW, SIGNAL = 2.8; EXPRESSED IN PLACENTA, SIGNAL = 3.2; EXPRESSED IN HELA, SIGNAL = 2.5; EXPRESSED IN HEART, SIGNAL = 3.4; EXPRESSED IN ADULT LIVER, SIGNAL = 3.1; EST_HUMAN HIT: BF370000.1, EVALUE 3.00e-64; NT HIT: gi11141878, EVALUE 1.00e-13; SWISSPROT HIT: P34678, EVALUE 7.00e-10
aggacctgccccagatatccatcatattcatcttcgtgaacgaggccctgtcggtgatcctgcggtccgtgcacagtgccgtcaatcacacgcccacacacctgctgaaggaaatcattctggtggatgacaacagcgacgaaggtacaggggtggctga

SEQ ID NO: 22672 - DNA, 121 bp, Homo sapiens
  MAP TO AC004167.1; EXPRESSED IN PLACENTA, SIGNAL = 1.8; EXPRESSED IN LUNG, SIGNAL = 1.4; EXPRESSED IN HEART, SIGNAL = 1.4; EXPRESSED IN FETAL LIVER, SIGNAL = 1.3; EXPRESSED IN BONE MARROW, SIGNAL = 1.9; EXPRESSED IN ADULT LIVER, SIGNAL = 2.7; EXPRESSED IN BRAIN, SIGNAL = 1.1; SWISSPROT HIT: P47029, EVALUE 3.10e+00; EST_HUMAN HIT: BF105845.1, EVALUE 7.00e-46
gaagaataattttaaagctgaaaatgcaagaacaggtctgaataagaaggaattgatgactaaggtggaaggaaataatgagggaaaacctaccaccataagtgattttgtcttgagcatt

SEQ ID NO: 22673 - DNA, 319 bp, Homo sapiens
  MAP TO AC002432.1; EXPRESSED IN LUNG, SIGNAL = 1.8; EXPRESSED IN BRAIN, SIGNAL = 2.2; EXPRESSED IN BONE MARROW, SIGNAL = 1.8; EXPRESSED IN PLACENTA, SIGNAL = 1.7; EXPRESSED IN HELA, SIGNAL = 1.9; EXPRESSED IN HEART, SIGNAL = 1.7; EXPRESSED IN FETAL LIVER, SIGNAL = 1.6; EXPRESSED IN ADULT LIVER, SIGNAL = 1.6; NT HIT: AF181897.1, EVALUE 2.00e-01; EST_HUMAN HIT: R17477.1, EVALUE 7.40e-02
ctttttaacaaacatacagagtttcaggaatgagaagaggaaattgcagctgatgagattttcaggatccctagcagagcaatttctttgtggattttggaaagcattctgtagaaggacaacatcgttaggctcttcatagagtttcttagaagcctcagtattctgagcaacacgtgattgcgcccagatctgaggatggggaactctgaaatgaaacacagctgtcctgatatttttaagaaaattgtaagggagacactttgtgcaatcaattagattgttcttttcttttttcctatttcagaagacagaaaaa

SEQ ID NO: 22674 - DNA, 510 bp, Homo sapiens
  MAP TO AC005585.1; EXPRESSED IN PLACENTA, SIGNAL = 4.9; EXPRESSED IN LUNG, SIGNAL = 5.4; EXPRESSED IN HEART, SIGNAL = 4.9; EXPRESSED IN BRAIN, SIGNAL = 4.3; EXPRESSED IN ADULT LIVER, SIGNAL = 4.9; EXPRESSED IN FETAL LIVER, SIGNAL = 5.7; EXPRESSED IN BONE MARROW, SIGNAL = 4.6; EXPRESSED IN HELA, SIGNAL = 4.8; SWISSPROT HIT: P30427, EVALUE 4.30e-02; EST_HUMAN HIT: AI800533.1, EVALUE 1.20e-01
aagagccagagagcatccctgtcagagcctccctgcagttcccagccacgaccttcaagaacaccaggagtgtccactcccagaccattgagacggccctggtgccctgtgacgcatgcgccagcgtccagggaagcctgcagaaggtgggcaaggtggtcatcagcctgtgtcagagccagaacctgccctcgtccttaggccagttccagcaactggtgcaggacagcatggggctcaggccactgccggctgccaccgtgggccgctgggcagcagagcagaggaaagacctgacgcgcctcagtaagcatgtggaggccctcagggcccagctggaggaggctgaagggcagaaggatggcctgaggaagcaggcgggcaagctggagcaggcgctgaaacaggagcagggggcacggcggcgacaggcggaggaggatgagcagtgcctgtctgagtgggagcacgacaaacagcagctgctcacaggtctgtgccccagaggcc

SEQ ID NO: 22675 - DNA, 185 bp, Homo sapiens
  MAP TO AC004466.1; EXPRESSED IN PLACENTA, SIGNAL = 5.6; EXPRESSED IN LUNG, SIGNAL = 7.1; EXPRESSED IN HELA, SIGNAL = 5.2; EXPRESSED IN HEART, SIGNAL = 5.1; EXPRESSED IN BRAIN, SIGNAL = 5.6; EXPRESSED IN FETAL LIVER, SIGNAL =   5; EXPRESSED IN BONE MARROW, SIGNAL = 4.9; EXPRESSED IN ADULT LIVER, SIGNAL = 5.1; EST_HUMAN HIT: AU140214.1, EVALUE 1.00e-100; NT HIT: X67482.1, EVALUE 1.00e-100; SWISSPROT HIT: Q28037, EVALUE 1.00e-29
tcattctgacagatgaggaagtgcagaggaagcgggagatgatcctgaagcggaaggaggaggaggccttgaaggacagtctgcggcccaagctgtctgaggagcagcagcgcatcattgccatactgctggacgcccaccataagacctacgaccccacctactccgacttctgccagttccgg

SEQ ID NO: 22676 - DNA, 152 bp, Homo sapiens
  MAP TO AC006330.2; EXPRESSED IN PLACENTA, SIGNAL = 1.2; EXPRESSED IN LUNG, SIGNAL = 1.7; EXPRESSED IN HEART, SIGNAL = 1.6; EXPRESSED IN BRAIN, SIGNAL = 1.4; EXPRESSED IN FETAL LIVER, SIGNAL = 1.6; EXPRESSED IN BONE MARROW, SIGNAL = 1.3; EXPRESSED IN ADULT LIVER, SIGNAL = 2.1; EST_HUMAN HIT: AA410760.1, EVALUE 2.00e-80; NT HIT: gi5174540, EVALUE 1.00e-80; SWISSPROT HIT: P40926, EVALUE 8.00e-18
aaaaagggcatcgagaagaacctgggcatcggcaaagtctcctcttttgaggagaagatgatctcggatgccatccccgagctgaaggcctccatcaagaagggggaagatttcgtgaagaccctgaagtgagccgctgtgacgggtggcca

SEQ ID NO: 22677 - DNA, 131 bp, Homo sapiens; identical to SEQ ID NO: 22183
  MAP TO AC006007.1; EXPRESSED IN LUNG, SIGNAL =   1; EXPRESSED IN BRAIN, SIGNAL = 2.1; EXPRESSED IN HELA, SIGNAL = 2.1; EXPRESSED IN ADULT LIVER, SIGNAL =   2; EXPRESSED IN BONE MARROW, SIGNAL =   2; EXPRESSED IN FETAL LIVER, SIGNAL = 2.2; EXPRESSED IN HEART, SIGNAL = 1.8; EXPRESSED IN PLACENTA, SIGNAL = 1.9; NT HIT: AL163267.2, EVALUE 3.90e+00; EST_HUMAN HIT: AW813276.1, EVALUE 1.20e+00

SEQ ID NO: 22678 - DNA, 276 bp, Homo sapiens
  MAP TO AC005383.1; EXPRESSED IN PLACENTA, SIGNAL = 3.2; EXPRESSED IN ADULT LIVER, SIGNAL = 3.4; EXPRESSED IN LUNG, SIGNAL = 3.9; EXPRESSED IN HELA, SIGNAL = 2.9; EXPRESSED IN HEART, SIGNAL = 2.9; EXPRESSED IN FETAL LIVER, SIGNAL = 2.8; EXPRESSED IN BRAIN, SIGNAL = 3.5; EXPRESSED IN BONE MARROW, SIGNAL = 2.9; SWISSPROT HIT: Q61704, EVALUE 9.10e-01
tggtctgaagaagccataacaagattccagatgtgtgttgctgggataaaattgcaagccagagtggttgaagtcactgaaaatgggataggagttgaactcaccgatctctccacttgttatcccagaataattagtgatgttctgattgatgaacatctggttttaaaatctgcttcaccacataaagacttaccaaatgacagacttgttaataaacatgagcttcaagttcatgtacagggacttcaaggtaacattttaaaaccatttatt

SEQ ID NO: 22679 - DNA, 123 bp, Homo sapiens
  MAP TO AC004470.1; EXPRESSED IN BONE MARROW, SIGNAL = 1.3; EXPRESSED IN ADULT LIVER, SIGNAL = 1.5; EXPRESSED IN PLACENTA, SIGNAL = 1.8; EXPRESSED IN HEART, SIGNAL = 1.4; EXPRESSED IN LUNG, SIGNAL = 1.8; EXPRESSED IN HELA, SIGNAL = 1.8; EXPRESSED IN FETAL LIVER, SIGNAL = 1.4; EXPRESSED IN BRAIN, SIGNAL = 1.4; NT HIT: AF298224.1, EVALUE 1.10e+00; EST_HUMAN HIT: AV758295.1, EVALUE 4.00e-41
tgtatcattatcaacagcaatgtatgagagccgtgtttccacacagactggaaagcagactatgctggattttgtcaagcagagaggtgagaaacattatttcagtgtagctttaattatatc

SEQ ID NO: 22680 - DNA, 287 bp, Homo sapiens
  MAP TO AC004977.1; EXPRESSED IN LUNG, SIGNAL =  11; EXPRESSED IN FETAL LIVER, SIGNAL = 5.4; EXPRESSED IN BONE MARROW, SIGNAL = 0.89; EXPRESSED IN PLACENTA, SIGNAL = 0.94; EXPRESSED IN HEART, SIGNAL = 1.7; EXPRESSED IN BRAIN, SIGNAL = 0.79; EXPRESSED IN ADULT LIVER, SIGNAL =  16; SWISSPROT HIT: P25311, EVALUE 5.00e-53; EST_HUMAN HIT: AV719444.1, EVALUE 0.00e+00; NT HIT: M76707.1, EVALUE 0.00e+00
atcctccctctgtggtggtcaccagccaccaggccccaggagaaaagaagaaactgaagtgcctggcctacgacttctacccagggaaaattgatgtgcactggactcgggccggcgaggtgcaggagcctgagttacggggagatgttcttcacaatggaaatggcacttaccagtcctgggtggtggtggcagtgcccccgcaggacacagccccctactcctgccacgtgcagcacagcagcctggcccagcccctcgtggtgccctgggaggccagctaggaa

SEQ ID NO: 22681 - DNA, 215 bp, Homo sapiens
  MAP TO AC005535.2; EXPRESSED IN PLACENTA, SIGNAL = 1.2; EXPRESSED IN LUNG, SIGNAL = 1.5; EXPRESSED IN HEART, SIGNAL = 1.3; EXPRESSED IN FETAL LIVER, SIGNAL =   2; EXPRESSED IN BONE MARROW, SIGNAL = 1.4; EXPRESSED IN BRAIN, SIGNAL = 1.1; EXPRESSED IN ADULT LIVER, SIGNAL = 1.4; SWISSPROT HIT: Q9QY14, EVALUE 1.80e-01; EST_HUMAN HIT: BE902613.1, EVALUE 3.00e+00
ggtgcacatcctagccaccagggcagggccaggacacttggttacatgcaggaggctccagtggaggcactgagcaggctccacatcgcacagtacccaaatcagagggcccactgcaacatggtgcagcagcaccaatgcatgtgtgcaaacgcgctgtaaagttagttgcagcaagccctctattaggtacagagctataaagaggaaaacag

SEQ ID NO: 22682 - DNA, 183 bp, Homo sapiens
  MAP TO AC005385.2; EXPRESSED IN PLACENTA, SIGNAL = 2.3; EXPRESSED IN LUNG, SIGNAL = 2.1; EXPRESSED IN HEART, SIGNAL = 2.2; EXPRESSED IN BRAIN, SIGNAL = 2.5; EXPRESSED IN BONE MARROW, SIGNAL = 2.3; EXPRESSED IN ADULT LIVER, SIGNAL = 2.3; EXPRESSED IN HELA, SIGNAL = 2.2; EXPRESSED IN FETAL LIVER, SIGNAL = 2.6; EST_HUMAN HIT: AI769331.1, EVALUE 7.00e-04; SWISSPROT HIT: Q01033, EVALUE 3.00e+00; NT HIT: U82668.1, EVALUE 2.70e-02
gccgtgcccccactgaaggccataggggagaattcttccttcagtcttctggctctggttgcctccaggccttccttggcttgtgactgcatcactccaatctctgcctctgtctttactttgctttccttctgtgtctgtgtcttctctttttctgtctcctgcaagaacacttgtcatgag

SEQ ID NO: 22683 - DNA, 225 bp, Homo sapiens
  MAP TO AC004585.1; EXPRESSED IN PLACENTA, SIGNAL = 1.6; EXPRESSED IN LUNG, SIGNAL = 1.7; EXPRESSED IN HEART, SIGNAL = 1.8; EXPRESSED IN BRAIN, SIGNAL = 1.6; EXPRESSED IN HELA, SIGNAL = 2.1; EXPRESSED IN FETAL LIVER, SIGNAL = 1.8; EXPRESSED IN BONE MARROW, SIGNAL = 2.1; EXPRESSED IN ADULT LIVER, SIGNAL = 2.5; SWISSPROT HIT: Q13435, EVALUE 6.60e+00; EST_HUMAN HIT: BE158133.1, EVALUE 1.00e-116; NT HIT: AF035262.1, EVALUE 1.00e-116
gtgggttacctgtctccatcggaatgttctcgtcgtctttcttctcctcgcctttgttagctgcttgttcttcctcaggaacgatgctgctctgactgcgctcagcttgctctgcggcctccttctccctttcctcctgccttttgcgggcctgttcctctgcctgtgcaatctcagctgcaattttctccatatccacttctactttcagaccgcacaactaat

SEQ ID NO: 22684 - DNA, 140 bp, Homo sapiens
  MAP TO AC006203.1; EXPRESSED IN PLACENTA, SIGNAL = 8.1; EXPRESSED IN LUNG, SIGNAL = 6.6; EXPRESSED IN HEART, SIGNAL = 8.4; EXPRESSED IN BRAIN, SIGNAL = 8.4; EXPRESSED IN HELA, SIGNAL = 8.2; EXPRESSED IN FETAL LIVER, SIGNAL = 8.7; EXPRESSED IN BONE MARROW, SIGNAL = 8.9; EXPRESSED IN ADULT LIVER, SIGNAL = 8.8; NT HIT: X53558.1, EVALUE 1.20e+00; EST_HUMAN HIT: BF217173.1, EVALUE 4.70e-01
tggatggtgaagaatagagatgtagcctcttctttaaccccagttaaccaacttagtgaagaagtcttttttcccaaatatgtaacacagatgaaggtggagcttagtaaacgggaaagtggcaataaagaacgggggaa

SEQ ID NO: 22685 - DNA, 87 bp, Homo sapiens
  MAP TO AC002456.1; EXPRESSED IN HELA, SIGNAL = 1.9; EXPRESSED IN BRAIN, SIGNAL = 1.6; EXPRESSED IN BONE MARROW, SIGNAL = 1.9; EXPRESSED IN ADULT LIVER, SIGNAL = 1.6; EXPRESSED IN PLACENTA, SIGNAL = 1.9; EXPRESSED IN HEART, SIGNAL = 1.7; EXPRESSED IN FETAL LIVER, SIGNAL =   3; EXPRESSED IN LUNG, SIGNAL = 1.6; NT HIT: AL163213.2, EVALUE 5.00e-11; EST_HUMAN HIT: AA503551.1, EVALUE 7.00e-08
attcaggtgacacatgtgcaggtttgttacatggctgtatcgtgtgatgctgaggtttgtggcatgattgatcccatcacccagata

SEQ ID NO: 22686 - DNA, 180 bp, Homo sapiens
  MAP TO AC004478.1; EXPRESSED IN ADULT LIVER, SIGNAL =   4; EXPRESSED IN PLACENTA, SIGNAL = 3.3; EXPRESSED IN BONE MARROW, SIGNAL =   3; EXPRESSED IN LUNG, SIGNAL =   4; EXPRESSED IN HELA, SIGNAL = 3.2; EXPRESSED IN HEART, SIGNAL = 2.5; EXPRESSED IN FETAL LIVER, SIGNAL = 2.8; EXPRESSED IN BRAIN, SIGNAL = 3.8; EST_HUMAN HIT: AW968835.1, EVALUE 5.00e-20; NT HIT: AL163303.2, EVALUE 5.00e-22; SWISSPROT HIT: Q10737, EVALUE 7.70e-01
ggaggtcaaaatatcaatattgacaagaacttggaagaaggtgattcccccgctcatggatgactttgaggggttcaagacttcattgaaggaagccactgtagatgttatggaagtagcaaaagaactagacttacaagtggagcttgaggatgtgactgaattgttgcaatatcatga

SEQ ID NO: 22687 - DNA, 189 bp, Homo sapiens
  MAP TO AC005598.6; EXPRESSED IN ADULT LIVER, SIGNAL =   7; EXPRESSED IN PLACENTA, SIGNAL = 7.1; EXPRESSED IN LUNG, SIGNAL = 7.4; EXPRESSED IN HELA, SIGNAL =   7; EXPRESSED IN HEART, SIGNAL = 7.2; EXPRESSED IN BRAIN, SIGNAL = 7.3; EXPRESSED IN BONE MARROW, SIGNAL = 6.7; EXPRESSED IN FETAL LIVER, SIGNAL = 6.7; EST_HUMAN HIT: AW959311.1, EVALUE 7.00e+00; NT HIT: AF155142.1, EVALUE 5.90e+00
ttcttcttcttcctcttcctcctcctcttcttctcctcctcctcctcctttttcttctttttcttcttcttttcctcctcctcctccttcttcttcttcgtcttcttcgtcttcttcttctttttctctctctctctctccttccaactggtctccttgttcccattccatcctccaaacctccaagca

SEQ ID NO: 22688 - DNA, 118 bp, Homo sapiens
  MAP TO AC005393.1; EXPRESSED IN PLACENTA, SIGNAL = 5.4; EXPRESSED IN BONE MARROW, SIGNAL = 5.2; EXPRESSED IN ADULT LIVER, SIGNAL = 5.4; EXPRESSED IN LUNG, SIGNAL = 4.5; EXPRESSED IN HELA, SIGNAL = 5.4; EXPRESSED IN HEART, SIGNAL = 4.8; EXPRESSED IN FETAL LIVER, SIGNAL = 5.5; EXPRESSED IN BRAIN, SIGNAL = 5.1; EST_HUMAN HIT: R52048.1, EVALUE 6.00e-03; NT HIT: L01665.1, EVALUE 2.00e-45; SWISSPROT HIT: Q01371, EVALUE 1.40e+00
ctgtgcaatggtaaaaagctggagatcctgggggcaaggcacttggccttgaaagaaaatcctcctcctccttctccagtggttctgggagagcatagatcttgatcattcgcaggac

SEQ ID NO: 22689 - DNA, 318 bp, Homo sapiens
  MAP TO AC004590.1; EXPRESSED IN BONE MARROW, SIGNAL = 2.2; EXPRESSED IN ADULT LIVER, SIGNAL = 2.5; EXPRESSED IN LUNG, SIGNAL = 2.3; EXPRESSED IN HELA, SIGNAL = 2.6; EXPRESSED IN HEART, SIGNAL = 2.2; EXPRESSED IN FETAL LIVER, SIGNAL = 2.2; EXPRESSED IN BRAIN, SIGNAL = 2.2; EXPRESSED IN PLACENTA, SIGNAL = 2.1; NT HIT: AF190860.1, EVALUE 0.00e+00; SWISSPROT HIT: O54898, EVALUE 3.00e-49; EST_HUMAN HIT: BF304609.1, EVALUE 1.20e+00
ccccctgagcgtggacctggagcgctattaccagacagagaacgaggatgagagccccttcatctgctcccagccacgcgagaacggcatgcggtcctgcagaagcgtgcccacgctgcgcggggacgggggcggtggcccaccttgcggtctggactatgaggcctacaacagctccagcaacaccacctgtgtcaactggaaccagtactacaccaactgctcagcgggggagcacaaccccttcaagggcgccatcaactttgacaacattggctatgcctggatcgccatcttccaggtggggcagcctgggcc

SEQ ID NO: 22690 - DNA, 210 bp, Homo sapiens
  MAP TO AC006207.5; EXPRESSED IN ADULT LIVER, SIGNAL = 2.3; EXPRESSED IN PLACENTA, SIGNAL = 2.4; EXPRESSED IN HEART, SIGNAL = 2.3; EXPRESSED IN LUNG, SIGNAL = 1.6; EXPRESSED IN FETAL LIVER, SIGNAL = 2.6; EXPRESSED IN BRAIN, SIGNAL = 3.1; EXPRESSED IN BONE MARROW, SIGNAL = 2.2; EXPRESSED IN HELA, SIGNAL = 2.3; NT HIT: M32437.1, EVALUE 3.20e-02; SWISSPROT HIT: O43602, EVALUE 1.70e+00; EST_HUMAN HIT: AA417041.1, EVALUE 4.70e-02
atctctcatcctcctcactgccaagcttcttgaaaaagttgtcaacatttgctgtatacacaatatgatgtctaccaaccttgccttcatctaagttaccaatggccttcttattgaaaaatgcaaaggaacttttcaaatttatcttacttgacatcttttcagtatgtaatcgtacagatggcacctacttgtgtaaaccacattctc

SEQ ID NO: 22691 - DNA, 150 bp, Homo sapiens
  MAP TO AC006358.2; EXPRESSED IN PLACENTA, SIGNAL =  31; EXPRESSED IN LUNG, SIGNAL =  36; EXPRESSED IN HEART, SIGNAL =  27; EXPRESSED IN BRAIN, SIGNAL =  33; EXPRESSED IN FETAL LIVER, SIGNAL =  28; EXPRESSED IN BONE MARROW, SIGNAL =  31; EXPRESSED IN HELA, SIGNAL =  31; EXPRESSED IN ADULT LIVER, SIGNAL =  28; NT HIT: gi9055245, EVALUE 8.60e-02; SWISSPROT HIT: P04023, EVALUE 3.10e+00; EST_HUMAN HIT: T89367.1, EVALUE 3.20e-02
cgggtgccccagcccttcatgctgactccgcttgttctcacacaccagttttcccaaagcagggggcatgaggaccacggtgggatgcaagatgctttcaggcggtacaaggatgaacgttttcatagcgacatttttgtatatcatgga

SEQ ID NO: 22692 - DNA, 211 bp, Homo sapiens
  MAP TO AC005544.1; EXPRESSED IN PLACENTA, SIGNAL = 1.7; EXPRESSED IN HEART, SIGNAL = 1.9; EXPRESSED IN FETAL LIVER, SIGNAL = 1.7; EXPRESSED IN BRAIN, SIGNAL =   2; EXPRESSED IN BONE MARROW, SIGNAL = 1.8; EXPRESSED IN ADULT LIVER, SIGNAL = 1.8; EXPRESSED IN HELA, SIGNAL = 1.9; EXPRESSED IN LUNG, SIGNAL = 1.8; EST_HUMAN HIT: AW502217.1, EVALUE 3.00e-31; SWISSPROT HIT: P42694, EVALUE 6.00e-35; NT HIT: gi7661883, EVALUE 1.00e-115
tgtttcttagcacagtacgtacaagacatacttgtaaacataaacagacaccaattaaaaagaaagagcaacttctggaagattccacagaggacttagattatggttttttatctaactacaagcttctcaatactgccatcacaagagcacaatccctggttgctgtggtgggtgatcccattgctctgtgctctattggaagatgcag

SEQ ID NO: 22693 - DNA, 224 bp, Homo sapiens
  MAP TO AC004593.1; EXPRESSED IN ADULT LIVER, SIGNAL = 3.8; EXPRESSED IN BONE MARROW, SIGNAL = 4.3; EXPRESSED IN PLACENTA, SIGNAL = 3.7; EXPRESSED IN LUNG, SIGNAL = 4.7; EXPRESSED IN HELA, SIGNAL = 4.1; EXPRESSED IN HEART, SIGNAL = 3.5; EXPRESSED IN BRAIN, SIGNAL =   4; EXPRESSED IN FETAL LIVER, SIGNAL = 3.6; NT HIT: L14610.1, EVALUE 5.30e-01; EST_HUMAN HIT: AW360865.1, EVALUE 2.00e-01; SWISSPROT HIT: P19751, EVALUE 1.30e+00
tgtgtgatacaggcaatgggacaactgggcagttagttggaactgaccttgcagacagccaagacggcaagctgggtgactcaagttcagaatgggttttttataaaaacaaacaaacagccatgattgatgtctcccttctcatcttttatatatccttttttatgggcagttgtggagaattggactggtttactgacatcatttctctctttgcaggctga

SEQ ID NO: 22694 - DNA, 244 bp, Homo sapiens
  MAP TO AC004896.1; EXPRESSED IN ADULT LIVER, SIGNAL = 5.4; EXPRESSED IN PLACENTA, SIGNAL = 4.7; EXPRESSED IN LUNG, SIGNAL = 5.4; EXPRESSED IN FETAL LIVER, SIGNAL = 4.6; EXPRESSED IN HELA, SIGNAL =   5; EXPRESSED IN HEART, SIGNAL = 5.1; EXPRESSED IN BRAIN, SIGNAL =   5; EXPRESSED IN BONE MARROW, SIGNAL = 4.6; EST_HUMAN HIT: BE612379.1, EVALUE 2.20e-01; NT HIT: gi11417236, EVALUE 1.50e-01
catctctactgctattaccccaatccaagacactatcatagctaccatctctactgctgttaccctaatccaagacactatcatagctaccatctctactgctattaccctaatccaagacgctatcatagctaccatctctactgctattaccataatccaagacgctattgtagctaccatctctactgctattactctcatccaagacactatcatagctaccatctctactgctattacc

SEQ ID NO: 22695 - DNA, 261 bp, Homo sapiens
  MAP TO AC005610.1; EXPRESSED IN PLACENTA, SIGNAL = 3.5; EXPRESSED IN ADULT LIVER, SIGNAL = 4.3; EXPRESSED IN LUNG, SIGNAL = 4.3; EXPRESSED IN HELA, SIGNAL =   4; EXPRESSED IN HEART, SIGNAL = 3.5; EXPRESSED IN FETAL LIVER, SIGNAL = 3.3; EXPRESSED IN BRAIN, SIGNAL = 7.5; EXPRESSED IN BONE MARROW, SIGNAL = 3.2; EST_HUMAN HIT: AW163640.1, EVALUE 0.00e+00; NT HIT: U52828.1, EVALUE 0.00e+00; SWISSPROT HIT: Q02817, EVALUE 5.00e-05
tcacacccaggagtcgggggaggccgggtagtggctcgtttcatagttcagttcactgtagggacgggcagctgagtagaagtcaacgtagttgccggtggacttgagacccaggtgcatggtgtactcgctggcgggagggcgatggtggacctggtcctcgaagaaggactcatcgtaatttcttgtggaattctgaaatggctggtaggtctcgtaatcttttctgctgggctcctgtgggactggctgtgctgaaac

SEQ ID NO: 22696 - DNA, 79 bp, Homo sapiens
  MAP TO AC006368.2; EXPRESSED IN BONE MARROW, SIGNAL = 1.7; EXPRESSED IN ADULT LIVER, SIGNAL = 3.2; EXPRESSED IN LUNG, SIGNAL = 1.2; EXPRESSED IN HELA, SIGNAL = 1.9; EXPRESSED IN HEART, SIGNAL = 1.8; EXPRESSED IN FETAL LIVER, SIGNAL = 2.4; EXPRESSED IN BRAIN, SIGNAL = 2.2; EXPRESSED IN PLACENTA, SIGNAL = 1.6; NT HIT: AL161579.2, EVALUE 2.50e+00; EST_HUMAN HIT: AI698989.1, EVALUE 2.40e-01
agacaccttagtttccattcttatatcatttaccttttctctggccatttcttcaaatgtccatactgagaccaaggcc

SEQ ID NO: 22697 - DNA, 191 bp, Homo sapiens
  MAP TO AC004995.1; EXPRESSED IN ADULT LIVER, SIGNAL = 5.8; EXPRESSED IN PLACENTA, SIGNAL = 3.7; EXPRESSED IN LUNG, SIGNAL = 4.4; EXPRESSED IN FETAL LIVER, SIGNAL = 5.6; EXPRESSED IN BONE MARROW, SIGNAL = 4.6; EXPRESSED IN HELA, SIGNAL = 5.2; EXPRESSED IN HEART, SIGNAL = 4.6; EXPRESSED IN BRAIN, SIGNAL = 2.5; NT HIT: gi7661637, EVALUE 9.00e-61; EST_HUMAN HIT: BE263373.1, EVALUE 2.00e-65; SWISSPROT HIT: Q9Y3U8, EVALUE 2.00e-23
ccgtttgtctttggagacctttcagtaactccttggcgtgctgcttgtacggggcgaagccacatgcctccgggatcatgtcccgcacaaacttggtgtgtttggtcagacgcccgcggcggcggctgtgcctgggctcgctcacgttcttggtcaccttttggcccttgttgaggcccacggccataggg

SEQ ID NO: 22698 - DNA, 126 bp, Homo sapiens
  MAP TO AC005549.1; EXPRESSED IN PLACENTA, SIGNAL = 2.9; EXPRESSED IN LUNG, SIGNAL =   3; EXPRESSED IN FETAL LIVER, SIGNAL =   3; EXPRESSED IN BONE MARROW, SIGNAL = 3.2; EXPRESSED IN ADULT LIVER, SIGNAL = 2.9; EXPRESSED IN HELA, SIGNAL = 3.2; EXPRESSED IN HEART, SIGNAL = 3.5; EXPRESSED IN BRAIN, SIGNAL = 3.4; NT HIT: AK024473.1, EVALUE 2.80e-01; EST_HUMAN HIT: AA327129.1, EVALUE 7.00e-03
ccgtgccacaactttgctgagctctttgtacgtacgtttctattcaatgatctcaacagcaaagaggcagttacggttgttatccctattttactgataaaggaactagatttcagggaggtaagg

SEQ ID NO: 22699 - DNA, 76 bp, Homo sapiens
  MAP TO AC004905.1; EXPRESSED IN PLACENTA, SIGNAL = 2.7; EXPRESSED IN HEART, SIGNAL = 2.6; EXPRESSED IN FETAL LIVER, SIGNAL = 3.7; EXPRESSED IN BRAIN, SIGNAL = 2.8; EXPRESSED IN BONE MARROW, SIGNAL = 2.7; EXPRESSED IN HELA, SIGNAL = 2.6; EXPRESSED IN LUNG, SIGNAL = 2.2; EXPRESSED IN ADULT LIVER, SIGNAL = 2.9; NT HIT: U38813.1, EVALUE 6.00e-01; EST_HUMAN HIT: BE796537.1, EVALUE 3.50e+00
cagttccccgaggtctcattcaggctctcttcctcattgataatgatgttctcaatgtccttcatcgttaggtggt

SEQ ID NO: 22700 - DNA, 109 bp, Homo sapiens
  MAP TO AC005295.1; EXPRESSED IN PLACENTA, SIGNAL = 1.5; EXPRESSED IN HEART, SIGNAL = 1.8; EXPRESSED IN FETAL LIVER, SIGNAL = 1.9; EXPRESSED IN BRAIN, SIGNAL = 1.7; EXPRESSED IN BONE MARROW, SIGNAL = 1.6; EXPRESSED IN ADULT LIVER, SIGNAL = 3.4; EXPRESSED IN HELA, SIGNAL = 1.7; EXPRESSED IN LUNG, SIGNAL = 1.6; NT HIT: gi4502240, EVALUE 5.00e-55; SWISSPROT HIT: P51690, EVALUE 2.00e-14; EST_HUMAN HIT: AA334347.1, EVALUE 4.00e-53
gcatagcctttctctttcagtatttttgcaaaagttgtctcatttgttggaagacctccagatgctccggtccactgaagaacacggtaaccaatgctggaaaccatcc

SEQ ID NO: 22701 - DNA, 193 bp, Homo sapiens
  MAP TO AC006372.2; EXPRESSED IN ADULT LIVER, SIGNAL = 1.9; EXPRESSED IN BONE MARROW, SIGNAL = 1.8; EXPRESSED IN PLACENTA, SIGNAL = 1.5; EXPRESSED IN LUNG, SIGNAL = 1.7; EXPRESSED IN HELA, SIGNAL = 1.6; EXPRESSED IN HEART, SIGNAL = 1.8; EXPRESSED IN BRAIN, SIGNAL = 1.9; EXPRESSED IN FETAL LIVER, SIGNAL = 1.5; NT HIT: AB037812.1, EVALUE 1.80e+00; SWISSPROT HIT: P48508, EVALUE 1.50e-01
caatctgaaatggatccagaattcttcttgttccctccaacatctgactacgactttccaaactattatttcccattttcttccattcttcaaattgggaattgttgcctttttcctgaagccttgcaagctggagctggacgacttgatataaacctcagcactcatagggacaactttcatggcatccaaa

SEQ ID NO: 22702 - DNA, 374 bp, Homo sapiens
  MAP TO AC005483.1; EXPRESSED IN PLACENTA, SIGNAL = 6.5; EXPRESSED IN BRAIN, SIGNAL = 6.3; EXPRESSED IN ADULT LIVER, SIGNAL = 6.8; EXPRESSED IN LUNG, SIGNAL = 6.1; EXPRESSED IN HELA, SIGNAL = 5.8; EXPRESSED IN HEART, SIGNAL = 6.3; EXPRESSED IN FETAL LIVER, SIGNAL = 6.9; EXPRESSED IN BONE MARROW, SIGNAL = 5.2; EST_HUMAN HIT: AI929032.1, EVALUE 3.00e-14; NT HIT: gi6005855, EVALUE 1.00e-27
gcgtgagcggtgaaggcaggccatgtcctggagactgactaggtttctgcggggggctggagctctgctgggttggagatggttggttctggttctgggagtgggagtggggttggtgctgctggggctgaggcgcctgttgcagctgagatgtaggagctggcggctgctgagaggcgggtggtggctgctggggtggggtgggctgcagcggctgctgctgggactgcgagggcgcctgtggggctggttgcgggtgctggttggttgacgggggaggctgctgctgctgctgctgctgctgctgctggagctggagctggagctgctggagctgggagttcagggatgaggtagctacaaggagagaaagc

SEQ ID NO: 22703 - DNA, 175 bp, Homo sapiens
  MAP TO AC002482.1; EXPRESSED IN PLACENTA, SIGNAL = 1.3; EXPRESSED IN LUNG, SIGNAL = 1.3; EXPRESSED IN FETAL LIVER, SIGNAL = 1.3; EXPRESSED IN BONE MARROW, SIGNAL = 1.2; EXPRESSED IN BRAIN, SIGNAL = 1.3; EXPRESSED IN ADULT LIVER, SIGNAL =   1; EXPRESSED IN HEART, SIGNAL = 1.3; SWISSPROT HIT: Q99616, EVALUE 8.00e-16; NT HIT: AJ000979.1, EVALUE 8.00e-92; EST_HUMAN HIT: T64262.1, EVALUE 3.00e-58
atgcactcaacgtcccatctacttgctgcttcacatttagcagtaagaagatctccttgcagaggctgaagagctatgtgatcaccaccagcaggtgtccccagaaggctgtcatgtgggtagaaaaatccctgctcacctggctcctccccactcccacattccccaatccaaa

SEQ ID NO: 22704 - DNA, 484 bp, Homo sapiens; identical to SEQ ID NO: 5945
  MAP TO AC005660.2; EXPRESSED IN PLACENTA, SIGNAL = 2.3; EXPRESSED IN BRAIN, SIGNAL = 2.3; EXPRESSED IN BONE MARROW, SIGNAL = 2.1; EXPRESSED IN ADULT LIVER, SIGNAL = 2.5; EXPRESSED IN LUNG, SIGNAL = 2.6; EXPRESSED IN HELA, SIGNAL = 2.2; EXPRESSED IN HEART, SIGNAL = 2.5; EXPRESSED IN FETAL LIVER, SIGNAL =   2; EST_HUMAN HIT: BE067042.1, EVALUE 5.00e-41; SWISSPROT HIT: P21997, EVALUE 8.80e+00

SEQ ID NO: 22705 - DNA, 177 bp, Homo sapiens
  MAP TO AC004962.1; EXPRESSED IN ADULT LIVER, SIGNAL =  11; EXPRESSED IN PLACENTA, SIGNAL = 9.7; EXPRESSED IN LUNG, SIGNAL =  10; EXPRESSED IN HELA, SIGNAL = 9.5; EXPRESSED IN FETAL LIVER, SIGNAL =  10; EXPRESSED IN HEART, SIGNAL =  10; EXPRESSED IN BRAIN, SIGNAL =  12; EXPRESSED IN BONE MARROW, SIGNAL =  10; NT HIT: Y19210.1, EVALUE 6.40e+00; EST_HUMAN HIT: AA456701.1, EVALUE 3.00e-03; SWISSPROT HIT: Q05793, EVALUE 1.50e-01
gtcctacactcgttaccaagtcttgctaccaggaactctgcagctagctcccactaccatcgcctctcacctctgcaacctgggctgcacctgcaatggcctgagcctgtactacctggccatgctcctctccacactctggtcccacgtggctttctcccaagcgagcctctggcc

SEQ ID NO: 22706 - DNA, 117 bp, Homo sapiens
  MAP TO AC005369.1; EXPRESSED IN PLACENTA, SIGNAL =  24; EXPRESSED IN BRAIN, SIGNAL =  27; EXPRESSED IN BONE MARROW, SIGNAL =  25; EXPRESSED IN ADULT LIVER, SIGNAL =  25; EXPRESSED IN LUNG, SIGNAL =  28; EXPRESSED IN HELA, SIGNAL =  25; EXPRESSED IN HEART, SIGNAL =  23; EXPRESSED IN FETAL LIVER, SIGNAL =  22; SWISSPROT HIT: P07178, EVALUE 1.00e-13; EST_HUMAN HIT: BE899193.1, EVALUE 1.00e-47; NT HIT: gi11416831, EVALUE 7.00e-48
gtgtcctgggaagaggtgaagaatgagatggtgggagagaagggccttgcacctgaggtggctgaccgcattggggactatgtccagcaacatggtgaggaacagaaccaagcctcc

SEQ ID NO: 22707 - DNA, 204 bp, Homo sapiens
  MAP TO AC005172.1; EXPRESSED IN LUNG, SIGNAL = 2.5; EXPRESSED IN HELA, SIGNAL = 2.1; EXPRESSED IN HEART, SIGNAL = 2.5; EXPRESSED IN FETAL LIVER, SIGNAL = 2.2; EXPRESSED IN BRAIN, SIGNAL = 2.1; EXPRESSED IN PLACENTA, SIGNAL = 2.1; EXPRESSED IN BONE MARROW, SIGNAL = 2.2; EXPRESSED IN ADULT LIVER, SIGNAL = 2.3; SWISSPROT HIT: O57594, EVALUE 1.70e+00; NT HIT: AF218257.1, EVALUE 4.80e-01; EST_HUMAN HIT: N94853.1, EVALUE 1.80e-01
ggctttctccctgcctgggactctcttctctttcttctttgcctggttaactccactcatctttgaggtctcagcttgcaccagttcctcagggaaattgtccctaacatcactaagtaaaatctcccacttaggggcttgcattgccctctttgtagctcttgtcttgatagcgttcttacacatgttggtgtggttagttac

SEQ ID NO: 22708 - DNA, 214 bp, Homo sapiens
  MAP TO AC005291.1; EXPRESSED IN PLACENTA, SIGNAL = 1.2; EXPRESSED IN HEART, SIGNAL =  20; EXPRESSED IN BONE MARROW, SIGNAL = 1.2; EXPRESSED IN ADULT LIVER, SIGNAL = 1.1; EXPRESSED IN LUNG, SIGNAL = 1.5; EXPRESSED IN FETAL LIVER, SIGNAL = 1.2; EXPRESSED IN BRAIN, SIGNAL = 1.3; NT HIT: gi11321578, EVALUE 1.00e-72; SWISSPROT HIT: P13533, EVALUE 8.00e-19; EST_HUMAN HIT: BF576632.1, EVALUE 9.00e-19
agtttatctcacacggcctcgcccgcacatgaacatagatggacccaatcgcatccctttcccagatgcagttaccttcggtgccgtctggctccgcctgctcctcacgctgcttctgcttgaacttcatgttcccataatgcatcacggctcccgtcagtttgtagatcccgactttctcctctgagctgaagcccaggatgtcaatggcatt

SEQ ID NO: 22709 - DNA, 244 bp, Homo sapiens
  MAP TO AC005384.1; EXPRESSED IN LUNG, SIGNAL =   3; EXPRESSED IN BRAIN, SIGNAL = 2.5; EXPRESSED IN ADULT LIVER, SIGNAL = 2.7; EXPRESSED IN PLACENTA, SIGNAL = 2.5; EXPRESSED IN HELA, SIGNAL = 2.5; EXPRESSED IN HEART, SIGNAL = 2.5; EXPRESSED IN BONE MARROW, SIGNAL = 2.3; EXPRESSED IN FETAL LIVER, SIGNAL = 2.3; SWISSPROT HIT: P82711, EVALUE 3.60e+00; EST_HUMAN HIT: AW972550.1, EVALUE 2.00e-75; NT HIT: gi11432710, EVALUE 6.00e-78
ttttaagaaagcttcttgtgatcctttggggcttctgtgaaaaacctgatgcagtgctccatccaaactcagaaggctttgggatatgctgtattttaaagggacagtttgtaacttgggctgtaaagcaaactggggctgtgttttcgatgatgatgatgatcatgatgatgatcatcatgatcatgatgatgatcatcatgatcatgatgatgattttaacagttttacttctggcctttcc

SEQ ID NO: 22710 - DNA, 255 bp, Homo sapiens
  MAP TO AC005591.1; EXPRESSED IN PLACENTA, SIGNAL = 5.1; EXPRESSED IN LUNG, SIGNAL = 5.5; EXPRESSED IN FETAL LIVER, SIGNAL = 4.5; EXPRESSED IN BRAIN, SIGNAL = 5.8; EXPRESSED IN ADULT LIVER, SIGNAL = 4.8; EXPRESSED IN HELA, SIGNAL = 5.1; EXPRESSED IN HEART, SIGNAL = 4.8; EXPRESSED IN BONE MARROW, SIGNAL = 4.8; SWISSPROT HIT: Q14681, EVALUE 2.00e-06; NT HIT: gi9506650, EVALUE 3.00e-40; EST_HUMAN HIT: BE799873.1, EVALUE 0.00e+00
cttgtccgagtccgggtcggggtcggcctggctcaagaggtacaggaaggatttcgggtcctgacacagcggcgtctgcccagtggtgaggaagtaggtgccgccgctgtagagccggacccacttggacctgctgctggggcgctgggccaggacgctgagccccgcgctttaagggaggcacaagaagccaccccaaccccgccccgagcctgccacgggccagcggcaggagctcgcagtgattccccgcca

SEQ ID NO: 22711 - DNA, 339 bp, Homo sapiens
  MAP TO AC003104.1; EXPRESSED IN LUNG, SIGNAL = 1.1; EXPRESSED IN ADULT LIVER, SIGNAL = 1.2; EXPRESSED IN PLACENTA, SIGNAL = 1.3; EXPRESSED IN HEART, SIGNAL = 1.3; EXPRESSED IN FETAL LIVER, SIGNAL = 1.3; EXPRESSED IN BRAIN, SIGNAL = 1.2; EXPRESSED IN BONE MARROW, SIGNAL = 1.6; SWISSPROT HIT: P07645, EVALUE 3.00e+00; EST_HUMAN HIT: AI459795.1, EVALUE 5.00e-77; NT HIT: gi11426182, EVALUE 3.00e-93
atggcggaaccttcccaggccccgaccccggccccggctgcgcagccccggccccttcagtccccagcccctgccccaactccgactcctgcacccagcccggcttcagccccgattccgactcccaccccggcaccagcccctgccccagctgcagccccagccggcagcacagggactggggggcccggggtaggaagtgggggggccgggagcgggggggatccggctcgacctggcctgagccagcagcagcgcgccagtcagaggaaggcgcaagtccgggggctgccgcgcgccaagaagcttgagaagctaggggtcttctcggcttgcaag

SEQ ID NO: 22712 - DNA, 96 bp, Homo sapiens
  MAP TO AC005599.5; EXPRESSED IN LUNG, SIGNAL = 1.7; EXPRESSED IN BRAIN, SIGNAL = 1.8; EXPRESSED IN PLACENTA, SIGNAL = 1.7; EXPRESSED IN HEART, SIGNAL = 1.9; EXPRESSED IN FETAL LIVER, SIGNAL = 1.7; EXPRESSED IN BONE MARROW, SIGNAL = 1.7; EXPRESSED IN ADULT LIVER, SIGNAL = 1.8; EXPRESSED IN HELA, SIGNAL = 1.9; EST_HUMAN HIT: AI222413.1, EVALUE 3.00e-47; NT HIT: M63391.1, EVALUE 8.00e-01; SWISSPROT HIT: P13742, EVALUE 4.20e+00
cagctgagcatcaccccagcctgctccttccaggtgacactaaggaagtgcaacccctcccagaagagcatgagcctggtgaagtcctcagtggaa

SEQ ID NO: 22713 - DNA, 135 bp, Homo sapiens
  MAP TO AC005414.2; EXPRESSED IN LUNG, SIGNAL = 0.96; EXPRESSED IN BRAIN, SIGNAL = 0.75; EXPRESSED IN PLACENTA, SIGNAL =   1; EXPRESSED IN HEART, SIGNAL = 1.3; EXPRESSED IN FETAL LIVER, SIGNAL = 0.92; EXPRESSED IN BONE MARROW, SIGNAL = 0.91; EXPRESSED IN ADULT LIVER, SIGNAL = 0.93; EST_HUMAN HIT: BE857385.1, EVALUE 7.00e-03; NT HIT: AB008866.1, EVALUE 1.20e+00
ggaggaaatgacagaggaggaagaggaaatgaaattgacagagaacaaggaggaggaggaggccacaaagatgaccacgaaggtgatgatgacaatgaagaggaggaggcatgtaaattataagtcaataaagct

SEQ ID NO: 22714 - DNA, 390 bp, Homo sapiens
  MAP TO AC005611.1; EXPRESSED IN LUNG, SIGNAL = 6.7; EXPRESSED IN BRAIN, SIGNAL = 6.9; EXPRESSED IN ADULT LIVER, SIGNAL = 7.3; EXPRESSED IN PLACENTA, SIGNAL = 6.8; EXPRESSED IN HELA, SIGNAL = 7.6; EXPRESSED IN HEART, SIGNAL = 7.2; EXPRESSED IN FETAL LIVER, SIGNAL = 7.4; EXPRESSED IN BONE MARROW, SIGNAL = 7.2; NT HIT: AF031231.1, EVALUE 1.60e-02; SWISSPROT HIT: P07986, EVALUE 2.50e-01; EST_HUMAN HIT: BE889813.1, EVALUE 0.00e+00
cggcaaccagttctttttcttctccaaatgtatcctccatggagtccttcccaccactcgcatactctactcctcagccgccccttcctcctgtgaggccttcagcaccattaccttttgtgcctcctcctgcagttccttctgtcccaccacttgttacttctatgccacctcctgtttctccatcaactgctgctgccttcggtaatcctcctgtatctcacttcccaccttcaacttctgccccaaacactcttttacctgcacccccttcgggtcctcctatatcaggattttctgttggttcaacttatgacattacaaggggacatgctgggagagctccccagacacccctgatgccatcattttctgcaccttcaggaacag

SEQ ID NO: 22715 - DNA, 212 bp, Homo sapiens
  MAP TO AC004060.1; EXPRESSED IN PLACENTA, SIGNAL = 2.3; EXPRESSED IN HELA, SIGNAL = 2.2; EXPRESSED IN HEART, SIGNAL =   2; EXPRESSED IN BONE MARROW, SIGNAL = 2.1; EXPRESSED IN FETAL LIVER, SIGNAL = 2.1; EXPRESSED IN LUNG, SIGNAL = 1.8; EXPRESSED IN BRAIN, SIGNAL = 1.9; EXPRESSED IN ADULT LIVER, SIGNAL = 1.9; SWISSPROT HIT: Q15427, EVALUE 6.40e+00; NT HIT: X88891.1, EVALUE 1.30e-01; EST_HUMAN HIT: AA758878.1, EVALUE 3.00e+00
tcaagctcaagcatcagattggtggcaaagtctggactcgaacccaaatcttctggatccaaatctgacccactttctaccacctcgagctgtagctcctccaggaactgtgcctcctccccaagctctgggtcctccccgagttggggttcctccacgagctggggctcctccagcctttccaccttcatctcacagctgcccaagccttg

SEQ ID NO: 22716 - DNA, 185 bp, Homo sapiens
  MAP TO AC005701.1; EXPRESSED IN ADULT LIVER, SIGNAL = 2.6; EXPRESSED IN PLACENTA, SIGNAL = 3.2; EXPRESSED IN LUNG, SIGNAL = 2.9; EXPRESSED IN HELA, SIGNAL = 2.5; EXPRESSED IN HEART, SIGNAL = 2.2; EXPRESSED IN BRAIN, SIGNAL = 2.5; EXPRESSED IN BONE MARROW, SIGNAL = 2.4; EXPRESSED IN FETAL LIVER, SIGNAL = 2.4; SWISSPROT HIT: P39057, EVALUE 5.00e-25; NT HIT: AF257737.1, EVALUE 2.00e-95
ctgcaagggcatctcggggtcaaattcgaactgggggacgagcttggaccaaggctcgaatttcttggtctctgggtcgatgtaatagtcaaagatggttccttgggaaggaaacttgactgttttgaactcagtcagccaccatttgctgaactctgcccggtagtccacaagctgcaaaaaca

SEQ ID NO: 22717 - DNA, 161 bp, Homo sapiens
  MAP TO AC002542.1; EXPRESSED IN PLACENTA, SIGNAL = 3.7; EXPRESSED IN HEART, SIGNAL = 3.1; EXPRESSED IN BONE MARROW, SIGNAL = 3.5; EXPRESSED IN ADULT LIVER, SIGNAL =   4; EXPRESSED IN HELA, SIGNAL = 3.7; EXPRESSED IN FETAL LIVER, SIGNAL = 3.8; EXPRESSED IN LUNG, SIGNAL = 4.2; EXPRESSED IN BRAIN, SIGNAL = 3.1; SWISSPROT HIT: Q92355, EVALUE 5.20e+00; EST_HUMAN HIT: AW082796.1, EVALUE 1.40e-01
caccttctcaggttgtggctgcttcatccttccagttattgagaccaaatactttgaggttatccatgactcctttatttctgacactccacatgcactgccagtaagtgttgttgactttaccttcaaatgtatcaccattgcctccaccattactacct

SEQ ID NO: 22718 - DNA, 139 bp, Homo sapiens
  MAP TO AC004675.1; EXPRESSED IN PLACENTA, SIGNAL = 6.3; EXPRESSED IN LUNG, SIGNAL = 5.4; EXPRESSED IN HELA, SIGNAL =   5; EXPRESSED IN HEART, SIGNAL = 4.6; EXPRESSED IN BRAIN, SIGNAL = 5.2; EXPRESSED IN BONE MARROW, SIGNAL =   5; EXPRESSED IN FETAL LIVER, SIGNAL = 4.2; EXPRESSED IN ADULT LIVER, SIGNAL = 4.6; NT HIT: gi11426469, EVALUE 8.00e-73; EST_HUMAN HIT: AA400242.1, EVALUE 1.00e-72; SWISSPROT HIT: P17897, EVALUE 4.10e-02
agtcactcagggagtaaccctcaaacccatccaagtcctccagctgcagcacctgggccaagtcacagcgactgatgaggctggcctgatttagggcaagaaagctgctgaccaaatagatgagtagcgcctttgtcat

SEQ ID NO: 22719 - DNA, 370 bp, Homo sapiens
  MAP TO AC004816.1; EXPRESSED IN PLACENTA, SIGNAL =   3; EXPRESSED IN ADULT LIVER, SIGNAL =   3; EXPRESSED IN LUNG, SIGNAL = 3.3; EXPRESSED IN HELA, SIGNAL = 3.2; EXPRESSED IN HEART, SIGNAL = 2.8; EXPRESSED IN FETAL LIVER, SIGNAL = 2.8; EXPRESSED IN BRAIN, SIGNAL = 3.4; EXPRESSED IN BONE MARROW, SIGNAL = 3.1; NT HIT: gi11425967, EVALUE 5.80e-02; SWISSPROT HIT: Q02779, EVALUE 1.00e-16
atgctgttgctaggagacccctctgcctccctgacgctgctctccctctcctccatctccgagtgcaactccacacgctccctgctgcgctccgacagcgatgaaattgtcgtgtatgagatgccagtcagcccagtcgaggcccctcccctgagtccatgtacccacaaccccctggtcaatgtccgagtagagcgcttcaaacgagatcctaaccaatctctgactcccacccatgtcaccctcaccaccccctcgcagcccagcagtcaccggcggactccttctgatggggcccttaagccagagactctcctagccagcaggagcccctccagcaatgggttgagccccagtcctggagcaggtg

SEQ ID NO: 22720 - DNA, 455 bp, Homo sapiens
  MAP TO AC005840.1; EXPRESSED IN PLACENTA, SIGNAL = 4.5; EXPRESSED IN LUNG, SIGNAL = 5.1; EXPRESSED IN HEART, SIGNAL = 3.7; EXPRESSED IN BRAIN, SIGNAL = 5.6; EXPRESSED IN BONE MARROW, SIGNAL = 5.4; EXPRESSED IN ADULT LIVER, SIGNAL = 3.6; EXPRESSED IN HELA, SIGNAL = 4.3; EXPRESSED IN FETAL LIVER, SIGNAL = 3.8; EST_HUMAN HIT: BF663559.1, EVALUE 1.00e-121; NT HIT: L24493.1, EVALUE 0.00e+00; SWISSPROT HIT: P26842, EVALUE 4.00e-24
ctggctcacacatctggcagcacagctttccctgagcccagtagtgcctctctgggcagctcttgggggctggagtagttgagagccccaccagggtccccagaacgcacagccaccagggatgtggccgtgccatggtccctgcccaggcggctcctttctgtgcccagttgctgatgctggcctctggagttagcacctccaagctgggcgctgctgtctcttctttgcaccccctgggcagtggctgcttcaggtggcaagccaacctttgaaggcagaatctctattgtggctgttttttttttctctctcatagcagcaacctccacccccttccccttccgtgtgctggggagagtattaaagagcaaactctgtgagacctgctgctcttcaaacatgcttcctccaacacatgagccttccttagtttccgcctctcctgctcatga

SEQ ID NO: 22721 - DNA, 85 bp, Homo sapiens
  MAP TO AC004448.1; EXPRESSED IN ADULT LIVER, SIGNAL =  11; EXPRESSED IN PLACENTA, SIGNAL =  14; EXPRESSED IN LUNG, SIGNAL =  14; EXPRESSED IN HELA, SIGNAL =  13; EXPRESSED IN HEART, SIGNAL =  12; EXPRESSED IN BRAIN, SIGNAL =  12; EXPRESSED IN FETAL LIVER, SIGNAL =  12; EXPRESSED IN BONE MARROW, SIGNAL =  12; SWISSPROT HIT: Q03350, EVALUE 5.60e+00; EST_HUMAN HIT: T69629.1, EVALUE 2.00e-36
gggtattgcaggcaccaatggaacaggttggggaggagagtttgggaccaagaacacccatgaacccttagaagccaccatagag

SEQ ID NO: 22722 - DNA, 197 bp, Homo sapiens
  MAP TO AC002544.1; EXPRESSED IN PLACENTA, SIGNAL = 5.7; EXPRESSED IN LUNG, SIGNAL = 6.1; EXPRESSED IN FETAL LIVER, SIGNAL =   6; EXPRESSED IN BRAIN, SIGNAL = 6.7; EXPRESSED IN BONE MARROW, SIGNAL = 6.6; EXPRESSED IN ADULT LIVER, SIGNAL = 7.5; EXPRESSED IN HELA, SIGNAL = 5.8; EXPRESSED IN HEART, SIGNAL = 5.3; NT HIT: gi11423972, EVALUE 5.00e-47; SWISSPROT HIT: Q07266, EVALUE 1.30e+00; EST_HUMAN HIT: BF343689.1, EVALUE 8.00e-47
acactgagcgatgatgaagaggagaggcatcccaacacccaccgggctaacctcttccgctggcagcaccaagcccgggtggagctcatggagcagttccagaaggagaaggaggaactggacaggggctgctgggagtacaagtgcaagatggccgagtgccagaggaagctgaaggagctggaggtgtcagaggg

SEQ ID NO: 22723 - DNA, 315 bp, Homo sapiens
  MAP TO AC004527.2; EXPRESSED IN PLACENTA, SIGNAL = 2.6; EXPRESSED IN LUNG, SIGNAL = 2.7; EXPRESSED IN HEART, SIGNAL = 2.1; EXPRESSED IN BRAIN, SIGNAL =   2; EXPRESSED IN BONE MARROW, SIGNAL =   2; EXPRESSED IN ADULT LIVER, SIGNAL = 2.5; EXPRESSED IN HELA, SIGNAL = 2.3; EXPRESSED IN FETAL LIVER, SIGNAL =   2; NT HIT: AL163204.2, EVALUE 0.00e+00; SWISSPROT HIT: Q64612, EVALUE 4.00e-01; EST_HUMAN HIT: AJ003609.1, EVALUE 3.00e-32
agtgacaaaaaatgtggcactgtgcctgcatccagaagctggccgtgtggttcatccaccagattgggccctttctgcacttgaacatagaccccacttcaccatagatgccttccacactgtcagtgagctctttgccaatcagcccaggcaggacctggacccagtcatggacctgttaatgctgtctcagggacaccaggccaacaccctggacatcatccacatacccaagtaatctcttaccaagtccttctcaagatggcctgtggtctgcctcttggcatccaagaagcccacagtgctgtagaagcc

SEQ ID NO: 22724 - DNA, 450 bp, Homo sapiens
  MAP TO AC005509.1; EXPRESSED IN PLACENTA, SIGNAL = 3.7; EXPRESSED IN BRAIN, SIGNAL = 1.5; EXPRESSED IN BONE MARROW, SIGNAL = 1.3; EXPRESSED IN ADULT LIVER, SIGNAL =   2; EXPRESSED IN LUNG, SIGNAL = 5.5; EXPRESSED IN HELA, SIGNAL = 4.5; EXPRESSED IN HEART, SIGNAL = 1.5; EXPRESSED IN FETAL LIVER, SIGNAL = 1.6; SWISSPROT HIT: P08727, EVALUE 7.00e-47; NT HIT: J03607.1, EVALUE 1.00e-125; EST_HUMAN HIT: BE562526.1, EVALUE 1.00e-125
tggtgaaccagcgttcagcatcctttcggttctgcttggcatgacctcatattggctctgcatgtcactcaggatattggtggcatcagcgcccagagccgaatccacttccacactgatctggcctcccacctggcccctcagggcattaatttccccctcatggttcttcttcaggtaggccagctcttccttcagcccttcggtctgcatctccaggtcggtcctggccagggtcagctcaaccagcaccccgtgcaggccattatgtcagcctccacactcacgagcagagtctgctccctctcatacttagttcagaagtcatctgcagccagacaggcattgttgatctgcaggacaatcctggaattctcaatgatgtcaccaagaatcttgtagcacaggtactcgatggtcccgtagtagtggctgtagtcatgggagggc

SEQ ID NO: 22725 - DNA, 124 bp, Homo sapiens
  MAP TO AC004242.1; EXPRESSED IN PLACENTA, SIGNAL = 3.5; EXPRESSED IN ADULT LIVER, SIGNAL = 3.5; EXPRESSED IN LUNG, SIGNAL = 3.4; EXPRESSED IN HELA, SIGNAL = 3.1; EXPRESSED IN HEART, SIGNAL =   3; EXPRESSED IN FETAL LIVER, SIGNAL = 3.1; EXPRESSED IN BRAIN, SIGNAL =   3; EXPRESSED IN BONE MARROW, SIGNAL = 3.3; EST_HUMAN HIT: AA761215.1, EVALUE 9.00e-30; SWISSPROT HIT: P51506, EVALUE 1.40e+00; NT HIT: AF114156.1, EVALUE 4.00e-28
tacagcttggttttacacgttttagggagacaggaaacatcagtcaatatatgtaagaagtacactggttccctccagaaagtcagggacaactcaaagcagggagggggcttccaggtcacag

SEQ ID NO: 22726 - DNA, 170 bp, Homo sapiens
  MAP TO AC006137.1; EXPRESSED IN PLACENTA, SIGNAL =   3; EXPRESSED IN HEART, SIGNAL = 4.1; EXPRESSED IN LUNG, SIGNAL = 3.4; EXPRESSED IN FETAL LIVER, SIGNAL = 4.5; EXPRESSED IN BRAIN, SIGNAL = 5.8; EXPRESSED IN BONE MARROW, SIGNAL = 3.3; EXPRESSED IN ADULT LIVER, SIGNAL = 3.4; EXPRESSED IN HELA, SIGNAL = 3.6; NT HIT: gi11497611, EVALUE 3.00e-91; SWISSPROT HIT: P04289, EVALUE 7.80e-01; EST_HUMAN HIT: AU118171.1, EVALUE 5.00e-91
aaagaggagcgtgtctctgaactgcgccatcaactccagtctcggcagcagctccgctcccggcgccacccaccgacacccccagaaccctctgggggcctgcccaggggaccccctgagccccccgaccggcttagctgtgatgggagtcgagtgcatttgctttataa

SEQ ID NO: 22727 - DNA, 118 bp, Homo sapiens
  MAP TO AC005905.1; EXPRESSED IN BRAIN, SIGNAL = 3.4; EXPRESSED IN ADULT LIVER, SIGNAL = 3.4; EXPRESSED IN PLACENTA, SIGNAL = 3.9; EXPRESSED IN LUNG, SIGNAL =   3; EXPRESSED IN HELA, SIGNAL = 3.9; EXPRESSED IN HEART, SIGNAL = 3.1; EXPRESSED IN BONE MARROW, SIGNAL =   4; EXPRESSED IN FETAL LIVER, SIGNAL = 4.1; NT HIT: X06411.1, EVALUE 6.60e-02; SWISSPROT HIT: P51484, EVALUE 9.30e+00
aaaaagcagccagagagcaataggggaaagggcagaaggtccaccaaccacagccactttcacactgaactccacgggcaaagccctatcctgcatcttgttatacgactgtgactga

SEQ ID NO: 22728 - DNA, 160 bp, Homo sapiens
  MAP TO AC004933.1; EXPRESSED IN LUNG, SIGNAL = 1.6; EXPRESSED IN BRAIN, SIGNAL = 1.6; EXPRESSED IN PLACENTA, SIGNAL = 1.5; EXPRESSED IN HEART, SIGNAL = 1.6; EXPRESSED IN FETAL LIVER, SIGNAL = 1.5; EXPRESSED IN BONE MARROW, SIGNAL = 1.3; EXPRESSED IN ADULT LIVER, SIGNAL = 1.6; EXPRESSED IN HELA, SIGNAL = 1.7; SWISSPROT HIT: Q9UPW0, EVALUE 6.00e-01; NT HIT: M37818.1, EVALUE 3.70e-01; EST_HUMAN HIT: BE266536.1, EVALUE 1.40e-01
tgcttctgcaccttctgcagatcagcaagggtgtgggccgagctgactgtggccttggaggctgtctgtccctgcaggctggccactggctgtagtaggagagtgcccaggtgctgtgggttaccctggaccatcctgtgggcctgaatttggatgggat

SEQ ID NO: 22729 - DNA, 387 bp, Homo sapiens
  MAP TO AC005522.1; EXPRESSED IN PLACENTA, SIGNAL = 3.7; EXPRESSED IN LUNG, SIGNAL = 3.8; EXPRESSED IN HEART, SIGNAL = 3.5; EXPRESSED IN FETAL LIVER, SIGNAL = 3.5; EXPRESSED IN BRAIN, SIGNAL = 4.1; EXPRESSED IN BONE MARROW, SIGNAL = 3.7; EXPRESSED IN ADULT LIVER, SIGNAL = 3.8; EXPRESSED IN HELA, SIGNAL = 3.3; SWISSPROT HIT: Q06633, EVALUE 1.00e-57; NT HIT: gi6005983, EVALUE 0.00e+00; EST_HUMAN HIT: BE747227.1, EVALUE 1.00e-122
atggagctgagctataggctcttcatctgcctcctgctctggggtagtactgagctgtgctacccccaacccctctggctcttgcagggtggagccagccatcctgagacgtccgtacagcccgtactggtggagtgtcaggaggccactctgatggtcatggtcagcaaagacctttttggcaccgggaagctcatcagggctgctgacctcaccttgggcccagaggcctgtgagcctctggtctccatggacacagaagatgtggtcaggtttgaggttggactccacgagtgtggcaacagcatgcaggtaagagaggctgggggccctggctttggtgggaggatgttcgaggcagccgggtatggggactgtggccaccat

SEQ ID NO: 22730 - DNA, 187 bp, Homo sapiens
  MAP TO AC005908.1; EXPRESSED IN PLACENTA, SIGNAL = 2.3; EXPRESSED IN HEART, SIGNAL = 2.1; EXPRESSED IN BRAIN, SIGNAL = 2.4; EXPRESSED IN BONE MARROW, SIGNAL = 2.4; EXPRESSED IN ADULT LIVER, SIGNAL =   2; EXPRESSED IN LUNG, SIGNAL = 2.7; EXPRESSED IN HELA, SIGNAL = 2.2; EXPRESSED IN FETAL LIVER, SIGNAL = 2.2; NT HIT: AF064706.1, EVALUE 6.80e+00; EST_HUMAN HIT: AI971938.1, EVALUE 6.50e-01; SWISSPROT HIT: Q28462, EVALUE 1.50e-01
cctgtgggtaattcagacggatggtcccgggcgtttcgcgaggagaaggctgttggtgaattgggggatgatcgggctgcacaacagatcgctcgtgatgccgaatgtgtgctcgtgggtcctgccctcccacctgggagaggagttttgcttgtggcttcagagtttctgggagttccttgaaatt

SEQ ID NO: 22731 - DNA, 445 bp, Homo sapiens
  MAP TO AC004098.1; EXPRESSED IN PLACENTA, SIGNAL = 4.1; EXPRESSED IN HEART, SIGNAL = 4.1; EXPRESSED IN BONE MARROW, SIGNAL = 3.9; EXPRESSED IN ADULT LIVER, SIGNAL = 4.2; EXPRESSED IN LUNG, SIGNAL = 5.5; EXPRESSED IN HELA, SIGNAL = 4.1; EXPRESSED IN FETAL LIVER, SIGNAL = 3.9; EXPRESSED IN BRAIN, SIGNAL = 4.8; EST_HUMAN HIT: AI638412.1, EVALUE 0.00e+00; NT HIT: AY009397.1, EVALUE 0.00e+00; SWISSPROT HIT: P17553, EVALUE 3.00e-89
tagcagcaccagtggaagatgcagtggcatttttccttccgcttctccgtcctcgtgttgtggccccggccacagcagagcagatcgcagccatcgatgccgtgggaggtgacattgcaagtccggtcccttgtgccaaaggaacccgtctctgggttgggctcacaaaagttgggggagttctcgtagtagaccaggtccctctccgtgggtggcttgaagagcgagtacttggcccggagggtctccacccagcctcgggactcacggtgcttctctactaccatctccgaggcgctgtcatacttgtccttgaggaagtcaccgatggcacggaagtcaggctgcgcccaccagcaggtcttcacctcacagctgcccgacagcccgtggcacttgcatttgaggtgcatgtggtccaggatagtctgggggagagaagtgg

SEQ ID NO: 22732 - DNA, 511 bp, Homo sapiens
  MAP TO AC004943.1; EXPRESSED IN PLACENTA, SIGNAL = 1.5; EXPRESSED IN LUNG, SIGNAL = 1.6; EXPRESSED IN FETAL LIVER, SIGNAL = 1.4; EXPRESSED IN BRAIN, SIGNAL = 1.4; EXPRESSED IN BONE MARROW, SIGNAL = 1.4; EXPRESSED IN ADULT LIVER, SIGNAL = 1.7; EXPRESSED IN HELA, SIGNAL = 1.7; EXPRESSED IN HEART, SIGNAL = 1.8; EST_HUMAN HIT: AW500356.1, EVALUE 4.80e-01; SWISSPROT HIT: Q04893, EVALUE 9.70e-02; NT HIT: L32832.1, EVALUE 0.00e+00
catttgagtgcgaaaacgtttctgcccaggccgatctccgctgtcaccagatttgcctgcagatccactcgcaccaggactcggggagcagggatctgcaaggcttgaggtttcactgtagtccactgtaccttcattgtcatattccttgctataaaagctcggggccgggctgaccagaccagatgacaaccgatcttcatactcagacattgccatcatggccgctttggtcaacccttcgttgggtgcagaagaggatttggtttcagttgctattcccgttgcactgtcgttatctgcgttgccctcgtctccagttgtggtatctgtgattgctgtgttgacagaggaacagtcatcgttgtccagcttagtttggtcaaagtttagattaactgaggacatggaggggctttcaaagtcttcaatcccttccaccttaatggaggaagggcttagaagagttctgggtgacaattccatggttttactcacaggtgagaggggg

SEQ ID NO: 22733 - DNA, 173 bp, Homo sapiens
  MAP TO AC005529.7; EXPRESSED IN PLACENTA, SIGNAL = 2.4; EXPRESSED IN LUNG, SIGNAL = 3.6; EXPRESSED IN FETAL LIVER, SIGNAL = 4.2; EXPRESSED IN BRAIN, SIGNAL = 2.5; EXPRESSED IN ADULT LIVER, SIGNAL = 3.1; EXPRESSED IN HELA, SIGNAL = 2.5; EXPRESSED IN HEART, SIGNAL = 2.5; EXPRESSED IN BONE MARROW, SIGNAL = 3.8; NT HIT: AF050113.1, EVALUE 1.00e-01; SWISSPROT HIT: P34099, EVALUE 1.50e-01; EST_HUMAN HIT: BF036364.1, EVALUE 8.00e-93
tcaggatgggatcatgcctttgctcctcttgcggtcggccatggttctccggttgtggttggctcttgtcgccttgttggcttccttcttcctgcgttcctgggttgtctcgcggctctgcccatggcctcgggggctgccggccactgctgttgagctgtcatgccggtacc

SEQ ID NO: 22734 - DNA, 125 bp, Homo sapiens
  MAP TO AC004387.1; EXPRESSED IN BRAIN, SIGNAL = 1.2; EXPRESSED IN ADULT LIVER, SIGNAL = 1.4; EXPRESSED IN PLACENTA, SIGNAL = 1.3; EXPRESSED IN LUNG, SIGNAL = 1.2; EXPRESSED IN HELA, SIGNAL = 2.1; EXPRESSED IN HEART, SIGNAL = 1.3; EXPRESSED IN BONE MARROW, SIGNAL = 1.5; EXPRESSED IN FETAL LIVER, SIGNAL = 1.4; SWISSPROT HIT: P55028, EVALUE 3.10e+00; EST_HUMAN HIT: AI078387.1, EVALUE 2.00e-64; NT HIT: gi11496282, EVALUE 2.00e-64
agagaccaatcctcagaaatatcaagaaagtgagatggctgcagaggttgagcctcctgagcccctgcttggtgacaagggacctgggtatgctcttcttcactgaagacacaaggtggacaatc

SEQ ID NO: 22735 - DNA, 105 bp, Homo sapiens
  MAP TO AC004104.1; EXPRESSED IN LUNG, SIGNAL = 7.3; EXPRESSED IN HELA, SIGNAL = 7.2; EXPRESSED IN HEART, SIGNAL = 6.2; EXPRESSED IN FETAL LIVER, SIGNAL =  11; EXPRESSED IN BRAIN, SIGNAL = 7.6; EXPRESSED IN BONE MARROW, SIGNAL = 7.4; EXPRESSED IN PLACENTA, SIGNAL = 7.3; EXPRESSED IN ADULT LIVER, SIGNAL =   8; NT HIT: AF027807.1, EVALUE 2.30e-01; SWISSPROT HIT: P35761, EVALUE 9.40e+00; EST_HUMAN HIT: BE300091.1, EVALUE 5.00e-03
gacttccctagacaagatcacccccatgttatacacttccatggcttcattcatagccccactgcatattgtaattatacattcgtgtgattatttaattgatct

SEQ ID NO: 22736 - DNA, 249 bp, Homo sapiens
  MAP TO AC004830.1; EXPRESSED IN LUNG, SIGNAL = 3.5; EXPRESSED IN FETAL LIVER, SIGNAL =   3; EXPRESSED IN BONE MARROW, SIGNAL = 3.1; EXPRESSED IN HELA, SIGNAL =   3; EXPRESSED IN BRAIN, SIGNAL = 3.2; EXPRESSED IN ADULT LIVER, SIGNAL = 2.8; EXPRESSED IN PLACENTA, SIGNAL = 3.1; EXPRESSED IN HEART, SIGNAL = 2.9; SWISSPROT HIT: P51459, EVALUE 2.20e+00
gctgaagcgtctgtgatgcacagggtgagattttgggatgataaggaatgttgaaatattataattgatgagatttggatgacaggctctcttgctgcttccagattgtttctgtgaataatacaatgcttccagctccttcaaaaccaaactgcctctcttgtggttaacaagggtgggatgagggaaaagagaacgtagcaactgaatgacaaattgatgccagattttagacttgataaaattcac

SEQ ID NO: 22737 - DNA, 291 bp, Homo sapiens
  MAP TO AC004551.1; EXPRESSED IN PLACENTA, SIGNAL = 0.82; EXPRESSED IN LUNG, SIGNAL = 0.67; EXPRESSED IN BONE MARROW, SIGNAL = 0.79; EXPRESSED IN ADULT LIVER, SIGNAL = 0.72; EXPRESSED IN FETAL LIVER, SIGNAL = 0.78; EXPRESSED IN HEART, SIGNAL = 4.1; NT HIT: gi5453823, EVALUE 0.00e+00; SWISSPROT HIT: P29728, EVALUE 2.00e-23; EST_HUMAN HIT: AW505430.1, EVALUE 0.00e+00
ctgggcttctgaagctgctgtttcaggaagtctccaacagtcttgtccttggcgttgtagttgatggtccagtagatacagagctggcggtactgggtgaccagctccaggaccgtgcggaagccctcagccatgttgaactgggagtccttcccgccctgctcccaggcatacacagtcaggagttccagcccgtgctgtgggggtagggagcctctccccttggagatcttggtacactggagaacgagaagaaagatatgttggttcatattggcactgatgaggtac

SEQ ID NO: 22738 - DNA, 152 bp, Homo sapiens
  MAP TO AC005972.1; EXPRESSED IN ADULT LIVER, SIGNAL = 1.3; EXPRESSED IN PLACENTA, SIGNAL = 1.4; EXPRESSED IN LUNG, SIGNAL = 1.5; EXPRESSED IN HEART, SIGNAL = 1.4; EXPRESSED IN BRAIN, SIGNAL = 1.2; EXPRESSED IN BONE MARROW, SIGNAL = 1.3; EXPRESSED IN FETAL LIVER, SIGNAL =   2; NT HIT: gi7374113, EVALUE 1.40e+00; SWISSPROT HIT: Q95281, EVALUE 2.70e-01; EST_HUMAN HIT: AI991089.1, EVALUE 2.00e-03
agagtaccaatttgattactttgggcttgaggagcacctttttggcctctgtataggtgctcattgccttggaaatgttggcctgaatcttttcgaggacttttttgttgggcttgttggcagaattatgcattccttagaatctgaatgtc

SEQ ID NO: 22739 - DNA, 519 bp, Homo sapiens
  MAP TO AC005598.6; EXPRESSED IN PLACENTA, SIGNAL = 4.1; EXPRESSED IN LUNG, SIGNAL = 4.4; EXPRESSED IN HELA, SIGNAL =   4; EXPRESSED IN FETAL LIVER, SIGNAL = 3.8; EXPRESSED IN ADULT LIVER, SIGNAL = 4.4; EXPRESSED IN HEART, SIGNAL = 3.6; EXPRESSED IN BRAIN, SIGNAL = 4.1; EXPRESSED IN BONE MARROW, SIGNAL =   4; SWISSPROT HIT: O60269, EVALUE 1.00e-01; EST_HUMAN HIT: AA434584.1, EVALUE 0.00e+00; NT HIT: M21095.1, EVALUE 8.30e-02
gggcaaggtgctggagaagtctggcttcgtgtcgactgccgcaacacagaccagacctactggtgtgagtacagggggcagcccagcatgtgccaggctttcgctgctgaccccaaaccttactggaatcaagccctgcaggagctgaggcgccttcaccatgcgtgccagggggccccggtgcttaggccatccgtgtgcagggaggctggaccccaggcccatatgcagcaggtgacttccagcctcaagggcagcccagagcccaaccagcagcctgaggctgggacgccatctctgaggcccaaggccacagtgaaactcacagaagcaacacagctgggaaaggactcgatggaagagctgggaaaagccaaacccaccacccgacccacagccaaacctacccagcctggacccaggcccggagggaatgaggaagcaaagaagaaggcctgggaacattgttggaaacccttccaggccctgtgcgcctttctcatcagcttcttccgaggg

SEQ ID NO: 22740 - DNA, 134 bp, Homo sapiens
  MAP TO AC004447.1; EXPRESSED IN LUNG, SIGNAL = 4.3; EXPRESSED IN HELA, SIGNAL = 4.1; EXPRESSED IN HEART, SIGNAL = 3.7; EXPRESSED IN FETAL LIVER, SIGNAL = 4.4; EXPRESSED IN BONE MARROW, SIGNAL = 4.1; EXPRESSED IN PLACENTA, SIGNAL = 4.4; EXPRESSED IN BRAIN, SIGNAL = 4.4; EXPRESSED IN ADULT LIVER, SIGNAL = 3.7; NT HIT: AB002363.1, EVALUE 4.00e-65; SWISSPROT HIT: O15226, EVALUE 5.00e-05; EST_HUMAN HIT: AW393969.1, EVALUE 1.00e-69
tgaccggctccctgatgccctttccgagggagcccaggccatggccctccttccagcccatcttctgcagcatctggaagcccaggttcttatcggtcagcttctgctgggcgaagtccaagtccttgggtttc

SEQ ID NO: 22741 - DNA, 158 bp, Homo sapiens
  MAP TO AC004125.1; EXPRESSED IN PLACENTA, SIGNAL = 2.5; EXPRESSED IN BRAIN, SIGNAL = 2.4; EXPRESSED IN BONE MARROW, SIGNAL =   2; EXPRESSED IN ADULT LIVER, SIGNAL = 2.2; EXPRESSED IN LUNG, SIGNAL = 2.6; EXPRESSED IN HELA, SIGNAL = 2.2; EXPRESSED IN HEART, SIGNAL = 1.9; EXPRESSED IN FETAL LIVER, SIGNAL = 2.1; NT HIT: L11572.1, EVALUE 3.60e-01; EST_HUMAN HIT: BF378533.1, EVALUE 1.40e-01; SWISSPROT HIT: P48343, EVALUE 4.00e+00
tccttaccaaatcttgcaaagctcctagaatcatcattcttgctgggcagccccttcccaactcacagattctcacctttcattggctcaggctggtatttactcctgtgcagcttccccttctcagcctggagatccaacaagagatgcaaagtgag

SEQ ID NO: 22742 - DNA, 182 bp, Homo sapiens
  MAP TO AC004704.2; EXPRESSED IN HEART, SIGNAL = 1.5; EXPRESSED IN ADULT LIVER, SIGNAL = 1.6; EXPRESSED IN PLACENTA, SIGNAL = 1.4; EXPRESSED IN LUNG, SIGNAL = 1.6; EXPRESSED IN FETAL LIVER, SIGNAL = 1.4; EXPRESSED IN BRAIN, SIGNAL = 1.5; EXPRESSED IN BONE MARROW, SIGNAL = 1.7; SWISSPROT HIT: Q00956, EVALUE 4.50e-01; EST_HUMAN HIT: H77294.1, EVALUE 6.30e-01
ggtctgtttggctcccaagccatgctcttaacctctatattctagtacttccggagaaaagtcatgagaatgagcagggcatatgtgaagatagcctgactgaagaagaagagttcatgttgagtgtggaggaaaacaaaggtcaacaggcagattgggaccaagttagagagtgcctggaa

SEQ ID NO: 22743 - DNA, 89 bp, Homo sapiens
  MAP TO AC004836.2; EXPRESSED IN LUNG, SIGNAL =   6; EXPRESSED IN HEART, SIGNAL = 5.6; EXPRESSED IN ADULT LIVER, SIGNAL = 5.6; EXPRESSED IN BONE MARROW, SIGNAL =   6; EXPRESSED IN BRAIN, SIGNAL = 5.9; EXPRESSED IN FETAL LIVER, SIGNAL = 5.9; EXPRESSED IN HELA, SIGNAL =   6; EXPRESSED IN PLACENTA, SIGNAL = 5.5; NT HIT: L35772.1, EVALUE 7.30e-01; EST_HUMAN HIT: AI003361.1, EVALUE 1.10e+00
ccaaatggcagatttatgaaggttctgtttgacaagagcaaaggatccactttgagcagctctgggcctatggaaggcaaggtgttcat

SEQ ID NO: 22744 - DNA, 282 bp, Homo sapiens
  MAP TO AC004736.1; EXPRESSED IN LUNG, SIGNAL = 3.6; EXPRESSED IN FETAL LIVER, SIGNAL = 3.9; EXPRESSED IN BONE MARROW, SIGNAL = 6.2; EXPRESSED IN HELA, SIGNAL = 3.7; EXPRESSED IN BRAIN, SIGNAL = 3.7; EXPRESSED IN ADULT LIVER, SIGNAL =   4; EXPRESSED IN PLACENTA, SIGNAL = 3.7; EXPRESSED IN HEART, SIGNAL = 3.5; SWISSPROT HIT: O69635, EVALUE 1.10e-01; NT HIT: AF109905.1, EVALUE 6.80e-01; EST_HUMAN HIT: T95291.1, EVALUE 4.00e+00
cttttggtctagagtgaatcccctggtcatgagaccgctcagaatagccagaggcattatattcagctgtcgtggaggccttgagatcctcagcccaggcagtggaccctggaatgagcccccactgaaccccctcccccacctctgagacaaccaccacctccctccttgatagacttcagccaatcccctccaaagcttctggcagaggccaggcctcctgctcagagtcaaggagcacagactccaaatgctctgaggcgatgtgacacaaagcacctg

SEQ ID NO: 22745 - DNA, 210 bp, Homo sapiens
  MAP TO AC004843.1; EXPRESSED IN HELA, SIGNAL = 3.9; EXPRESSED IN HEART, SIGNAL = 3.7; EXPRESSED IN BRAIN, SIGNAL = 4.1; EXPRESSED IN ADULT LIVER, SIGNAL = 3.8; EXPRESSED IN LUNG, SIGNAL = 4.1; EXPRESSED IN FETAL LIVER, SIGNAL = 3.8; EXPRESSED IN BONE MARROW, SIGNAL =   4; EXPRESSED IN PLACENTA, SIGNAL = 3.7; EST_HUMAN HIT: BE969346.1, EVALUE 7.40e-01; NT HIT: AF173845.1, EVALUE 3.20e-02; SWISSPROT HIT: P28284, EVALUE 1.30e+00
aatccagtgggaagctctctgggaaaccacagctgttgggggccatggggccagaaacctgctgccttatggagctcagcaggaggatctgaaggcaagcagcaacatgccagcagggcatgggtgggtggatgggggactggtggagtttggaggactggggagctatgacaatgtgaagagagacccagaaatggtaggtggtcagag

SEQ ID NO: 22746 - DNA, 117 bp, Homo sapiens
  MAP TO AC004595.1; EXPRESSED IN PLACENTA, SIGNAL = 6.8; EXPRESSED IN LUNG, SIGNAL = 6.9; EXPRESSED IN FETAL LIVER, SIGNAL = 9.2; EXPRESSED IN HELA, SIGNAL = 7.7; EXPRESSED IN BRAIN, SIGNAL = 8.5; EXPRESSED IN BONE MARROW, SIGNAL = 6.3; EXPRESSED IN ADULT LIVER, SIGNAL = 9.3; EXPRESSED IN HEART, SIGNAL =  12; NT HIT: gi4507168, EVALUE 1.00e-43; EST_HUMAN HIT: BF516188.1, EVALUE 2.00e-43; SWISSPROT HIT: Q02446, EVALUE 1.00e-06
atcagaagaaggaggaggaggaggaggcggcagcggcagcggcgatggctacagaaggagggaaaacctctgagccagagaataacaataaaaaacccaaaacctcaggctcccagg

SEQ ID NO: 22747 - DNA, 138 bp, Homo sapiens
  MAP TO AC005606.1; EXPRESSED IN LUNG, SIGNAL = 4.3; EXPRESSED IN BONE MARROW, SIGNAL = 3.9; EXPRESSED IN PLACENTA, SIGNAL = 4.1; EXPRESSED IN HELA, SIGNAL = 3.6; EXPRESSED IN HEART, SIGNAL =   3; EXPRESSED IN FETAL LIVER, SIGNAL = 3.6; EXPRESSED IN BRAIN, SIGNAL = 3.6; EXPRESSED IN ADULT LIVER, SIGNAL = 3.6; NT HIT: gi4826987, EVALUE 3.00e-72; SWISSPROT HIT: Q92901, EVALUE 6.00e-23; EST_HUMAN HIT: AA630306.1, EVALUE 8.00e-12
ggtgatagcccttctgcccggcccgagcaatggagcagcccacgcgggcggggtgccaggcgccaatgcaggccaccttgcgcaggcccttatgggtcttccgcggcagcttcttggtatgccagcggcttgtgaccc

SEQ ID NO: 22748 - DNA, 206 bp, Homo sapiens
  MAP TO AC004453.1; EXPRESSED IN LUNG, SIGNAL = 2.4; EXPRESSED IN BRAIN, SIGNAL =   3; EXPRESSED IN PLACENTA, SIGNAL = 2.6; EXPRESSED IN HEART, SIGNAL = 2.5; EXPRESSED IN BONE MARROW, SIGNAL = 2.2; EXPRESSED IN ADULT LIVER, SIGNAL = 2.5; EXPRESSED IN HELA, SIGNAL = 2.8; EXPRESSED IN FETAL LIVER, SIGNAL = 2.8; SWISSPROT HIT: P17624, EVALUE 7.00e-04; NT HIT: AB028991.1, EVALUE 2.00e-92; EST_HUMAN HIT: BF343915.1, EVALUE 9.00e-90
gggcgagtattggtggaacgccatcctggagggagaagagcccatcgacattgacaagatcaacaaggagcgctccatggccaccgtggatgaggaggaacaggcggtgttggacaggcttacctttgactaccaccagaagctgcagggcaagccacagagccatgagctggtacgagcatggcagtcctggagagtccaccctt

SEQ ID NO: 22749 - DNA, 155 bp, Homo sapiens
  MAP TO AC005610.1; EXPRESSED IN BONE MARROW, SIGNAL = 4.2; EXPRESSED IN PLACENTA, SIGNAL =   4; EXPRESSED IN LUNG, SIGNAL = 4.4; EXPRESSED IN HELA, SIGNAL =   5; EXPRESSED IN FETAL LIVER, SIGNAL = 4.4; EXPRESSED IN ADULT LIVER, SIGNAL = 4.4; EXPRESSED IN HEART, SIGNAL =   4; EXPRESSED IN BRAIN, SIGNAL = 4.1; NT HIT: AL161505.2, EVALUE 2.30e-02; SWISSPROT HIT: Q51831, EVALUE 6.80e+00; EST_HUMAN HIT: AA708349.1, EVALUE 5.30e-01
ctgatatcaccaccacatatgaagactaccaagggactgagtcaggagttccagaacttgtttgcactggaggcagaaaactttgagaaagtggagtgcctactaatccaagatcaacaaaacaaggattaattacctcaacaaaatgatacaaa

SEQ ID NO: 22750 - DNA, 300 bp, Homo sapiens
  MAP TO AC006121.1; EXPRESSED IN PLACENTA, SIGNAL = 1.6; EXPRESSED IN BONE MARROW, SIGNAL = 1.7; EXPRESSED IN ADULT LIVER, SIGNAL = 1.9; EXPRESSED IN LUNG, SIGNAL = 1.6; EXPRESSED IN HEART, SIGNAL = 1.5; EXPRESSED IN FETAL LIVER, SIGNAL = 1.7; EXPRESSED IN BRAIN, SIGNAL = 1.8; SWISSPROT HIT: Q93008, EVALUE 5.00e-56; NT HIT: gi11641424, EVALUE 0.00e+00; EST_HUMAN HIT: BE925875.1, EVALUE 0.00e+00
atcctattaactccaagtcatccatcatataggctctcctttttgctactagttttccttctcgacaattcacagctttgaagaatcgctcaaaacacttcattccattttcagttaacagagaaggatcaagctgaagcacattactttcaaagaagtccttattaatatcaggatctaagtctggttcatcccccatcaacttggaataccacttaaaacaggcttcacgatcacaaaggtaaactgcattctcagctaagcatttccatatttgttttgcctgaggagcacatagcc

SEQ ID NO: 22751 - DNA, 132 bp, Homo sapiens
  MAP TO AC004847.1; EXPRESSED IN PLACENTA, SIGNAL = 2.2; EXPRESSED IN LUNG, SIGNAL = 2.4; EXPRESSED IN FETAL LIVER, SIGNAL = 2.5; EXPRESSED IN HELA, SIGNAL = 2.6; EXPRESSED IN BRAIN, SIGNAL = 2.7; EXPRESSED IN BONE MARROW, SIGNAL = 2.5; EXPRESSED IN ADULT LIVER, SIGNAL = 2.7; EXPRESSED IN HEART, SIGNAL = 2.5; SWISSPROT HIT: Q13491, EVALUE 8.10e-01
atgttgctgcaaccaaaggacctgcgccaaggatacccccacagcggtagtgggatccccacttactggagcatctcccgtgaaggcacacagacccaagcatcaaccatcctcagcaccagcccagggtgg

SEQ ID NO: 22752 - DNA, 307 bp, Homo sapiens
  MAP TO AC004752.1; EXPRESSED IN HELA, SIGNAL = 2.4; EXPRESSED IN BRAIN, SIGNAL = 2.3; EXPRESSED IN ADULT LIVER, SIGNAL = 2.2; EXPRESSED IN PLACENTA, SIGNAL = 2.1; EXPRESSED IN LUNG, SIGNAL = 2.4; EXPRESSED IN HEART, SIGNAL = 2.2; EXPRESSED IN FETAL LIVER, SIGNAL = 2.1; EXPRESSED IN BONE MARROW, SIGNAL = 2.3; SWISSPROT HIT: P18168, EVALUE 4.30e+00; NT HIT: AL163206.2, EVALUE 5.00e-05; EST_HUMAN HIT: AA714330.1, EVALUE 2.00e-05
ggggaaaatgaggctcagaaaattcatggtggtgatcttttcaaatacatacctaatcatgtcattctcctgcttaacttaccctcgaaagccttccaaacccctcagcatagcctccaaagccctgtgtgatctgtttctggcctacttctcccacctctgctcaaaccacttctccgcttgctcaccacattttatattttcaggccactgcctgttttgcaagcgcgtcaagcccattcccatctcaaggcctttgcacttgctgttccctgcgcctggagcactcttcctccatttccagaac

SEQ ID NO: 22753 - DNA, 118 bp, Homo sapiens
  MAP TO AC004518.1; EXPRESSED IN PLACENTA, SIGNAL = 5.7; EXPRESSED IN LUNG, SIGNAL = 6.2; EXPRESSED IN FETAL LIVER, SIGNAL = 5.3; EXPRESSED IN ADULT LIVER, SIGNAL = 4.6; EXPRESSED IN HELA, SIGNAL = 5.6; EXPRESSED IN HEART, SIGNAL = 4.5; EXPRESSED IN BRAIN, SIGNAL = 5.5; EXPRESSED IN BONE MARROW, SIGNAL = 5.5; EST_HUMAN HIT: BE072399.1, EVALUE 3.80e-01; NT HIT: D25221.1, EVALUE 4.10e+00
aaggaggacagtgcaggtcaaagccctggttgctgattacagacaagatgggagtcatgtggggtgtcagcttctgtctcctgagagagaaaaccgaaaaatgctacctgaatttcca

SEQ ID NO: 22754 - DNA, 182 bp, Homo sapiens
  MAP TO AC005479.2; EXPRESSED IN LUNG, SIGNAL =   3; EXPRESSED IN BONE MARROW, SIGNAL = 2.8; EXPRESSED IN PLACENTA, SIGNAL = 3.2; EXPRESSED IN HELA, SIGNAL = 3.1; EXPRESSED IN HEART, SIGNAL = 2.4; EXPRESSED IN FETAL LIVER, SIGNAL = 2.4; EXPRESSED IN BRAIN, SIGNAL = 2.7; EXPRESSED IN ADULT LIVER, SIGNAL = 2.5; EST_HUMAN HIT: AA853523.1, EVALUE 7.00e-41; NT HIT: gi4557732, EVALUE 4.00e-69; SWISSPROT HIT: Q61555, EVALUE 4.00e-06
tgacctggccacctctgtcctctctcatggcatggctctggggacagatattgacgagtgtgaggactatggagacccggtgtgtggcacctggaagtgtgaaaacagccctggctcctaccgctgtgttctgggctgccagcctggcttccacatggccccgaacggagactgcattggtg

SEQ ID NO: 22755 - DNA, 132 bp, Homo sapiens
  MAP TO AC006016.2; EXPRESSED IN BRAIN, SIGNAL = 7.9; EXPRESSED IN PLACENTA, SIGNAL = 7.1; EXPRESSED IN LUNG, SIGNAL = 6.1; EXPRESSED IN HEART, SIGNAL = 5.7; EXPRESSED IN BONE MARROW, SIGNAL = 5.6; EXPRESSED IN ADULT LIVER, SIGNAL = 5.5; EXPRESSED IN HELA, SIGNAL = 4.7; EXPRESSED IN FETAL LIVER, SIGNAL = 6.4; NT HIT: AL163247.2, EVALUE 1.90e-02; SWISSPROT HIT: P23074, EVALUE 2.40e-02; EST_HUMAN HIT: AA156080.1, EVALUE 5.00e-04
gatttgatggatcacttgatgatggaattgggacagtaccactgtgtgatggacttggcccatacattcttcccaattgacatcacaccagagagccaggaacagtttgtcttcacatggaaagggcgacaa

SEQ ID NO: 22756 - DNA, 170 bp, Homo sapiens
  MAP TO AC004216.1; EXPRESSED IN PLACENTA, SIGNAL =   4; EXPRESSED IN LUNG, SIGNAL = 4.7; EXPRESSED IN HEART, SIGNAL = 4.2; EXPRESSED IN BRAIN, SIGNAL = 4.9; EXPRESSED IN ADULT LIVER, SIGNAL = 4.4; EXPRESSED IN FETAL LIVER, SIGNAL = 4.2; EXPRESSED IN BONE MARROW, SIGNAL =   4; EXPRESSED IN HELA, SIGNAL = 4.8; SWISSPROT HIT: Q01766, EVALUE 5.10e+00; NT HIT: D10376.1, EVALUE 3.90e-01; EST_HUMAN HIT: BE745988.1, EVALUE 9.00e-03
atgatatttctcctgagttacaaaatggcagttgttaattatgaatggaaaagtttcctttacaggggagaaatctgacaatatcaccttaaccaggtaatcaaggttaacgtcattgataatgggacaaatgacattacgtgcctggtgatggaatgcactaagaacac

SEQ ID NO: 22757 - DNA, 191 bp, Homo sapiens
  MAP TO AC003683.1; EXPRESSED IN PLACENTA, SIGNAL = 0.91; EXPRESSED IN LUNG, SIGNAL = 0.98; EXPRESSED IN FETAL LIVER, SIGNAL = 0.86; EXPRESSED IN BRAIN, SIGNAL = 0.94; EXPRESSED IN BONE MARROW, SIGNAL = 0.98; EXPRESSED IN ADULT LIVER, SIGNAL =   1; EXPRESSED IN HEART, SIGNAL = 5.4; NT HIT: AF053490.1, EVALUE 1.00e-103; SWISSPROT HIT: P22771, EVALUE 2.00e-17; EST_HUMAN HIT: AV729257.1, EVALUE 5.00e-85
acccagatgactccctggacttggacccatccatgctagactccatttggaaaccagatttgttctttgccaatgagaagggtgccaacttccacgatgtcaccactgacaacaaattgctacggatttcgaaaaatggcaaagtgctctacagtatcaggtaagcctccattggctgcacatgttcgcat

SEQ ID NO: 22758 - DNA, 135 bp, Homo sapiens
  MAP TO AC004526.1; EXPRESSED IN PLACENTA, SIGNAL = 2.6; EXPRESSED IN HEART, SIGNAL = 1.9; EXPRESSED IN FETAL LIVER, SIGNAL =   2; EXPRESSED IN BRAIN, SIGNAL = 1.8; EXPRESSED IN BONE MARROW, SIGNAL = 3.8; EXPRESSED IN ADULT LIVER, SIGNAL = 1.9; EXPRESSED IN HELA, SIGNAL = 2.3; EXPRESSED IN LUNG, SIGNAL = 2.2; SWISSPROT HIT: P21359, EVALUE 6.00e-20; NT HIT: D12625.1, EVALUE 2.00e-70; EST_HUMAN HIT: BE783158.1, EVALUE 1.10e-01
ttggtggatggttttgctgaaagcaccaaacgtaaagcagcagtttggccactacaaatcattctccttatcttgtgtccagaaataatccaggatatatccaaagacgtggttgatgaaaacaacatgaataag

SEQ ID NO: 22759 - DNA, 280 bp, Homo sapiens
  MAP TO AC004222.1; EXPRESSED IN PLACENTA, SIGNAL = 2.2; EXPRESSED IN BONE MARROW, SIGNAL = 2.1; EXPRESSED IN ADULT LIVER, SIGNAL = 2.4; EXPRESSED IN LUNG, SIGNAL = 2.2; EXPRESSED IN HELA, SIGNAL = 2.5; EXPRESSED IN HEART, SIGNAL = 2.3; EXPRESSED IN FETAL LIVER, SIGNAL = 2.3; EXPRESSED IN BRAIN, SIGNAL = 2.4; SWISSPROT HIT: O67087, EVALUE 6.30e-02; EST_HUMAN HIT: AV723976.1, EVALUE 9.00e-32; NT HIT: AL163201.2, EVALUE 5.00e-20
taagcatcaagaccatccagaaaaacatgacccaccgaaggaattaaagaaggcaccagtgatcaatcctggagagacagcgatatgtgacctctcagaccgaggagtcaaaatagctgttttgaggaagctcaaggaaatccatgataatgtggagaaggaattcggaatcctatcagataaatttaacgaagagattgaaacaattacaaagaaccagagagaaattctggagacgaaaaatgcagctgacatactgaaatatgcatcaagagtctct

SEQ ID NO: 22760 - DNA, 84 bp, Homo sapiens
  MAP TO AC004615.1; EXPRESSED IN LUNG, SIGNAL =   8; EXPRESSED IN ADULT LIVER, SIGNAL = 7.2; EXPRESSED IN PLACENTA, SIGNAL = 7.1; EXPRESSED IN HELA, SIGNAL = 7.6; EXPRESSED IN HEART, SIGNAL = 6.3; EXPRESSED IN FETAL LIVER, SIGNAL = 7.3; EXPRESSED IN BRAIN, SIGNAL =   7; EXPRESSED IN BONE MARROW, SIGNAL = 7.9; NT HIT: gi11417342, EVALUE 3.00e-40; EST_HUMAN HIT: BE674025.1, EVALUE 4.00e-40; SWISSPROT HIT: Q13591, EVALUE 1.00e-08
acgggagttcagagcgaagaatgctgtggatttctcgcagttaacatttgacccaggacagaaagaacttgttgtaggagcaag

SEQ ID NO: 22761 - DNA, 151 bp, Homo sapiens
  MAP TO AC003685.1; EXPRESSED IN ADULT LIVER, SIGNAL = 1.8; EXPRESSED IN PLACENTA, SIGNAL = 2.5; EXPRESSED IN LUNG, SIGNAL = 1.5; EXPRESSED IN HEART, SIGNAL = 1.4; EXPRESSED IN BRAIN, SIGNAL = 1.4; EXPRESSED IN FETAL LIVER, SIGNAL = 1.3; EXPRESSED IN BONE MARROW, SIGNAL = 3.9; NT HIT: AF077206.1, EVALUE 4.00e-56; EST_HUMAN HIT: AV712977.1, EVALUE 3.00e-58
acctctccgtcatcaggtgacccattgtagtcattcatcttgtccatgtcctgcatgtcctcatcatcctctaagtcctcttcactatcctcattgtcttcatcatcctcctcttcctcatcatcatagtgctctgaggctggcttgccaa

SEQ ID NO: 22762 - DNA, 112 bp, Homo sapiens
  MAP TO AC004764.1; EXPRESSED IN PLACENTA, SIGNAL = 2.2; EXPRESSED IN LUNG, SIGNAL = 2.2; EXPRESSED IN FETAL LIVER, SIGNAL =   2; EXPRESSED IN ADULT LIVER, SIGNAL = 2.1; EXPRESSED IN HELA, SIGNAL = 2.2; EXPRESSED IN HEART, SIGNAL = 2.1; EXPRESSED IN BRAIN, SIGNAL =   2; EXPRESSED IN BONE MARROW, SIGNAL = 2.1; NT HIT: AB015281.1, EVALUE 1.60e-02; SWISSPROT HIT: Q03669, EVALUE 3.20e+00; EST_HUMAN HIT: BF572271.1, EVALUE 9.10e-02
gtcaaaattggaggcccccaggttcctgtctgttccaaatctttgcatgatgacagtggtttctctgatgtggtaagctttggctttcttctgttttctttctaaaagatca

SEQ ID NO: 22763 - DNA, 229 bp, Homo sapiens
  MAP TO AC005660.2; EXPRESSED IN BONE MARROW, SIGNAL =  24; EXPRESSED IN PLACENTA, SIGNAL =  22; EXPRESSED IN LUNG, SIGNAL =  29; EXPRESSED IN HELA, SIGNAL =  24; EXPRESSED IN HEART, SIGNAL =  18; EXPRESSED IN FETAL LIVER, SIGNAL =  23; EXPRESSED IN ADULT LIVER, SIGNAL =  22; EXPRESSED IN BRAIN, SIGNAL =  24; SWISSPROT HIT: P08775, EVALUE 3.50e-01; NT HIT: AB007877.1, EVALUE 1.00e-88; EST_HUMAN HIT: AL120441.1, EVALUE 1.00e-39
ggtgtgtccaatcagaagactccaaccaccatcttgctgactcccgagaggaagttccacagcttcgggtatgccgccagggacttttaccatgacctggatcccaatgaggccaagcagtggctgtacctggagaagttcaagatgaagctgcacaccactggggtgagcaagcctctcccctgggcccaggtcccccgcaatggagtgccaagcttcctccagcctt

SEQ ID NO: 22764 - DNA, 403 bp, Homo sapiens
  MAP TO AC006070.1; EXPRESSED IN PLACENTA, SIGNAL = 2.4; EXPRESSED IN HEART, SIGNAL = 2.2; EXPRESSED IN BRAIN, SIGNAL = 2.6; EXPRESSED IN BONE MARROW, SIGNAL = 2.5; EXPRESSED IN ADULT LIVER, SIGNAL = 2.3; EXPRESSED IN LUNG, SIGNAL = 2.5; EXPRESSED IN HELA, SIGNAL = 2.5; EXPRESSED IN FETAL LIVER, SIGNAL = 2.4; EST_HUMAN HIT: BE250684.1, EVALUE 4.00e-07; NT HIT: gi7657286, EVALUE 8.00e-20; SWISSPROT HIT: P02438, EVALUE 7.50e-02
acggctggcagcagctggagccacagctctggtttaggcaaccaggcaggtagacactcgtggggtggtagcaggttctcctgcagtagatgggtgcacaggagctgggctggcagcagctggacccacagctggtttggccacagcagctggacccacagcagatgggctggcagcagggtgtgctgcagcaggaaggctggcagcagctggtcacacaggtgggctggcagcaggtggtcctgcagcaggtgttttgacagcaagttgggtggcagcaaggctggcagcagctggacacacagcaggagggctggcagcagggtgtgctgctgcaggtggtcacagtggtgggcttccagcaggtggtcctgcagcaggtaggctgacagcaaggggagca

SEQ ID NO: 22765 - DNA, 170 bp, Homo sapiens
  MAP TO AC005157.1; EXPRESSED IN PLACENTA, SIGNAL = 1.6; EXPRESSED IN ADULT LIVER, SIGNAL = 1.7; EXPRESSED IN LUNG, SIGNAL =   2; EXPRESSED IN HEART, SIGNAL = 1.4; EXPRESSED IN FETAL LIVER, SIGNAL = 1.6; EXPRESSED IN BRAIN, SIGNAL =   2; EXPRESSED IN BONE MARROW, SIGNAL = 1.7; NT HIT: AL163246.2, EVALUE 1.00e-04; EST_HUMAN HIT: AI185642.1, EVALUE 1.00e-17; SWISSPROT HIT: P15465, EVALUE 1.30e+00
gatgcttcctgcccttgaatatcagattccaagttcttcagctccaagttcttgggctgaggtgggatctttccctccccactgtacactgagcaatagagggtggtgaggggtgagggagccacgctgctgaattctggttggcattcccagctgtgtaaaatggggtg

SEQ ID NO: 22766 - DNA, 148 bp, Homo sapiens
  MAP TO AC002428.1; EXPRESSED IN BRAIN, SIGNAL = 3.5; EXPRESSED IN PLACENTA, SIGNAL = 3.7; EXPRESSED IN LUNG, SIGNAL = 4.2; EXPRESSED IN HEART, SIGNAL = 3.4; EXPRESSED IN BONE MARROW, SIGNAL = 3.9; EXPRESSED IN ADULT LIVER, SIGNAL = 3.4; EXPRESSED IN HELA, SIGNAL = 3.4; EXPRESSED IN FETAL LIVER, SIGNAL = 3.9; SWISSPROT HIT: P21814, EVALUE 1.40e+00; NT HIT: AJ271735.1, EVALUE 8.00e-33; EST_HUMAN HIT: AA346720.1, EVALUE 2.00e-37
ttctatgaaggttgagagaggtgaggaagctgcagaagaaaagtttgagattagcagagtttggttcatcagatttagggaaagaagccatctccataacataaaagtgcaaggtgaagcagcaggtgctgatggagaagctgcagca

SEQ ID NO: 22767 - DNA, 75 bp, Homo sapiens
  MAP TO AC002433.1; EXPRESSED IN LUNG, SIGNAL = 4.6; EXPRESSED IN HELA, SIGNAL = 4.5; EXPRESSED IN HEART, SIGNAL = 4.7; EXPRESSED IN FETAL LIVER, SIGNAL =   6; EXPRESSED IN PLACENTA, SIGNAL = 5.9; EXPRESSED IN BRAIN, SIGNAL = 6.6; EXPRESSED IN BONE MARROW, SIGNAL = 5.9; EXPRESSED IN ADULT LIVER, SIGNAL = 4.2; EST_HUMAN HIT: AW172708.1, EVALUE 5.60e-02; NT HIT: AF076827.1, EVALUE 1.50e-01
atgcttgacccagttttgccacgggctactgaccaagaggttgctgttcggagttggcatgagtcagagaagcag

SEQ ID NO: 22768 - DNA, 176 bp, Homo sapiens
  MAP TO AC003084.1; EXPRESSED IN PLACENTA, SIGNAL = 3.4; EXPRESSED IN LUNG, SIGNAL =   2; EXPRESSED IN HEART, SIGNAL = 1.7; EXPRESSED IN BRAIN, SIGNAL = 1.8; EXPRESSED IN BONE MARROW, SIGNAL = 1.6; EXPRESSED IN ADULT LIVER, SIGNAL = 1.8; EXPRESSED IN HELA, SIGNAL = 1.8; EXPRESSED IN FETAL LIVER, SIGNAL = 1.6; NT HIT: AL163282.2, EVALUE 2.00e-06; EST_HUMAN HIT: AI208715.1, EVALUE 2.00e-07; SWISSPROT HIT: P42286, EVALUE 2.30e+00
tcctggaggtccgaagcccccaaatcaaggtgtcagcagggctgtattccttctggctctgggtatctttcagatctttctctgatctctgcttctgtcataaagtctcctactatgactgttacctccctgccttcctcttacaaggattatgtgattacattgggcccttctga

SEQ ID NO: 22769 - DNA, 145 bp, Homo sapiens
  MAP TO AC002452.1; EXPRESSED IN BRAIN, SIGNAL =  12; EXPRESSED IN ADULT LIVER, SIGNAL = 9.5; EXPRESSED IN PLACENTA, SIGNAL =  10; EXPRESSED IN LUNG, SIGNAL =  13; EXPRESSED IN HELA, SIGNAL =  10; EXPRESSED IN HEART, SIGNAL = 9.8; EXPRESSED IN BONE MARROW, SIGNAL =  11; EXPRESSED IN FETAL LIVER, SIGNAL = 9.8; EST_HUMAN HIT: D56343.1, EVALUE 3.00e-70; SWISSPROT HIT: Q63100, EVALUE 6.00e-22; NT HIT: AF123074.1, EVALUE 2.00e-70
cagtttgacagtccagtcaaatgatgatgtgacaaacaggtgagaaaagtcgattgggcccactgccatgtggcagttaattcctgtcactggcccttggtgaccttcaaagacctcaccaatacctgctttgctgtaggaagag

SEQ ID NO: 22770 - DNA, 304 bp, Homo sapiens
  MAP TO AC005234.1; EXPRESSED IN LUNG, SIGNAL = 1.6; EXPRESSED IN HEART, SIGNAL = 1.4; EXPRESSED IN FETAL LIVER, SIGNAL =   2; EXPRESSED IN BONE MARROW, SIGNAL =   2; EXPRESSED IN PLACENTA, SIGNAL = 1.6; EXPRESSED IN BRAIN, SIGNAL = 1.6; EXPRESSED IN ADULT LIVER, SIGNAL = 1.3; EST_HUMAN HIT: AU125928.1, EVALUE 0.00e+00; NT HIT: gi9257185, EVALUE 0.00e+00; SWISSPROT HIT: P35612, EVALUE 3.00e-17
tctttttgctctttttcaggaaggagggggttcggaatttctttttcttctttgagggagacttggaaggtgagccctctggggacatggggccgctggtgaccgactcggttttgtccttagaggtatcaacatccgtgtcagcactggtggtcatctggctcaggcctttgctgaggatttcctctgccgtctgctcctcctccctcccgttgaccaccaccccttccggctgggttgtttcgggctctgtggtggcggctttgcttgtttctgtcttcttagtaccttctagaaaaagatc

SEQ ID NO: 22771 - DNA, 183 bp, Homo sapiens
  MAP TO AC005600.1; EXPRESSED IN PLACENTA, SIGNAL = 0.74; EXPRESSED IN LUNG, SIGNAL = 0.83; EXPRESSED IN FETAL LIVER, SIGNAL = 1.4; EXPRESSED IN BONE MARROW, SIGNAL = 0.81; EXPRESSED IN ADULT LIVER, SIGNAL = 0.98; EXPRESSED IN HEART, SIGNAL = 2.4; EXPRESSED IN BRAIN, SIGNAL =   1; EST_HUMAN HIT: BF091349.1, EVALUE 2.00e-69; NT HIT: L43610.1, EVALUE 6.00e-99; SWISSPROT HIT: P98161, EVALUE 1.00e-06
cttgctccgggacatccggaagagaaaaaggatggccaggtagacgggatagacaaccacgctggacaccaggccaacagcgactgtgtcgacgctcagcgggctcagcctggacacatgccccgtgctgtgtggaggagaggaggccacacaggtgaggctgaggggcaggaagggctgggc

SEQ ID NO: 22772 - DNA, 201 bp, Homo sapiens
  MAP TO AC004148.1; EXPRESSED IN BRAIN, SIGNAL = 1.1; EXPRESSED IN PLACENTA, SIGNAL = 1.2; EXPRESSED IN LUNG, SIGNAL = 1.2; EXPRESSED IN HEART, SIGNAL = 1.3; EXPRESSED IN BONE MARROW, SIGNAL = 1.1; EXPRESSED IN ADULT LIVER, SIGNAL = 1.3; EXPRESSED IN FETAL LIVER, SIGNAL = 1.2; EST_HUMAN HIT: AW502002.1, EVALUE 2.00e-93; NT HIT: gi11426983, EVALUE 2.00e-93; SWISSPROT HIT: P19199, EVALUE 3.30e-01
tattaaaataccgtgaggacatcattaatgtgcggacagcagcagaccacgtagaagaaaagctgaaggctgagatacttttcctaaaagagcagatccaagcagaacagtgtttaaaagaaaatcttgaagaaactctgcaactagaaatagaaaactgcaaggaggaaataggtgaagataaaagtgatgtagtttaga

SEQ ID NO: 22773 - DNA, 195 bp, Homo sapiens
  MAP TO AC004504.1; EXPRESSED IN ADULT LIVER, SIGNAL = 1.3; EXPRESSED IN LUNG, SIGNAL = 1.4; EXPRESSED IN HEART, SIGNAL = 1.4; EXPRESSED IN FETAL LIVER, SIGNAL = 1.5; EXPRESSED IN BRAIN, SIGNAL = 1.4; EXPRESSED IN BONE MARROW, SIGNAL = 1.3; EXPRESSED IN PLACENTA, SIGNAL = 1.4; NT HIT: AF153980.1, EVALUE 2.00e-03; EST_HUMAN HIT: R10887.1, EVALUE 1.00e-100; SWISSPROT HIT: Q17298, EVALUE 3.80e+00
aaacgcagcataagtcgaagttgcaatggacagcatacgtcgaaacttcctctgtgccaggctccttgtggggactctcttctcatcgcctcctttagtcctcaccactgccctatgaggaagaatgtgctttttaacttcattttacagatgagaaaactgaggcccataaggcgaagttactctctcaagcca

SEQ ID NO: 22774 - DNA, 87 bp, Homo sapiens
  MAP TO AC004600.2; EXPRESSED IN FETAL LIVER, SIGNAL = 1.2; EXPRESSED IN ADULT LIVER, SIGNAL = 1.1; EXPRESSED IN PLACENTA, SIGNAL = 0.94; EXPRESSED IN LUNG, SIGNAL = 0.98; EXPRESSED IN HEART, SIGNAL = 1.8; EXPRESSED IN BRAIN, SIGNAL =   1; EXPRESSED IN BONE MARROW, SIGNAL = 1.1; NT HIT: gi11433063, EVALUE 5.00e-42; SWISSPROT HIT: Q05086, EVALUE 5.00e-11; EST_HUMAN HIT: AA384493.1, EVALUE 7.00e-42
acaggtgctctgtctgtgcccgttgtaaactgcaagaagagtcttttctgttcatctgtaaatgaatgaacgatttcccagaactcc

SEQ ID NO: 22775 - DNA, 105 bp, Homo sapiens
  MAP TO AC002465.1; EXPRESSED IN LUNG, SIGNAL = 8.2; EXPRESSED IN BRAIN, SIGNAL = 8.1; EXPRESSED IN PLACENTA, SIGNAL = 7.9; EXPRESSED IN HEART, SIGNAL = 6.8; EXPRESSED IN FETAL LIVER, SIGNAL = 7.2; EXPRESSED IN BONE MARROW, SIGNAL = 7.3; EXPRESSED IN ADULT LIVER, SIGNAL = 6.6; EXPRESSED IN HELA, SIGNAL = 7.8; NT HIT: AF229843.1, EVALUE 7.00e-17; EST_HUMAN HIT: AU124648.1, EVALUE 1.30e+00
ctgagacgtccggtcgagatacccaatctcccagccatcatcctcgctctcgctactctcgcctccgccagccactggcaggcctcgcagcgcgctcgccgccat

SEQ ID NO: 22776 - DNA, 144 bp, Homo sapiens
  MAP TO AC004518.1; EXPRESSED IN PLACENTA, SIGNAL = 4.2; EXPRESSED IN LUNG, SIGNAL = 4.2; EXPRESSED IN BRAIN, SIGNAL = 3.8; EXPRESSED IN HELA, SIGNAL = 3.8; EXPRESSED IN HEART, SIGNAL = 3.9; EXPRESSED IN FETAL LIVER, SIGNAL = 4.2; EXPRESSED IN BONE MARROW, SIGNAL = 3.8; EXPRESSED IN ADULT LIVER, SIGNAL = 4.2; SWISSPROT HIT: P34946, EVALUE 1.00e+00; EST_HUMAN HIT: AA659878.1, EVALUE 4.80e-01
acgtccattggttgttgttgttctcatcagcattattactgtaggaaccctggaagtctcccctacccacccaagtcctattgcactttctatcatgacagaccatttctcttttttgagagtcttatattacaatgcagacac

SEQ ID NO: 22777 - DNA, 147 bp, Homo sapiens
  MAP TO AC005610.1; EXPRESSED IN PLACENTA, SIGNAL = 1.5; EXPRESSED IN HELA, SIGNAL = 1.8; EXPRESSED IN HEART, SIGNAL = 1.7; EXPRESSED IN FETAL LIVER, SIGNAL = 1.7; EXPRESSED IN BRAIN, SIGNAL = 1.7; EXPRESSED IN ADULT LIVER, SIGNAL = 1.7; EXPRESSED IN LUNG, SIGNAL = 1.6; EXPRESSED IN BONE MARROW, SIGNAL = 1.9; SWISSPROT HIT: P13674, EVALUE 9.00e+00; NT HIT: AK024458.1, EVALUE 8.40e-02
agaaacttgaccctgatggggtggagggtgacccagtgaatagccacagctgtgatgatatggtcaatgttgatgtttctattgataattttgtttccaaagagagttttggaaactttgtcttctatccttagaagttagattcat

SEQ ID NO: 22778 - DNA, 216 bp, Homo sapiens
  MAP TO AC005479.2; EXPRESSED IN PLACENTA, SIGNAL = 1.6; EXPRESSED IN LUNG, SIGNAL = 1.5; EXPRESSED IN FETAL LIVER, SIGNAL = 1.6; EXPRESSED IN BONE MARROW, SIGNAL = 1.8; EXPRESSED IN ADULT LIVER, SIGNAL = 1.6; EXPRESSED IN HEART, SIGNAL = 1.9; EXPRESSED IN BRAIN, SIGNAL = 1.4; EST_HUMAN HIT: AA852962.1, EVALUE 1.00e-103; NT HIT: gi4557732, EVALUE 1.00e-118; SWISSPROT HIT: Q00918, EVALUE 6.10e-01
aggccttcagagagatctgccctgccggccacggctacacctacgcgagctccgacatccgcctgtccatgaggaaagccgaggaggaggaactggcaaggcccccaagggagcaagggcagaggagcagcggggcactgcccgggccagcagagaggcagcccctccgggtcgtcacggacacctggcttgaggccgggaccatccctgacaagg

SEQ ID NO: 22779 - DNA, 111 bp, Homo sapiens
  MAP TO AC002477.1; EXPRESSED IN PLACENTA, SIGNAL = 1.5; EXPRESSED IN LUNG, SIGNAL = 1.4; EXPRESSED IN FETAL LIVER, SIGNAL = 1.3; EXPRESSED IN BRAIN, SIGNAL = 1.5; EXPRESSED IN BONE MARROW, SIGNAL = 1.4; EXPRESSED IN ADULT LIVER, SIGNAL = 1.2; EXPRESSED IN HEART, SIGNAL = 1.4; EST_HUMAN HIT: BF364201.1, EVALUE 1.00e-53
ctattaattctctattttttgcttctatttcctctagcagtgtctctggagtagatgtcattttctcattatctgtggcataactttccaaaaactttctatattctggat

SEQ ID NO: 22780 - DNA, 243 bp, Homo sapiens
  MAP TO AC004159.1; EXPRESSED IN PLACENTA, SIGNAL = 1.6; EXPRESSED IN BRAIN, SIGNAL = 1.6; EXPRESSED IN BONE MARROW, SIGNAL = 1.5; EXPRESSED IN ADULT LIVER, SIGNAL = 1.7; EXPRESSED IN LUNG, SIGNAL = 1.8; EXPRESSED IN HELA, SIGNAL = 1.9; EXPRESSED IN HEART, SIGNAL = 1.8; EXPRESSED IN FETAL LIVER, SIGNAL = 1.6; EST_HUMAN HIT: AI027614.1, EVALUE 1.00e-83; SWISSPROT HIT: P45634, EVALUE 8.00e-38; NT HIT: M73791.1, EVALUE 2.00e-62
ttgaccccacaaccatcagggatgaggtgcttctcagccactttgtcttcaaatttgtcagcattaaacttggtgaagccccacttgttggagatatggatcttctgccatccagggaacttgaacttggccctgcgtaaggcttcaatcacatggtccttgttctgaagcttagtgcggataaacatgatgacttgaccaatgtggaccctggccacagtaccctggggttttccaaaggcc

SEQ ID NO: 22781 - DNA, 154 bp, Homo sapiens
  MAP TO AC004525.1; EXPRESSED IN FETAL LIVER, SIGNAL = 1.5; EXPRESSED IN ADULT LIVER, SIGNAL = 1.5; EXPRESSED IN PLACENTA, SIGNAL = 1.9; EXPRESSED IN LUNG, SIGNAL = 1.3; EXPRESSED IN HEART, SIGNAL = 1.4; EXPRESSED IN BRAIN, SIGNAL = 1.3; EXPRESSED IN BONE MARROW, SIGNAL = 1.5; EST_HUMAN HIT: BE696075.1, EVALUE 8.00e-71; SWISSPROT HIT: P24394, EVALUE 4.00e-23; NT HIT: gi11431471, EVALUE 2.00e-73
ttactcggagagcagaaaaaccagctggtacaacaggcggagctcggtgctgcaattggtgggaccattcatcttccactcgcaagtagagatgctcatgtagtcggagacgcaggtgggctcctgcaagaccttcatgttccctggggagaca

SEQ ID NO: 22782 - DNA, 158 bp, Homo sapiens
  MAP TO AC005629.1; EXPRESSED IN BONE MARROW, SIGNAL = 3.9; EXPRESSED IN PLACENTA, SIGNAL =   3; EXPRESSED IN LUNG, SIGNAL = 3.5; EXPRESSED IN HELA, SIGNAL = 4.1; EXPRESSED IN FETAL LIVER, SIGNAL =  53; EXPRESSED IN ADULT LIVER, SIGNAL = 3.9; EXPRESSED IN HEART, SIGNAL = 3.9; EXPRESSED IN BRAIN, SIGNAL = 4.5; SWISSPROT HIT: P21918, EVALUE 2.00e-12; NT HIT: M77185.1, EVALUE 2.00e-64; EST_HUMAN HIT: BE746231.1, EVALUE 2.00e-46
  unsure 60
  unsure 62
ctcaagagaccgcctggtccctgtgccagttgagctggaccggaatgaaggagatgaggntngacaaggtccaggccgggcggaccatgaccaaggccatgcgctgggtcatcttgcctcgtagcggaaggcctggagacggcagtagcgggccacgc

SEQ ID NO: 22783 - DNA, 304 bp, Homo sapiens
  MAP TO AC004061.1; EXPRESSED IN BONE MARROW, SIGNAL = 1.2; EXPRESSED IN PLACENTA, SIGNAL = 1.4; EXPRESSED IN LUNG, SIGNAL = 0.84; EXPRESSED IN HEART, SIGNAL = 1.4; EXPRESSED IN FETAL LIVER, SIGNAL = 1.6; EXPRESSED IN ADULT LIVER, SIGNAL = 1.1; EXPRESSED IN BRAIN, SIGNAL = 1.7; SWISSPROT HIT: Q02294, EVALUE 4.90e-01; EST_HUMAN HIT: AA569575.1, EVALUE 3.00e-53; NT HIT: U66059.1, EVALUE 2.00e-63
ccaggctgccgaggtctcaaatggaaatgaggaacttactgggaactggaccaaaggtcatgtgtgttatgccttagcaaagaacttggctgcattctattcatgccctagggaactgtggaagtttgaacttaggagtgatgacctagggtatctgaaagtagaaatttctaagcagcaaagtgttcaccatgtggcctggctgcttctaacaacctacactcagatgcaggagcaaagaaatgacttaaaattggaatttatatttcaacaggaagcagagcataaaagtttggaaaatttg

SEQ ID NO: 22784 - DNA, 90 bp, Homo sapiens
  MAP TO AC004615.1; EXPRESSED IN PLACENTA, SIGNAL = 5.1; EXPRESSED IN LUNG, SIGNAL = 5.6; EXPRESSED IN HEART, SIGNAL = 5.3; EXPRESSED IN BRAIN, SIGNAL = 5.6; EXPRESSED IN HELA, SIGNAL = 4.7; EXPRESSED IN FETAL LIVER, SIGNAL = 5.4; EXPRESSED IN BONE MARROW, SIGNAL = 5.1; EXPRESSED IN ADULT LIVER, SIGNAL = 4.9; EST_HUMAN HIT: AA815175.1, EVALUE 3.00e-07; NT HIT: AF111168.2, EVALUE 5.00e-05
gaactcatggctataaagcagtgctggccaatagaactttctatgatgatagaaatgctcatattctgtattgacaaatatggtagccat

SEQ ID NO: 22785 - DNA, 190 bp, Homo sapiens
  MAP TO AC005495.1; EXPRESSED IN PLACENTA, SIGNAL = 2.7; EXPRESSED IN HELA, SIGNAL = 2.7; EXPRESSED IN HEART, SIGNAL = 2.9; EXPRESSED IN FETAL LIVER, SIGNAL = 3.1; EXPRESSED IN ADULT LIVER, SIGNAL = 3.2; EXPRESSED IN LUNG, SIGNAL = 2.8; EXPRESSED IN BRAIN, SIGNAL =   3; EXPRESSED IN BONE MARROW, SIGNAL = 2.8; SWISSPROT HIT: O84102, EVALUE 8.60e+00; NT HIT: AF032922.1, EVALUE 1.10e-01; EST_HUMAN HIT: BE768813.1, EVALUE 1.70e-01
atgtgcaggtgatgatgtgatgatgactgtcaatattgcttctgcttttgccaagaactcctgtcccactagccagaatccttttcttaatgttgttgccattcttctggtaagaatctttgaccctttcaaatctgtcagcaggtactgctcctttctctttaaaattcatgtcactctcattttctct

SEQ ID NO: 22786 - DNA, 166 bp, Homo sapiens
  MAP TO AC004687.1; EXPRESSED IN PLACENTA, SIGNAL = 4.5; EXPRESSED IN ADULT LIVER, SIGNAL = 5.3; EXPRESSED IN BONE MARROW, SIGNAL =   5; EXPRESSED IN BRAIN, SIGNAL = 5.5; EXPRESSED IN FETAL LIVER, SIGNAL = 5.3; EXPRESSED IN HEART, SIGNAL =   5; EXPRESSED IN LUNG, SIGNAL = 4.8; EXPRESSED IN HELA, SIGNAL = 4.3; NT HIT: AF003255.1, EVALUE 1.50e+00; EST_HUMAN HIT: AW945516.1, EVALUE 3.60e-02; SWISSPROT HIT: Q49784, EVALUE 7.80e-01
agacatggaacttgccaatcaggacatccaggtccatggggagagagccatgtactgcaagctttggctatgtgtttgtgattccattcggaccctattgtgtgtgtactttgagtgctgccagtaccacaccactatctcccttttctctcaaactcagaactag

SEQ ID NO: 22787 - DNA, 184 bp, Homo sapiens
  MAP TO AC005660.2; EXPRESSED IN LUNG, SIGNAL = 4.3; EXPRESSED IN HELA, SIGNAL = 4.7; EXPRESSED IN BRAIN, SIGNAL = 4.8; EXPRESSED IN BONE MARROW, SIGNAL =   4; EXPRESSED IN ADULT LIVER, SIGNAL = 4.4; EXPRESSED IN PLACENTA, SIGNAL = 3.1; EXPRESSED IN HEART, SIGNAL = 3.9; EXPRESSED IN FETAL LIVER, SIGNAL = 4.3; EST_HUMAN HIT: N24143.1, EVALUE 6.40e-01; SWISSPROT HIT: P32886, EVALUE 2.30e+00; NT HIT: AJ001678.1, EVALUE 4.30e-01
atgtcctggtttgctggaatagttctagtttatgcctcttttcctagtgaaattagtaataatgatatctttcaccttctaagtatctcagtttggaaggtgaattatgtggttgcgctccttatctttgtcttctcagccatctgggcctcaagacggatgagggaggcagtagggtgtgcag

SEQ ID NO: 22788 - DNA, 102 bp, Homo sapiens
  MAP TO AC005317.1; EXPRESSED IN PLACENTA, SIGNAL =   2; EXPRESSED IN HEART, SIGNAL = 2.1; EXPRESSED IN BONE MARROW, SIGNAL = 1.7; EXPRESSED IN ADULT LIVER, SIGNAL =   2; EXPRESSED IN LUNG, SIGNAL = 1.8; EXPRESSED IN HELA, SIGNAL = 1.8; EXPRESSED IN FETAL LIVER, SIGNAL = 1.9; EXPRESSED IN BRAIN, SIGNAL = 2.1; SWISSPROT HIT: P16811, EVALUE 3.20e+00; NT HIT: AF143732.1, EVALUE 8.60e-01
ggttccttcctgacatgggcattgggctgcgcatgtgtgttcgcagttctttccagctgctgttctgacctctttgtgcagtgtatttatgtggctgtagat

SEQ ID NO: 22789 - DNA, 181 bp, Homo sapiens
  MAP TO AC004664.1; EXPRESSED IN PLACENTA, SIGNAL = 2.2; EXPRESSED IN LUNG, SIGNAL = 1.9; EXPRESSED IN HEART, SIGNAL = 1.4; EXPRESSED IN BRAIN, SIGNAL = 1.7; EXPRESSED IN BONE MARROW, SIGNAL = 1.8; EXPRESSED IN ADULT LIVER, SIGNAL = 1.7; EXPRESSED IN HELA, SIGNAL = 1.7; EXPRESSED IN FETAL LIVER, SIGNAL = 1.6; SWISSPROT HIT: P30143, EVALUE 1.50e-01; EST_HUMAN HIT: BF345805.1, EVALUE 1.60e-01
agctccctggcagccctggggctgttttcttcccaggggtccagctcctgtgcagcacagtgctggtgggtgtaggtgtttgggggacacagatggtgacagtaaggtctgtgcttttcactttctcattggccagcggaatagggtgggaaatgggatgcagactgcctgcccccagcat

SEQ ID NO: 22790 - DNA, 191 bp, Homo sapiens
  MAP TO AC005529.7; EXPRESSED IN HELA, SIGNAL = 1.6; EXPRESSED IN FETAL LIVER, SIGNAL = 1.7; EXPRESSED IN PLACENTA, SIGNAL = 1.7; EXPRESSED IN LUNG, SIGNAL = 1.6; EXPRESSED IN HEART, SIGNAL = 1.7; EXPRESSED IN BRAIN, SIGNAL = 1.5; EXPRESSED IN BONE MARROW, SIGNAL = 1.5; EXPRESSED IN ADULT LIVER, SIGNAL = 1.7; EST_HUMAN HIT: AI590071.1, EVALUE 1.00e-103; SWISSPROT HIT: Q03307, EVALUE 7.60e-01; NT HIT: AB023200.1, EVALUE 1.00e-103
ctgaagagccgcagacacatcttctcctggggaaattccttgggcccctccacactgtcgtcatggctctcggtctccaggtaaacatccagcagcacacacagccgctgcagctggttggtcaacagctggtggctgggccaagggccacacagctccttgtagcacacattgacttcgccctccatggc

SEQ ID NO: 22791 - DNA, 177 bp, Homo sapiens
  MAP TO AC003091.1; EXPRESSED IN PLACENTA, SIGNAL = 3.3; EXPRESSED IN ADULT LIVER, SIGNAL = 3.5; EXPRESSED IN LUNG, SIGNAL = 2.3; EXPRESSED IN HEART, SIGNAL = 2.9; EXPRESSED IN FETAL LIVER, SIGNAL = 4.9; EXPRESSED IN BRAIN, SIGNAL = 3.3; EXPRESSED IN HELA, SIGNAL = 2.6; EXPRESSED IN BONE MARROW, SIGNAL = 3.1; EST_HUMAN HIT: BE378471.1, EVALUE 1.00e-23; SWISSPROT HIT: P81125, EVALUE 2.30e+00; NT HIT: X87344.1, EVALUE 1.00e-04
ctgccactgctgctgacacatgccaatgaggacagatcctgctgccactgccctataaagtgctttgactggcaccacccattgaagtgttgtgaccagaagtctgggagcacctcagcccatccagtgcagcaggtccctaaccttgaggagccagagaacaaagccaggtcccaa

SEQ ID NO: 22792 - DNA, 96 bp, Homo sapiens
  MAP TO AC002458.1; EXPRESSED IN PLACENTA, SIGNAL = 2.1; EXPRESSED IN LUNG, SIGNAL = 2.3; EXPRESSED IN HELA, SIGNAL =   2; EXPRESSED IN HEART, SIGNAL =   2; EXPRESSED IN BRAIN, SIGNAL = 2.2; EXPRESSED IN FETAL LIVER, SIGNAL = 1.9; EXPRESSED IN BONE MARROW, SIGNAL = 2.4; EXPRESSED IN ADULT LIVER, SIGNAL = 1.9; NT HIT: D14547.1, EVALUE 2.00e-10; EST_HUMAN HIT: AI392964.1, EVALUE 9.00e-17
cttgagatagcaggaccaagccctcttcctcctcctcagcctactcaacatgaagataaagatgaagacctttatgtttcacttccacttaataat

SEQ ID NO: 22793 - DNA, 81 bp, Homo sapiens
  MAP TO AC004701.1; EXPRESSED IN BONE MARROW, SIGNAL = 1.2; EXPRESSED IN ADULT LIVER, SIGNAL = 1.3; EXPRESSED IN LUNG, SIGNAL = 1.5; EXPRESSED IN HEART, SIGNAL = 1.4; EXPRESSED IN FETAL LIVER, SIGNAL = 1.3; EXPRESSED IN BRAIN, SIGNAL = 1.5; EXPRESSED IN PLACENTA, SIGNAL = 1.3; EST_HUMAN HIT: AA488871.1, EVALUE 9.70e-01; NT HIT: D88348.1, EVALUE 6.50e-01
gaggtcaaattagagctcctgcagttggagctacagcaccggcagttgacagcatcagctcagttctgcctcttgagacat

SEQ ID NO: 22794 - DNA, 89 bp, Homo sapiens
  MAP TO AC004596.1; EXPRESSED IN PLACENTA, SIGNAL = 5.1; EXPRESSED IN HEART, SIGNAL = 3.8; EXPRESSED IN LUNG, SIGNAL = 4.5; EXPRESSED IN HELA, SIGNAL = 4.2; EXPRESSED IN FETAL LIVER, SIGNAL = 3.7; EXPRESSED IN BRAIN, SIGNAL = 4.3; EXPRESSED IN BONE MARROW, SIGNAL = 4.4; EXPRESSED IN ADULT LIVER, SIGNAL = 4.1; EST_HUMAN HIT: BE770209.1, EVALUE 6.00e-33; NT HIT: U65487.1, EVALUE 3.00e-43; SWISSPROT HIT: P25976, EVALUE 3.00e-08
cgggcacctccagctgctacaaattcttccaagaagatgaaattccagggagaacccaagaagcctcccatgtgagcctgggggttgga

SEQ ID NO: 22795 - DNA, 307 bp, Homo sapiens
  MAP TO AC004706.1; EXPRESSED IN BONE MARROW, SIGNAL = 8.3; EXPRESSED IN HELA, SIGNAL = 7.4; EXPRESSED IN HEART, SIGNAL = 7.7; EXPRESSED IN FETAL LIVER, SIGNAL = 8.4; EXPRESSED IN ADULT LIVER, SIGNAL = 9.1; EXPRESSED IN PLACENTA, SIGNAL = 7.8; EXPRESSED IN LUNG, SIGNAL = 8.8; EXPRESSED IN BRAIN, SIGNAL = 8.3; EST_HUMAN HIT: BF511215.1, EVALUE 2.80e-01; NT HIT: AE004694.1, EVALUE 7.50e-01; SWISSPROT HIT: P28739, EVALUE 1.10e+00
cccatccggcacctggagctcctgagtgcgcgcgccccgggagagctgtgctccccgcgaaatccgtgcgctccagctcagggctcccgggatcggtgcccgttagtgggcacaggacgccgggtgtccgaagggctgcctggagatgcaactgaccttggcgggcatcagaatgacgagtggcagcagcaggagcggggtgacgaacaagatcacgaaggacttgaacttggagacatagctcagcgccgaggccatcgcgcgggagggagactggcgggcgagacgagtgaggggcagctagagg

SEQ ID NO: 22796 - DNA, 94 bp, Homo sapiens
  MAP TO AC003034.1; EXPRESSED IN LUNG, SIGNAL = 1.6; EXPRESSED IN HELA, SIGNAL = 1.9; EXPRESSED IN BONE MARROW, SIGNAL = 1.6; EXPRESSED IN ADULT LIVER, SIGNAL = 1.7; EXPRESSED IN PLACENTA, SIGNAL = 1.5; EXPRESSED IN HEART, SIGNAL = 1.8; EXPRESSED IN FETAL LIVER, SIGNAL = 1.8; EXPRESSED IN BRAIN, SIGNAL = 1.9; EST_HUMAN HIT: BF590442.1, EVALUE 5.00e-46; NT HIT: AF062389.1, EVALUE 5.00e-05
cttgaacctgcccaagactgtcacagggaaaattcaacgagccaagcttcgagacaaggagtggaagatgtccggaaaagcccgtgcgcagtga

SEQ ID NO: 22797 - DNA, 152 bp, Homo sapiens
  MAP TO AC004839.1; EXPRESSED IN BONE MARROW, SIGNAL = 1.1; EXPRESSED IN LUNG, SIGNAL =   1; EXPRESSED IN HEART, SIGNAL = 1.5; EXPRESSED IN FETAL LIVER, SIGNAL = 1.1; EXPRESSED IN BRAIN, SIGNAL = 1.2; EXPRESSED IN ADULT LIVER, SIGNAL = 1.2; EXPRESSED IN PLACENTA, SIGNAL = 1.2; SWISSPROT HIT: P51572, EVALUE 2.00e-07; NT HIT: gi11421918, EVALUE 2.00e-49; EST_HUMAN HIT: AV717938.1, EVALUE 2.00e-49
agttttgagacgtctggttacgcttattactcaactggcaaaagaactgtcaaacaaaggtgtacttaaaactcaagcagaaaatactaacaaggctgccaaaaaatttatggaagaaaacgaaaaactaaaaagggtatttaattttcttt

SEQ ID NO: 22798 - DNA, 471 bp, Homo sapiens
  MAP TO AC004601.1; EXPRESSED IN BRAIN, SIGNAL = 8.4; EXPRESSED IN ADULT LIVER, SIGNAL = 7.6; EXPRESSED IN PLACENTA, SIGNAL = 7.8; EXPRESSED IN BONE MARROW, SIGNAL = 7.7; EXPRESSED IN LUNG, SIGNAL = 8.7; EXPRESSED IN HELA, SIGNAL = 7.2; EXPRESSED IN HEART, SIGNAL = 7.4; EXPRESSED IN FETAL LIVER, SIGNAL = 7.3; SWISSPROT HIT: Q00587, EVALUE 3.80e-02; NT HIT: U15553.1, EVALUE 3.00e-01; EST_HUMAN HIT: BE169131.1, EVALUE 0.00e+00
ctcctgctatcccctttctgggcccttgcccagtgctccacctgggccagattgctcttcctttggctgtgtttttcagggttggtcctgggaggaaaggcccgctggtacccaccagtcccattctgttctcctgggccatatgaggcaggcagcattccattcttctctgcccgttggggctgtgcctgctggcctcttgggccagtgggtaaatccataaacaaggcatcctcctcggctggcgagtacggagacctggccttgctccggtcccgcttgccctccagtgggtccctctgggaacggtactgctctccctcctgctcctgcctctcgaagttgacaatgtcatcatggccacgatgaggacaatctctcgtatgtccgggtcccacccggccacattcatgacaggactctgtgtggttggcctgggggacagcctgccgctccaccttctccatatcc

SEQ ID NO: 22799 - DNA, 279 bp, Homo sapiens
  MAP TO AC005392.1; EXPRESSED IN LUNG, SIGNAL = 1.5; EXPRESSED IN FETAL LIVER, SIGNAL = 1.6; EXPRESSED IN PLACENTA, SIGNAL =   2; EXPRESSED IN BRAIN, SIGNAL = 1.9; EXPRESSED IN BONE MARROW, SIGNAL = 3.5; EXPRESSED IN ADULT LIVER, SIGNAL = 1.5; EXPRESSED IN HEART, SIGNAL = 1.8; NT HIT: X17097.1, EVALUE 0.00e+00; SWISSPROT HIT: Q00888, EVALUE 9.00e-50; EST_HUMAN HIT: BF085667.1, EVALUE 0.00e+00
ggaggagattcagggtgactgggtcactgcggctggcactcactgggttccgtatttcacattcatagggtcctgcaatatactttgtgacaccaaatataaagagggtcctgttggttttggacagctgcaacctgtgagtcatagggaggctctgaccattcatccaccactggtagcttgcggctggagtcgcaggatcacaggttaagatcacagcctccatggcctccctgggatttaagttgctgctggagatggagggcttgggagtctcca

SEQ ID NO: 22800 - DNA, 138 bp, Homo sapiens
  MAP TO AC003682.1; EXPRESSED IN PLACENTA, SIGNAL = 1.1; EXPRESSED IN LUNG, SIGNAL = 1.5; EXPRESSED IN FETAL LIVER, SIGNAL = 1.3; EXPRESSED IN BONE MARROW, SIGNAL =   1; EXPRESSED IN ADULT LIVER, SIGNAL = 1.3; EXPRESSED IN HEART, SIGNAL = 1.3; EXPRESSED IN BRAIN, SIGNAL = 1.6; NT HIT: AF233882.1, EVALUE 4.80e+00; SWISSPROT HIT: O27874, EVALUE 1.80e+00; EST_HUMAN HIT: BF305652.1, EVALUE 1.80e+00
ccagaggcccgtgagccaggttcttggcgtggagccaatgaggctcaggggagggacatttccgctctgtccaacttgtcggagcggaacttccggcgtcctccctgtggcgggcactttggcttgtgtcagttccat

SEQ ID NO: 22801 - DNA, 153 bp, Homo sapiens
  MAP TO AC003104.1; EXPRESSED IN PLACENTA, SIGNAL = 1.5; EXPRESSED IN ADULT LIVER, SIGNAL = 1.4; EXPRESSED IN LUNG, SIGNAL = 1.2; EXPRESSED IN HEART, SIGNAL = 1.4; EXPRESSED IN FETAL LIVER, SIGNAL = 1.5; EXPRESSED IN BRAIN, SIGNAL = 1.1; EXPRESSED IN BONE MARROW, SIGNAL = 1.4; EST_HUMAN HIT: AW749933.1, EVALUE 2.00e-71; NT HIT: gi11426182, EVALUE 1.00e-71
gcgagaagaggacgctcccagagaacctgaccctggaggatgccaagcggctccgtgtgatgggtgacatccccatggagctggtcaatgaggtcatgctgaccatcactgaccctgctgccatgctggggcctgaggtgggcagcccgacct

SEQ ID NO: 22802 - DNA, 107 bp, Homo sapiens
  MAP TO AC005540.2; EXPRESSED IN LUNG, SIGNAL = 1.4; EXPRESSED IN FETAL LIVER, SIGNAL = 1.3; EXPRESSED IN BRAIN, SIGNAL = 1.6; EXPRESSED IN PLACENTA, SIGNAL = 1.4; EXPRESSED IN HEART, SIGNAL = 1.5; EXPRESSED IN BONE MARROW, SIGNAL = 1.2; EXPRESSED IN ADULT LIVER, SIGNAL = 1.3; EST_HUMAN HIT: N95225.1, EVALUE 3.40e-01; SWISSPROT HIT: P41892, EVALUE 9.40e+00
gcgatgaatcaccctgagattatgcaggtggggtttcccctgaagggactggaactgctcactgccagctgtcctcagaagaggtcagtcatggggcgggaaatcag

SEQ ID NO: 22803 - DNA, 264 bp, Homo sapiens
  MAP TO AC004682.1; EXPRESSED IN PLACENTA, SIGNAL = 1.6; EXPRESSED IN HEART, SIGNAL = 1.5; EXPRESSED IN BONE MARROW, SIGNAL = 1.7; EXPRESSED IN ADULT LIVER, SIGNAL = 1.6; EXPRESSED IN LUNG, SIGNAL = 1.8; EXPRESSED IN FETAL LIVER, SIGNAL = 1.4; EXPRESSED IN BRAIN, SIGNAL = 1.6; SWISSPROT HIT: P46100, EVALUE 1.40e+00; NT HIT: gi9910569, EVALUE 4.00e-27
aggacaggaagggactggaaccctcctccattcaggactcagcagagagggtcaaagtctctgacagccattcgtcctctttgtcttttccggaagctcaatcacgtgacctcagagacaaagagcctgcagcaaagcttgacacagacccaagagaagaaagctcagctggaagaggaaatcattgcttatgaggaaaggatgaaaaagctcaatacggaattaagaaaactgcggggcttccaccaggagagtgagctggag

SEQ ID NO: 22804 - DNA, 98 bp, Homo sapiens
  MAP TO AC005516.1; EXPRESSED IN PLACENTA, SIGNAL = 1.9; EXPRESSED IN LUNG, SIGNAL = 2.2; EXPRESSED IN HELA, SIGNAL = 2.3; EXPRESSED IN HEART, SIGNAL = 2.3; EXPRESSED IN FETAL LIVER, SIGNAL = 2.3; EXPRESSED IN ADULT LIVER, SIGNAL = 1.9; EXPRESSED IN BRAIN, SIGNAL = 2.5; EXPRESSED IN BONE MARROW, SIGNAL = 2.4; SWISSPROT HIT: Q63627, EVALUE 1.90e+00
tccctggtattcttccatatgggctctcaccaccttgcatctctgcactcccagctctgcctcctcaacccagcaaaccactggctcagcctcagtct

SEQ ID NO: 22805 - DNA, 230 bp, Homo sapiens
  MAP TO AC004844.1; EXPRESSED IN BONE MARROW, SIGNAL = 4.2; EXPRESSED IN HELA, SIGNAL = 4.3; EXPRESSED IN FETAL LIVER, SIGNAL = 4.5; EXPRESSED IN ADULT LIVER, SIGNAL = 4.2; EXPRESSED IN PLACENTA, SIGNAL = 4.4; EXPRESSED IN LUNG, SIGNAL = 5.5; EXPRESSED IN HEART, SIGNAL = 4.5; EXPRESSED IN BRAIN, SIGNAL = 4.9; NT HIT: AL163246.2, EVALUE 2.20e+00; SWISSPROT HIT: P55577, EVALUE 8.00e-03; EST_HUMAN HIT: BE159024.1, EVALUE 8.20e-01
aggacccactattaaatttaaaggtacagataaatgtccaaactatggatgcccaaatgtggaatctgaagctgttaacatcatctctgtcatgtccccctctcatcatttttattgttgcaaagttagaagtagggtgagtcatctccctcccattcaggggccatgtcctcatctgcagcacagactctgcgaaggcatccagcaggtgctctctaattctgctggtc

SEQ ID NO: 22806 - DNA, 97 bp, Homo sapiens
  MAP TO AC003685.1; EXPRESSED IN LUNG, SIGNAL =   1; EXPRESSED IN BRAIN, SIGNAL = 1.2; EXPRESSED IN BONE MARROW, SIGNAL =   1; EXPRESSED IN PLACENTA, SIGNAL = 1.1; EXPRESSED IN HEART, SIGNAL = 1.4; EXPRESSED IN FETAL LIVER, SIGNAL = 1.3; EXPRESSED IN ADULT LIVER, SIGNAL = 1.7; NT HIT: AJ246003.1, EVALUE 1.00e-05; EST_HUMAN HIT: AA761549.1, EVALUE 1.90e-02
ctgaagtccatagtttacattagggttcacaatgacaaatgtataatgacgagtatccaccatcgtagtatcacacacagaatttgggctgccctga

SEQ ID NO: 22807 - DNA, 156 bp, Homo sapiens
  MAP TO AC005527.3; EXPRESSED IN PLACENTA, SIGNAL = 1.4; EXPRESSED IN LUNG, SIGNAL = 1.7; EXPRESSED IN HELA, SIGNAL = 2.1; EXPRESSED IN FETAL LIVER, SIGNAL = 1.8; EXPRESSED IN BONE MARROW, SIGNAL = 1.6; EXPRESSED IN ADULT LIVER, SIGNAL = 3.8; EXPRESSED IN HEART, SIGNAL = 1.6; EXPRESSED IN BRAIN, SIGNAL = 2.3; EST_HUMAN HIT: BE292898.1, EVALUE 5.00e-75; NT HIT: gi11417946, EVALUE 4.00e-75; SWISSPROT HIT: P34492, EVALUE 1.00e-02
cttgagcttgtatgtcctcagctcatagatgttgggacccattctgggctgtggctcattccagaagctgaactcgaggagcagctggtttctcctggacagcagcatctggctccgctcccttcggaactccaggtactcctgtgggcatggtgg

SEQ ID NO: 22808 - DNA, 139 bp, Homo sapiens
  MAP TO AC004668.1; EXPRESSED IN BONE MARROW, SIGNAL = 6.6; EXPRESSED IN PLACENTA, SIGNAL =  11; EXPRESSED IN LUNG, SIGNAL = 6.2; EXPRESSED IN HELA, SIGNAL = 8.4; EXPRESSED IN FETAL LIVER, SIGNAL = 5.6; EXPRESSED IN BRAIN, SIGNAL = 6.8; EXPRESSED IN ADULT LIVER, SIGNAL =  28; EXPRESSED IN HEART, SIGNAL = 7.7; EST_HUMAN HIT: AI880886.1, EVALUE 1.00e-47; NT HIT: gi11433823, EVALUE 1.00e-46; SWISSPROT HIT: P30054, EVALUE 2.00e-12
ttgggtagatgccttggataatcctttgaaggaagatcacttagtccaacttaatgaaaccaatatccttcccatactgacaaaaacactggcggcacatattgaggccatatttccggatcagaccgtgccggtttga

SEQ ID NO: 22809 - DNA, 155 bp, Homo sapiens
  MAP TO AC005858.1; EXPRESSED IN LUNG, SIGNAL = 7.6; EXPRESSED IN HEART, SIGNAL = 4.7; EXPRESSED IN FETAL LIVER, SIGNAL = 5.1; EXPRESSED IN BRAIN, SIGNAL = 5.7; EXPRESSED IN BONE MARROW, SIGNAL =   6; EXPRESSED IN HELA, SIGNAL = 5.3; EXPRESSED IN PLACENTA, SIGNAL = 5.9; EXPRESSED IN ADULT LIVER, SIGNAL = 5.7; EST_HUMAN HIT: N29575.1, EVALUE 2.10e+00; SWISSPROT HIT: P26361, EVALUE 3.00e+00
ctagtcatcttccatttttgctctctccatgctatggtctgccctttccagccctacttggctcaggaggctgatcttgaggactgtattccctggccttccttgctggtcgacttcttgttgaagttgggcactgagaaccacccgcagcagat

SEQ ID NO: 22810 - DNA, 118 bp, Homo sapiens
  MAP TO AC004856.1; EXPRESSED IN HELA, SIGNAL = 2.6; EXPRESSED IN HEART, SIGNAL =   4; EXPRESSED IN BRAIN, SIGNAL = 2.3; EXPRESSED IN PLACENTA, SIGNAL = 2.5; EXPRESSED IN LUNG, SIGNAL = 2.5; EXPRESSED IN FETAL LIVER, SIGNAL = 2.5; EXPRESSED IN BONE MARROW, SIGNAL = 2.4; EXPRESSED IN ADULT LIVER, SIGNAL = 2.4; SWISSPROT HIT: P20430, EVALUE 9.30e+00; EST_HUMAN HIT: N84970.1, EVALUE 8.00e-27; NT HIT: AL163267.2, EVALUE 3.00e-19
cagagcaagtgctgggatccatggctgagagacctgaagacagatcatgtcacaggactctttgcagatactccccagtaccaggtcagagtccagtagctccactgggtggctagac

SEQ ID NO: 22811 - DNA, 147 bp, Homo sapiens
  MAP TO AC005056.1; EXPRESSED IN BRAIN, SIGNAL =  22; EXPRESSED IN ADULT LIVER, SIGNAL =  16; EXPRESSED IN BONE MARROW, SIGNAL =  15; EXPRESSED IN PLACENTA, SIGNAL =  16; EXPRESSED IN LUNG, SIGNAL =  14; EXPRESSED IN HELA, SIGNAL =  12; EXPRESSED IN HEART, SIGNAL =  11; EXPRESSED IN FETAL LIVER, SIGNAL =  16; NT HIT: gi5881412, EVALUE 1.00e-77; EST_HUMAN HIT: AL047281.1, EVALUE 2.00e-77
ctggaaccgcagcacctgggatcccagcacctgggacaactggaatcccagctcctgggacaccaacacctggaacgccagctcctgggacaccaactactcccgggccaaagcctggcccaccaggcactaagcctgcagcagctc

SEQ ID NO: 22812 - DNA, 220 bp, Homo sapiens
  MAP TO AC004770.1; EXPRESSED IN LUNG, SIGNAL = 6.9; EXPRESSED IN PLACENTA, SIGNAL = 6.6; EXPRESSED IN HEART, SIGNAL =   7; EXPRESSED IN FETAL LIVER, SIGNAL = 6.9; EXPRESSED IN BRAIN, SIGNAL =   7; EXPRESSED IN BONE MARROW, SIGNAL = 6.7; EXPRESSED IN ADULT LIVER, SIGNAL = 6.2; EXPRESSED IN HELA, SIGNAL = 6.3; EST_HUMAN HIT: BF569527.1, EVALUE 2.00e-32; NT HIT: gi11439789, EVALUE 1.00e-32; SWISSPROT HIT: P23206, EVALUE 1.90e-01
ccatcagtgtctaccaggtcctcctctgtgcgcaggctcagcacgtacagtgtggacatggacaccacgctggagccacagaaaagggtgaccgttagagctggagccaccatccagtgccctctctctaggacaaggctgtggtccttgctcctgaggctgggctcccaggtgatgcctacaaaatgggtcaccccagaggggaagaggcagaaaggcc

SEQ ID NO: 22813 - DNA, 154 bp, Homo sapiens
  MAP TO AC004674.1; EXPRESSED IN LUNG, SIGNAL = 3.6; EXPRESSED IN HELA, SIGNAL = 3.7; EXPRESSED IN BRAIN, SIGNAL = 4.2; EXPRESSED IN BONE MARROW, SIGNAL = 3.6; EXPRESSED IN ADULT LIVER, SIGNAL = 2.9; EXPRESSED IN PLACENTA, SIGNAL = 3.4; EXPRESSED IN HEART, SIGNAL = 3.5; EXPRESSED IN FETAL LIVER, SIGNAL = 3.5; EST_HUMAN HIT: BE910208.1, EVALUE 2.10e+00; NT HIT: X98505.1, EVALUE 3.50e-01; SWISSPROT HIT: P98109, EVALUE 9.00e+00
aagctgttgctttggtgatgttggtttggacaatcacttaagtgctggtgttctattcctcacaataaatggaagtgtgaacattgcgatcttgggctccagtgaccaagaggagagcagacgctcctctccacaggttcctatcagagatact

SEQ ID NO: 22814 - DNA, 186 bp, Homo sapiens
  MAP TO AC000380.1; EXPRESSED IN PLACENTA, SIGNAL = 2.6; EXPRESSED IN ADULT LIVER, SIGNAL = 4.5; EXPRESSED IN LUNG, SIGNAL = 3.8; EXPRESSED IN HEART, SIGNAL = 3.3; EXPRESSED IN FETAL LIVER, SIGNAL = 3.1; EXPRESSED IN BRAIN, SIGNAL = 3.4; EXPRESSED IN HELA, SIGNAL =   3; EXPRESSED IN BONE MARROW, SIGNAL = 3.3; EST_HUMAN HIT: BE818123.1, EVALUE 4.00e-79; SWISSPROT HIT: P24563, EVALUE 3.40e-01; NT HIT: AB014520.1, EVALUE 3.00e-79
tgtgatgggcagctgccccacggccgcgcccagggactcgttgaccgagcagtggatgattctgtcagagacaatctggatgtcgcagcttacttggcctatcttgacccggtactcgtgactctggagccccaggctgtcctgctccttctgtgggtgcaaagggggaggatgctcatggggaag

SEQ ID NO: 22815 - DNA, 249 bp, Homo sapiens
  MAP TO AC005809.1; EXPRESSED IN PLACENTA, SIGNAL = 4.1; EXPRESSED IN LUNG, SIGNAL = 4.5; EXPRESSED IN FETAL LIVER, SIGNAL =  66; EXPRESSED IN BRAIN, SIGNAL = 5.3; EXPRESSED IN ADULT LIVER, SIGNAL = 8.4; EXPRESSED IN HELA, SIGNAL = 4.1; EXPRESSED IN HEART, SIGNAL = 6.4; EXPRESSED IN BONE MARROW, SIGNAL = 5.1; NT HIT: X03427.1, EVALUE 1.00e-125; EST_HUMAN HIT: BE299561.1, EVALUE 1.00e-115; SWISSPROT HIT: P01344, EVALUE 1.00e-31
tcacttccgattgctggccatctctgggggggcgcccccgtgggcggggtcttgggtgggtagagcaatcaggggacggtgacgtttggcctccctgaacgcctcgagctccttggcgagcacgtgaccccggcgggcacgcaggagggcaggcaggcccctgcgcaggcgctgggtggactgcttccaggtgtcatattggaagaacttgcccacggggtatctggggaagttgtcctgggaggggaa

SEQ ID NO: 22816 - DNA, 132 bp, Homo sapiens
  MAP TO AC004812.1; EXPRESSED IN PLACENTA, SIGNAL = 3.8; EXPRESSED IN LUNG, SIGNAL = 4.4; EXPRESSED IN HELA, SIGNAL = 4.5; EXPRESSED IN FETAL LIVER, SIGNAL = 4.6; EXPRESSED IN BRAIN, SIGNAL = 5.4; EXPRESSED IN BONE MARROW, SIGNAL = 4.5; EXPRESSED IN ADULT LIVER, SIGNAL = 4.3; EXPRESSED IN HEART, SIGNAL = 4.8; NT HIT: AF092918.1, EVALUE 2.90e-01; SWISSPROT HIT: P77221, EVALUE 7.00e+00; EST_HUMAN HIT: BF035316.1, EVALUE 2.00e-68
ctgggaacacctgctttggagcctataccagaagactgcagagagtgtagaaggttcttagcagtggcttctggctgggcctcagccaactgctggatggctgcctgcaaggccctgcgggaggctgcatct

SEQ ID NO: 22817 - DNA, 511 bp, Homo sapiens
  MAP TO AC003664.1; EXPRESSED IN PLACENTA, SIGNAL = 1.7; EXPRESSED IN LUNG, SIGNAL = 1.9; EXPRESSED IN HEART, SIGNAL = 1.7; EXPRESSED IN FETAL LIVER, SIGNAL = 1.6; EXPRESSED IN BRAIN, SIGNAL = 1.7; EXPRESSED IN ADULT LIVER, SIGNAL = 1.5; EXPRESSED IN BONE MARROW, SIGNAL = 1.7; NT HIT: AF254822.1, EVALUE 1.00e-06; EST_HUMAN HIT: AI393981.1, EVALUE 5.00e-07
gataatctgtaagatctttttcttctccttctcctcctcctcctcctcctcctccttcttcttcttcttcttcttcttctcctcctcctcctctttctcctcttccttcttcttcttcttcttcttcttctcctcctcctcctcctcctcctcctcctccttcttcttcttcttcttcttcttcttcttcttctcctcctcctcctctttctcctcttccttctcctcctcctccttctccttctccttcttcctcttcttctgttttttgagacaggatcttgctctgtctcccaggctgaagagggcagtggcgccccttcctcttccccttccccttccccctccactgcctcctcctcctcctcttcctcttccccttcttcttccccttctccttctccttcttccccttctccttctccttctccttcttccccttctccttctccttctccttctccttcttcttcttcctcttcttcttcttcacaggatcttgctctgtctt

SEQ ID NO: 22818 - DNA, 165 bp, Homo sapiens
  MAP TO AC005923.2; EXPRESSED IN FETAL LIVER, SIGNAL =  15; EXPRESSED IN BRAIN, SIGNAL =  15; EXPRESSED IN BONE MARROW, SIGNAL =  15; EXPRESSED IN PLACENTA, SIGNAL =  16; EXPRESSED IN HELA, SIGNAL =  14; EXPRESSED IN HEART, SIGNAL =  12; EXPRESSED IN ADULT LIVER, SIGNAL =  15; EXPRESSED IN LUNG, SIGNAL =  16; EST_HUMAN HIT: BE393378.1, EVALUE 2.20e+00; SWISSPROT HIT: P40879, EVALUE 3.00e-08; NT HIT: AF279265.1, EVALUE 3.00e-88
gtggggctgggcctgatccacttcggcttcgtggtcacctacctgtcagaacctcttgtccgaggctataccacagctgcagctgtgcaggtcttcgtctcacagctcaagtatgtgtttggcctccatctgagcagccactctgggccactgtccctcatctat

SEQ ID NO: 22819 - DNA, 126 bp, Homo sapiens
  MAP TO AC005477.1; EXPRESSED IN BONE MARROW, SIGNAL = 1.9; EXPRESSED IN PLACENTA, SIGNAL = 1.9; EXPRESSED IN LUNG, SIGNAL = 1.9; EXPRESSED IN HELA, SIGNAL = 1.9; EXPRESSED IN FETAL LIVER, SIGNAL = 2.1; EXPRESSED IN BRAIN, SIGNAL = 2.3; EXPRESSED IN ADULT LIVER, SIGNAL = 1.9; EXPRESSED IN HEART, SIGNAL = 1.9; NT HIT: AF200465.1, EVALUE 1.10e+00; EST_HUMAN HIT: AA993571.1, EVALUE 2.70e-02
accctctatgccaatgagtgttcaaacctgtatctcaaatctgatcactctctggaggtgaagcctgctgtatacaactgcgctctggacttcccacaggcatctcaaactcaccatgcccaagtg

SEQ ID NO: 22820 - DNA, 181 bp, Homo sapiens
  MAP TO AC004691.1; EXPRESSED IN LUNG, SIGNAL =   8; EXPRESSED IN HELA, SIGNAL = 6.9; EXPRESSED IN ADULT LIVER, SIGNAL = 6.8; EXPRESSED IN PLACENTA, SIGNAL = 7.5; EXPRESSED IN HEART, SIGNAL = 4.8; EXPRESSED IN FETAL LIVER, SIGNAL = 7.3; EXPRESSED IN BRAIN, SIGNAL = 7.7; EXPRESSED IN BONE MARROW, SIGNAL = 7.2; NT HIT: X54056.1, EVALUE 4.20e-01; EST_HUMAN HIT: BF361093.1, EVALUE 3.00e-21; SWISSPROT HIT: P31110, EVALUE 1.00e+00
gaccccgaggttccccatctgggtggtttgcagtgagagccacttcagcatcctctttagcctgcagccggggctcctgcgtgactggaggactgagaggctctttgacttgtactactacgatggcctggccaaccagcaggagcagatccggctgaccattggtgcgggccctcacccc

SEQ ID NO: 22821 - DNA, 201 bp, Homo sapiens
  MAP TO AC004828.2; EXPRESSED IN PLACENTA, SIGNAL = 1.9; EXPRESSED IN LUNG, SIGNAL = 2.2; EXPRESSED IN HELA, SIGNAL =   2; EXPRESSED IN FETAL LIVER, SIGNAL = 1.9; EXPRESSED IN ADULT LIVER, SIGNAL = 2.1; EXPRESSED IN HEART, SIGNAL = 1.8; EXPRESSED IN BRAIN, SIGNAL = 2.1; EXPRESSED IN BONE MARROW, SIGNAL = 2.3; NT HIT: AF213884.1, EVALUE 3.00e-02; EST_HUMAN HIT: AA069953.1, EVALUE 1.80e-01; SWISSPROT HIT: Q02047, EVALUE 5.00e+00
cggcccttcctgccgcaattccaaggagcaccttggcaaagctaaacttcgatgctctcttaggaggtggatgaacgcctggtcctcctctcccttctcctccgtggcctccagtgcttgctctggcaccagcaaccccattttctatctatctatctttggagcccaaggctggagctgatgaagctctcaagagggcag

SEQ ID NO: 22822 - DNA, 123 bp, Homo sapiens
  MAP TO AC006083.1; EXPRESSED IN PLACENTA, SIGNAL = 1.7; EXPRESSED IN HEART, SIGNAL = 1.4; EXPRESSED IN BONE MARROW, SIGNAL = 1.5; EXPRESSED IN ADULT LIVER, SIGNAL = 1.4; EXPRESSED IN FETAL LIVER, SIGNAL = 1.4; EXPRESSED IN LUNG, SIGNAL = 1.6; EXPRESSED IN BRAIN, SIGNAL = 1.4; NT HIT: gi9910365, EVALUE 2.00e-63; SWISSPROT HIT: O75493, EVALUE 9.00e-13
tgcgaagaggtgtcagaaaggggtcgaagatcatgtgactggtctctatgttgactggcgactgccgtttccccacagagcaaagattccaagctgagttcaccaatccccagaaagaaggaa

SEQ ID NO: 22823 - DNA, 287 bp, Homo sapiens
  MAP TO AC002465.1; EXPRESSED IN HEART, SIGNAL = 2.9; EXPRESSED IN LUNG, SIGNAL = 0.69; EXPRESSED IN ADULT LIVER, SIGNAL = 0.42; EST_HUMAN HIT: AI243326.1, EVALUE 6.60e-02
ggtgtgtccatttgtgaaaattcattgtgctgtacacatggaatgtgggcactcttctgcatttcatatttcaataacaagaagaaggtggtagaggaagaggagaaggggagggaggagaaagaaggggaagaggaagaagggaaagaggaagaggaggaggaagacaaggaggaggaagagaagaggaagaggagaaagaggaggagaggaaggaggagggggaggaggagaaagaagaaaaaggaagaggaggaggaagagaaggagaaagcaatggtggcatg

SEQ ID NO: 22824 - DNA, 97 bp, Homo sapiens
  MAP TO AC005284.1; EXPRESSED IN PLACENTA, SIGNAL = 1.8; EXPRESSED IN HEART, SIGNAL = 1.9; EXPRESSED IN FETAL LIVER, SIGNAL =   2; EXPRESSED IN BONE MARROW, SIGNAL = 1.9; EXPRESSED IN ADULT LIVER, SIGNAL = 2.1; EXPRESSED IN LUNG, SIGNAL = 2.4; EXPRESSED IN BRAIN, SIGNAL = 1.9; NT HIT: U04642.1, EVALUE 2.10e-01; EST_HUMAN HIT: BE695268.1, EVALUE 1.20e+00
gaacgacaaggaggtcagcccacatatgtgatcccccactttctttccacatcccaattcatgagtttcgtgaattacattattatgtattatcaag

SEQ ID NO: 22825 - DNA, 120 bp, Homo sapiens
  MAP TO AC004763.1; EXPRESSED IN PLACENTA, SIGNAL = 8.9; EXPRESSED IN HEART, SIGNAL = 7.2; EXPRESSED IN ADULT LIVER, SIGNAL =  13; EXPRESSED IN LUNG, SIGNAL = 7.9; EXPRESSED IN FETAL LIVER, SIGNAL = 8.2; EXPRESSED IN BRAIN, SIGNAL = 7.1; EXPRESSED IN BONE MARROW, SIGNAL = 7.6; EXPRESSED IN HELA, SIGNAL =  11; SWISSPROT HIT: P15248, EVALUE 3.00e-17; NT HIT: M30135.1, EVALUE 1.00e-61; EST_HUMAN HIT: BE614563.1, EVALUE 9.90e-02
tatttttcctgtgaacagccatgcaaccaaaccacggcaggcaacgcgctgacatttctgaagagtcttctggaaattttccagaaagaaaagatgagagggatgagaggcaagatatga

SEQ ID NO: 22826 - DNA, 153 bp, Homo sapiens
  MAP TO AC004072.1; EXPRESSED IN BONE MARROW, SIGNAL = 1.5; EXPRESSED IN HELA, SIGNAL = 1.9; EXPRESSED IN FETAL LIVER, SIGNAL = 2.2; EXPRESSED IN ADULT LIVER, SIGNAL =   2; EXPRESSED IN PLACENTA, SIGNAL = 1.7; EXPRESSED IN LUNG, SIGNAL = 1.8; EXPRESSED IN HEART, SIGNAL = 2.2; EXPRESSED IN BRAIN, SIGNAL = 3.3; EST_HUMAN HIT: BE878686.1, EVALUE 3.30e-02; NT HIT: Y08926.1, EVALUE 2.00e-05
tttaggaggcactaaatccacggcattaactacccttattgatgataatgatgataataatgatggtgacatttacaggagcattgatactacggtcgtcactgccattgccatcatcaccttgtatttatagattattaggcatttaagtaa

SEQ ID NO: 22827 - DNA, 322 bp, Homo sapiens
  MAP TO AC003954.1; EXPRESSED IN PLACENTA, SIGNAL =  12; EXPRESSED IN HEART, SIGNAL =  10; EXPRESSED IN ADULT LIVER, SIGNAL =  12; EXPRESSED IN LUNG, SIGNAL =  13; EXPRESSED IN FETAL LIVER, SIGNAL =  11; EXPRESSED IN BRAIN, SIGNAL =  12; EXPRESSED IN BONE MARROW, SIGNAL =  11; EXPRESSED IN HELA, SIGNAL =  11; NT HIT: gi11034810, EVALUE 0.00e+00; SWISSPROT HIT: Q9T1V6, EVALUE 8.20e-02; EST_HUMAN HIT: AA868837.1, EVALUE 1.20e+00
aggtcctcaattttttactttgtccctactttcctgtcgtagccccatcttcccctggtgtcgactccgtccccttgcagcgcacaggcagccagcacggcccacagaatgccgccgcggccaccttccagagggccagctatgccgccggcccagcctccaattacgcggacccctaccgacagctgcagtattgtccctctgttgagtctccatacagcaaatccggccctgctctcccgcctgaaggcaccttggccaggtccccgtccattgatagcattcagaaagatcccaggtgggtaaaaacctttttctttcc

SEQ ID NO: 22828 - DNA, 138 bp, Homo sapiens
  MAP TO AC005692.1; EXPRESSED IN LUNG, SIGNAL = 2.9; EXPRESSED IN BRAIN, SIGNAL = 2.8; EXPRESSED IN PLACENTA, SIGNAL = 2.9; EXPRESSED IN HEART, SIGNAL = 3.6; EXPRESSED IN FETAL LIVER, SIGNAL = 3.1; EXPRESSED IN BONE MARROW, SIGNAL = 2.8; EXPRESSED IN ADULT LIVER, SIGNAL =   3; EXPRESSED IN HELA, SIGNAL = 3.3; SWISSPROT HIT: P09592, EVALUE 1.40e+00; NT HIT: AE004929.1, EVALUE 1.20e+00; EST_HUMAN HIT: BE889948.1, EVALUE 3.00e-02
acctgcgcagaatgacggctggcttcatgggcatggcggtggccatcatcctctttggctggatcatcggcgtgctgggctgctgctgggaccgaggccttatgcagtacgtggcagggctgctcttcctcatgggag

SEQ ID NO: 22829 - DNA, 105 bp, Homo sapiens
  MAP TO AC006330.2; EXPRESSED IN PLACENTA, SIGNAL = 1.8; EXPRESSED IN LUNG, SIGNAL = 2.4; EXPRESSED IN HEART, SIGNAL =   2; EXPRESSED IN FETAL LIVER, SIGNAL = 2.1; EXPRESSED IN BONE MARROW, SIGNAL = 1.9; EXPRESSED IN HELA, SIGNAL =   2; EXPRESSED IN BRAIN, SIGNAL = 2.1; EXPRESSED IN ADULT LIVER, SIGNAL = 2.3; NT HIT: AL163278.2, EVALUE 2.00e-23; EST_HUMAN HIT: AW468897.1, EVALUE 6.00e-43
cataatgtagaatgactgggagtcttgaccttcttttcctgcaactagatggtcccatctgggggtgatgggagatagtgacagatcatcaggcattagattctc

SEQ ID NO: 22830 - DNA, 90 bp, Homo sapiens
  MAP TO AC000100.2; EXPRESSED IN LUNG, SIGNAL = 1.6; EXPRESSED IN BRAIN, SIGNAL = 1.7; EXPRESSED IN BONE MARROW, SIGNAL =   2; EXPRESSED IN PLACENTA, SIGNAL = 1.6; EXPRESSED IN HELA, SIGNAL = 1.7; EXPRESSED IN HEART, SIGNAL = 1.6; EXPRESSED IN FETAL LIVER, SIGNAL = 3.7; EXPRESSED IN ADULT LIVER, SIGNAL =  11; NT HIT: Z36879.1, EVALUE 2.90e+00; EST_HUMAN HIT: BE741171.1, EVALUE 4.40e+00
ctggagcatgctcataagacttctctttcagattctcattaagtacagaatgaaacctgtggtaagtaccaattctgaaaaataaaaaaa

SEQ ID NO: 22831 - DNA, 178 bp, Homo sapiens
  MAP TO AC002504.1; EXPRESSED IN PLACENTA, SIGNAL = 5.6; EXPRESSED IN LUNG, SIGNAL =   6; EXPRESSED IN HEART, SIGNAL = 6.1; EXPRESSED IN FETAL LIVER, SIGNAL = 6.5; EXPRESSED IN BONE MARROW, SIGNAL =   6; EXPRESSED IN ADULT LIVER, SIGNAL = 5.6; EXPRESSED IN HELA, SIGNAL = 6.6; EXPRESSED IN BRAIN, SIGNAL = 7.1; SWISSPROT HIT: Q07954, EVALUE 1.30e+00; NT HIT: gi6981271, EVALUE 2.60e-02; EST_HUMAN HIT: AV662029.1, EVALUE 6.20e-01
acaactgttaaaagattccaacatgccattaggcaagagccagagaagatccgcagccatcccatccctgtccacagagatgccactggccctggtaactgctgtctccgccaccagcaccacaaagccaacctttgtcgagatcggggaggaaatgctcttcctacacacaagtgcg

SEQ ID NO: 22832 - DNA, 96 bp, Homo sapiens
  MAP TO AC005180.1; EXPRESSED IN PLACENTA, SIGNAL = 6.1; EXPRESSED IN HELA, SIGNAL = 9.4; EXPRESSED IN HEART, SIGNAL = 4.4; EXPRESSED IN BONE MARROW, SIGNAL = 6.2; EXPRESSED IN ADULT LIVER, SIGNAL =  11; EXPRESSED IN BRAIN, SIGNAL = 1.8; EXPRESSED IN FETAL LIVER, SIGNAL =   6; EXPRESSED IN LUNG, SIGNAL = 3.8; NT HIT: D17554.1, EVALUE 7.00e-26; EST_HUMAN HIT: BF245458.1, EVALUE 3.00e-26
cttgccaccagcatcagctttcttggccttaggtttcttctctttagtatctggcttctcagctttctcacccatcatcttgcaagatgggaaaga

SEQ ID NO: 22833 - DNA, 166 bp, Homo sapiens
  MAP TO AC004855.1; EXPRESSED IN PLACENTA, SIGNAL = 1.9; EXPRESSED IN LUNG, SIGNAL = 2.7; EXPRESSED IN HEART, SIGNAL = 1.6; EXPRESSED IN BRAIN, SIGNAL = 1.7; EXPRESSED IN ADULT LIVER, SIGNAL = 1.6; EXPRESSED IN FETAL LIVER, SIGNAL = 1.7; EXPRESSED IN BONE MARROW, SIGNAL = 1.5; NT HIT: gi11421930, EVALUE 2.00e-80; SWISSPROT HIT: Q09272, EVALUE 8.90e+00; EST_HUMAN HIT: AA319599.1, EVALUE 1.00e-75
ggaaggctgagtcaaaacttttatgtctaatgcactgttgatattttcttctaaagtagcacaatatccatccacaacactggtaatagtatccttcaaagttccaagattatagaaaacctgaagagctgttccgacttgagttggattcttaaaaaaaggtggg

SEQ ID NO: 22834 - DNA, 151 bp, Homo sapiens
  MAP TO AC002081.1; EXPRESSED IN LUNG, SIGNAL = 1.3; EXPRESSED IN HELA, SIGNAL = 1.7; EXPRESSED IN BRAIN, SIGNAL = 1.7; EXPRESSED IN BONE MARROW, SIGNAL = 1.5; EXPRESSED IN ADULT LIVER, SIGNAL = 1.3; EXPRESSED IN PLACENTA, SIGNAL = 1.4; EXPRESSED IN HEART, SIGNAL = 1.6; EXPRESSED IN FETAL LIVER, SIGNAL = 1.4; SWISSPROT HIT: Q59295, EVALUE 2.30e+00; NT HIT: AL163252.2, EVALUE 1.40e+00; EST_HUMAN HIT: R80873.1, EVALUE 5.10e-01
tttgagttttcctagtagtgactgtttattggaatatacaacttcctcttcattatcttctccttccatgatagcacaactgtctgcagccgggagttcacactcttttgagttagtcgtcattactaacttggaatatttgtattccagt

SEQ ID NO: 22835 - DNA, 89 bp, Homo sapiens
  MAP TO AC004954.1; EXPRESSED IN LUNG, SIGNAL = 1.7; EXPRESSED IN HELA, SIGNAL = 2.1; EXPRESSED IN FETAL LIVER, SIGNAL = 1.6; EXPRESSED IN BRAIN, SIGNAL =   2; EXPRESSED IN BONE MARROW, SIGNAL = 1.6; EXPRESSED IN ADULT LIVER, SIGNAL = 1.6; EXPRESSED IN PLACENTA, SIGNAL = 1.7; EXPRESSED IN HEART, SIGNAL = 1.7; NT HIT: M62752.1, EVALUE 4.70e-02
tcaggggactcttgctgcctcccactaccaccacatcaaacaaggtcagagcgtagtaggaggctgtgcccattcatcaggttccagtg

SEQ ID NO: 22836 - DNA, 349 bp, Homo sapiens
  MAP TO AC003958.1; EXPRESSED IN LUNG, SIGNAL = 3.4; EXPRESSED IN HEART, SIGNAL = 2.6; EXPRESSED IN FETAL LIVER, SIGNAL = 2.4; EXPRESSED IN BRAIN, SIGNAL = 2.7; EXPRESSED IN HELA, SIGNAL = 2.7; EXPRESSED IN BONE MARROW, SIGNAL = 3.1; EXPRESSED IN PLACENTA, SIGNAL = 2.7; EXPRESSED IN ADULT LIVER, SIGNAL = 2.6; NT HIT: Y16789.1, EVALUE 0.00e+00; SWISSPROT HIT: Q14525, EVALUE 3.00e-50; EST_HUMAN HIT: BF569905.1, EVALUE 0.00e+00
atgccctacaacttctgcctgcccagcctgagctgccgcaccagctgctcctcccggccctgtgtgccccccagctgccacggctacaccctgcccggggcctgcaacatccctgccaatgtgagcaactgcaactggttctgcgagggctccttcaatggcagcgagaaggagactatgcagttcctgaacgaccgcctggccagctacctggagaaggtgcgtcagctggagcgggacaacgcggagctggagaacctcatccgggagcggtctcagcagcaggagcccttgctgtgccccagctaccagtcctacttcaagaccattgaggagctccagcagaagg

SEQ ID NO: 22837 - DNA, 293 bp, Homo sapiens
  MAP TO AC002523.1; EXPRESSED IN HELA, SIGNAL = 9.3; EXPRESSED IN HEART, SIGNAL =   8; EXPRESSED IN BRAIN, SIGNAL = 9.4; EXPRESSED IN BONE MARROW, SIGNAL = 8.6; EXPRESSED IN PLACENTA, SIGNAL = 7.2; EXPRESSED IN LUNG, SIGNAL = 8.8; EXPRESSED IN FETAL LIVER, SIGNAL = 8.1; EXPRESSED IN ADULT LIVER, SIGNAL =   7; EST_HUMAN HIT: AI991025.1, EVALUE 2.00e-05; NT HIT: AF010496.1, EVALUE 4.60e-02; SWISSPROT HIT: Q32007, EVALUE 1.50e+00
caacaattccggaaaatgcccaagagggggcaaaacaatgttgctcaacctaatcccactgggacgcttcaactcaaggactatttgcaggcaggtgaagatatggagactttcctgtttgattatggaactgaccaaggtgcctggctctgggggacaccagatgaccagaggccatatgtagagctggcaatccactggtcccccacgaatgtacagtgggtcctagcacaggtagatactggtgcagactgcagtcttgtttatgggaacctgggtaagtttccaggcag

SEQ ID NO: 22838 - DNA, 167 bp, Homo sapiens
  MAP TO AC005369.1; EXPRESSED IN LUNG, SIGNAL = 3.9; EXPRESSED IN FETAL LIVER, SIGNAL = 4.4; EXPRESSED IN PLACENTA, SIGNAL = 4.6; EXPRESSED IN HELA, SIGNAL = 4.4; EXPRESSED IN BRAIN, SIGNAL = 4.5; EXPRESSED IN BONE MARROW, SIGNAL = 4.1; EXPRESSED IN ADULT LIVER, SIGNAL = 5.1; EXPRESSED IN HEART, SIGNAL =   4; SWISSPROT HIT: Q09776, EVALUE 3.90e+00; EST_HUMAN HIT: BE889525.1, EVALUE 9.00e-77; NT HIT: AF064564.2, EVALUE 9.70e-02
tcagtaactcttcttggtggaaccaaagccagagaagcccatcacagctgccatctcatcgtcctcctcaaatgtcaagtcctcctcagccctccttttcttctccttctgtttctctttcttgtacgctttggccttttcctcctggagggaaaaatcactcagaa

SEQ ID NO: 22839 - DNA, 134 bp, Homo sapiens
  MAP TO AC000134.14; EXPRESSED IN PLACENTA, SIGNAL = 1.9; EXPRESSED IN BRAIN, SIGNAL = 2.2; EXPRESSED IN ADULT LIVER, SIGNAL = 1.8; EXPRESSED IN LUNG, SIGNAL = 1.8; EXPRESSED IN HELA, SIGNAL = 1.7; EXPRESSED IN HEART, SIGNAL = 1.9; EXPRESSED IN FETAL LIVER, SIGNAL = 3.2; EXPRESSED IN BONE MARROW, SIGNAL = 2.4; NT HIT: AJ000052.1, EVALUE 7.00e-70; SWISSPROT HIT: P17471, EVALUE 3.10e+00; EST_HUMAN HIT: BE314607.1, EVALUE 4.00e-60
ctgttatcgtcttcccgaagggtcccatttaagcgagccaactcccgaagctgcatcttccgtagatcattctggtcctctggagtctcgataccctgcttcaggatgtttcttatctagtgaaaatgcaatgg

SEQ ID NO: 22840 - DNA, 138 bp, Homo sapiens
  MAP TO AC005384.1; EXPRESSED IN FETAL LIVER, SIGNAL = 2.8; EXPRESSED IN BRAIN, SIGNAL = 3.1; EXPRESSED IN BONE MARROW, SIGNAL = 2.7; EXPRESSED IN PLACENTA, SIGNAL = 2.8; EXPRESSED IN HELA, SIGNAL = 2.8; EXPRESSED IN HEART, SIGNAL = 2.6; EXPRESSED IN ADULT LIVER, SIGNAL = 2.6; EXPRESSED IN LUNG, SIGNAL = 2.9; SWISSPROT HIT: P53355, EVALUE 4.00e+00; NT HIT: AJ002141.1, EVALUE 1.20e+00
ggagaactaaatgatgacaatgacagtgtccctgggctaacccttagaatcggaaaagccggcaagctggaagtttcaggtcccgggaagcacccagcagtcggaattcctattggagagttagctggcttcatctaa

SEQ ID NO: 22841 - DNA, 306 bp, Homo sapiens
  MAP TO AC000379.1; EXPRESSED IN PLACENTA, SIGNAL = 1.7; EXPRESSED IN BRAIN, SIGNAL = 1.8; EXPRESSED IN BONE MARROW, SIGNAL = 2.3; EXPRESSED IN ADULT LIVER, SIGNAL = 1.2; EXPRESSED IN LUNG, SIGNAL =   2; EXPRESSED IN HELA, SIGNAL = 2.6; EXPRESSED IN HEART, SIGNAL = 1.7; EXPRESSED IN FETAL LIVER, SIGNAL = 2.9; NT HIT: gi4557364, EVALUE 0.00e+00; EST_HUMAN HIT: BE889560.1, EVALUE 1.00e-109; SWISSPROT HIT: P54132, EVALUE 3.00e-42
cagtataattctgaattgactctgagaagtttatattttgagcagtagatgacactggaagacagtctgtcttggctgaggaaagtctttctgatactgatttaattggccgaccttccttgatgggttgataggcagctgtggaagatttgctggctgctaaattatgcattatgtcttcccagtcatcatcatcatcaaagtcatctatgtcaaaattatcaatatcataggaaggttgggtttctctttctaagtcatttattgaagcagtatgtttattctgatctttcacagcagtgcttg

SEQ ID NO: 22842 - DNA, 232 bp, Homo sapiens
  MAP TO AC005591.1; EXPRESSED IN LUNG, SIGNAL = 6.7; EXPRESSED IN HELA, SIGNAL = 6.7; EXPRESSED IN FETAL LIVER, SIGNAL =   8; EXPRESSED IN BRAIN, SIGNAL = 6.9; EXPRESSED IN BONE MARROW, SIGNAL = 6.4; EXPRESSED IN ADULT LIVER, SIGNAL = 6.7; EXPRESSED IN PLACENTA, SIGNAL = 6.3; EXPRESSED IN HEART, SIGNAL = 7.2; EST_HUMAN HIT: BF224345.1, EVALUE 1.00e-128; SWISSPROT HIT: P48308, EVALUE 1.40e+00; NT HIT: M98537.1, EVALUE 8.60e+00
gaggcaggagcaaggtgttgagcttctaaacatcgtcctgccagggagggaccctgacaggtgcttggctgacatgctgtggccgaggcaggaaggaagttgcagaattccacgaaggcagaagactaccagtaggcaggtcccatgtcatcacacccgtgagagtggcagtggtctggtggccacagagatgtctgacagcgtgggtctggagccggtgatcggctggctt

SEQ ID NO: 22843 - DNA, 157 bp, Homo sapiens
  MAP TO AC004770.1; EXPRESSED IN LUNG, SIGNAL = 3.1; EXPRESSED IN HEART, SIGNAL = 3.1; EXPRESSED IN FETAL LIVER, SIGNAL = 4.2; EXPRESSED IN BRAIN, SIGNAL = 3.6; EXPRESSED IN HELA, SIGNAL = 4.6; EXPRESSED IN BONE MARROW, SIGNAL = 3.4; EXPRESSED IN PLACENTA, SIGNAL =   3; EXPRESSED IN ADULT LIVER, SIGNAL =   4; NT HIT: gi11439783, EVALUE 6.00e-40; SWISSPROT HIT: P01876, EVALUE 3.00e+00; EST_HUMAN HIT: AA428359.1, EVALUE 9.00e-40
tattcaacatgctctcccctgaccttttccgccagctccaggccacatgcaatgtccacaagtctgccttcaatgactggttcagtggacacctcaacttccagattgagcaccagtgagtagggagcctggggaagcagggtcctggggagggtgt

SEQ ID NO: 22844 - DNA, 250 bp, Homo sapiens
  MAP TO AC004081.1; EXPRESSED IN LUNG, SIGNAL = 2.2; EXPRESSED IN HEART, SIGNAL = 2.3; EXPRESSED IN FETAL LIVER, SIGNAL = 2.5; EXPRESSED IN HELA, SIGNAL =   2; EXPRESSED IN BRAIN, SIGNAL = 2.3; EXPRESSED IN BONE MARROW, SIGNAL =   2; EXPRESSED IN ADULT LIVER, SIGNAL = 1.9; EXPRESSED IN PLACENTA, SIGNAL = 2.1; EST_HUMAN HIT: BE392803.1, EVALUE 2.30e-01; SWISSPROT HIT: P12525, EVALUE 8.00e-43; NT HIT: J03069.1, EVALUE 0.00e+00
ccaggagccgctggagagagcggtgagtgacctgcttgccgttggcgcgccctcgggatactcgcccaaggagttcgccacccccgactacactcccgagctcgaagccggcaacctagcgcccatcttcccctgtttgttgggcgagcccaagatccaggcctgctccaggtctgagagcccaagcgactccgagggtgaagaaatcgacgtgacagtaaagaagaggcagtctttgagtacgcggaag

SEQ ID NO: 22845 - DNA, 129 bp, Homo sapiens
  MAP TO AC004865.1; EXPRESSED IN PLACENTA, SIGNAL = 1.5; EXPRESSED IN BRAIN, SIGNAL = 1.6; EXPRESSED IN ADULT LIVER, SIGNAL = 1.1; EXPRESSED IN HEART, SIGNAL = 1.5; EXPRESSED IN LUNG, SIGNAL = 1.6; EXPRESSED IN FETAL LIVER, SIGNAL = 0.95; EXPRESSED IN BONE MARROW, SIGNAL = 1.1; NT HIT: M18533.1, EVALUE 1.10e+00; EST_HUMAN HIT: BF328623.1, EVALUE 1.00e-66
cagagcttaatcaggaagcttcagaagagaggtagtcccagtgacgtagttacacctatagtgacacagcattctaaagtgaatgactccaacgaattaggtggtctgactaccagtggctctgcagag

SEQ ID NO: 22846 - DNA, 124 bp, Homo sapiens
  MAP TO AC004125.1; EXPRESSED IN PLACENTA, SIGNAL = 1.9; EXPRESSED IN LUNG, SIGNAL = 1.7; EXPRESSED IN HEART, SIGNAL = 2.4; EXPRESSED IN BRAIN, SIGNAL = 1.7; EXPRESSED IN HELA, SIGNAL = 1.9; EXPRESSED IN FETAL LIVER, SIGNAL = 2.1; EXPRESSED IN BONE MARROW, SIGNAL = 1.9; EXPRESSED IN ADULT LIVER, SIGNAL =   2; NT HIT: AJ245761.1, EVALUE 2.80e-01; EST_HUMAN HIT: BE928133.1, EVALUE 7.00e-03
gggtctagatgacctcaatggtcctccaactctgatgttcatcctctggttctctttagccttgcccctctacttgacagccaatgaagagcacagacttgggagccacactgcctacatttga

SEQ ID NO: 22847 - DNA, 237 bp, Homo sapiens
  MAP TO AC003689.1; EXPRESSED IN LUNG, SIGNAL = 3.4; EXPRESSED IN FETAL LIVER, SIGNAL =   4; EXPRESSED IN BRAIN, SIGNAL = 2.6; EXPRESSED IN BONE MARROW, SIGNAL =   3; EXPRESSED IN ADULT LIVER, SIGNAL = 3.2; EXPRESSED IN PLACENTA, SIGNAL = 4.2; EXPRESSED IN HEART, SIGNAL = 3.5; EXPRESSED IN HELA, SIGNAL = 2.6; EST_HUMAN HIT: AA641846.1, EVALUE 1.00e-05; NT HIT: X64643.1, EVALUE 4.00e-05; SWISSPROT HIT: P23477, EVALUE 2.00e+00
cttccctcacagtcatggtctgggagtccacactgtgttagcagtggtttgctccttttgtattgcagagaaatgcggatacacatgtagatgtacatatatcgccattcatctctttctccattagtggacatcagggtggtttccagtttggggctattaacgagcagtgctgacgtgagcttttgtgtacaagctgcgtagcaacatatgctttcacttctcttgggcaaatac

SEQ ID NO: 22848 - DNA, 120 bp, Homo sapiens
  MAP TO AC002123.1; EXPRESSED IN LUNG, SIGNAL = 4.3; EXPRESSED IN HEART, SIGNAL = 2.9; EXPRESSED IN FETAL LIVER, SIGNAL = 3.6; EXPRESSED IN BRAIN, SIGNAL = 3.6; EXPRESSED IN BONE MARROW, SIGNAL = 2.9; EXPRESSED IN HELA, SIGNAL = 2.9; EXPRESSED IN PLACENTA, SIGNAL = 3.3; EXPRESSED IN ADULT LIVER, SIGNAL = 3.3; EST_HUMAN HIT: BE067986.1, EVALUE 2.00e-03; NT HIT: AL161588.2, EVALUE 1.00e+00; SWISSPROT HIT: O53553, EVALUE 8.20e-01
gcagaagaagaagaagaaaaaaggacagagttccgaggtattcagaaccagggaggaaccagcagaggagatggagcaaatgcgtccggcaaagtcagaggaagaggtggagaaggcagt

SEQ ID NO: 22849 - DNA, 347 bp, Homo sapiens
  MAP TO AC006312.8; EXPRESSED IN PLACENTA, SIGNAL = 1.7; EXPRESSED IN HEART, SIGNAL = 2.1; EXPRESSED IN ADULT LIVER, SIGNAL = 2.3; EXPRESSED IN LUNG, SIGNAL = 2.8; EXPRESSED IN FETAL LIVER, SIGNAL = 1.7; EXPRESSED IN BRAIN, SIGNAL = 2.2; EXPRESSED IN BONE MARROW, SIGNAL = 1.9; EXPRESSED IN HELA, SIGNAL = 2.3; EST_HUMAN HIT: BE550162.1, EVALUE 0.00e+00; NT HIT: gi11429679, EVALUE 0.00e+00; SWISSPROT HIT: Q08379, EVALUE 2.00e-34
ctgaacccccgcccccagagcccccagcagggccctccgaggtggagcagcagctacaagcggaggctgagcacctgcggaaggagctggagggtctggcaggacagcttcaagcccaggtgcaagacaatgagggcttgagtcgcctgaaccgggagcaggaggagaggctgctggagctggagcgggcggccgagctctggggggagcaggcggaggcgcgcaggcaaatcctggagaccatgcagaacgaccgcactaccatcagccgcgcactctcccagaaccgggagctcaaggagcagctggctgagctgcagagcggatttgtaaagctggtgcgctgc

SEQ ID NO: 22850 - DNA, 211 bp, Homo sapiens
  MAP TO AC002355.1; EXPRESSED IN BONE MARROW, SIGNAL = 0.86; EXPRESSED IN PLACENTA, SIGNAL = 0.77; EXPRESSED IN LUNG, SIGNAL =   1; EXPRESSED IN HEART, SIGNAL =   4; EXPRESSED IN FETAL LIVER, SIGNAL = 0.78; EXPRESSED IN ADULT LIVER, SIGNAL = 0.7; EXPRESSED IN BRAIN, SIGNAL = 0.91; SWISSPROT HIT: O33367, EVALUE 4.30e-01; NT HIT: M63503.1, EVALUE 5.00e-01
  unsure 21
  unsure 25
  unsure 28
tcagagccgggctgggcgcancatncangacacaagcacagcacagggtggagcagtccagcttggccggggtccccggggatccagccttcttgttgaccttgggcagcagcagaacaaaggacatagccagggcacagtggtagaagctgtggacgtaagtgtagtcccagtcctgcggggggcaagcggtcagtctggggcctcagcc

SEQ ID NO: 22851 - DNA, 135 bp, Homo sapiens
  MAP TO AC005868.1; EXPRESSED IN PLACENTA, SIGNAL = 4.7; EXPRESSED IN HEART, SIGNAL = 5.2; EXPRESSED IN BONE MARROW, SIGNAL = 4.4; EXPRESSED IN ADULT LIVER, SIGNAL = 5.5; EXPRESSED IN LUNG, SIGNAL = 5.7; EXPRESSED IN HELA, SIGNAL = 4.6; EXPRESSED IN FETAL LIVER, SIGNAL = 4.6; EXPRESSED IN BRAIN, SIGNAL = 5.2; NT HIT: U91328.1, EVALUE 1.00e-03; EST_HUMAN HIT: BE047871.1, EVALUE 1.00e-07; SWISSPROT HIT: P19490, EVALUE 5.30e+00
atacagacattgatatcatagataaacatgttctttatttttatattgtcaatgtttgtgttgctggaaaaaggggtccctatgatccagacctcaagagagggttcctggacctcccacagaaagggattcaag

SEQ ID NO: 22852 - DNA, 77 bp, Homo sapiens
  MAP TO AC005010.2; EXPRESSED IN PLACENTA, SIGNAL = 3.4; EXPRESSED IN LUNG, SIGNAL = 4.2; EXPRESSED IN HEART, SIGNAL = 3.8; EXPRESSED IN FETAL LIVER, SIGNAL = 3.6; EXPRESSED IN BONE MARROW, SIGNAL = 3.5; EXPRESSED IN ADULT LIVER, SIGNAL = 3.6; EXPRESSED IN HELA, SIGNAL = 3.8; EXPRESSED IN BRAIN, SIGNAL =   4; NT HIT: M64733.1, EVALUE 6.10e-01; SWISSPROT HIT: O87971, EVALUE 5.60e+00; EST_HUMAN HIT: AA115860.1, EVALUE 3.60e+00
gcaggatgcgaatgggagaggcaccaagggccgcagagaaggagccgtgctgcactgggctgccgtgaagacgaggt

SEQ ID NO: 22853 - DNA, 234 bp, Homo sapiens
  MAP TO AC006237.1; EXPRESSED IN LUNG, SIGNAL = 1.6; EXPRESSED IN FETAL LIVER, SIGNAL = 1.9; EXPRESSED IN BRAIN, SIGNAL =   2; EXPRESSED IN BONE MARROW, SIGNAL =   2; EXPRESSED IN PLACENTA, SIGNAL = 1.7; EXPRESSED IN HELA, SIGNAL = 1.9; EXPRESSED IN HEART, SIGNAL = 2.2; EXPRESSED IN ADULT LIVER, SIGNAL = 1.8; NT HIT: AE005006.1, EVALUE 1.40e-01; SWISSPROT HIT: Q92737, EVALUE 2.00e-11; EST_HUMAN HIT: F30158.1, EVALUE 1.00e-27
ctggagcgtattgacagggaaggcgctgatgggtggaaagtcgaggatctggaggtcgtgcacgtggccgttcatgacgacagcaggcaggtaaaggcggcgggcggtggtggggacgcagacctcgctgaactcgttgtacaagaactggcgcacgatggcactcttgcccacacctcgcgcccccagcacggccacccggtaggtggagaccatgcctcccgccccactccg

SEQ ID NO: 22854 - DNA, 88 bp, Homo sapiens
  MAP TO AC004819.1; EXPRESSED IN LUNG, SIGNAL = 2.8; EXPRESSED IN BRAIN, SIGNAL = 3.3; EXPRESSED IN BONE MARROW, SIGNAL = 3.3; EXPRESSED IN PLACENTA, SIGNAL = 2.6; EXPRESSED IN HELA, SIGNAL = 3.1; EXPRESSED IN HEART, SIGNAL = 3.1; EXPRESSED IN FETAL LIVER, SIGNAL =   3; EXPRESSED IN ADULT LIVER, SIGNAL = 2.3; EST_HUMAN HIT: AA016979.1, EVALUE 2.00e-20; NT HIT: AB019576.1, EVALUE 4.00e-21
ttcttgtgcagggaccacgctaatcttctctgtattgttccaattttagtatatgtgctgctgaagcgagcactccatttctgtaaag

SEQ ID NO: 22855 - DNA, 226 bp, Homo sapiens
  MAP TO AC005282.1; EXPRESSED IN PLACENTA, SIGNAL = 7.5; EXPRESSED IN LUNG, SIGNAL = 6.9; EXPRESSED IN FETAL LIVER, SIGNAL =   6; EXPRESSED IN BRAIN, SIGNAL = 6.9; EXPRESSED IN ADULT LIVER, SIGNAL = 5.2; EXPRESSED IN HELA, SIGNAL = 5.6; EXPRESSED IN HEART, SIGNAL = 6.1; EXPRESSED IN BONE MARROW, SIGNAL = 6.4; EST_HUMAN HIT: BF129669.1, EVALUE 8.00e-01; SWISSPROT HIT: P02671, EVALUE 1.00e-06
cggcaccgtcacagcagcaccgcctggaagagggagcaccgggcactgggctacgaggaacagggtaccacctcgatgagggagcaccgggcactgggctacgaggaacagggcaccgcctcgaagagggagcaccgggcactgggctacgaggaacagggcaacgcctcgaagagggagcaccgggcactgggctacgaggaacagggcagtggagccgcaccct

SEQ ID NO: 22856 - DNA, 172 bp, Homo sapiens
  MAP TO AC005294.1; EXPRESSED IN BRAIN, SIGNAL = 4.6; EXPRESSED IN BONE MARROW, SIGNAL = 4.2; EXPRESSED IN PLACENTA, SIGNAL = 4.4; EXPRESSED IN ADULT LIVER, SIGNAL = 3.8; EXPRESSED IN FETAL LIVER, SIGNAL = 4.1; EXPRESSED IN HEART, SIGNAL = 4.5; EXPRESSED IN HELA, SIGNAL = 4.3; EXPRESSED IN LUNG, SIGNAL = 4.7; SWISSPROT HIT: P39299, EVALUE 3.90e+00
ctgagccagctcctatccacctgataggatacaaagaagactcactggcctgtgggttcttacgtacaagctgctgtttttcccctctaccgatcatgggaatttccagttcaggagttttgttggcatgccgtcctggacagagtgagagcaggaggacctggccacacac

SEQ ID NO: 22857 - DNA, 111 bp, Homo sapiens
  MAP TO AC002476.1; EXPRESSED IN LUNG, SIGNAL = 6.5; EXPRESSED IN BONE MARROW, SIGNAL =   5; EXPRESSED IN PLACENTA, SIGNAL = 5.5; EXPRESSED IN HELA, SIGNAL = 5.4; EXPRESSED IN HEART, SIGNAL = 6.3; EXPRESSED IN FETAL LIVER, SIGNAL = 6.2; EXPRESSED IN BRAIN, SIGNAL =   7; EXPRESSED IN ADULT LIVER, SIGNAL = 7.8; EST_HUMAN HIT: AA314150.1, EVALUE 4.00e-56; SWISSPROT HIT: P13473, EVALUE 2.00e-15; NT HIT: gi11421124, EVALUE 3.00e-56
tatttgtagtttcatagcgtactgtgaaattcatctgccattttgcataaaggcaagtggcattttctgaatctgtcaaattaagttccaatgcataagaccgcacagctc

SEQ ID NO: 22858 - DNA, 146 bp, Homo sapiens
  MAP TO AC005747.1; EXPRESSED IN ADULT LIVER, SIGNAL = 9.5; EXPRESSED IN PLACENTA, SIGNAL = 9.2; EXPRESSED IN LUNG, SIGNAL =  12; EXPRESSED IN HELA, SIGNAL = 8.8; EXPRESSED IN HEART, SIGNAL =   8; EXPRESSED IN BRAIN, SIGNAL = 9.5; EXPRESSED IN BONE MARROW, SIGNAL = 9.2; EXPRESSED IN FETAL LIVER, SIGNAL = 8.7; NT HIT: AB015885.1, EVALUE 3.30e-01; EST_HUMAN HIT: R45088.1, EVALUE 2.00e-68; SWISSPROT HIT: P32867, EVALUE 5.30e+00
acaagtgtaaagaaaataaaatgacccatgatcttagaccaaaggttctcaacttcagcacgattcatgttttcaagttgagcacttctttgctgtggtgtcccatgccttgcgagatactcagcgtcatccctggtgtcacctac

SEQ ID NO: 22859 - DNA, 249 bp, Homo sapiens
  MAP TO AC002288.1; EXPRESSED IN ADULT LIVER, SIGNAL = 4.5; EXPRESSED IN PLACENTA, SIGNAL = 4.6; EXPRESSED IN LUNG, SIGNAL = 4.4; EXPRESSED IN HEART, SIGNAL = 3.9; EXPRESSED IN BRAIN, SIGNAL = 4.3; EXPRESSED IN HELA, SIGNAL =   4; EXPRESSED IN FETAL LIVER, SIGNAL = 4.1; EXPRESSED IN BONE MARROW, SIGNAL = 5.3; EST_HUMAN HIT: AI718148.1, EVALUE 2.30e-01
agtggtcaaggaacaaaaagcaacatctctgtgtggtcagttgcaaatgattggaacaaggggaatacgaaaagaaaaagtcagtggtttccttttgtcgttgtctaagaaaaataataggcatcaaatatctcctgtgttctgggcgccatatttaatagcattagcaatagaagaagatggagaaagagatagagaaggagaaagagaaggagaagggaaaggagaaggagaaggggtaggagaagg

SEQ ID NO: 22860 - DNA, 273 bp, Homo sapiens
  MAP TO AC004918.1; EXPRESSED IN LUNG, SIGNAL = 1.9; EXPRESSED IN HELA, SIGNAL = 2.1; EXPRESSED IN ADULT LIVER, SIGNAL = 2.1; EXPRESSED IN PLACENTA, SIGNAL = 1.9; EXPRESSED IN HEART, SIGNAL = 2.1; EXPRESSED IN FETAL LIVER, SIGNAL = 2.3; EXPRESSED IN BRAIN, SIGNAL = 2.3; EXPRESSED IN BONE MARROW, SIGNAL = 1.8; EST_HUMAN HIT: BE266603.1, EVALUE 9.80e-01; NT HIT: AF026552.3, EVALUE 1.70e-01; SWISSPROT HIT: O01975, EVALUE 2.30e-01
tggaaagacatctgctgctctggcacgcaaatgctgtctccgagggctcgtgccatatgcaccagctggtggatcctgctgcctccctgcacatgtacggaagccacgtaccgaacctggttctccaagaagtgcatgtagcggtaaagcagtgtgtaggagggagagaggatgcccacagacttcatccgcgcgccacgttccagctcgctctccacgggcatgttggcaaagcaggccaggccgaagaagggcccctttcggaaatagcta

SEQ ID NO: 22861 - DNA, 159 bp, Homo sapiens
  MAP TO AC000062.1; EXPRESSED IN PLACENTA, SIGNAL = 1.4; EXPRESSED IN LUNG, SIGNAL = 1.5; EXPRESSED IN FETAL LIVER, SIGNAL = 1.6; EXPRESSED IN BRAIN, SIGNAL = 1.7; EXPRESSED IN BONE MARROW, SIGNAL = 1.4; EXPRESSED IN ADULT LIVER, SIGNAL = 2.2; EXPRESSED IN HEART, SIGNAL = 1.5; EST_HUMAN HIT: AA393984.1, EVALUE 5.40e-01; NT HIT: AL049784.1, EVALUE 1.00e-84; SWISSPROT HIT: P40468, EVALUE 1.80e-02
gtaaagaagaaatttatggcggagctaaaagaattacggcacaaagagcagaacccatatgtggttcaaagcattatcagcttaataatgggcatgaaattctttcgaattaagatgtatccagtggaggattttgaggcctctcttcagtttatgcag

SEQ ID NO: 22862 - DNA, 351 bp, Homo sapiens
  MAP TO AC005016.1; EXPRESSED IN HEART, SIGNAL = 2.2; EXPRESSED IN BRAIN, SIGNAL = 0.91; EXPRESSED IN BONE MARROW, SIGNAL = 0.92; EXPRESSED IN PLACENTA, SIGNAL =   1; EXPRESSED IN LUNG, SIGNAL = 1.2; EXPRESSED IN FETAL LIVER, SIGNAL = 0.98; EXPRESSED IN ADULT LIVER, SIGNAL = 0.89; NT HIT: AJ271735.1, EVALUE 9.00e-07; SWISSPROT HIT: P08548, EVALUE 2.00e-13; EST_HUMAN HIT: BE000550.1, EVALUE 2.00e-14
cccatccagaaggagagaggctaaagtgtacttaactagggatttgggaagaatagggccaactggacagcattggttaagtgccagaagaaacactagtgttttcagatacagagtgtgatgattaactttatgtgtcaacttgactgggctatggtgtgcccagatgtcaaacatatggtttactcgcatgttgttgcaaatatttgcatctgtgttcattaaggacattggcccatagttttccatttttgttttgtccttgtctggttttggcatcagggtaatgatggccttgtagaatgcatttggaagaattatttcctcttcaattttctggaagaatttgag

SEQ ID NO: 22863 - DNA, 98 bp, Homo sapiens
  MAP TO AC005659.2; EXPRESSED IN PLACENTA, SIGNAL =   4; EXPRESSED IN LUNG, SIGNAL = 3.7; EXPRESSED IN HELA, SIGNAL = 4.2; EXPRESSED IN FETAL LIVER, SIGNAL = 4.2; EXPRESSED IN BRAIN, SIGNAL =   5; EXPRESSED IN BONE MARROW, SIGNAL = 3.9; EXPRESSED IN ADULT LIVER, SIGNAL = 4.1; EXPRESSED IN HEART, SIGNAL = 3.9; NT HIT: gi9695413, EVALUE 5.30e-02; EST_HUMAN HIT: BF509359.1, EVALUE 7.70e-02
gcaggaggcatgccctctgagatggccagaaagtctacaagtctgtctgtttcagccccaacagccccgggctcccaggccaggtggaattctgccat

SEQ ID NO: 22864 - DNA, 480 bp, Homo sapiens
  MAP TO AC005358.1; EXPRESSED IN BONE MARROW, SIGNAL = 1.1; EXPRESSED IN PLACENTA, SIGNAL = 1.2; EXPRESSED IN LUNG, SIGNAL = 1.3; EXPRESSED IN HEART, SIGNAL = 1.4; EXPRESSED IN FETAL LIVER, SIGNAL = 1.3; EXPRESSED IN BRAIN, SIGNAL = 1.1; EXPRESSED IN ADULT LIVER, SIGNAL = 1.2; NT HIT: U57651.1, EVALUE 3.00e-01; SWISSPROT HIT: Q03233, EVALUE 4.40e-01; EST_HUMAN HIT: BF376478.1, EVALUE 1.00e-100
gtctctgaattaagacaacagcttcgaattcggggcttgcctgtgtcaggcaccaaaacggctctcatggaccggcttcgacccttccaggactgctctggcaacccagtgccgaactttggggatataacgactgtcacttttcctgtcacacccaacacgctgcccaattaccagtcttcctcttctaccagtgccctgtccaacggcttctaccactttggcagcaccagctccagccccccgatctccccagcctcctctgacctgtcagtcgctgggtccctgccggacaccttcaatgatgcctccccctccttcggcctgcacccgtccccagtccacgtgtgcacggaggaaagtctcatgagcagcctgaatgggggctctgttccttctgagctggatgggctggactccgagaaggacaagatgctggtggagaagcagaaggtgatcaatgaactcacctggaaactc

SEQ ID NO: 22865 - DNA, 105 bp, Homo sapiens
  MAP TO AC004841.2; EXPRESSED IN PLACENTA, SIGNAL = 4.6; EXPRESSED IN LUNG, SIGNAL = 4.9; EXPRESSED IN HELA, SIGNAL = 4.6; EXPRESSED IN FETAL LIVER, SIGNAL = 4.8; EXPRESSED IN ADULT LIVER, SIGNAL = 4.7; EXPRESSED IN HEART, SIGNAL = 3.6; EXPRESSED IN BRAIN, SIGNAL = 4.8; EXPRESSED IN BONE MARROW, SIGNAL = 4.2; EST_HUMAN HIT: AI628131.1, EVALUE 3.30e-01; NT HIT: AE004742.1, EVALUE 8.90e-01
ggaaccaacccctcctaccggcaaagagggagaaaagaccctatcagcagtagacatgtggacggcaacctccctgaacaacctggtgagagctcagggcagaca

SEQ ID NO: 22866 - DNA, 243 bp, Homo sapiens
  MAP TO AC005899.1; EXPRESSED IN PLACENTA, SIGNAL = 1.7; EXPRESSED IN LUNG, SIGNAL = 1.5; EXPRESSED IN HEART, SIGNAL = 1.5; EXPRESSED IN FETAL LIVER, SIGNAL = 2.5; EXPRESSED IN BONE MARROW, SIGNAL = 2.3; EXPRESSED IN ADULT LIVER, SIGNAL = 1.4; EXPRESSED IN HELA, SIGNAL = 1.7; EXPRESSED IN BRAIN, SIGNAL = 1.2; SWISSPROT HIT: O43670, EVALUE 3.00e-07; EST_HUMAN HIT: BF088376.1, EVALUE 0.00e+00; NT HIT: gi4508016, EVALUE 0.00e+00
gctcaggcagctgtccaaggacctgttggtacagatttcaaacccttaaatagtacccctgcaacaactacagaacccccaaagcctacattccctgcttatacacagtctacagcttcaacaactagtacaacaaatagtactgcagctaaaccagcggcttcaataacaagtaagcctgctacacttacaacaactagtgcaaccagtaagttgatccatccagatgaggatatatccctg

SEQ ID NO: 22867 - DNA, 185 bp, Homo sapiens
  MAP TO AC005509.1; EXPRESSED IN LUNG, SIGNAL = 5.6; EXPRESSED IN HEART, SIGNAL =   7; EXPRESSED IN FETAL LIVER, SIGNAL = 8.5; EXPRESSED IN HELA, SIGNAL = 5.7; EXPRESSED IN BRAIN, SIGNAL = 6.8; EXPRESSED IN BONE MARROW, SIGNAL = 6.8; EXPRESSED IN ADULT LIVER, SIGNAL = 7.2; EXPRESSED IN PLACENTA, SIGNAL = 6.2; SWISSPROT HIT: P01133, EVALUE 2.00e-32; NT HIT: X04571.1, EVALUE 1.00e-100; EST_HUMAN HIT: BE278455.1, EVALUE 6.40e-01
gtccctttttggtgaccgtatcttctattcaacatggaaaatgaagacaatttggatagccaacaaacacactggaaaggacatggttagaattaacctccattcatcatttgtaccacttggtgaactgaaagtagtgcatccacttgcacaacccaaggcagaagatgacacttgggagcctg

SEQ ID NO: 22868 - DNA, 141 bp, Homo sapiens
  MAP TO AC003077.1; EXPRESSED IN LUNG, SIGNAL = 2.4; EXPRESSED IN HEART, SIGNAL = 3.7; EXPRESSED IN FETAL LIVER, SIGNAL = 3.4; EXPRESSED IN BRAIN, SIGNAL =   6; EXPRESSED IN BONE MARROW, SIGNAL = 2.2; EXPRESSED IN HELA, SIGNAL = 3.8; EXPRESSED IN PLACENTA, SIGNAL = 3.6; EXPRESSED IN ADULT LIVER, SIGNAL = 3.4; NT HIT: gi7662263, EVALUE 5.00e-74; SWISSPROT HIT: P98107, EVALUE 5.30e+00; EST_HUMAN HIT: BF346257.1, EVALUE 2.00e-18
tgtcaaagttctggatgatggtgaggtgcaggtgctctttgcgctgccattctgtttgcatggggtaggtcaggaactccctgaggggccgatcagaccattccagtagctcgtcatataagaggagggtatatgcagctt

SEQ ID NO: 22869 - DNA, 289 bp, Homo sapiens
  MAP TO AC005207.1; EXPRESSED IN PLACENTA, SIGNAL = 1.4; EXPRESSED IN LUNG, SIGNAL = 1.5; EXPRESSED IN HELA, SIGNAL = 1.9; EXPRESSED IN HEART, SIGNAL = 3.8; EXPRESSED IN FETAL LIVER, SIGNAL =   2; EXPRESSED IN BRAIN, SIGNAL = 2.5; EXPRESSED IN BONE MARROW, SIGNAL = 1.4; EXPRESSED IN ADULT LIVER, SIGNAL = 2.1; SWISSPROT HIT: P11466, EVALUE 3.80e+00; EST_HUMAN HIT: AA195106.1, EVALUE 0.00e+00; NT HIT: AF055066.1, EVALUE 1.80e-01
aattattatgattaaagttactgttgcatttaggaggctccttgaaagtaacaccttttccaaggacaatggcaacaatgtcaatgtcaacactgagtctaattttgaccacatttatagtggtatagtgtcaatactgcattttcatgacaaccacactccactgttgaaacactgtgccagtgagaagtgcaacatccagtgggcagatgaaaatgatgcatggccaagttcagtgtttacagataaaactgctgtggttcaagtgcttccttccccatcaaatcct

SEQ ID NO: 22870 - DNA, 230 bp, Homo sapiens
  MAP TO AC002076.1; EXPRESSED IN PLACENTA, SIGNAL = 3.2; EXPRESSED IN LUNG, SIGNAL = 3.2; EXPRESSED IN HELA, SIGNAL = 3.5; EXPRESSED IN FETAL LIVER, SIGNAL = 3.2; EXPRESSED IN BRAIN, SIGNAL = 3.5; EXPRESSED IN ADULT LIVER, SIGNAL = 3.3; EXPRESSED IN HEART, SIGNAL = 3.3; EXPRESSED IN BONE MARROW, SIGNAL = 3.7; SWISSPROT HIT: P18395, EVALUE 7.10e+00; EST_HUMAN HIT: AW379433.1, EVALUE 8.20e-01
tgaccacaaaagtggttactgatttaggtaattacaacttgtcatttgttacagaagcagaggcaagttttctcttagtcattaacacaatggtagtgaaatgtgactcatgtaaactcaacaggatgccagaaggacctgatgtaggtgatggagatttctctctcatgtgtgctcaccttgttaaagaaaagactgtggtgttgagtcttcatgatgatagggtaaaa

SEQ ID NO: 22871 - DNA, 337 bp, Homo sapiens
  MAP TO AC004861.1; EXPRESSED IN PLACENTA, SIGNAL = 3.7; EXPRESSED IN ADULT LIVER, SIGNAL = 4.5; EXPRESSED IN LUNG, SIGNAL = 4.3; EXPRESSED IN HEART, SIGNAL = 3.5; EXPRESSED IN FETAL LIVER, SIGNAL = 3.8; EXPRESSED IN BRAIN, SIGNAL = 4.3; EXPRESSED IN BONE MARROW, SIGNAL =   4; EXPRESSED IN HELA, SIGNAL = 4.3; NT HIT: AL163303.2, EVALUE 2.00e-32; SWISSPROT HIT: P04933, EVALUE 2.20e+00; EST_HUMAN HIT: BF347229.1, EVALUE 5.00e-46
atgtgtttcatgggaggaggttaaaatatcaacatcaataggagtttggaaaaagttgattccaaccctcatggatgactttgaaatgttcaagacttcagtggaggaagccacttcagatgtggtagaaatagcaagaaaactagaagtagaagtagagcctgaagatgtgactgaattgctgcaatctcataataaaattagagcagatgatgacttgcttcttatggatgaacagagaaagtggtttctagagatagaatctacttccagtgaagtgacgatgaacatttttgagatgacaacacaagatttagaatatttcattaaacttagc

SEQ ID NO: 22872 - DNA, 359 bp, Homo sapiens
  MAP TO AC005216.1; EXPRESSED IN FETAL LIVER, SIGNAL = 2.1; EXPRESSED IN BRAIN, SIGNAL = 1.2; EXPRESSED IN BONE MARROW, SIGNAL = 1.6; EXPRESSED IN ADULT LIVER, SIGNAL = 1.9; EXPRESSED IN PLACENTA, SIGNAL = 1.7; EXPRESSED IN LUNG, SIGNAL = 1.5; EXPRESSED IN HEART, SIGNAL = 3.6; EXPRESSED IN HELA, SIGNAL = 1.8; EST_HUMAN HIT: C02944.1, EVALUE 1.00e-116; SWISSPROT HIT: Q24432, EVALUE 2.20e-01
atggatccctgcagagacccctccagtccgggatccccactctcgtggtaggctccctcagacgcagccccaccatggtccttcggcctcagcagttccaattctaccagccacaggggatcccctcctccccctcagccgtggtggtggagatggggtccaagcctgccctcacgggggagcccgccctcacgtgcatcagcaggggcagtgaggcccggatccactccgcggccagctccctcattatggaagacaaagaaatccccatcaagagtgagcctctgccaaaaccgcccgcatctgccccaccatccatcctggtgaaaccagaaaactcaagaaatggcatcgaaaag

SEQ ID NO: 22873 - DNA, 295 bp, Homo sapiens
  MAP TO AC006203.1; EXPRESSED IN PLACENTA, SIGNAL = 2.6; EXPRESSED IN LUNG, SIGNAL = 1.6; EXPRESSED IN HEART, SIGNAL = 2.8; EXPRESSED IN FETAL LIVER, SIGNAL = 4.2; EXPRESSED IN BONE MARROW, SIGNAL = 3.3; EXPRESSED IN ADULT LIVER, SIGNAL =   3; EXPRESSED IN HELA, SIGNAL =   3; EXPRESSED IN BRAIN, SIGNAL = 3.5; SWISSPROT HIT: P55289, EVALUE 5.00e-42; NT HIT: AF217289.1, EVALUE 0.00e+00; EST_HUMAN HIT: AI378792.1, EVALUE 8.00e-11
cttcattcagatatggacaggggagacggatccatcaaatacatcctctcgggagaaggtgctggcatcgtgtttaccatcgacgacaccactggagacatccacgccattcagaggctcgaccgagaggaaagagcccagtatactctaagggctcaagccctagacaggcggacgggcaggccaatggagcccgagtcagagttcatcatcaaaattcaagacatcaatgacaatgagcccaagttcctggacggaccttatgtggccactgtgccagaaatgtcccctgtgg

SEQ ID NO: 22874 - DNA, 201 bp, Homo sapiens
  MAP TO AC004958.1; EXPRESSED IN LUNG, SIGNAL = 1.8; EXPRESSED IN FETAL LIVER, SIGNAL = 1.7; EXPRESSED IN BONE MARROW, SIGNAL = 1.6; EXPRESSED IN PLACENTA, SIGNAL =   2; EXPRESSED IN HELA, SIGNAL = 1.9; EXPRESSED IN HEART, SIGNAL = 1.7; EXPRESSED IN BRAIN, SIGNAL = 1.9; EXPRESSED IN ADULT LIVER, SIGNAL = 2.2; EST_HUMAN HIT: AW960753.1, EVALUE 4.00e-98; SWISSPROT HIT: P14994, EVALUE 1.30e+00; NT HIT: gi11419210, EVALUE 3.00e-98
cgagttgaagaatttctcagcaaagatatcagttatcttatttcaaataagaaggaagctaaatttgcacaaaccttgggtcgaatttctcctgtaccaagtccagaatctgcatatactgcagaaaccacttcacctcatcccagccatgatggaagttcatttaagtcaccagacacagtaagtctcttaaatatgctt

SEQ ID NO: 22875 - DNA, 108 bp, Homo sapiens
  MAP TO AC005320.1; EXPRESSED IN LUNG, SIGNAL = 1.3; EXPRESSED IN FETAL LIVER, SIGNAL = 1.1; EXPRESSED IN BONE MARROW, SIGNAL = 1.1; EXPRESSED IN HEART, SIGNAL = 1.4; EXPRESSED IN BRAIN, SIGNAL =   1; EXPRESSED IN ADULT LIVER, SIGNAL = 1.2; EXPRESSED IN PLACENTA, SIGNAL = 1.1; NT HIT: X97745.1, EVALUE 3.70e+00; SWISSPROT HIT: P21526, EVALUE 9.40e+00; EST_HUMAN HIT: AI468082.1, EVALUE 3.40e-01
aaaaagaaaccagctgttgccagaggtaataacctaatggccaatcttgcagagacaatgaccctaaagagatacggcaatggccaccaagaagaggtagatcaaatt

SEQ ID NO: 22876 - DNA, 87 bp, Homo sapiens
  MAP TO AC004097.1; EXPRESSED IN BONE MARROW, SIGNAL = 6.9; EXPRESSED IN HELA, SIGNAL = 7.7; EXPRESSED IN HEART, SIGNAL =   7; EXPRESSED IN FETAL LIVER, SIGNAL =   6; EXPRESSED IN BRAIN, SIGNAL = 7.7; EXPRESSED IN ADULT LIVER, SIGNAL = 6.4; EXPRESSED IN PLACENTA, SIGNAL = 6.5; EXPRESSED IN LUNG, SIGNAL = 7.4; NT HIT: U36232.1, EVALUE 7.10e-01; EST_HUMAN HIT: BE791452.1, EVALUE 1.10e+00
gcaaaagaagatcatagtcatagtctgcaacaggactaagtgaattttgtgtagtcctggcaaagtcgttctgaggcatccattcat

SEQ ID NO: 22877 - DNA, 158 bp, Homo sapiens
  MAP TO AC003964.1; EXPRESSED IN PLACENTA, SIGNAL = 1.6; EXPRESSED IN LUNG, SIGNAL = 1.9; EXPRESSED IN HEART, SIGNAL = 1.5; EXPRESSED IN BRAIN, SIGNAL = 1.6; EXPRESSED IN ADULT LIVER, SIGNAL = 1.4; EXPRESSED IN FETAL LIVER, SIGNAL = 1.4; EXPRESSED IN BONE MARROW, SIGNAL = 1.6; SWISSPROT HIT: Q64691, EVALUE 2.70e-01; EST_HUMAN HIT: AU128584.1, EVALUE 5.00e-72; NT HIT: AL161596.2, EVALUE 5.60e+00
aaattactaaaaatgacaagtagaagacttgaggagtccatgggggctgttcagatgggattggtcaatatgttcaaaggatttcaaagcaaggttttgccacccctgagtccaaaggtggttacagaagaagaagtaaaccgaatggtaatgtatcc

SEQ ID NO: 22878 - DNA, 127 bp, Homo sapiens
  MAP TO AC004578.3; EXPRESSED IN PLACENTA, SIGNAL = 8.7; EXPRESSED IN LUNG, SIGNAL =  11; EXPRESSED IN HEART, SIGNAL = 9.1; EXPRESSED IN BRAIN, SIGNAL =  11; EXPRESSED IN BONE MARROW, SIGNAL = 9.4; EXPRESSED IN ADULT LIVER, SIGNAL = 9.3; EXPRESSED IN HELA, SIGNAL =  10; EXPRESSED IN FETAL LIVER, SIGNAL =  10; SWISSPROT HIT: P40330, EVALUE 6.20e-01; EST_HUMAN HIT: AU158472.1, EVALUE 4.20e-01
gccagagtggcggccacccccagccagcacctaccttcctcttgttggtcgggcagatgtagaaattgtcgatgacggtggtgacaccaggctggagggtgagcttggtgtaggacgtcccgaaatc

SEQ ID NO: 22879 - DNA, 183 bp, Homo sapiens
  MAP TO AC005701.1; EXPRESSED IN ADULT LIVER, SIGNAL = 6.9; EXPRESSED IN PLACENTA, SIGNAL =   8; EXPRESSED IN LUNG, SIGNAL = 7.5; EXPRESSED IN HEART, SIGNAL =   7; EXPRESSED IN BRAIN, SIGNAL = 7.8; EXPRESSED IN HELA, SIGNAL = 7.8; EXPRESSED IN FETAL LIVER, SIGNAL = 7.2; EXPRESSED IN BONE MARROW, SIGNAL = 7.7; EST_HUMAN HIT: BE782082.1, EVALUE 4.10e-02; NT HIT: AJ404468.1, EVALUE 3.00e-85; SWISSPROT HIT: P39057, EVALUE 2.00e-14
aactgtaccttgtaatccatctgctccgagcagttgaacacatagaccaggatgcccagtgcgcggcccaggtccttggtggtctcggtcttgcctgtgcctgcaggtcctgcgggagccccactcatggtcaggtgcagggactgggtgagggtgatgtagcacctgccaaacacgggaggg

SEQ ID NO: 22880 - DNA, 144 bp, Homo sapiens
  MAP TO AC002526.1; EXPRESSED IN LUNG, SIGNAL = 1.6; EXPRESSED IN PLACENTA, SIGNAL = 1.5; EXPRESSED IN HEART, SIGNAL = 5.9; EXPRESSED IN FETAL LIVER, SIGNAL = 1.7; EXPRESSED IN BRAIN, SIGNAL = 2.6; EXPRESSED IN BONE MARROW, SIGNAL = 1.6; EXPRESSED IN ADULT LIVER, SIGNAL = 3.7; EXPRESSED IN HELA, SIGNAL = 1.9; EST_HUMAN HIT: BE561070.1, EVALUE 3.10e-02; NT HIT: AL163278.2, EVALUE 3.00e-04; SWISSPROT HIT: P41650, EVALUE 6.10e-01
cactctgctcttctggaagccacagtcaagggaacccaggacctgacaagctggcagaaggacaagaaattcttgccagccagactcctggtctatctctgtggaatccagtagagctgatggtaagaatcactgtgtctgttt

SEQ ID NO: 22881 - DNA, 180 bp, Homo sapiens
  MAP TO AC005837.1; EXPRESSED IN LUNG, SIGNAL = 6.4; EXPRESSED IN HEART, SIGNAL = 6.1; EXPRESSED IN FETAL LIVER, SIGNAL =   6; EXPRESSED IN BRAIN, SIGNAL = 6.5; EXPRESSED IN HELA, SIGNAL = 6.1; EXPRESSED IN BONE MARROW, SIGNAL = 5.9; EXPRESSED IN PLACENTA, SIGNAL = 6.5; EXPRESSED IN ADULT LIVER, SIGNAL =   6; SWISSPROT HIT: Q92183, EVALUE 3.00e-20; EST_HUMAN HIT: AL120518.1, EVALUE 5.00e-97; NT HIT: Y11339.2, EVALUE 4.00e-97
atcactgagggccatgagcgcttttctgatcactactatgatacatcatggaagcggctgatcttttacataaaccatgacttcaagctggagagagaagtctggaagcggctacacgatgaagggataatccggctgtaccagcgtcctggtcccggaactgccaaagccaagaactga

SEQ ID NO: 22882 - DNA, 100 bp, Homo sapiens
  MAP TO AC005911.6; EXPRESSED IN LUNG, SIGNAL = 1.7; EXPRESSED IN PLACENTA, SIGNAL =   2; EXPRESSED IN HEART, SIGNAL = 1.7; EXPRESSED IN FETAL LIVER, SIGNAL = 1.9; EXPRESSED IN BRAIN, SIGNAL = 1.6; EXPRESSED IN BONE MARROW, SIGNAL = 1.7; EXPRESSED IN ADULT LIVER, SIGNAL = 1.8; EXPRESSED IN HELA, SIGNAL = 1.7; NT HIT: gi11436736, EVALUE 1.00e-39; SWISSPROT HIT: O75386, EVALUE 5.00e-09; EST_HUMAN HIT: AU130490.1, EVALUE 2.00e-39
gcatcttcttccacaacagaggagcttactgatggagcatgaacttcgtctggtttcaggacagcagctggaccatcaatacctaagggccaaaataaaa

SEQ ID NO: 22883 - DNA, 174 bp, Homo sapiens
  MAP TO AC005598.6; EXPRESSED IN LUNG, SIGNAL = 3.7; EXPRESSED IN FETAL LIVER, SIGNAL =   7; EXPRESSED IN BONE MARROW, SIGNAL = 6.4; EXPRESSED IN PLACENTA, SIGNAL = 4.7; EXPRESSED IN HELA, SIGNAL = 5.2; EXPRESSED IN HEART, SIGNAL = 5.2; EXPRESSED IN BRAIN, SIGNAL = 5.6; EXPRESSED IN ADULT LIVER, SIGNAL = 4.8; NT HIT: M26434.1, EVALUE 3.00e-17; SWISSPROT HIT: P07679, EVALUE 6.70e+00; EST_HUMAN HIT: BE001671.1, EVALUE 3.00e-18
tttgggaacatctggagtctcattgacattgccagtaaaagtgtcaaatgttgcatttctgtggtcatctgcatagtagagctttttgcatggatctttgggaattttatctgttgcatattttagatataacagttgctgccatcctaaactcattgttagcactaagaacca

SEQ ID NO: 22884 - DNA, 207 bp, Homo sapiens
  MAP TO AC002127.1; EXPRESSED IN PLACENTA, SIGNAL = 3.3; EXPRESSED IN HEART, SIGNAL = 3.4; EXPRESSED IN BRAIN, SIGNAL = 3.8; EXPRESSED IN BONE MARROW, SIGNAL = 3.8; EXPRESSED IN ADULT LIVER, SIGNAL = 3.4; EXPRESSED IN LUNG, SIGNAL = 3.4; EXPRESSED IN HELA, SIGNAL = 3.5; EXPRESSED IN FETAL LIVER, SIGNAL =   3; EST_HUMAN HIT: W01153.1, EVALUE 4.70e-02; SWISSPROT HIT: O34274, EVALUE 2.90e+00
agcagcaatcctgtcactgcttctcctaggtgatgtttcaaaactgactgaaacatttgttcatagtagtcagcaacatcttttctttctacatttgcttgtatcttggccactagaaacatcctatcaagaaggaatttctttaggtgtagtcgttgtttctcttcttgaaagtgcaggtaattgctacgtgggacttggagaaaa

SEQ ID NO: 22885 - DNA, 136 bp, Homo sapiens
  MAP TO AC005918.5; EXPRESSED IN PLACENTA, SIGNAL = 2.8; EXPRESSED IN LUNG, SIGNAL = 3.3; EXPRESSED IN HELA, SIGNAL =   3; EXPRESSED IN FETAL LIVER, SIGNAL = 3.1; EXPRESSED IN ADULT LIVER, SIGNAL = 2.9; EXPRESSED IN HEART, SIGNAL = 2.6; EXPRESSED IN BRAIN, SIGNAL = 3.1; EXPRESSED IN BONE MARROW, SIGNAL = 2.9; NT HIT: D16313.1, EVALUE 3.00e-01; SWISSPROT HIT: P07372, EVALUE 1.10e+00
accacagcctctgcgccgcttcgtggcagtgctggtggaggaagagaaggacgctctgttctctacagaggccctgaaactagatgctggatcatcccgtacgtttccctgtgctaaggttgccccatctgggctg

SEQ ID NO: 22886 - DNA, 232 bp, Homo sapiens
  MAP TO AC005010.2; EXPRESSED IN PLACENTA, SIGNAL =   5; EXPRESSED IN LUNG, SIGNAL = 5.4; EXPRESSED IN HELA, SIGNAL = 5.4; EXPRESSED IN HEART, SIGNAL = 4.6; EXPRESSED IN BRAIN, SIGNAL = 4.8; EXPRESSED IN FETAL LIVER, SIGNAL = 4.3; EXPRESSED IN BONE MARROW, SIGNAL = 4.2; EXPRESSED IN ADULT LIVER, SIGNAL = 4.5; SWISSPROT HIT: P51617, EVALUE 2.20e-01; EST_HUMAN HIT: AI452982.1, EVALUE 9.00e-10; NT HIT: U22970.1, EVALUE 4.00e-05
atgggttcccatggctctacctccagttcagtgatttgcttgaatggctcacagaactcggggaaacactttacttgtgtttacccacactatgtaaatgctcccactcaggcacagccgaacgaaggggcacatggggcgaggcagaggccagggccatgtggactctccgtgccctctctgggcaccgcctccctgtgttcagccctctgcaagcactccaaaacccttg

SEQ ID NO: 22887 - DNA, 188 bp, Homo sapiens
  MAP TO AC004918.1; EXPRESSED IN PLACENTA, SIGNAL = 2.9; EXPRESSED IN BONE MARROW, SIGNAL = 2.8; EXPRESSED IN ADULT LIVER, SIGNAL = 3.9; EXPRESSED IN LUNG, SIGNAL = 3.5; EXPRESSED IN HELA, SIGNAL = 3.3; EXPRESSED IN HEART, SIGNAL = 2.9; EXPRESSED IN FETAL LIVER, SIGNAL = 3.3; EXPRESSED IN BRAIN, SIGNAL =   3; NT HIT: AB032973.1, EVALUE 1.00e-69; SWISSPROT HIT: P41440, EVALUE 2.00e-01
aggccacataggacacctctacctccaggctctcgatgtcagccacgttcacgtagaagaaaggtttggactcaggaatggtgcccccgatgccaggcagtgaaacgttggccaagcagcagcagcagtacactgtggggatagaggaggtgagcggggagggtctgcccctccacagcccttcctcc

SEQ ID NO: 22888 - DNA, 140 bp, Homo sapiens
  MAP TO AC003667.1; EXPRESSED IN FETAL LIVER, SIGNAL = 2.5; EXPRESSED IN BRAIN, SIGNAL =   3; EXPRESSED IN BONE MARROW, SIGNAL = 2.8; EXPRESSED IN ADULT LIVER, SIGNAL = 2.7; EXPRESSED IN PLACENTA, SIGNAL = 2.9; EXPRESSED IN LUNG, SIGNAL = 2.6; EXPRESSED IN HEART, SIGNAL = 2.8; EXPRESSED IN HELA, SIGNAL = 2.9; EST_HUMAN HIT: BE165980.1, EVALUE 1.00e-26; SWISSPROT HIT: P01124, EVALUE 9.10e+00; NT HIT: AL163249.2, EVALUE 2.00e-18
atcctcttgctatttccaccatatcttcagttaattcttccactgaagtcttgaacccctcaaagtcatctatgaagtttggagtcatcttcttccaaactcctgttaatgttgatgttttgaacacctcccatgaatca

SEQ ID NO: 22889 - DNA, 171 bp, Homo sapiens
  MAP TO AC002490.1; EXPRESSED IN LUNG, SIGNAL = 2.2; EXPRESSED IN BRAIN, SIGNAL = 2.3; EXPRESSED IN ADULT LIVER, SIGNAL = 1.7; EXPRESSED IN PLACENTA, SIGNAL =   2; EXPRESSED IN HELA, SIGNAL = 1.9; EXPRESSED IN HEART, SIGNAL = 1.7; EXPRESSED IN FETAL LIVER, SIGNAL = 1.8; EXPRESSED IN BONE MARROW, SIGNAL = 1.9; EST_HUMAN HIT: BF348182.1, EVALUE 1.00e-91; NT HIT: U88153.1, EVALUE 5.00e-87
ttgcagggcacaggcaagaggaggtgggcagcgaggagacggggccagcagcagcgccagcagcaggcagtagagttcacggcggcagcgggagctcgtgtacggggagctgcctaggacctcaccctgctgtacacccatgaccagggggaggaccaggtcatgcagtct

SEQ ID NO: 22890 - DNA, 118 bp, Homo sapiens
  MAP TO AC002074.1; EXPRESSED IN HELA, SIGNAL = 4.7; EXPRESSED IN HEART, SIGNAL = 3.8; EXPRESSED IN BRAIN, SIGNAL = 4.6; EXPRESSED IN BONE MARROW, SIGNAL = 4.8; EXPRESSED IN PLACENTA, SIGNAL = 4.4; EXPRESSED IN LUNG, SIGNAL = 4.8; EXPRESSED IN FETAL LIVER, SIGNAL =   4; EXPRESSED IN ADULT LIVER, SIGNAL = 4.5; SWISSPROT HIT: P55025, EVALUE 9.30e+00; EST_HUMAN HIT: AI374601.1, EVALUE 3.80e-01
tatgttgtgagtacccctatggagaagcccacatgcaagaaatggatgtcaccagccaagagctatcatgagtgtgccaacaaccacatgagtaactctggaaatggatcttccccag

SEQ ID NO: 22891 - DNA, 77 bp, Homo sapiens
  MAP TO AC005294.1; EXPRESSED IN PLACENTA, SIGNAL = 1.7; EXPRESSED IN BRAIN, SIGNAL = 1.9; EXPRESSED IN ADULT LIVER, SIGNAL = 1.5; EXPRESSED IN LUNG, SIGNAL = 0.88; EXPRESSED IN HEART, SIGNAL = 2.1; EXPRESSED IN FETAL LIVER, SIGNAL = 2.2; EXPRESSED IN BONE MARROW, SIGNAL = 2.2; NT HIT: Z29642.1, EVALUE 1.00e-02; EST_HUMAN HIT: BE253897.1, EVALUE 3.60e+00
ggtgatatgcttcctgaatccaacccttacgtagccacagatatcagtcaccaggtcagaggagccatatcatgtgg

SEQ ID NO: 22892 - DNA, 177 bp, Homo sapiens
  MAP TO AC005516.1; EXPRESSED IN LUNG, SIGNAL = 1.3; EXPRESSED IN BRAIN, SIGNAL = 1.8; EXPRESSED IN ADULT LIVER, SIGNAL = 1.4; EXPRESSED IN PLACENTA, SIGNAL = 1.5; EXPRESSED IN HEART, SIGNAL = 1.6; EXPRESSED IN BONE MARROW, SIGNAL = 1.4; EXPRESSED IN FETAL LIVER, SIGNAL = 1.6; EST_HUMAN HIT: D44898.1, EVALUE 3.00e-95; SWISSPROT HIT: P42858, EVALUE 8.00e-28; NT HIT: gi11435773, EVALUE 2.00e-95
ctgtaaatttgcagccagaagcatttctacccggcgacaagcaaggatgtcgaccatgcgagccagcacacggaaaggggtgcacagaagcctgtccacatacagcgtgagcacagctcccgactggctgagatggatcccctccaagcactgaagagttttcttcagcatggttgg

SEQ ID NO: 22893 - DNA, 101 bp, Homo sapiens
  MAP TO AC004848.1; EXPRESSED IN LUNG, SIGNAL = 1.5; EXPRESSED IN HEART, SIGNAL = 1.5; EXPRESSED IN FETAL LIVER, SIGNAL = 1.5; EXPRESSED IN PLACENTA, SIGNAL = 1.7; EXPRESSED IN BRAIN, SIGNAL = 1.5; EXPRESSED IN BONE MARROW, SIGNAL = 1.6; EXPRESSED IN ADULT LIVER, SIGNAL = 1.5; NT HIT: gi11421514, EVALUE 3.00e-50; SWISSPROT HIT: Q14563, EVALUE 4.00e-15
tcaatgtaggtgcaaattggatgaaaagcccccgttccacaggcgtacaagtgagtctgattatatgccttaagtaccttgatgaaattagcacattcttt

SEQ ID NO: 22894 - DNA, 196 bp, Homo sapiens
  MAP TO AC002119.1; EXPRESSED IN PLACENTA, SIGNAL = 2.4; EXPRESSED IN LUNG, SIGNAL = 2.9; EXPRESSED IN HELA, SIGNAL = 1.6; EXPRESSED IN FETAL LIVER, SIGNAL = 1.4; EXPRESSED IN BRAIN, SIGNAL = 3.2; EXPRESSED IN ADULT LIVER, SIGNAL = 1.7; EXPRESSED IN HEART, SIGNAL = 1.5; EXPRESSED IN BONE MARROW, SIGNAL = 1.4; SWISSPROT HIT: Q99128, EVALUE 5.00e+00; NT HIT: U62332.1, EVALUE 4.60e-01
ggaagcacgaagttaaagaagcttcctcctgttctacagctgttcgtagggagagaagattctcaagggacagtgtgaatgacggaaatgttaaattgaggaggaggcggagcttgggtgtggaggcatttattgtttggtctgtccagtaatcccttcttctgggaccttcctctcccctgtcacacttctgcat

SEQ ID NO: 22895 - DNA, 143 bp, Homo sapiens
  MAP TO AC000085.4; EXPRESSED IN PLACENTA, SIGNAL = 1.6; EXPRESSED IN LUNG, SIGNAL = 1.7; EXPRESSED IN HEART, SIGNAL = 1.5; EXPRESSED IN FETAL LIVER, SIGNAL = 1.4; EXPRESSED IN BONE MARROW, SIGNAL = 1.8; EXPRESSED IN ADULT LIVER, SIGNAL = 1.7; EXPRESSED IN HELA, SIGNAL = 1.6; EXPRESSED IN BRAIN, SIGNAL = 1.7; NT HIT: gi11526319, EVALUE 3.00e-75; SWISSPROT HIT: P54198, EVALUE 5.00e-09; EST_HUMAN HIT: N98942.1, EVALUE 5.00e-75
ggtctgcggaagagggagctgctgaaggagctgctaccagtcatcgggcagaacctccgattccagcgcctcttcaccgagtgtcaggaacagctcgacatcctgagggacaagtagcctgccccagcctgccctggctgcag

SEQ ID NO: 22896 - DNA, 176 bp, Homo sapiens
  MAP TO AC005611.1; EXPRESSED IN LUNG, SIGNAL = 2.7; EXPRESSED IN FETAL LIVER, SIGNAL =   3; EXPRESSED IN BONE MARROW, SIGNAL = 3.3; EXPRESSED IN PLACENTA, SIGNAL = 2.7; EXPRESSED IN HELA, SIGNAL = 2.4; EXPRESSED IN HEART, SIGNAL = 2.6; EXPRESSED IN BRAIN, SIGNAL = 3.2; EXPRESSED IN ADULT LIVER, SIGNAL = 2.7; EST_HUMAN HIT: H10932.1, EVALUE 5.00e-88; NT HIT: AL161550.2, EVALUE 2.60e-02; SWISSPROT HIT: Q57709, EVALUE 8.90e-02
aatctggaggtgaactggatattgtagtgacctcaaataaagaagtaaaagttgctgctgtccgagatgccttccaggaggtctttggcttagctgtggttgtaggggaagctggacagtccaatattgccccacaaccagtgggctatgcagctggattaaaagtgagtaacaga

SEQ ID NO: 22897 - DNA, 92 bp, Homo sapiens
  MAP TO AC005531.1; EXPRESSED IN LUNG, SIGNAL = 1.6; EXPRESSED IN BONE MARROW, SIGNAL = 1.7; EXPRESSED IN PLACENTA, SIGNAL = 1.7; EXPRESSED IN HELA, SIGNAL = 1.8; EXPRESSED IN HEART, SIGNAL = 1.6; EXPRESSED IN FETAL LIVER, SIGNAL = 1.9; EXPRESSED IN BRAIN, SIGNAL = 2.6; EXPRESSED IN ADULT LIVER, SIGNAL = 1.6; SWISSPROT HIT: P13983, EVALUE 4.20e+00
ccaagatgctcatcaccaccaagatggcgaacagaaggaccgcgatggcacccagcaggaggcgtgtggtggtgtctaggagaagagagagg

SEQ ID NO: 22898 - DNA, 131 bp, Homo sapiens
  MAP TO AC004584.1; EXPRESSED IN BRAIN, SIGNAL = 6.5; EXPRESSED IN ADULT LIVER, SIGNAL = 6.7; EXPRESSED IN LUNG, SIGNAL = 6.7; EXPRESSED IN BONE MARROW, SIGNAL = 5.5; EXPRESSED IN PLACENTA, SIGNAL =   6; EXPRESSED IN HELA, SIGNAL = 5.7; EXPRESSED IN HEART, SIGNAL = 5.6; EXPRESSED IN FETAL LIVER, SIGNAL =   6; NT HIT: gi11055991, EVALUE 4.00e-68; SWISSPROT HIT: P78061, EVALUE 1.40e+00; EST_HUMAN HIT: BE542270.1, EVALUE 6.00e-68
gggcagttctgagaagttcttgcaggagttggtggcataatagagccaccagaacatgtaggcatccttgcggaccgtcacataatcccatacttccttgccctcctctgtgggccagtcaatgacagctc

SEQ ID NO: 22899 - DNA, 122 bp, Homo sapiens
  MAP TO AC005482.1; EXPRESSED IN LUNG, SIGNAL = 1.6; EXPRESSED IN FETAL LIVER, SIGNAL = 1.5; EXPRESSED IN BRAIN, SIGNAL = 1.6; EXPRESSED IN BONE MARROW, SIGNAL = 1.5; EXPRESSED IN ADULT LIVER, SIGNAL = 1.5; EXPRESSED IN PLACENTA, SIGNAL = 1.4; EXPRESSED IN HEART, SIGNAL = 1.5; EST_HUMAN HIT: R94672.1, EVALUE 6.00e-03; NT HIT: U76408.1, EVALUE 4.00e-03
ctcctgtcaatgtgtgtcagccttgatgatgaggaggaggaggaagatatgatgacaatgataatgatgatgacgatgataatgatgacgatgacattctacttacctgagtcctcatttcc

SEQ ID NO: 22900 - DNA, 277 bp, Homo sapiens
  MAP TO AC003692.1; EXPRESSED IN LUNG, SIGNAL = 3.6; EXPRESSED IN HELA, SIGNAL = 3.3; EXPRESSED IN BRAIN, SIGNAL = 3.5; EXPRESSED IN BONE MARROW, SIGNAL = 3.3; EXPRESSED IN ADULT LIVER, SIGNAL = 3.1; EXPRESSED IN PLACENTA, SIGNAL = 3.3; EXPRESSED IN HEART, SIGNAL = 3.1; EXPRESSED IN FETAL LIVER, SIGNAL = 3.1; NT HIT: AJ298105.1, EVALUE 3.00e-06; EST_HUMAN HIT: AA190755.1, EVALUE 0.00e+00; SWISSPROT HIT: P14077, EVALUE 5.00e-08
tcagtcctgctggaccatttgtgagactggctctggactcagtgacctatgcttcccaggacagtctgccttccagtggtccccattgtatactggacagggttgaggtggcttcttcttgctgcctgggcagtcccttttgaagtgccctagtttgccacattggtagcaactagcaggtgtaccttggggatactgggttttatacaaagtggccaccagagtctctgcctttttcttgtgtttcctctccttcccctgggcctcctcctggtcc

SEQ ID NO: 22901 - DNA, 163 bp, Homo sapiens
  MAP TO AC005658.2; EXPRESSED IN HELA, SIGNAL = 2.1; EXPRESSED IN BRAIN, SIGNAL = 2.2; EXPRESSED IN BONE MARROW, SIGNAL = 2.1; EXPRESSED IN ADULT LIVER, SIGNAL =   2; EXPRESSED IN HEART, SIGNAL = 2.3; EXPRESSED IN PLACENTA, SIGNAL = 1.7; EXPRESSED IN LUNG, SIGNAL =   2; EXPRESSED IN FETAL LIVER, SIGNAL =   2; EST_HUMAN HIT: N76964.1, EVALUE 5.60e-01; NT HIT: U07826.1, EVALUE 3.70e-01; SWISSPROT HIT: Q61554, EVALUE 2.70e-01
aacagtgattgtctgccagaggatgggtgccaggagggggatgagttttctaacagcaacgaaccatgttatcatggtgttcacccttctcagaagggaccagagtgtggacaagatccagggtgttgggatctggataggcaggtccaagggggtgtgcctg

SEQ ID NO: 22902 - DNA, 179 bp, Homo sapiens
  MAP TO AC003950.1; EXPRESSED IN BONE MARROW, SIGNAL =   4; EXPRESSED IN PLACENTA, SIGNAL = 3.7; EXPRESSED IN LUNG, SIGNAL =   4; EXPRESSED IN HELA, SIGNAL =   4; EXPRESSED IN HEART, SIGNAL = 4.2; EXPRESSED IN FETAL LIVER, SIGNAL = 4.1; EXPRESSED IN BRAIN, SIGNAL = 5.2; EXPRESSED IN ADULT LIVER, SIGNAL = 4.1; SWISSPROT HIT: Q92667, EVALUE 4.00e-30; NT HIT: gi11424399, EVALUE 5.00e-96; EST_HUMAN HIT: AW750653.1, EVALUE 8.00e-96
ctcatgctgcctgatggcatcaccgtggaggtcattgtggtcaaccaggtcaatgccgggcacctgttcgtgcagcagcacacacaccctaccttccacgcgctgcgcagcctcgaccagcagatgtacctctgttactctcagcctggaatccccaccttgcccaccccagtggaaag

SEQ ID NO: 22903 - DNA, 184 bp, Homo sapiens
  MAP TO AC004413.1; EXPRESSED IN HELA, SIGNAL = 2.8; EXPRESSED IN BONE MARROW, SIGNAL = 1.5; EXPRESSED IN FETAL LIVER, SIGNAL = 2.5; EXPRESSED IN HEART, SIGNAL = 2.6; EXPRESSED IN PLACENTA, SIGNAL = 0.67; EXPRESSED IN LUNG, SIGNAL = 0.58; EXPRESSED IN BRAIN, SIGNAL = 0.6; EXPRESSED IN ADULT LIVER, SIGNAL = 0.66; EST_HUMAN HIT: AV763461.1, EVALUE 2.50e+00; NT HIT: AF075629.1, EVALUE 4.30e-01; SWISSPROT HIT: Q40082, EVALUE 1.70e+00
aggacaatctgcatcattctgcataactgtcaaagtaactgttttgttgatgctggtgagtctactgatgtctatgacaaagttgtcagtgttaaagcccaagatattgttgcctgagctaagggcaatgacgcccatgaacagcacatttagcacctcactttccatgtcatcagtagtggca

SEQ ID NO: 22904 - DNA, 199 bp, Homo sapiens
  MAP TO AC005540.2; EXPRESSED IN LUNG, SIGNAL = 3.1; EXPRESSED IN HELA, SIGNAL = 3.4; EXPRESSED IN BRAIN, SIGNAL = 3.3; EXPRESSED IN BONE MARROW, SIGNAL = 3.2; EXPRESSED IN ADULT LIVER, SIGNAL = 2.4; EXPRESSED IN PLACENTA, SIGNAL = 2.9; EXPRESSED IN HEART, SIGNAL = 2.7; EXPRESSED IN FETAL LIVER, SIGNAL = 2.9; NT HIT: AJ242906.1, EVALUE 3.00e-02; EST_HUMAN HIT: AA100620.1, EVALUE 4.50e-02; SWISSPROT HIT: P94892, EVALUE 5.00e+00
ccccaacattttttttggccacaccatacccagagcagccaacagcattactgaagctggcagatgcataactctctgcttcctgatgaagatgaggaaaagaagtgccttcctggatcagggagagggagatgagctgaatattaatattgcacttaatactggtgaaatcatgatccaggccctcaggcagtatatc

SEQ ID NO: 22905 - DNA, 174 bp, Homo sapiens
  MAP TO AC002302.1; EXPRESSED IN PLACENTA, SIGNAL = 1.9; EXPRESSED IN HELA, SIGNAL =   2; EXPRESSED IN BRAIN, SIGNAL =   2; EXPRESSED IN BONE MARROW, SIGNAL = 2.1; EXPRESSED IN ADULT LIVER, SIGNAL = 2.2; EXPRESSED IN HEART, SIGNAL = 2.1; EXPRESSED IN LUNG, SIGNAL = 2.1; EXPRESSED IN FETAL LIVER, SIGNAL = 2.2; NT HIT: gi11431590, EVALUE 1.00e-93; SWISSPROT HIT: P05772, EVALUE 3.00e-21; EST_HUMAN HIT: AI382619.1, EVALUE 2.00e-93
atggctgacccggctgcggggccgccgccgagcgagggcgaggagagcaccgtgcgcttcgcccgcaaaggcgccctccggcagaagaacgtgcatgaggtcaagaaccacaaattcaccgcccgcttcttcaagcagcccaccttctgcagccactgcaccgacttcatctgg

SEQ ID NO: 22906 - DNA, 188 bp, Homo sapiens
  MAP TO AC005548.1; EXPRESSED IN BONE MARROW, SIGNAL = 2.2; EXPRESSED IN PLACENTA, SIGNAL = 2.7; EXPRESSED IN LUNG, SIGNAL = 2.5; EXPRESSED IN HELA, SIGNAL = 2.5; EXPRESSED IN HEART, SIGNAL = 2.2; EXPRESSED IN FETAL LIVER, SIGNAL = 2.4; EXPRESSED IN BRAIN, SIGNAL = 2.8; EXPRESSED IN ADULT LIVER, SIGNAL = 2.2; EST_HUMAN HIT: AW081049.1, EVALUE 1.70e-01; NT HIT: gi11432372, EVALUE 1.10e-01; SWISSPROT HIT: P49782, EVALUE 5.00e+00
tctacttctagccattcattccagggttttatcaccataattaacattgctgtgtggaaataataagcctgtaggaaaccaggggagagaactaaggtactaatgagcacatcaattacaataatgataaatttgctgtcattccaaccattgatcttcacatcactcagctgttgattgcaagtgag

SEQ ID NO: 22907 - DNA, 204 bp, Homo sapiens
  MAP TO AC002461.1; EXPRESSED IN LUNG, SIGNAL = 1.8; EXPRESSED IN BRAIN, SIGNAL = 1.5; EXPRESSED IN PLACENTA, SIGNAL = 1.4; EXPRESSED IN HEART, SIGNAL = 1.3; EXPRESSED IN BONE MARROW, SIGNAL = 1.5; EXPRESSED IN ADULT LIVER, SIGNAL = 1.3; EXPRESSED IN FETAL LIVER, SIGNAL = 1.4; EST_HUMAN HIT: AI149574.1, EVALUE 4.60e-02; NT HIT: gi6752975, EVALUE 7.50e+00; SWISSPROT HIT: P17383, EVALUE 5.00e+00
ataaaatttggatgtttgttgttgttgctggatttgaaggaaaggatgctctttatgctaagatcactcctcattattctcaagaagaaaaaatattgtgtgcacattttggagaatggaaattgggggtcccttctatgttggtcatttttgcttctgcataaaataatagagataattagtcatcaccttgatgtagacaat

SEQ ID NO: 22908 - DNA, 276 bp, Homo sapiens
  MAP TO AC005726.1; EXPRESSED IN PLACENTA, SIGNAL = 5.7; EXPRESSED IN LUNG, SIGNAL = 7.2; EXPRESSED IN FETAL LIVER, SIGNAL = 6.2; EXPRESSED IN BONE MARROW, SIGNAL =   7; EXPRESSED IN ADULT LIVER, SIGNAL = 6.6; EXPRESSED IN HELA, SIGNAL = 5.7; EXPRESSED IN HEART, SIGNAL = 6.1; EXPRESSED IN BRAIN, SIGNAL = 6.7; SWISSPROT HIT: Q10351, EVALUE 2.00e-09; NT HIT: AF161427.1, EVALUE 0.00e+00; EST_HUMAN HIT: AI940621.1, EVALUE 0.00e+00
gtgtacaaggctgtagctgccgtccagaagtcggcagaagagttggcgtctgggcacctggcatctgcctttgtcgccagccaggaagctgtgacatcctctgagcttgccttctttgacccgtcactcctccacctcctttatttccctgatgaccagaagtttgccatctacatcccactcttcctgcctatggctgtgcccatcctcctgtccctggtcaagatcttcctggagacccgcaagtcctggagaaagcctgagaagacagactga

SEQ ID NO: 22909 - DNA, 87 bp, Homo sapiens
  MAP TO AC003681.1; EXPRESSED IN LUNG, SIGNAL = 2.5; EXPRESSED IN FETAL LIVER, SIGNAL = 2.6; EXPRESSED IN BONE MARROW, SIGNAL = 2.6; EXPRESSED IN PLACENTA, SIGNAL = 2.6; EXPRESSED IN HELA, SIGNAL = 2.5; EXPRESSED IN BRAIN, SIGNAL = 3.1; EXPRESSED IN ADULT LIVER, SIGNAL = 3.1; EXPRESSED IN HEART, SIGNAL = 2.8; NT HIT: gi11417957, EVALUE 5.00e-42; EST_HUMAN HIT: BF355914.1, EVALUE 2.00e-20
acttcaccataagggaaagaagagagccttgttggacactgaagaagggacggggatttctcctcctaatctgggcctcttgtcatg

SEQ ID NO: 22910 - DNA, 289 bp, Homo sapiens
  MAP TO AC005663.1; EXPRESSED IN BONE MARROW, SIGNAL = 1.5; EXPRESSED IN PLACENTA, SIGNAL = 3.4; EXPRESSED IN LUNG, SIGNAL = 2.9; EXPRESSED IN HELA, SIGNAL = 2.3; EXPRESSED IN HEART, SIGNAL = 1.5; EXPRESSED IN FETAL LIVER, SIGNAL = 1.5; EXPRESSED IN BRAIN, SIGNAL = 3.3; EXPRESSED IN ADULT LIVER, SIGNAL = 9.4; NT HIT: M65212.1, EVALUE 1.00e-104; EST_HUMAN HIT: BE314182.1, EVALUE 1.00e-104; SWISSPROT HIT: P21964, EVALUE 5.00e-41
ctttcttgtcgcccacgttcatggcccactccttctgctcgcagtaggtgtcaatggcctccagcacgctctgtgcgttcccgggctccgcatgctgcagcacgtggttcaggatgcgctgctccttggtgtcacccatgagcaggttgtggatgggctgcaggatgaactcgttccagccgataaggcacaggccccagccccagtgcctcagaagcagcagcagcaccaccagcagcaccaggcccagcaacacagctgccaacagcagaggcggggcctccggcat

SEQ ID NO: 22911 - DNA, 247 bp, Homo sapiens
  MAP TO AC005669.1; EXPRESSED IN LUNG, SIGNAL = 3.5; EXPRESSED IN FETAL LIVER, SIGNAL = 3.4; EXPRESSED IN BRAIN, SIGNAL =   4; EXPRESSED IN BONE MARROW, SIGNAL = 3.5; EXPRESSED IN PLACENTA, SIGNAL = 3.5; EXPRESSED IN HELA, SIGNAL = 3.3; EXPRESSED IN HEART, SIGNAL = 3.7; EXPRESSED IN ADULT LIVER, SIGNAL = 3.6; SWISSPROT HIT: O70159, EVALUE 2.10e+00
aaacaccagccaaatcccaagctcccactatagaaaggatttctacaggaaatagttggccctgggaagcaaacaaagccctctgcagaacatggaagccagatttcagatgctggttgcaagtcgcttttcttgttataaagcgcctggtagaactgcctttcttttctttgtctttcatctttgcctttgcaatctttgggggcttcactccatttgctaaaggtgtgtgggtgttagcgtcact

SEQ ID NO: 22912 - DNA, 130 bp, Homo sapiens
  MAP TO AC005808.1; EXPRESSED IN HELA, SIGNAL = 4.2; EXPRESSED IN FETAL LIVER, SIGNAL = 4.3; EXPRESSED IN BRAIN, SIGNAL =   5; EXPRESSED IN BONE MARROW, SIGNAL = 4.6; EXPRESSED IN ADULT LIVER, SIGNAL = 9.9; EXPRESSED IN PLACENTA, SIGNAL = 4.4; EXPRESSED IN HEART, SIGNAL =   4; EXPRESSED IN LUNG, SIGNAL = 4.7; SWISSPROT HIT: P14310, EVALUE 1.80e-02; NT HIT: AF095520.1, EVALUE 1.10e+00; EST_HUMAN HIT: AI802662.1, EVALUE 1.10e-01
cggagatgagattagggtcagagccacacccctgacccgcgtacaggacaaactgaagccacgcgtctacactggcgctccgaactgcgttggcccaaagcttcttcaccgcttccagcggagggcttaa

SEQ ID NO: 22913 - DNA, 373 bp, Homo sapiens
  MAP TO AC003689.1; EXPRESSED IN PLACENTA, SIGNAL = 2.1; EXPRESSED IN LUNG, SIGNAL = 2.2; EXPRESSED IN FETAL LIVER, SIGNAL = 2.7; EXPRESSED IN ADULT LIVER, SIGNAL =   2; EXPRESSED IN HELA, SIGNAL = 1.8; EXPRESSED IN HEART, SIGNAL = 3.1; EXPRESSED IN BRAIN, SIGNAL = 1.9; EXPRESSED IN BONE MARROW, SIGNAL =   2; EST_HUMAN HIT: AI677867.1, EVALUE 2.20e-02; NT HIT: gi11435626, EVALUE 0.00e+00; SWISSPROT HIT: P30203, EVALUE 2.00e-62
agaaccgcgcgctgcgcctggtggacggtggcggcgcctgcgccggccgcgtggagatgctggagcatggcgagtggggatcagtgtgcgatgacacttgggacctggaggacgcccacgtggtgtgcaggcaactgggctgcggctgggcagtccaggccctgcccggcttgcacttcacgcccggccgcgggcctatccaccgggaccaggtgaactgctcgggggccgaagcttacctgtgggactgcccggggctgccaggacagcactactgcggccacaaagaggacgcgggcgcggtgtgctcaggtcagtgggcggagtcgctgaagcccggtcactaccaacactcaccataggcctactgggc

SEQ ID NO: 22914 - DNA, 241 bp, Homo sapiens
  MAP TO AC002123.1; EXPRESSED IN PLACENTA, SIGNAL = 2.4; EXPRESSED IN LUNG, SIGNAL = 2.3; EXPRESSED IN FETAL LIVER, SIGNAL = 2.5; EXPRESSED IN ADULT LIVER, SIGNAL =   2; EXPRESSED IN HELA, SIGNAL = 2.4; EXPRESSED IN HEART, SIGNAL = 2.3; EXPRESSED IN BRAIN, SIGNAL = 2.5; EXPRESSED IN BONE MARROW, SIGNAL = 2.6; SWISSPROT HIT: P51111, EVALUE 4.50e+00; EST_HUMAN HIT: BF573904.1, EVALUE 8.60e-01; NT HIT: S65091.1, EVALUE 5.80e-01
acattttctcttgtggatttccatcatcatagtgactatgatgtgtccctccctgcagtgtgcatttgatcctctcattcatcctatccatatggagaacacctacttggctttcaaaatgcagttccagcatctcctcctccattttctgggggattggactacttacccttttgggggctcgtattatgtcctgatactgctctgcaatcacatttataatactttatggtactttatt

SEQ ID NO: 22915 - DNA, 83 bp, Homo sapiens
  MAP TO AC005815.1; EXPRESSED IN LUNG, SIGNAL = 6.4; EXPRESSED IN FETAL LIVER, SIGNAL = 7.4; EXPRESSED IN BONE MARROW, SIGNAL = 6.5; EXPRESSED IN PLACENTA, SIGNAL = 5.7; EXPRESSED IN HELA, SIGNAL = 6.6; EXPRESSED IN HEART, SIGNAL = 6.3; EXPRESSED IN BRAIN, SIGNAL = 7.1; EXPRESSED IN ADULT LIVER, SIGNAL = 6.7; SWISSPROT HIT: P17858, EVALUE 9.70e-02; EST_HUMAN HIT: AA629140.1, EVALUE 1.00e-09; NT HIT: X16912.1, EVALUE 2.00e-13
atgaacactgctgtctgggccgtggcacacatgggcatttgtgtgggcaccaaagtcttcctcatctgcgaggtaaggctgag

SEQ ID NO: 22916 - DNA, 83 bp, Homo sapiens
  MAP TO AC002288.1; EXPRESSED IN PLACENTA, SIGNAL = 4.1; EXPRESSED IN HEART, SIGNAL = 5.2; EXPRESSED IN FETAL LIVER, SIGNAL = 4.7; EXPRESSED IN BRAIN, SIGNAL = 5.4; EXPRESSED IN BONE MARROW, SIGNAL = 4.6; EXPRESSED IN ADULT LIVER, SIGNAL = 4.6; EXPRESSED IN HELA, SIGNAL = 4.8; EXPRESSED IN LUNG, SIGNAL = 4.5; EST_HUMAN HIT: BE974448.1, EVALUE 6.40e-02
attagcttccatcgtggtaacaagacaatttcctgtatcatcactagaggcaactagggcaactggtttttcatttttatatc

SEQ ID NO: 22917 - DNA, 195 bp, Homo sapiens
  MAP TO AC003077.1; EXPRESSED IN PLACENTA, SIGNAL = 1.2; EXPRESSED IN LUNG, SIGNAL = 1.4; EXPRESSED IN FETAL LIVER, SIGNAL = 1.4; EXPRESSED IN ADULT LIVER, SIGNAL = 1.4; EXPRESSED IN HEART, SIGNAL = 1.6; EXPRESSED IN BRAIN, SIGNAL = 1.3; EXPRESSED IN BONE MARROW, SIGNAL = 1.4; EST_HUMAN HIT: BF346257.1, EVALUE 5.00e-57; SWISSPROT HIT: P35029, EVALUE 7.60e-01; NT HIT: gi7662263, EVALUE 1.00e-69
gtgccccaaggggctcgcagtctatctgaggagttagcatgtaataagaattgcatggtaccttgaattcattctctttatcttttgtgcctttgtgaaatggtcggtcatagcggaatttccagatgtgattcactttatagaagcttttgatgttgtccggaacaccctctctctgcaggacctcctggctct

SEQ ID NO: 22918 - DNA, 365 bp, Homo sapiens
  MAP TO AC003958.1; EXPRESSED IN LUNG, SIGNAL = 2.6; EXPRESSED IN HELA, SIGNAL = 2.4; EXPRESSED IN ADULT LIVER, SIGNAL = 2.3; EXPRESSED IN PLACENTA, SIGNAL = 2.6; EXPRESSED IN HEART, SIGNAL = 2.2; EXPRESSED IN FETAL LIVER, SIGNAL = 2.6; EXPRESSED IN BRAIN, SIGNAL = 2.4; EXPRESSED IN BONE MARROW, SIGNAL = 2.4; EST_HUMAN HIT: BF569905.1, EVALUE 0.00e+00; NT HIT: Y16787.1, EVALUE 0.00e+00; SWISSPROT HIT: Q14525, EVALUE 8.00e-48
atgccctacaacttctgcctgcccagcctgagctgccgcaccagctgctcctcccggccctgcgtgccccccagctgccacagctgcaccctgcccggggcctgcaacatccccgccaatgtgagcaactgcaactggttctgcgagggctccttcaatggtagcgagaaggagactatgcagttcctgaacgaccgcctggccagctacctggagaaagtgcgtcagctggagcgggacaacgcggagctggagaacctcatccgggagcggtctcagcagcaggagcccttgctgtgccccagttaccagtcctattttaagaccattgaggagctccagcagaaggtgagcggcattgctgt

SEQ ID NO: 22919 - DNA, 89 bp, Homo sapiens
  MAP TO AC005774.1; EXPRESSED IN PLACENTA, SIGNAL = 1.1; EXPRESSED IN LUNG, SIGNAL = 1.3; EXPRESSED IN HEART, SIGNAL = 1.4; EXPRESSED IN FETAL LIVER, SIGNAL = 1.2; EXPRESSED IN BONE MARROW, SIGNAL = 1.6; EXPRESSED IN ADULT LIVER, SIGNAL =   1; EXPRESSED IN BRAIN, SIGNAL = 1.2; EXPRESSED IN HELA, SIGNAL = 2.9; NT HIT: AB018561.1, EVALUE 1.80e-01
ttccccccattttccttccaagctttctcatggttggtagataagtgataccaatccaatacatgtttgaccacctcacaccatggagt

SEQ ID NO: 22920 - DNA, 89 bp, Homo sapiens
  MAP TO AC005668.1; EXPRESSED IN LUNG, SIGNAL = 5.7; EXPRESSED IN HELA, SIGNAL = 5.5; EXPRESSED IN ADULT LIVER, SIGNAL = 5.1; EXPRESSED IN PLACENTA, SIGNAL = 8.7; EXPRESSED IN HEART, SIGNAL = 5.3; EXPRESSED IN FETAL LIVER, SIGNAL = 5.2; EXPRESSED IN BRAIN, SIGNAL = 6.5; EXPRESSED IN BONE MARROW, SIGNAL = 5.6; SWISSPROT HIT: Q92786, EVALUE 5.60e+00; NT HIT: AF175412.1, EVALUE 1.20e-02
tcaaggtcaggcttggtgggaggttccttccaccctgggcaccaaagcccaagattgacatctggagcctcagtacatcatcatgggct

SEQ ID NO: 22921 - DNA, 297 bp, Homo sapiens
  MAP TO AC005803.1; EXPRESSED IN PLACENTA, SIGNAL = 3.3; EXPRESSED IN LUNG, SIGNAL =   4; EXPRESSED IN HELA, SIGNAL = 3.9; EXPRESSED IN FETAL LIVER, SIGNAL = 3.9; EXPRESSED IN ADULT LIVER, SIGNAL = 3.5; EXPRESSED IN HEART, SIGNAL = 3.6; EXPRESSED IN BRAIN, SIGNAL = 4.5; EXPRESSED IN BONE MARROW, SIGNAL = 4.3; SWISSPROT HIT: P35499, EVALUE 1.00e-48; EST_HUMAN HIT: AI016157.1, EVALUE 9.00e-26; NT HIT: L01978.1, EVALUE 0.00e+00
cacctgcaggagggagaggtagcccagacccacgttgtcgtagttgaccttgacattgagccagcggacctggcctgtgtgcatgaggctctcgcactcagacttgttgttgacctcggagatgtcgaacctctcagaggtggtggtgttgatgcagtagtagaacttgccggcaaacaggttgacacccatgatgctgaagatcagccagaagatgaggcagacaagcagcacattcatgatggaggggatggcgcctaggagggcgttcaccaccacctgggggccagggggtcc

SEQ ID NO: 22922 - DNA, 79 bp, Homo sapiens
  MAP TO AC005058.1; EXPRESSED IN PLACENTA, SIGNAL =   2; EXPRESSED IN LUNG, SIGNAL = 2.4; EXPRESSED IN BRAIN, SIGNAL = 2.1; EXPRESSED IN HELA, SIGNAL = 1.9; EXPRESSED IN HEART, SIGNAL =   2; EXPRESSED IN FETAL LIVER, SIGNAL = 1.9; EXPRESSED IN BONE MARROW, SIGNAL = 1.9; EXPRESSED IN ADULT LIVER, SIGNAL = 1.9; NT HIT: AL163283.2, EVALUE 6.30e-01; EST_HUMAN HIT: BE074217.1, EVALUE 1.00e-15
catgaagcactgcaaattctctaaggggatgcccgttaatgtcaactggatggttatcttgtaggtttgttgttcttaa

SEQ ID NO: 22923 - DNA, 179 bp, Homo sapiens
  MAP TO AC004067.1; EXPRESSED IN PLACENTA, SIGNAL = 1.4; EXPRESSED IN LUNG, SIGNAL = 1.5; EXPRESSED IN BRAIN, SIGNAL = 1.3; EXPRESSED IN ADULT LIVER, SIGNAL = 1.4; EXPRESSED IN HELA, SIGNAL = 1.8; EXPRESSED IN HEART, SIGNAL = 1.6; EXPRESSED IN FETAL LIVER, SIGNAL = 1.5; EXPRESSED IN BONE MARROW, SIGNAL = 1.3; EST_HUMAN HIT: AI015800.1, EVALUE 5.00e-94; NT HIT: gi11437174, EVALUE 5.00e-87; SWISSPROT HIT: O66834, EVALUE 1.20e-01
aaaaaccaagtaatgagcacactgctgagatggaacacatgaaatctttggttcacagactatttacaatcttgcatttagaagagtctcagaaaaagagagagcaccatttactggagaaaattgaccacctgaaggaacagctgcagccccttgaacaggttaggaagcatcacggt

SEQ ID NO: 22924 - DNA, 479 bp, Homo sapiens
  MAP TO AC004079.1; EXPRESSED IN FETAL LIVER, SIGNAL = 3.4; EXPRESSED IN ADULT LIVER, SIGNAL = 2.9; EXPRESSED IN PLACENTA, SIGNAL = 3.1; EXPRESSED IN LUNG, SIGNAL = 3.1; EXPRESSED IN HEART, SIGNAL = 3.3; EXPRESSED IN BRAIN, SIGNAL =   3; EXPRESSED IN BONE MARROW, SIGNAL = 2.9; EXPRESSED IN HELA, SIGNAL =   3; SWISSPROT HIT: O43365, EVALUE 2.00e-48; NT HIT: Y11717.1, EVALUE 1.00e-124
tcacaggtgggtgagcttgggtgcttcctgaattcttccctgagaaggatggtggccggtaaggtccgtgtaggtggggtgcggctccccaggccccggcccgtggtggtggccgctgcccagcggcccggcacccccatagtccatggcgcccgaggcagcgtgggggaggtgagttagaccaaagagggctggcccggagttgctcatgggctccacatagctgccccccacgaagacggggcttccctgtatgtgtggggtcccatagctgccgttgccctgcaggccatgagcgtgcgggtcatagtcgggggtgccccctgcgcccgcccctgccgccgtgtagcgcttctgtgggggtggcgggggtgcgcagctgggcagggacgcagggtaggaggcggggggcagcccgtaggtaccctgggggggcttggagaagggcgggggcgactggggctcatacgggacgctgt

SEQ ID NO: 22925 - DNA, 232 bp, Homo sapiens
  MAP TO AC005155.1; EXPRESSED IN PLACENTA, SIGNAL = 1.4; EXPRESSED IN LUNG, SIGNAL = 1.5; EXPRESSED IN FETAL LIVER, SIGNAL = 1.2; EXPRESSED IN BRAIN, SIGNAL = 1.3; EXPRESSED IN BONE MARROW, SIGNAL = 1.2; EXPRESSED IN ADULT LIVER, SIGNAL = 1.4; EXPRESSED IN HEART, SIGNAL = 1.3; EST_HUMAN HIT: AW855191.1, EVALUE 9.00e-04; SWISSPROT HIT: Q03369, EVALUE 6.20e-01; NT HIT: U42224.1, EVALUE 1.00e-123
tgtaaatggacttcagcagttcacacctttgttgttcaagagtcagctggcattatctcttgaatttttaaaacagcttgaagaagaaagcatcactttaatcccattttgtagaggagagacagttggcaaggtcacccagtggcacacgggtggggctgggatcaaacctgggccaactgaactcagaggtggtcctgctcccctgccggcaggtgatcaagtcatgcag

SEQ ID NO: 22926 - DNA, 125 bp, Homo sapiens
  MAP TO AC005344.1; EXPRESSED IN BRAIN, SIGNAL = 1.8; EXPRESSED IN ADULT LIVER, SIGNAL = 1.6; EXPRESSED IN PLACENTA, SIGNAL = 1.9; EXPRESSED IN LUNG, SIGNAL = 1.7; EXPRESSED IN HELA, SIGNAL =   2; EXPRESSED IN HEART, SIGNAL = 1.9; EXPRESSED IN BONE MARROW, SIGNAL = 1.6; EXPRESSED IN FETAL LIVER, SIGNAL = 1.7; NT HIT: AJ012166.1, EVALUE 2.80e-01; EST_HUMAN HIT: R23821.1, EVALUE 1.00e-01; SWISSPROT HIT: P54743, EVALUE 1.10e+00
gcacatcttcccaggccttctccagcgtaccggcatcacctggggactggccctctgcagtcacgctggctccaggctcaccgggagtcacgttctctggctgtgactttccttttgctgtggat

SEQ ID NO: 22927 - DNA, 144 bp, Homo sapiens
  MAP TO AC005548.1; EXPRESSED IN PLACENTA, SIGNAL = 3.2; EXPRESSED IN BRAIN, SIGNAL = 3.1; EXPRESSED IN ADULT LIVER, SIGNAL = 2.8; EXPRESSED IN LUNG, SIGNAL = 3.2; EXPRESSED IN HELA, SIGNAL = 3.4; EXPRESSED IN HEART, SIGNAL = 3.1; EXPRESSED IN FETAL LIVER, SIGNAL = 3.1; EXPRESSED IN BONE MARROW, SIGNAL = 2.8; NT HIT: AF309555.1, EVALUE 8.20e-02; SWISSPROT HIT: P52429, EVALUE 1.80e+00
actgctaaggctgccgtggatttccacacagaatgctgctgctgctcccagcacgctatctcccagttcagccaggactgcagcgccctcaagacagtacagccaggttgtgtcactgatccccgtggcattgatctcagcatg

SEQ ID NO: 22928 - DNA, 246 bp, Homo sapiens
  MAP TO AC005352.1; EXPRESSED IN LUNG, SIGNAL =  10; EXPRESSED IN HELA, SIGNAL = 9.3; EXPRESSED IN FETAL LIVER, SIGNAL = 9.1; EXPRESSED IN PLACENTA, SIGNAL =  11; EXPRESSED IN HEART, SIGNAL =  11; EXPRESSED IN BRAIN, SIGNAL =  10; EXPRESSED IN BONE MARROW, SIGNAL = 7.8; EXPRESSED IN ADULT LIVER, SIGNAL = 8.4; SWISSPROT HIT: P18713, EVALUE 2.80e+00; EST_HUMAN HIT: AV756238.1, EVALUE 2.20e-01; NT HIT: gi9964314, EVALUE 9.20e+00
gctattgactattctaataattttattcttcctgatgaactttacattaatattattaaattcacatatctctgtgttgggatttttttcttggaactgagttacatttggagcagaaataacgccgttcaggaatatgatgtatggcattggtcagaaaggacatttttaagaaacattatatatatcttcatttcatttaaaaaatctttcagaacatttgatgatttcttcatctatgcccat

SEQ ID NO: 22929 - DNA, 290 bp, Homo sapiens
  MAP TO AC005664.1; EXPRESSED IN PLACENTA, SIGNAL = 5.8; EXPRESSED IN BRAIN, SIGNAL = 5.9; EXPRESSED IN ADULT LIVER, SIGNAL = 5.9; EXPRESSED IN LUNG, SIGNAL = 5.4; EXPRESSED IN HELA, SIGNAL = 5.2; EXPRESSED IN HEART, SIGNAL = 5.6; EXPRESSED IN FETAL LIVER, SIGNAL = 8.1; EXPRESSED IN BONE MARROW, SIGNAL = 5.2; EST_HUMAN HIT: BF306996.1, EVALUE 0.00e+00; NT HIT: AF109906.1, EVALUE 7.00e-01; SWISSPROT HIT: P35085, EVALUE 3.40e-01
caacggattcatctttgcacacctcgactttggccttcacctgccccagggccccaggggctgcctcagcccctagtgggtctttctcgtccgggggccccgggtcagcacccatagagtcaggctcatccaggggaaactccagctctgcagatcggctcaggggcttgacgggggacacatccccactaggggtgaggtcactgctttgctcccgttcctcgttgtccttcattttcttataatgcagacaagggatgctactcagaggagggtcgtgtttctgtgga

SEQ ID NO: 22930 - DNA, 151 bp, Homo sapiens
  MAP TO AC005317.1; EXPRESSED IN PLACENTA, SIGNAL = 1.6; EXPRESSED IN LUNG, SIGNAL = 1.6; EXPRESSED IN FETAL LIVER, SIGNAL = 2.2; EXPRESSED IN BRAIN, SIGNAL = 1.5; EXPRESSED IN BONE MARROW, SIGNAL = 1.8; EXPRESSED IN ADULT LIVER, SIGNAL = 1.5; EXPRESSED IN HELA, SIGNAL = 3.2; EXPRESSED IN HEART, SIGNAL = 2.4; NT HIT: U07563.1, EVALUE 1.40e+00; EST_HUMAN HIT: BE871610.1, EVALUE 5.00e-38
gggagaggaggaagaggaggaggaagaggcattctacgaagacctagatgatatattggagtccattactaatagaatgattaagagtgagctggaagactttgaactggtaattgctaagtcctcagctgtattgaatgatggagttctt

SEQ ID NO: 22931 - DNA, 165 bp, Homo sapiens
  MAP TO AC002038.1; EXPRESSED IN BONE MARROW, SIGNAL =   2; EXPRESSED IN PLACENTA, SIGNAL = 2.1; EXPRESSED IN LUNG, SIGNAL = 2.3; EXPRESSED IN HELA, SIGNAL = 2.1; EXPRESSED IN FETAL LIVER, SIGNAL = 1.8; EXPRESSED IN ADULT LIVER, SIGNAL = 2.1; EXPRESSED IN HEART, SIGNAL = 1.9; EXPRESSED IN BRAIN, SIGNAL = 2.2; EST_HUMAN HIT: AI654903.1, EVALUE 9.00e-71; SWISSPROT HIT: O50290, EVALUE 1.00e+00; NT HIT: AF051371.1, EVALUE 3.80e-01
ttgttgttctttacacgatggtgttgcaagaaaatggatatggtgttgaggaagacattccaaccttactaatggctgctagcagtatggatgacattctggctctcactggattcaatacatgcttgagcatagtcttctcctcgggtaaacaagaaaatataa

SEQ ID NO: 22932 - DNA, 255 bp, Homo sapiens
  MAP TO AC002041.1; EXPRESSED IN PLACENTA, SIGNAL = 2.1; EXPRESSED IN HEART, SIGNAL = 1.8; EXPRESSED IN FETAL LIVER, SIGNAL = 2.1; EXPRESSED IN BRAIN, SIGNAL = 2.3; EXPRESSED IN LUNG, SIGNAL = 2.6; EXPRESSED IN HELA, SIGNAL = 2.3; EXPRESSED IN BONE MARROW, SIGNAL = 2.2; EXPRESSED IN ADULT LIVER, SIGNAL = 2.2; EST_HUMAN HIT: AI923163.1, EVALUE 1.00e-130; SWISSPROT HIT: P48029, EVALUE 1.00e-47; NT HIT: U41302.1, EVALUE 0.00e+00
tcccagaactcgatgacaggggaccggcggtcagcaagctggtcacaagtgaggttggccaggctggcactggcacagtcttcatggcggaagatctccacacagtcgggagtgttccaggtgtggccacatgtggcccagggcagcgtggtggtaaaggacttgaccaggtaatagaagccccaggccagcaccatgatgtagtaggtgttgcagtagaagacgatcaccatggaggcatagcccaggcctggg

SEQ ID NO: 22933 - DNA, 97 bp, Homo sapiens
  MAP TO AC002045.1; EXPRESSED IN BONE MARROW, SIGNAL = 8.8; EXPRESSED IN PLACENTA, SIGNAL = 5.2; EXPRESSED IN LUNG, SIGNAL = 6.8; EXPRESSED IN HELA, SIGNAL =  13; EXPRESSED IN HEART, SIGNAL = 6.5; EXPRESSED IN FETAL LIVER, SIGNAL =  14; EXPRESSED IN ADULT LIVER, SIGNAL =  13; EXPRESSED IN BRAIN, SIGNAL = 3.3; EST_HUMAN HIT: AW292929.1, EVALUE 2.00e-05; NT HIT: gi4505844, EVALUE 1.00e-05
tgcctgccaatcatgctgctcctgctactgccgtcgctgctgctgctgctgcttctacctggccccgggtccggcgagggtgagtgaggaaggggct

SEQ ID NO: 22934 - DNA, 237 bp, Homo sapiens
  MAP TO AC003101.1; EXPRESSED IN PLACENTA, SIGNAL = 1.8; EXPRESSED IN HEART, SIGNAL = 1.8; EXPRESSED IN BRAIN, SIGNAL = 2.5; EXPRESSED IN BONE MARROW, SIGNAL = 1.7; EXPRESSED IN ADULT LIVER, SIGNAL = 1.6; EXPRESSED IN LUNG, SIGNAL = 1.9; EXPRESSED IN HELA, SIGNAL = 1.7; EXPRESSED IN FETAL LIVER, SIGNAL = 1.7; EST_HUMAN HIT: BE273763.1, EVALUE 8.40e-01; NT HIT: AF025952.1, EVALUE 3.60e-02
gcgtcttcctcggagcgctggccccgtcccagtccccgcccccggccgcgccgcccttcttggcttgcgccctggtccccaccaaccccgcccgagcccccacggaccctgcccggcccgacggaaatgacccggccagggtcacacacggcccctgcccgctccgctgcggccatctccgcttccgcttccgcttccgccgaggcttctttccgactcaggcacggctctgtgccg

SEQ ID NO: 22935 - DNA, 85 bp, Homo sapiens
  MAP TO AC005332.1; EXPRESSED IN PLACENTA, SIGNAL = 1.8; EXPRESSED IN HELA, SIGNAL = 2.4; EXPRESSED IN HEART, SIGNAL =   2; EXPRESSED IN BONE MARROW, SIGNAL = 1.9; EXPRESSED IN ADULT LIVER, SIGNAL = 2.2; EXPRESSED IN BRAIN, SIGNAL = 1.8; EXPRESSED IN FETAL LIVER, SIGNAL = 2.1; EXPRESSED IN LUNG, SIGNAL =   2; EST_HUMAN HIT: AA573201.1, EVALUE 1.00e-40; NT HIT: X78262.1, EVALUE 6.90e-01
gctgttcacctctcccttggctcagcaccccttgccagttctcccaaggtcctctctgccagttgaaggcttccctgatcgccat

SEQ ID NO: 22936 - DNA, 230 bp, Homo sapiens
  MAP TO AC005539.1; EXPRESSED IN LUNG, SIGNAL = 1.1; EXPRESSED IN FETAL LIVER, SIGNAL = 1.3; EXPRESSED IN BRAIN, SIGNAL = 0.93; EXPRESSED IN BONE MARROW, SIGNAL = 0.96; EXPRESSED IN ADULT LIVER, SIGNAL = 1.2; EXPRESSED IN HEART, SIGNAL = 1.3; EXPRESSED IN PLACENTA, SIGNAL = 1.3; NT HIT: gi11419840, EVALUE 1.40e-01; EST_HUMAN HIT: BE843733.1, EVALUE 2.10e-01; SWISSPROT HIT: Q16831, EVALUE 1.00e-17
cttcataaaaatcataggtacacattgtatgtccaacgagggttgggaagttggggatttctttgctacagttgaacagttcttcagacagttctttgtccagttcagtacttcgggtgacaatgttgtccaaaatgacctgttcaaaccggggcttaaagaaggagtctacagctatatccgttattacaacagtccctggtgcaatccctgcaatgtgggaataaatg

SEQ ID NO: 22937 - DNA, 181 bp, Homo sapiens
  MAP TO AC002068.1; EXPRESSED IN PLACENTA, SIGNAL = 6.6; EXPRESSED IN HELA, SIGNAL = 5.9; EXPRESSED IN HEART, SIGNAL = 5.9; EXPRESSED IN FETAL LIVER, SIGNAL = 5.8; EXPRESSED IN ADULT LIVER, SIGNAL = 6.5; EXPRESSED IN LUNG, SIGNAL = 6.9; EXPRESSED IN BRAIN, SIGNAL =   7; EXPRESSED IN BONE MARROW, SIGNAL = 5.9; NT HIT: AL161547.2, EVALUE 4.20e-01; EST_HUMAN HIT: AV710091.1, EVALUE 9.80e+00
acactccaactgatgggttacaaggttacaaagcactgagtgtcagaagccttggaggctttttaggctacatagcagtgtatatcacagagaacatcacagattttgttgttgttgttgttccttttatagttatgaagtctactgcaagcagaatcacaaggtcaaggtcaaaggttat

SEQ ID NO: 22938 - DNA, 87 bp, Homo sapiens
  MAP TO AC005746.1; EXPRESSED IN LUNG, SIGNAL = 3.4; EXPRESSED IN PLACENTA, SIGNAL = 3.1; EXPRESSED IN HELA, SIGNAL = 3.4; EXPRESSED IN HEART, SIGNAL = 2.5; EXPRESSED IN FETAL LIVER, SIGNAL = 2.9; EXPRESSED IN BRAIN, SIGNAL = 2.9; EXPRESSED IN BONE MARROW, SIGNAL =   3; EXPRESSED IN ADULT LIVER, SIGNAL = 2.9; SWISSPROT HIT: Q04399, EVALUE 2.90e-01; EST_HUMAN HIT: AA608838.1, EVALUE 1.10e+00
ctccatgttgccatgagctgcattttcctggtccaggccccaaacaccaggaactgtctggttctcccggcttgactcagcccagcc

SEQ ID NO: 22939 - DNA, 142 bp, Homo sapiens
  MAP TO AC002477.1; EXPRESSED IN LUNG, SIGNAL = 0.92; EXPRESSED IN BRAIN, SIGNAL = 0.92; EXPRESSED IN ADULT LIVER, SIGNAL = 1.2; EXPRESSED IN PLACENTA, SIGNAL = 2.5; EXPRESSED IN HEART, SIGNAL = 1.6; EXPRESSED IN FETAL LIVER, SIGNAL = 1.3; EXPRESSED IN BONE MARROW, SIGNAL = 1.1; NT HIT: AL161500.2, EVALUE 5.00e+00; EST_HUMAN HIT: BF030788.1, EVALUE 2.00e-74
ctttcttctccttgttgcgatcctgcttatcttcccccttggagctgtcccccgaggtcccaccaccgctgcctgtggccccggcgggggttaacagggttactcgcttctccttaggcctgtgctccttctcttccttcat

SEQ ID NO: 22940 - DNA, 159 bp, Homo sapiens
  MAP TO AC000062.1; EXPRESSED IN PLACENTA, SIGNAL = 2.5; EXPRESSED IN HELA, SIGNAL = 2.6; EXPRESSED IN HEART, SIGNAL =   2; EXPRESSED IN FETAL LIVER, SIGNAL = 2.4; EXPRESSED IN ADULT LIVER, SIGNAL = 2.6; EXPRESSED IN LUNG, SIGNAL = 1.9; EXPRESSED IN BRAIN, SIGNAL = 2.3; EXPRESSED IN BONE MARROW, SIGNAL = 2.6; EST_HUMAN HIT: BE767066.1, EVALUE 4.00e-82; NT HIT: AL049784.1, EVALUE 1.00e-84; SWISSPROT HIT: Q05950, EVALUE 2.30e+00
gtttacgggcattcttggtcatagctgatagcttgcagcagaaagatggggaacctcccatgccggttacaggagccgttcttccttcaggaaacacgttaagagtaaagaaaacatatttgagtaaaacactaactgaagaggaagccaaaatgatag

SEQ ID NO: 22941 - DNA, 77 bp, Homo sapiens
  MAP TO AC003663.1; EXPRESSED IN PLACENTA, SIGNAL =   3; EXPRESSED IN LUNG, SIGNAL = 3.3; EXPRESSED IN FETAL LIVER, SIGNAL =   4; EXPRESSED IN BRAIN, SIGNAL = 3.6; EXPRESSED IN BONE MARROW, SIGNAL = 3.5; EXPRESSED IN ADULT LIVER, SIGNAL = 3.1; EXPRESSED IN HELA, SIGNAL = 3.3; EXPRESSED IN HEART, SIGNAL = 3.3; NT HIT: gi4504896, EVALUE 9.00e-34; SWISSPROT HIT: P52292, EVALUE 3.00e-08; EST_HUMAN HIT: AW780143.1, EVALUE 6.00e-36
acgttgtgccagaaactacctctgaaggctacactttccaagttcaggatggggctcctgggacctttaacttttag

SEQ ID NO: 22942 - DNA, 243 bp, Homo sapiens
  MAP TO AC005837.1; EXPRESSED IN PLACENTA, SIGNAL = 8.2; EXPRESSED IN HEART, SIGNAL = 3.2; EXPRESSED IN ADULT LIVER, SIGNAL = 5.7; EXPRESSED IN LUNG, SIGNAL = 3.7; EXPRESSED IN FETAL LIVER, SIGNAL = 8.1; EXPRESSED IN BRAIN, SIGNAL = 2.7; EXPRESSED IN BONE MARROW, SIGNAL = 6.6; EXPRESSED IN HELA, SIGNAL =   4; SWISSPROT HIT: P06302, EVALUE 2.80e-02; EST_HUMAN HIT: AA311159.1, EVALUE 2.00e-60; NT HIT: J04800.1, EVALUE 3.00e-49
atgccccatcatgtcagatgcagccatagacaccagctccgagatcaccaccaaggacttaaaggagaagaaggaagttgtggaggaggcggaaatggaagagatgcctctgctaatgggaacactaatgaggaaaattgggagcaggaggttgacaatgaggtagatgaagaagaggaagaaggtgatggtgaggaagaggatggagatgaagacgaggaagctgagtttgctatgggcaag

SEQ ID NO: 22943 - DNA, 168 bp, Homo sapiens
  MAP TO AC005877.2; EXPRESSED IN BRAIN, SIGNAL = 1.5; EXPRESSED IN ADULT LIVER, SIGNAL = 1.3; EXPRESSED IN LUNG, SIGNAL = 1.7; EXPRESSED IN FETAL LIVER, SIGNAL = 1.4; EXPRESSED IN BONE MARROW, SIGNAL = 1.4; EXPRESSED IN PLACENTA, SIGNAL = 1.6; EXPRESSED IN HEART, SIGNAL = 1.7; SWISSPROT HIT: P08547, EVALUE 7.00e-06; NT HIT: AJ400877.1, EVALUE 2.00e-15; EST_HUMAN HIT: AW972851.1, EVALUE 1.00e-11
agccattgccaaactcaatgtcatctagatcttctcctatgttatcttcttcagcttttgtagttttgcattttacattgaagtcaatgatccattttgagttaatacttgtgaagaatgtaaggtctgtgtctaaattcatctatttatttatttttgcatatggat

SEQ ID NO: 22944 - DNA, 98 bp, Homo sapiens
  MAP TO AC005939.1; EXPRESSED IN PLACENTA, SIGNAL = 2.5; EXPRESSED IN LUNG, SIGNAL = 2.2; EXPRESSED IN HELA, SIGNAL = 1.8; EXPRESSED IN HEART, SIGNAL = 1.7; EXPRESSED IN FETAL LIVER, SIGNAL = 1.7; EXPRESSED IN BRAIN, SIGNAL = 2.1; EXPRESSED IN BONE MARROW, SIGNAL = 1.9; EXPRESSED IN ADULT LIVER, SIGNAL = 1.9; SWISSPROT HIT: O27352, EVALUE 1.10e+00; NT HIT: AF196864.1, EVALUE 1.00e-12; EST_HUMAN HIT: AA622731.1, EVALUE 8.00e-08
ctctgaccatgcctctgaaatcaaaatgggcactgacagcagggagaaaccaggcaatgggagcaggcacttccaagcttgtggggggaaggggggga

SEQ ID NO: 22945 - DNA, 244 bp, Homo sapiens
  MAP TO AC002081.1; EXPRESSED IN PLACENTA, SIGNAL = 1.2; EXPRESSED IN LUNG, SIGNAL = 1.4; EXPRESSED IN HEART, SIGNAL = 1.3; EXPRESSED IN FETAL LIVER, SIGNAL = 1.4; EXPRESSED IN BRAIN, SIGNAL = 1.2; EXPRESSED IN ADULT LIVER, SIGNAL = 1.4; EXPRESSED IN BONE MARROW, SIGNAL = 1.2; NT HIT: gi7710057, EVALUE 1.50e-01; SWISSPROT HIT: P01267, EVALUE 2.00e-03; EST_HUMAN HIT: AW954806.1, EVALUE 0.00e+00
cccaggcccgcatggaatacaagcctctttgccatagacctgatgtatggacaggtaggtgtcaggtggacattccttgcactggttggtttctttctcaatgtagtggcctggagggcaggggacacacgatgaacccgactgttcagaaccgagggcacaggcacggcatgaggacgccaccccatcaactgcattagtggctgtgatagaataaatcttcaccatgtcattgatgaaccgt

SEQ ID NO: 22946 - DNA, 370 bp, Homo sapiens
  MAP TO AC005747.1; EXPRESSED IN PLACENTA, SIGNAL = 0.72; EXPRESSED IN HEART, SIGNAL = 1.4; EXPRESSED IN FETAL LIVER, SIGNAL = 1.1; EXPRESSED IN BRAIN, SIGNAL = 0.9; EXPRESSED IN ADULT LIVER, SIGNAL = 1.1; EXPRESSED IN LUNG, SIGNAL = 0.79; EXPRESSED IN BONE MARROW, SIGNAL = 1.1; SWISSPROT HIT: P35243, EVALUE 1.00e-67; NT HIT: S62028.1, EVALUE 0.00e+00; EST_HUMAN HIT: BE254103.1, EVALUE 0.00e+00
ttcattcttgctgatggtcccgttaccgtccacgtcgtagagggagaaggcccactccagcttctggttggtcttgcccgcggtggtcatgtgcagggcgatgacgtactccttgaagtccagggtgccgtcgaggttggaatcgaagctgcggaacacatgctgggcgtaggccttggggtcggtgtcggggaagaacttggcgtagatgctctggaactgctgctgggtgatgcggccggtgggacagtccttcaggaaggactggtaccaggagcacagctcctcctccgagaacttggtgttcagctgcagctcctccaggatctccttggacagggccccacttttgctgttccccatgagtgag

SEQ ID NO: 22947 - DNA, 108 bp, Homo sapiens
  MAP TO AC004526.1; EXPRESSED IN LUNG, SIGNAL = 9.7; EXPRESSED IN FETAL LIVER, SIGNAL = 8.1; EXPRESSED IN PLACENTA, SIGNAL = 8.3; EXPRESSED IN HELA, SIGNAL = 7.6; EXPRESSED IN BRAIN, SIGNAL = 8.6; EXPRESSED IN BONE MARROW, SIGNAL = 7.7; EXPRESSED IN ADULT LIVER, SIGNAL = 9.2; EXPRESSED IN HEART, SIGNAL = 8.1; SWISSPROT HIT: Q04690, EVALUE 1.00e-13; EST_HUMAN HIT: AW391369.1, EVALUE 3.00e-54; NT HIT: gi11426544, EVALUE 2.00e-54
caacagcacccacatttacgtaaagtttcagtgtctgaatcaaatgttctcttggatgaagaagtacttactgatccgaagatccaggcgctgcttcttactgttcta

SEQ ID NO: 22948 - DNA, 278 bp, Homo sapiens
  MAP TO AC003669.1; EXPRESSED IN PLACENTA, SIGNAL =   3; EXPRESSED IN LUNG, SIGNAL = 2.8; EXPRESSED IN HEART, SIGNAL = 2.9; EXPRESSED IN FETAL LIVER, SIGNAL = 3.2; EXPRESSED IN BRAIN, SIGNAL =   3; EXPRESSED IN BONE MARROW, SIGNAL = 2.9; EXPRESSED IN ADULT LIVER, SIGNAL = 2.7; EXPRESSED IN HELA, SIGNAL = 2.9; NT HIT: S41694.1, EVALUE 7.00e-72; SWISSPROT HIT: P01252, EVALUE 2.00e-03; EST_HUMAN HIT: BE260714.1, EVALUE 6.00e-64
tcaacctcatcagtcttctgcttcttggtatcaacgttgtcatcctcagcatcttcaactgcccatttgcccatagcatcctcagctgccacatcttcatcttcatcctcttcctcaccatcaccttcttcctcctctttttcctccccatattcttcctattcttcttctacctcattgtcagcctcctgtttcccattttcctcattagcgttcccattaccaggaccatctcttcccttctctgcctcctccacaacttctttcttctcctttaa

SEQ ID NO: 22949 - DNA, 234 bp, Homo sapiens; identical to SEQ ID NO: 22468
  MAP TO AC005950.1; EXPRESSED IN ADULT LIVER, SIGNAL = 4.1; EXPRESSED IN HEART, SIGNAL = 5.2; EXPRESSED IN BRAIN, SIGNAL = 4.1; EXPRESSED IN LUNG, SIGNAL = 3.5; EXPRESSED IN FETAL LIVER, SIGNAL = 4.4; EXPRESSED IN BONE MARROW, SIGNAL = 4.1; EXPRESSED IN PLACENTA, SIGNAL =   4; EXPRESSED IN HELA, SIGNAL = 4.2; NT HIT: AJ006345.1, EVALUE 1.00e-129; EST_HUMAN HIT: BF542075.1, EVALUE 8.30e-01

SEQ ID NO: 22950 - DNA, 119 bp, Homo sapiens
  MAP TO AC004580.2; EXPRESSED IN BRAIN, SIGNAL = 1.4; EXPRESSED IN ADULT LIVER, SIGNAL = 1.4; EXPRESSED IN LUNG, SIGNAL = 1.3; EXPRESSED IN FETAL LIVER, SIGNAL = 1.4; EXPRESSED IN BONE MARROW, SIGNAL = 1.5; EXPRESSED IN PLACENTA, SIGNAL = 1.7; EXPRESSED IN HEART, SIGNAL = 1.4; EST_HUMAN HIT: BE785356.1, EVALUE 1.50e+00; SWISSPROT HIT: P08289, EVALUE 4.10e+00
aaggggccgtcctgtggtacatcagccccgccctgccgggttccaagcagcttctcctcgcagctctcagaaacatcagtgtggccagagctcagcatgtagggcagattccccaggcc

SEQ ID NO: 22951 - DNA, 380 bp, Homo sapiens
  MAP TO AC005754.1; EXPRESSED IN BONE MARROW, SIGNAL = 1.9; EXPRESSED IN PLACENTA, SIGNAL = 1.6; EXPRESSED IN LUNG, SIGNAL = 1.8; EXPRESSED IN HELA, SIGNAL =   2; EXPRESSED IN FETAL LIVER, SIGNAL = 2.2; EXPRESSED IN ADULT LIVER, SIGNAL =   2; EXPRESSED IN HEART, SIGNAL = 1.7; EXPRESSED IN BRAIN, SIGNAL = 2.3; SWISSPROT HIT: P22545, EVALUE 2.10e+00; NT HIT: gi11416793, EVALUE 4.00e-43; EST_HUMAN HIT: AV704645.1, EVALUE 1.40e+00
aatcgattcagaacccacctctccccaaagcatcaataaaatgaagaaagccacttgccttttcttgttctgtactttagtttgcatcatgtctattatgtctgaatacggaagaaaaatccttttcagctcccaatcaccacatctaccgtcgaccctctcggatgtctttgcagagatttttaaattcgttcttacaacttgtctggcgacgactgccttcccggacacatctatctcagctttagctgtaaacgtggtctgtatttttacttggcttctggatgaaacggagtccaccgagtctgcagagctttcattcactctcttagcttgtaccgccaccacgcgttcaaactaataacttcatgagatgtttt

SEQ ID NO: 22952 - DNA, 179 bp, Homo sapiens
  MAP TO AC004241.1; EXPRESSED IN PLACENTA, SIGNAL = 7.9; EXPRESSED IN HELA, SIGNAL = 6.3; EXPRESSED IN HEART, SIGNAL = 6.9; EXPRESSED IN BRAIN, SIGNAL = 7.9; EXPRESSED IN ADULT LIVER, SIGNAL = 7.6; EXPRESSED IN LUNG, SIGNAL = 8.4; EXPRESSED IN FETAL LIVER, SIGNAL = 7.4; EXPRESSED IN BONE MARROW, SIGNAL = 7.2; EST_HUMAN HIT: BE379558.1, EVALUE 6.00e-66; SWISSPROT HIT: P48308, EVALUE 6.70e+00; NT HIT: U78168.1, EVALUE 4.00e-66
atcccacaccctgaccagctggggcccactgtgggctctgctgaggggctggacctggtgagtgccaaggacctggcaggccagctgacggaccacgactggagcctcttcaacagtatccaccaggtatgggaggcagagctgggggaggagagcaggcggcggggcgcccggctcgg

SEQ ID NO: 22953 - DNA, 163 bp, Homo sapiens
  MAP TO AC005875.1; EXPRESSED IN PLACENTA, SIGNAL =  21; EXPRESSED IN LUNG, SIGNAL =  29; EXPRESSED IN HELA, SIGNAL =  27; EXPRESSED IN HEART, SIGNAL =  23; EXPRESSED IN FETAL LIVER, SIGNAL =  26; EXPRESSED IN ADULT LIVER, SIGNAL =  23; EXPRESSED IN BRAIN, SIGNAL =  32; EXPRESSED IN BONE MARROW, SIGNAL =  28; SWISSPROT HIT: Q04707, EVALUE 5.20e+00; EST_HUMAN HIT: BF576922.1, EVALUE 2.00e-65
cataggccaccacaaaggtacttgtgcctgctgccatttttgactgtacgagggactctttaaatccgagtttcagcaggactgcagacatgtccacaccacttgacacaaccatgtaaaatatgaccaaggaaatgaatgagattccagtgtacaacgacac

SEQ ID NO: 22954 - DNA, 143 bp, Homo sapiens
  MAP TO AC005722.1; EXPRESSED IN LUNG, SIGNAL = 4.7; EXPRESSED IN HELA, SIGNAL = 4.7; EXPRESSED IN BRAIN, SIGNAL = 4.6; EXPRESSED IN BONE MARROW, SIGNAL = 4.5; EXPRESSED IN ADULT LIVER, SIGNAL = 4.5; EXPRESSED IN PLACENTA, SIGNAL = 4.1; EXPRESSED IN HEART, SIGNAL = 3.8; EXPRESSED IN FETAL LIVER, SIGNAL = 4.6; NT HIT: gi7662209, EVALUE 3.00e-75; EST_HUMAN HIT: AL110432.1, EVALUE 5.00e-75
agaaaacttatcttccccaccattgggtcctcccaactatctacaagtttccaaagattctgccagtactagtagcaagaactcttcttgtgacacggatgactttgttttggtgccacacaacatctcgtcagaccactcat

SEQ ID NO: 22955 - DNA, 160 bp, Homo sapiens
  MAP TO AC006080.1; EXPRESSED IN HEART, SIGNAL = 2.7; EXPRESSED IN BRAIN, SIGNAL = 3.2; EXPRESSED IN ADULT LIVER, SIGNAL = 5.2; EXPRESSED IN PLACENTA, SIGNAL = 3.5; EXPRESSED IN BONE MARROW, SIGNAL = 3.5; EXPRESSED IN FETAL LIVER, SIGNAL = 4.4; EXPRESSED IN LUNG, SIGNAL = 3.5; EXPRESSED IN HELA, SIGNAL = 3.4; NT HIT: gi11525843, EVALUE 3.70e-01; SWISSPROT HIT: P71546, EVALUE 5.20e+00; EST_HUMAN HIT: AA370336.1, EVALUE 8.50e+00
ttggaccccagctgagccaggacctcctctaagcagatgacattttccctcctgactgtctctcccctgatgagattttttgacaggtggcccatctgtcctccagcatctccatggtcatcaactgggaggagctgaatgaggcatttgatttgcaaat

SEQ ID NO: 22956 - DNA, 122 bp, Homo sapiens
  MAP TO AC005971.5; EXPRESSED IN PLACENTA, SIGNAL = 2.7; EXPRESSED IN LUNG, SIGNAL = 2.9; EXPRESSED IN BONE MARROW, SIGNAL = 2.5; EXPRESSED IN HELA, SIGNAL = 2.5; EXPRESSED IN ADULT LIVER, SIGNAL = 2.5; EXPRESSED IN HEART, SIGNAL = 2.2; EXPRESSED IN FETAL LIVER, SIGNAL =   3; EXPRESSED IN BRAIN, SIGNAL = 2.9; EST_HUMAN HIT: AA722878.1, EVALUE 1.00e-62; NT HIT: Y10627.1, EVALUE 2.70e-01
gaattgccccccactgcctggatgagggcactgtgcggagtatggtcactgaggaattcaatggcagcgattgggagaaggccatgaaagagcacaagaccatcaagaacatgtctaaagag

SEQ ID NO: 22957 - DNA, 465 bp, Homo sapiens
  MAP TO AC006088.1; EXPRESSED IN ADULT LIVER, SIGNAL = 2.2; EXPRESSED IN HEART, SIGNAL = 5.9; EXPRESSED IN FETAL LIVER, SIGNAL =   2; EXPRESSED IN BRAIN, SIGNAL = 2.7; EXPRESSED IN BONE MARROW, SIGNAL = 1.4; EXPRESSED IN PLACENTA, SIGNAL = 1.5; EXPRESSED IN LUNG, SIGNAL = 2.2; EXPRESSED IN HELA, SIGNAL = 2.3; NT HIT: gi11436557, EVALUE 0.00e+00; SWISSPROT HIT: O46674, EVALUE 6.00e-85; EST_HUMAN HIT: AU133213.1, EVALUE 0.00e+00
ggtacaaacattgctgctgggaaagctatgggagtggtggtagcaactggagttaacaccgaaattggcaagatccgggatgaaatggtggcaacagaacaggagagaacaccccttcagcaaaaactagatgaatttggggaacagctttccaaagtcatctcccttatttgcattgcagtctggatcataaatattgggcacttcaatgacccggttcatggagggtcctggatcagaggtgctatttactactttaaaattgcagtggccctggctgtagcagccattcctgaaggtctgcctgcagtcatcaccacctgcctggctcttggaactcgcagaatggcaaagaaaaatgccattgttcgaagcctcccgtctgtggaaacccttggttgtacttctgttatctgctcagacaagactggtacacttacaacaaaccagatgtcagtctgcagg

SEQ ID NO: 22958 - DNA, 112 bp, Homo sapiens
  MAP TO AC003084.1; EXPRESSED IN BONE MARROW, SIGNAL = 3.6; EXPRESSED IN PLACENTA, SIGNAL = 3.8; EXPRESSED IN LUNG, SIGNAL = 3.9; EXPRESSED IN HELA, SIGNAL =   4; EXPRESSED IN FETAL LIVER, SIGNAL = 4.6; EXPRESSED IN ADULT LIVER, SIGNAL = 3.8; EXPRESSED IN HEART, SIGNAL = 5.5; EXPRESSED IN BRAIN, SIGNAL = 3.2; EST_HUMAN HIT: R94090.1, EVALUE 3.60e-01
aaagatgaaggagagtgggccaatgatggtggtgggctatcacaactgctacaaccccaacaacttcaattcaagtcacaagcactactaagggagtgagcgccacttgtct

SEQ ID NO: 22959 - DNA, 119 bp, Homo sapiens
  MAP TO AC004455.1; EXPRESSED IN BONE MARROW, SIGNAL = 1.1; EXPRESSED IN PLACENTA, SIGNAL = 1.2; EXPRESSED IN LUNG, SIGNAL = 1.4; EXPRESSED IN FETAL LIVER, SIGNAL = 1.2; EXPRESSED IN ADULT LIVER, SIGNAL = 1.3; EXPRESSED IN HEART, SIGNAL = 1.3; EXPRESSED IN BRAIN, SIGNAL = 1.3; SWISSPROT HIT: P28166, EVALUE 7.10e+00
tctgatggtggagttctgggagccctgggaacagacaccaggaacgcggcagctgatctgccacggagtcaagaggatcttccgggaggctctgtcatttctgtaaatcaaggggttag

SEQ ID NO: 22960 - DNA, 99 bp, Homo sapiens
  MAP TO AC004534.1; EXPRESSED IN PLACENTA, SIGNAL =  11; EXPRESSED IN HELA, SIGNAL = 9.6; EXPRESSED IN BRAIN, SIGNAL =  11; EXPRESSED IN ADULT LIVER, SIGNAL =  13; EXPRESSED IN HEART, SIGNAL = 9.1; EXPRESSED IN LUNG, SIGNAL =  12; EXPRESSED IN FETAL LIVER, SIGNAL = 9.7; EXPRESSED IN BONE MARROW, SIGNAL =  11; SWISSPROT HIT: P23011, EVALUE 5.50e+00; NT HIT: AB037814.1, EVALUE 4.00e-09; EST_HUMAN HIT: AI248533.1, EVALUE 1.00e-12
tcttgctcctgatttccctgtggtgagtgcctgcttctgccttgccttctgccatgggtaaaagcttcccgaggccttcccagaagcagatgctgacat

SEQ ID NO: 22961 - DNA, 75 bp, Homo sapiens
  MAP TO AC005725.1; EXPRESSED IN PLACENTA, SIGNAL = 3.3; EXPRESSED IN LUNG, SIGNAL = 3.8; EXPRESSED IN HELA, SIGNAL = 3.2; EXPRESSED IN HEART, SIGNAL = 2.9; EXPRESSED IN FETAL LIVER, SIGNAL = 3.1; EXPRESSED IN BRAIN, SIGNAL =   3; EXPRESSED IN ADULT LIVER, SIGNAL = 3.4; EXPRESSED IN BONE MARROW, SIGNAL = 2.9; NT HIT: AF240786.1, EVALUE 9.10e+00; EST_HUMAN HIT: BE008001.1, EVALUE 5.60e-02
cttgtacataggtctccattgtttcctcacttgtacttttttctttatctagcagaaccatttgacgattgggtc

SEQ ID NO: 22962 - DNA, 140 bp, Homo sapiens
  MAP TO AC003964.1; EXPRESSED IN PLACENTA, SIGNAL = 2.8; EXPRESSED IN LUNG, SIGNAL = 3.2; EXPRESSED IN HELA, SIGNAL = 2.8; EXPRESSED IN HEART, SIGNAL = 2.4; EXPRESSED IN FETAL LIVER, SIGNAL = 2.5; EXPRESSED IN ADULT LIVER, SIGNAL = 2.5; EXPRESSED IN BRAIN, SIGNAL = 2.5; EXPRESSED IN BONE MARROW, SIGNAL = 2.4; SWISSPROT HIT: Q01820, EVALUE 2.40e+00; EST_HUMAN HIT: AW810922.1, EVALUE 7.30e+00; NT HIT: D16826.1, EVALUE 1.00e-03
attactcaaatttggcttgggtgggtaggggaagggctccttcatgttgatgcctgtgtcattttttaaaatgtaattcaacagtctgatagctttcacacattctggcataatatgcacctgtttcattgtgtatattt

SEQ ID NO: 22963 - DNA, 376 bp, Homo sapiens
  MAP TO AC004079.1; EXPRESSED IN FETAL LIVER, SIGNAL = 2.2; EXPRESSED IN BONE MARROW, SIGNAL = 2.2; EXPRESSED IN ADULT LIVER, SIGNAL = 2.3; EXPRESSED IN HELA, SIGNAL = 2.3; EXPRESSED IN PLACENTA, SIGNAL =   2; EXPRESSED IN LUNG, SIGNAL = 2.1; EXPRESSED IN HEART, SIGNAL = 2.2; EXPRESSED IN BRAIN, SIGNAL = 1.9; EST_HUMAN HIT: AI239865.1, EVALUE 3.50e-01; NT HIT: AF224262.1, EVALUE 2.00e-05; SWISSPROT HIT: P75613, EVALUE 7.00e-01
tgcaagggtacgagtgtggcaaaaagagaaatggagatttctctcttttgctgcaatcccaaggcgtcaacggcgggtccttctcaaaggaaggtgttaaaaatataagtagtatgtttaaactgtcaaggagccaaagtgtcaccttagagcaaaaacaaagccaggggaaaagggagaaatcaaaaagcactccgggccagggtggcctcatgcataccaatggtttttgtcatttatggctgggcaagatttatgactcggcgccccaaagctgtaaacagagcacaaaacagcaaacacttgctccttatggcatattgcagagcaacttgaaagggggagctggccgcgtaggaggtgagagccagccgca

SEQ ID NO: 22964 - DNA, 148 bp, Homo sapiens
  MAP TO AC005683.2; EXPRESSED IN HELA, SIGNAL = 2.2; EXPRESSED IN FETAL LIVER, SIGNAL = 2.2; EXPRESSED IN PLACENTA, SIGNAL = 2.2; EXPRESSED IN LUNG, SIGNAL = 2.4; EXPRESSED IN HEART, SIGNAL = 2.2; EXPRESSED IN BRAIN, SIGNAL = 2.2; EXPRESSED IN BONE MARROW, SIGNAL = 2.2; EXPRESSED IN ADULT LIVER, SIGNAL = 2.5; SWISSPROT HIT: Q13698, EVALUE 1.40e+00; NT HIT: AF038633.1, EVALUE 5.20e+00; EST_HUMAN HIT: AW953120.1, EVALUE 5.00e-78
aagacttagcatccacccatgtggccactcagcagaagctgcagatgggccagctgcagaaggccaggggcagggcacagctgtacctttgcagggtcatcgtgcagaaagctgtgcagaggccccgctggctcatcatcttttagtt

SEQ ID NO: 22965 - DNA, 173 bp, Homo sapiens
  MAP TO AC004464.1; EXPRESSED IN LUNG, SIGNAL = 8.5; EXPRESSED IN HELA, SIGNAL =  12; EXPRESSED IN BONE MARROW, SIGNAL = 9.7; EXPRESSED IN ADULT LIVER, SIGNAL =  10; EXPRESSED IN PLACENTA, SIGNAL =  11; EXPRESSED IN HEART, SIGNAL = 9.5; EXPRESSED IN FETAL LIVER, SIGNAL =  10; EXPRESSED IN BRAIN, SIGNAL = 9.1; SWISSPROT HIT: P18406, EVALUE 3.00e+00; NT HIT: M10806.1, EVALUE 6.20e+00
agagcagcctgtatgttattggagaaagagttggccttaaaagagagaagaaaactgacgttggagctgcagaaacacatctccttttaggtacaaagcaaggaaggcaaagacagtgtgtctgggcatttggggaggcaggtctgcctcttggtcaacaggtgggaagacat

SEQ ID NO: 22966 - DNA, 132 bp, Homo sapiens
  MAP TO AC005821.1; EXPRESSED IN ADULT LIVER, SIGNAL = 2.7; EXPRESSED IN PLACENTA, SIGNAL = 2.8; EXPRESSED IN LUNG, SIGNAL = 2.8; EXPRESSED IN HELA, SIGNAL = 3.2; EXPRESSED IN HEART, SIGNAL = 2.8; EXPRESSED IN BRAIN, SIGNAL = 2.8; EXPRESSED IN BONE MARROW, SIGNAL = 2.7; EXPRESSED IN FETAL LIVER, SIGNAL = 2.9; SWISSPROT HIT: P49259, EVALUE 2.00e-07; NT HIT: AF134838.1, EVALUE 2.00e-58; EST_HUMAN HIT: AI922123.1, EVALUE 1.70e+00
cactctcccagttgaggtacttgaggggcgagttgtccgaccactgccagcctccgctcgtgtccaagtcattcaagccgatccacagggtggagctgtacccagtgaggaggcctgacagcaaggagggac

SEQ ID NO: 22967 - DNA, 198 bp, Homo sapiens
  MAP TO AC004131.1; EXPRESSED IN PLACENTA, SIGNAL = 4.5; EXPRESSED IN LUNG, SIGNAL = 5.6; EXPRESSED IN HELA, SIGNAL = 5.4; EXPRESSED IN FETAL LIVER, SIGNAL =   5; EXPRESSED IN BONE MARROW, SIGNAL = 5.4; EXPRESSED IN ADULT LIVER, SIGNAL =   5; EXPRESSED IN HEART, SIGNAL = 5.4; EXPRESSED IN BRAIN, SIGNAL = 5.8; EST_HUMAN HIT: AI097001.1, EVALUE 1.00e-107; SWISSPROT HIT: O95180, EVALUE 7.50e-01; NT HIT: gi11431857, EVALUE 1.00e-108
ggcagccgcaccaggaggatgagcatcaggagcagtgtgatcagggcgcccgccccggccaccgcctccaccacaatgccccagatggcgtccaggtcgcacagggacacgtactgagggaggaggtccagcccacagcctcgggatgtgctggcgttttcagaggccaccgaggtgatcacgaagagcaggaggaag

SEQ ID NO: 22968 - DNA, 112 bp, Homo sapiens
  MAP TO AC004582.1; EXPRESSED IN PLACENTA, SIGNAL = 2.7; EXPRESSED IN LUNG, SIGNAL = 2.3; EXPRESSED IN HELA, SIGNAL = 3.1; EXPRESSED IN FETAL LIVER, SIGNAL = 2.5; EXPRESSED IN BONE MARROW, SIGNAL = 2.3; EXPRESSED IN ADULT LIVER, SIGNAL = 2.2; EXPRESSED IN HEART, SIGNAL = 2.4; EXPRESSED IN BRAIN, SIGNAL = 2.3; SWISSPROT HIT: Q08101, EVALUE 2.40e+00; NT HIT: U26716.1, EVALUE 9.70e-01; EST_HUMAN HIT: AU156577.1, EVALUE 1.40e+00
ttttacgtttttctctttgtgcccataggctaaaatcaaactttttctgctctgatccctctagtacttctctcagctggtatttcggttcccctcggcctggttcacacat

SEQ ID NO: 22969 - DNA, 130 bp, Homo sapiens
  MAP TO AC004084.1; EXPRESSED IN PLACENTA, SIGNAL = 1.5; EXPRESSED IN ADULT LIVER, SIGNAL = 1.8; EXPRESSED IN LUNG, SIGNAL = 1.9; EXPRESSED IN HEART, SIGNAL = 1.7; EXPRESSED IN FETAL LIVER, SIGNAL = 1.6; EXPRESSED IN BRAIN, SIGNAL = 2.1; EXPRESSED IN BONE MARROW, SIGNAL = 1.7; SWISSPROT HIT: P27177, EVALUE 3.60e-01; NT HIT: AF100956.1, EVALUE 2.90e-01
tggctccatcctggctcctggttctcatcagccgagccggggccctttccccggctgggggtggccatggcgccagaagccacgacaggtttacgttccagccgcagctgcactggccccatcccaagtc

SEQ ID NO: 22970 - DNA, 307 bp, Homo sapiens
  MAP TO AC005691.1; EXPRESSED IN PLACENTA, SIGNAL =  16; EXPRESSED IN BONE MARROW, SIGNAL =  17; EXPRESSED IN ADULT LIVER, SIGNAL =  21; EXPRESSED IN LUNG, SIGNAL =  18; EXPRESSED IN HELA, SIGNAL =  19; EXPRESSED IN HEART, SIGNAL =  29; EXPRESSED IN FETAL LIVER, SIGNAL =  21; EXPRESSED IN BRAIN, SIGNAL =  24; NT HIT: gi11435636, EVALUE 3.00e+00; SWISSPROT HIT: P47179, EVALUE 1.50e+00
cttaaagggggtggtgcctggctccagtcctgccagcgtgctgctgtccaccatgtgtgccactcggggatcgcccacccgcatgaagtcactgactaggtcggtgacctccaccagccagtccgggcctaacatggtgaccacctggtcagtgccctcggatgatgtcgtgtggaactgggtgaagacctgcagggtggcatgctggtactgcagggtgcagccacggcttgcactctgccgccgctcctcctcctcctcatcctcatcctcgctttcccggactgacctggggtggggacatgcc

SEQ ID NO: 22971 - DNA, 150 bp, Homo sapiens
  MAP TO AC004467.1; EXPRESSED IN PLACENTA, SIGNAL = 2.1; EXPRESSED IN LUNG, SIGNAL = 2.5; EXPRESSED IN HELA, SIGNAL = 2.4; EXPRESSED IN HEART, SIGNAL = 1.8; EXPRESSED IN FETAL LIVER, SIGNAL = 1.8; EXPRESSED IN ADULT LIVER, SIGNAL = 1.7; EXPRESSED IN BRAIN, SIGNAL = 1.7; EXPRESSED IN BONE MARROW, SIGNAL = 1.7; NT HIT: gi7382479, EVALUE 2.00e-79; SWISSPROT HIT: O43182, EVALUE 3.00e-16
tgttggagccggaggaacagctgggcaccttgcagctcctcatataccttctacctccctgcaactgcgacaccctccaccgcctgctacagttcctctccatcgtggccaggcatgccgatgacaacatcagcaaagatgggcaagagg

SEQ ID NO: 22972 - DNA, 312 bp, Homo sapiens
  MAP TO AC005736.1; EXPRESSED IN LUNG, SIGNAL = 1.3; EXPRESSED IN BRAIN, SIGNAL = 1.6; EXPRESSED IN BONE MARROW, SIGNAL = 1.8; EXPRESSED IN PLACENTA, SIGNAL = 1.3; EXPRESSED IN HEART, SIGNAL = 9.3; EXPRESSED IN FETAL LIVER, SIGNAL = 1.3; EXPRESSED IN ADULT LIVER, SIGNAL = 1.3; EST_HUMAN HIT: BF216086.1, EVALUE 7.20e-02
tcaagtttcttgaaaggaaacctttccaattctcagagctttgagagaccatcttacttccatgtatgtttggctgttgcttttttgtttgtttttggaatgtcctgctttagggagagctgccatcagtagaagcatgaggaatggatcccttgttctattttttaaaaaataattaaagaactctaaatgaagataatgttgaagaaaattggattcttcttcttcttcttcttcttcttcttcttcttcttcttcttcttcttcttcttcttcttcttcttcttcttcttcttcttcttcttctttttt

SEQ ID NO: 22973 - DNA, 359 bp, Homo sapiens
  MAP TO AC004584.1; EXPRESSED IN LUNG, SIGNAL = 2.7; EXPRESSED IN BRAIN, SIGNAL = 2.6; EXPRESSED IN BONE MARROW, SIGNAL = 2.2; EXPRESSED IN PLACENTA, SIGNAL = 2.8; EXPRESSED IN HELA, SIGNAL = 2.5; EXPRESSED IN HEART, SIGNAL = 2.4; EXPRESSED IN FETAL LIVER, SIGNAL = 2.4; EXPRESSED IN ADULT LIVER, SIGNAL = 2.8; EST_HUMAN HIT: AU143706.1, EVALUE 0.00e+00; NT HIT: gi11424395, EVALUE 0.00e+00; SWISSPROT HIT: P38432, EVALUE 2.00e-47
aggagttgctgagaattctgtagtcatcagtaatggtgacattaatttatctcttagaaaagcaaagaagcgggcatttcagttagaggagggtgaagaaactgaaccagattgcaaatattcaaagaagcattggaagagtcgagagaacaataacaataatgagaaggtcttggatctggaaccaaaagctgtcacagatcagactgtcagcaaaaaaaacaagagaaaaaataaagcaacctgtggcacagtgggtgatgataacgaagaggccaaaagaaaatcaccaaagaaaaaggagaaatgtgaatataaaaaaaaggctaagaatcccaagtctccgaaagtacaggcag

SEQ ID NO: 22974 - DNA, 121 bp, Homo sapiens
  MAP TO AC005859.1; EXPRESSED IN LUNG, SIGNAL = 1.9; EXPRESSED IN HELA, SIGNAL = 1.8; EXPRESSED IN BRAIN, SIGNAL = 1.8; EXPRESSED IN BONE MARROW, SIGNAL = 2.1; EXPRESSED IN ADULT LIVER, SIGNAL = 1.8; EXPRESSED IN PLACENTA, SIGNAL = 1.8; EXPRESSED IN HEART, SIGNAL = 1.7; EXPRESSED IN FETAL LIVER, SIGNAL = 1.9; NT HIT: gi11421041, EVALUE 4.00e-62; SWISSPROT HIT: P11908, EVALUE 1.00e-17; EST_HUMAN HIT: H15341.1, EVALUE 5.00e-62
tacccatgggatcttctctggaccagctatttccagaataaataatgccgcctttgaggctgttgtcgtcacaaacacaattccgcaagaggacaaaatgaaacactgcaccaagattcag

SEQ ID NO: 22975 - DNA, 254 bp, Homo sapiens
  MAP TO AC004472.1; EXPRESSED IN PLACENTA, SIGNAL = 3.4; EXPRESSED IN LUNG, SIGNAL = 4.1; EXPRESSED IN HELA, SIGNAL = 3.6; EXPRESSED IN FETAL LIVER, SIGNAL = 3.5; EXPRESSED IN BRAIN, SIGNAL = 3.5; EXPRESSED IN BONE MARROW, SIGNAL = 3.6; EXPRESSED IN ADULT LIVER, SIGNAL = 3.3; EXPRESSED IN HEART, SIGNAL = 3.4; SWISSPROT HIT: Q01643, EVALUE 2.40e-02; NT HIT: gi9910491, EVALUE 1.00e-20; EST_HUMAN HIT: BE166574.1, EVALUE 6.00e-73
aagctggacaaccaggagcaggatgaatgagcccaaaaggaagggggtggccctggcctcagctacaacaaaactatcagagaagaacacagccaagcgaaacagcaggagtaacaggacgggcccagggatgggaaacagggttgccaggggcctcttggacccccagccagcccaggctttccacagaaaagggaggaatgagctcactgcagccacagcccctagaagcactagatctagcttcagctcaa

SEQ ID NO: 22976 - DNA, 228 bp, Homo sapiens
  MAP TO AC005831.1; EXPRESSED IN PLACENTA, SIGNAL = 1.3; EXPRESSED IN ADULT LIVER, SIGNAL = 1.3; EXPRESSED IN LUNG, SIGNAL = 1.3; EXPRESSED IN HEART, SIGNAL = 1.5; EXPRESSED IN FETAL LIVER, SIGNAL = 1.4; EXPRESSED IN BRAIN, SIGNAL = 1.6; EXPRESSED IN BONE MARROW, SIGNAL = 1.3; EST_HUMAN HIT: BE294432.1, EVALUE 2.00e-87; SWISSPROT HIT: P02462, EVALUE 1.80e-02
atggctgcccctgacgggagggtagtctccagaccccagagacttggtcaggggtctggccaggggccaaaggggagtggagcctgcctgcatcccctggacagcctggagcagaaggagactcaggagcaaacgtcgggccagctagtcatgctgaggaaggcacaggagttctttcagacctgtgatgctgaaggcaagggcttcatcgccaggaaggatatgcag

SEQ ID NO: 22977 - DNA, 159 bp, Homo sapiens
  MAP TO AC004549.1; EXPRESSED IN HELA, SIGNAL =  15; EXPRESSED IN HEART, SIGNAL =  13; EXPRESSED IN BRAIN, SIGNAL =  15; EXPRESSED IN BONE MARROW, SIGNAL =  14; EXPRESSED IN PLACENTA, SIGNAL =  15; EXPRESSED IN LUNG, SIGNAL =  17; EXPRESSED IN FETAL LIVER, SIGNAL =  14; EXPRESSED IN ADULT LIVER, SIGNAL =  15; NT HIT: AF135399.1, EVALUE 3.60e-01; EST_HUMAN HIT: AI833003.1, EVALUE 2.00e-77
tgggcaggcaaaaggcttctcttcccctccattcatgcacatggagctgaggatggcttcggagctgatggcactctctgtggtccaggactcatcgctgtccgactcctcatagtccacctcctcctcgtcatactcgctgcctgcaggacaagagaa

SEQ ID NO: 22978 - DNA, 114 bp, Homo sapiens
  MAP TO AC004106.1; EXPRESSED IN LUNG, SIGNAL = 4.1; EXPRESSED IN FETAL LIVER, SIGNAL =   3; EXPRESSED IN BRAIN, SIGNAL = 3.7; EXPRESSED IN BONE MARROW, SIGNAL = 3.2; EXPRESSED IN HELA, SIGNAL = 3.2; EXPRESSED IN PLACENTA, SIGNAL = 3.8; EXPRESSED IN HEART, SIGNAL = 3.3; EXPRESSED IN ADULT LIVER, SIGNAL = 3.2; EST_HUMAN HIT: T08169.1, EVALUE 2.00e-12; NT HIT: U81384.1, EVALUE 2.50e-01; SWISSPROT HIT: P40935, EVALUE 2.40e+00
atgccatgcacaatatctggacacatttttttctccagcaggactttgttttgggcttgatgattttcatggctttttctataacaacaatagcatcttcaatggtataatctt

SEQ ID NO: 22979 - DNA, 144 bp, Homo sapiens
  MAP TO AC005697.1; EXPRESSED IN LUNG, SIGNAL =  15; EXPRESSED IN HELA, SIGNAL =  14; EXPRESSED IN FETAL LIVER, SIGNAL =  22; EXPRESSED IN BRAIN, SIGNAL =  26; EXPRESSED IN PLACENTA, SIGNAL =  18; EXPRESSED IN HEART, SIGNAL =  19; EXPRESSED IN BONE MARROW, SIGNAL =  18; EXPRESSED IN ADULT LIVER, SIGNAL =  19; NT HIT: AF224669.1, EVALUE 4.00e-10; SWISSPROT HIT: P21139, EVALUE 1.80e+00; EST_HUMAN HIT: AA369683.1, EVALUE 2.00e-06
agagagacagaggtttattaccatgaactggctcatgcaattatggagattggcaagtccaaaatctgcagagccaatgtcccagttcaagcacaaaggctggaagctgctgtagaaccaggaagagctgatgtcccagtttga

SEQ ID NO: 22980 - DNA, 277 bp, Homo sapiens
  MAP TO AC004596.1; EXPRESSED IN PLACENTA, SIGNAL = 1.2; EXPRESSED IN LUNG, SIGNAL = 1.4; EXPRESSED IN FETAL LIVER, SIGNAL = 1.8; EXPRESSED IN BONE MARROW, SIGNAL = 1.3; EXPRESSED IN ADULT LIVER, SIGNAL = 1.2; EXPRESSED IN HEART, SIGNAL = 1.3; EXPRESSED IN BRAIN, SIGNAL = 1.3; EST_HUMAN HIT: BE891286.1, EVALUE 0.00e+00; NT HIT: L16848.1, EVALUE 6.70e-01; SWISSPROT HIT: P08929, EVALUE 4.10e-01
gagactcatcctgggcggacatgatacccgctttgtggatggcaggcacaggccccttctggcaagatccactcagatcaactacccgggcttttttagccaatactgaaccctcccgctgctgggcaggcaggattggtatggcctcactgctgactccacattccagctccatgccaggctcctccaactccatgcttgccaggactttatcaaattcgtcttgttcaggcccctcaaagccaccaacttgctgctgttggctctcaaaggtgag

SEQ ID NO: 22981 - DNA, 122 bp, Homo sapiens
  MAP TO AC004148.1; EXPRESSED IN PLACENTA, SIGNAL = 3.8; EXPRESSED IN LUNG, SIGNAL = 3.6; EXPRESSED IN HELA, SIGNAL = 3.7; EXPRESSED IN FETAL LIVER, SIGNAL = 3.7; EXPRESSED IN ADULT LIVER, SIGNAL =   4; EXPRESSED IN HEART, SIGNAL = 4.4; EXPRESSED IN BRAIN, SIGNAL = 3.9; EXPRESSED IN BONE MARROW, SIGNAL = 3.4; NT HIT: gi11426985, EVALUE 9.00e-63; SWISSPROT HIT: P08328, EVALUE 1.40e+00; EST_HUMAN HIT: AA827198.1, EVALUE 1.00e-62
ctccgctgaatctcctcctttgccaagtcctgtttgagaatgtactgctctctgaacacctgggtggctctgctgaggagctgaaggcattcttcaggaggaggggctatgtccttttcaga

SEQ ID NO: 22982 - DNA, 166 bp, Homo sapiens
  MAP TO AC005670.1; EXPRESSED IN PLACENTA, SIGNAL = 3.7; EXPRESSED IN LUNG, SIGNAL = 3.8; EXPRESSED IN HELA, SIGNAL =   4; EXPRESSED IN HEART, SIGNAL = 4.1; EXPRESSED IN FETAL LIVER, SIGNAL =   4; EXPRESSED IN ADULT LIVER, SIGNAL = 3.9; EXPRESSED IN BRAIN, SIGNAL = 4.4; EXPRESSED IN BONE MARROW, SIGNAL = 3.9; NT HIT: gi11426036, EVALUE 2.00e-86; SWISSPROT HIT: O35166, EVALUE 1.00e-23; EST_HUMAN HIT: AA488981.1, EVALUE 1.00e-88
gggactcagaagaagatccttgacattgccaacatgctgggcttgtccaacacagtgatgcggctcatcgagaagcgggctttccaggacaagtactttatgataggtgggatgctgctgacctgtgtggtcatgttcctcgtggtgcagtacctgacatgagcca

SEQ ID NO: 22983 - DNA, 160 bp, Homo sapiens
  MAP TO AC005865.1; EXPRESSED IN LUNG, SIGNAL =  14; EXPRESSED IN FETAL LIVER, SIGNAL =  14; EXPRESSED IN BONE MARROW, SIGNAL =  13; EXPRESSED IN PLACENTA, SIGNAL =  13; EXPRESSED IN HELA, SIGNAL =  10; EXPRESSED IN HEART, SIGNAL =  13; EXPRESSED IN BRAIN, SIGNAL =  16; EXPRESSED IN ADULT LIVER, SIGNAL =  15; NT HIT: AP001508.1, EVALUE 9.30e-02; SWISSPROT HIT: P30668, EVALUE 4.00e+00; EST_HUMAN HIT: AI251980.1, EVALUE 1.00e-04
acagccaagaggggtagaggtgccccgaaagccgtggggagtcccatgccattcagcatctcaagaagcggtgcagcagagaaaccagctacgaggtccctcacctgtttttcctcaaatggcaagcccaggaagggggcagaggccacgttcagtgggg

SEQ ID NO: 22984 - DNA, 259 bp, Homo sapiens
  MAP TO AC004491.1; EXPRESSED IN LUNG, SIGNAL = 2.4; EXPRESSED IN BRAIN, SIGNAL = 2.3; EXPRESSED IN BONE MARROW, SIGNAL = 2.1; EXPRESSED IN PLACENTA, SIGNAL = 2.4; EXPRESSED IN HELA, SIGNAL = 2.2; EXPRESSED IN HEART, SIGNAL =   2; EXPRESSED IN FETAL LIVER, SIGNAL = 2.2; EXPRESSED IN ADULT LIVER, SIGNAL = 2.2; SWISSPROT HIT: P51617, EVALUE 1.10e+00; NT HIT: gi11435244, EVALUE 1.60e-01; EST_HUMAN HIT: BF382349.1, EVALUE 6.00e-02
agctctgcctgagcttgccaggactgtcccagacccttctcctgcagctctgggggggctcacaagagctctcaggcactgtcatcatcgtgccccagttccccaagcaacacttcatcatagtggctgtacccatgaggcagagcccactctatggtttggggcccattgccgagtctgtggcaaggcttcttgggggctcattctgggttctaaggcaacctgtaggtcccccagggggccagggaatgtcagatac

SEQ ID NO: 22985 - DNA, 145 bp, Homo sapiens
  MAP TO AC005809.1; EXPRESSED IN LUNG, SIGNAL = 1.2; EXPRESSED IN BONE MARROW, SIGNAL = 1.5; EXPRESSED IN PLACENTA, SIGNAL =   1; EXPRESSED IN HEART, SIGNAL = 1.4; EXPRESSED IN FETAL LIVER, SIGNAL = 1.3; EXPRESSED IN BRAIN, SIGNAL = 1.4; EXPRESSED IN ADULT LIVER, SIGNAL = 1.2; SWISSPROT HIT: O33010, EVALUE 4.00e+00; NT HIT: L44140.1, EVALUE 5.10e+00; EST_HUMAN HIT: BE910472.1, EVALUE 7.60e+00
gagggccaggagaagccccagagcagccgcaggcacctcctccccacagtggctgtggagggccaggagaaccctgaggagccccgggtgcccgccgcccacagcgatgccctgacccctggcttcttgaggaccaccttcccat

SEQ ID NO: 22986 - DNA, 248 bp, Homo sapiens
  MAP TO AC004552.1; EXPRESSED IN LUNG, SIGNAL =   8; EXPRESSED IN PLACENTA, SIGNAL =   4; EXPRESSED IN HEART, SIGNAL = 7.6; EXPRESSED IN FETAL LIVER, SIGNAL =  14; EXPRESSED IN BRAIN, SIGNAL = 3.9; EXPRESSED IN BONE MARROW, SIGNAL = 6.8; EXPRESSED IN ADULT LIVER, SIGNAL =  17; EXPRESSED IN HELA, SIGNAL = 9.5; SWISSPROT HIT: P02383, EVALUE 9.00e-25; EST_HUMAN HIT: BF244299.1, EVALUE 1.00e-123; NT HIT: gi11420850, EVALUE 1.00e-129
gcttcacatacagcttgggaagcacataggcatcgaagacgctcgcttcagaaatgtccctgattgctgcggcctccactatgtttcgaatgacgaatttcttaatggccttgtccttgggcacgcatcgggcacatttagtgcagcgaataggctgcacgtggccgcggccctttttggcacgaccattgttccttcttttctttgtcatcttggaggcacagaccggagagagcaaacctcttttc

SEQ ID NO: 22987 - DNA, 120 bp, Homo sapiens
  MAP TO AC005746.1; EXPRESSED IN LUNG, SIGNAL = 1.4; EXPRESSED IN FETAL LIVER, SIGNAL = 1.5; EXPRESSED IN BRAIN, SIGNAL = 1.4; EXPRESSED IN BONE MARROW, SIGNAL = 1.6; EXPRESSED IN ADULT LIVER, SIGNAL = 1.4; EXPRESSED IN PLACENTA, SIGNAL = 1.4; EXPRESSED IN HEART, SIGNAL = 1.4; NT HIT: gi8923130, EVALUE 1.00e-61; EST_HUMAN HIT: BF026953.1, EVALUE 2.00e-61; SWISSPROT HIT: Q62523, EVALUE 6.20e-01
cggcaagtcgctcccggaggccctcctccgtgtgctccatggaggacatgtgccgcagcccgaagccctcaggccagctcccgcacacctccagcagggtcacgctcctgtcaaaggtac

SEQ ID NO: 22988 - DNA, 75 bp, Homo sapiens
  MAP TO AC004159.1; EXPRESSED IN LUNG, SIGNAL = 5.2; EXPRESSED IN HELA, SIGNAL = 4.6; EXPRESSED IN BRAIN, SIGNAL = 6.6; EXPRESSED IN BONE MARROW, SIGNAL = 4.8; EXPRESSED IN ADULT LIVER, SIGNAL = 4.7; EXPRESSED IN PLACENTA, SIGNAL = 4.7; EXPRESSED IN HEART, SIGNAL = 4.4; EXPRESSED IN FETAL LIVER, SIGNAL = 4.6; EST_HUMAN HIT: AI223104.1, EVALUE 1.00e-21; SWISSPROT HIT: Q29195, EVALUE 1.70e-01; NT HIT: AF143815.1, EVALUE 3.00e-18
atacggacagcctccagggcttcagaagacagcagctcatattcatcagacaccatgtggccacagagtgggaac

SEQ ID NO: 22989 - DNA, 175 bp, Homo sapiens
  MAP TO AC004592.1; EXPRESSED IN LUNG, SIGNAL = 1.8; EXPRESSED IN BRAIN, SIGNAL = 1.6; EXPRESSED IN BONE MARROW, SIGNAL = 1.5; EXPRESSED IN ADULT LIVER, SIGNAL = 1.5; EXPRESSED IN PLACENTA, SIGNAL = 1.6; EXPRESSED IN HEART, SIGNAL = 1.6; EXPRESSED IN FETAL LIVER, SIGNAL = 1.8; EST_HUMAN HIT: AW850306.1, EVALUE 6.00e-01; NT HIT: AL445065.1, EVALUE 1.60e+00; SWISSPROT HIT: P47259, EVALUE 8.90e-02
gaaggcttgggatagcaacctcactacagtcttttttgatgccagaaaaccacggaagggcctcctcaagttttctgtgcccctgaacagggccaagaagaagctgagagggctagtaaacccagagaaatctaacagagaagaaagaggattcaccgtgaccttagtggacaag

SEQ ID NO: 22990 - DNA, 243 bp, Homo sapiens
  MAP TO AC005751.1; EXPRESSED IN LUNG, SIGNAL = 4.1; EXPRESSED IN FETAL LIVER, SIGNAL = 5.5; EXPRESSED IN BONE MARROW, SIGNAL = 4.1; EXPRESSED IN PLACENTA, SIGNAL = 3.7; EXPRESSED IN HELA, SIGNAL = 4.1; EXPRESSED IN HEART, SIGNAL = 4.1; EXPRESSED IN BRAIN, SIGNAL = 3.5; EXPRESSED IN ADULT LIVER, SIGNAL = 4.6; EST_HUMAN HIT: AW975013.1, EVALUE 5.60e-02; SWISSPROT HIT: Q02817, EVALUE 4.00e-03; NT HIT: M59305.1, EVALUE 2.30e+00
acctccatctctgctggtgctctccattgtccaaacccaccaggaagcacctccgtctctgctggtgctctccattgtccaaactcaccaggaagcacctccgtctctgctggtgctctccattgtccaaacccaccaggaagcacctccgtctctgctggtgctctccattgtccaaacccaccaggaagcacctccgtctctgctggtgctctccattgtccaaacctaccaggaagccca

SEQ ID NO: 22991 - DNA, 113 bp, Homo sapiens
  MAP TO AC004125.1; EXPRESSED IN PLACENTA, SIGNAL = 4.4; EXPRESSED IN LUNG, SIGNAL = 4.5; EXPRESSED IN HEART, SIGNAL = 4.6; EXPRESSED IN BRAIN, SIGNAL = 4.7; EXPRESSED IN BONE MARROW, SIGNAL = 4.1; EXPRESSED IN ADULT LIVER, SIGNAL = 4.6; EXPRESSED IN HELA, SIGNAL = 4.7; EXPRESSED IN FETAL LIVER, SIGNAL = 4.9; NT HIT: AJ302158.1, EVALUE 9.80e-01; SWISSPROT HIT: P41739, EVALUE 2.40e+00
tcacgggactgtggcgatactaccgttatctctgaagacactcctgaaccattctctggagaggaaggtctgggcttgctgggatgtgtgctcatcctgcaggtatttcagga

SEQ ID NO: 22992 - DNA, 87 bp, Homo sapiens
  MAP TO AC004056.1; EXPRESSED IN LUNG, SIGNAL = 1.5; EXPRESSED IN HELA, SIGNAL = 1.7; EXPRESSED IN BRAIN, SIGNAL = 1.6; EXPRESSED IN BONE MARROW, SIGNAL = 1.6; EXPRESSED IN ADULT LIVER, SIGNAL = 2.3; EXPRESSED IN PLACENTA, SIGNAL = 1.6; EXPRESSED IN HEART, SIGNAL = 1.6; EXPRESSED IN FETAL LIVER, SIGNAL = 1.6; EST_HUMAN HIT: AW502248.1, EVALUE 7.00e-42; SWISSPROT HIT: P11275, EVALUE 3.00e-11; NT HIT: AF071569.1, EVALUE 5.00e-42
ctccagccttgatctgctgatagagtctgtgttggtcttcatcccagaagggtggataccccacaagtagaatatagagaatgacac

SEQ ID NO: 22993 - DNA, 278 bp, Homo sapiens
  MAP TO AC004506.1; EXPRESSED IN LUNG, SIGNAL =  11; EXPRESSED IN HELA, SIGNAL = 8.6; EXPRESSED IN BRAIN, SIGNAL = 5.7; EXPRESSED IN BONE MARROW, SIGNAL = 7.2; EXPRESSED IN ADULT LIVER, SIGNAL =  19; EXPRESSED IN PLACENTA, SIGNAL =  13; EXPRESSED IN HEART, SIGNAL =   8; EXPRESSED IN FETAL LIVER, SIGNAL = 7.2; NT HIT: L05092.1, EVALUE 1.00e-116; EST_HUMAN HIT: AV716314.1, EVALUE 1.00e-116; SWISSPROT HIT: P39026, EVALUE 2.00e-42
tgtccactgcacagttcaaggatccaaggcagaagaaatcctggagaaggatctaaaggtgcagaagtatgagttaagaaaaaataacttctcagatactagaaactttggttttgggatccaggaacacatcgatttgggtatcatatatgacccaagcattggtatctacggcctggacttctctgtggtgctgggtaggccaggtttcagcatcacagacaagaagcacaggacaggctgcactggggccaaacacagactcagcaaagaggaga

SEQ ID NO: 22994 - DNA, 119 bp, Homo sapiens
  MAP TO AC005827.3; EXPRESSED IN LUNG, SIGNAL = 1.9; EXPRESSED IN HELA, SIGNAL = 2.2; EXPRESSED IN BONE MARROW, SIGNAL = 1.9; EXPRESSED IN ADULT LIVER, SIGNAL = 1.9; EXPRESSED IN PLACENTA, SIGNAL = 1.9; EXPRESSED IN HEART, SIGNAL = 2.3; EXPRESSED IN FETAL LIVER, SIGNAL =   2; EXPRESSED IN BRAIN, SIGNAL = 2.4; NT HIT: gi8400716, EVALUE 1.70e-02; SWISSPROT HIT: Q9QYC0, EVALUE 6.20e-01; EST_HUMAN HIT: BE044417.1, EVALUE 3.90e-01
atggtggtactggcagaagcattgccagcaaagaaggcagacccaagtccatattatgcatctattccaggaagaaaaaaaattgctgccccctcaatgatggaaggagtccaatgtaa

SEQ ID NO: 22995 - DNA, 92 bp, Homo sapiens
  MAP TO AC005771.1; EXPRESSED IN BRAIN, SIGNAL = 1.4; EXPRESSED IN BONE MARROW, SIGNAL = 1.4; EXPRESSED IN ADULT LIVER, SIGNAL = 1.3; EXPRESSED IN HEART, SIGNAL = 1.5; EXPRESSED IN PLACENTA, SIGNAL = 1.4; EXPRESSED IN LUNG, SIGNAL = 1.3; EXPRESSED IN FETAL LIVER, SIGNAL = 1.5; NT HIT: AJ011419.1, EVALUE 3.00e-03; EST_HUMAN HIT: BE007906.1, EVALUE 1.10e+00
tgtacttttccaataccagccatacctccactgggttgtctcctagacctacaagtggctgttttacattttgttcccagaagactctggaa

SEQ ID NO: 22996 - DNA, 165 bp, Homo sapiens
  MAP TO AC004169.3; EXPRESSED IN PLACENTA, SIGNAL = 1.1; EXPRESSED IN LUNG, SIGNAL = 1.5; EXPRESSED IN FETAL LIVER, SIGNAL = 1.1; EXPRESSED IN BRAIN, SIGNAL = 1.1; EXPRESSED IN BONE MARROW, SIGNAL = 1.1; EXPRESSED IN ADULT LIVER, SIGNAL = 1.3; EXPRESSED IN HEART, SIGNAL = 1.9; SWISSPROT HIT: P54817, EVALUE 1.30e+00; NT HIT: AB037750.1, EVALUE 4.00e-13; EST_HUMAN HIT: T87470.1, EVALUE 2.20e+00
ggcgaggaccttgtcctcctccttagggtggaaaatcagagtttccacgaagaagggaatgggctgcttctgaaaggtggcgccttcgtctgcgctgaggaataggctctggtcccggtcactgagtgaggagctgacaaggatgacctgaaacacaaagcgggt

SEQ ID NO: 22997 - DNA, 200 bp, Homo sapiens
  MAP TO AC005877.2; EXPRESSED IN PLACENTA, SIGNAL = 1.4; EXPRESSED IN LUNG, SIGNAL = 1.4; EXPRESSED IN FETAL LIVER, SIGNAL = 1.8; EXPRESSED IN BONE MARROW, SIGNAL = 1.9; EXPRESSED IN BRAIN, SIGNAL = 1.8; EXPRESSED IN ADULT LIVER, SIGNAL = 1.7; EXPRESSED IN HEART, SIGNAL = 2.2; SWISSPROT HIT: P29149, EVALUE 1.70e+00; NT HIT: M17197.1, EVALUE 8.00e-03; EST_HUMAN HIT: BF432530.1, EVALUE 1.10e-02
cagcacctgcagatttggagtctgaagagaaagggtcagagacagaaacaaagccaccctggcctggcctgctggctgactgcagggaaagcccacatacacttgaggcagaagggaatggcaatgggcatgaaaatactgcccatacccaaactgtgttccctgaggccatccgatacacccagggtgcttcagggcag

SEQ ID NO: 22998 - DNA, 126 bp, Homo sapiens
  MAP TO AC004061.1; EXPRESSED IN BONE MARROW, SIGNAL = 1.8; EXPRESSED IN PLACENTA, SIGNAL = 1.7; EXPRESSED IN LUNG, SIGNAL = 1.4; EXPRESSED IN HELA, SIGNAL = 1.9; EXPRESSED IN HEART, SIGNAL = 1.8; EXPRESSED IN FETAL LIVER, SIGNAL = 2.1; EXPRESSED IN BRAIN, SIGNAL = 1.8; EXPRESSED IN ADULT LIVER, SIGNAL = 1.8; EST_HUMAN HIT: BE350127.1, EVALUE 4.00e-35; SWISSPROT HIT: P03949, EVALUE 7.00e+00; NT HIT: AF223391.1, EVALUE 3.00e-29
attccagaagaagacattgttaccataggagatgacagctctatgtgtgttattgcccctgaagaccttctagtgggacaggatatggaggggaaagacagtgacattggtgatcctgaccctgtg

SEQ ID NO: 22999 - DNA, 128 bp, Homo sapiens
  MAP TO AC004519.1; EXPRESSED IN LUNG, SIGNAL = 1.6; EXPRESSED IN FETAL LIVER, SIGNAL = 1.5; EXPRESSED IN BONE MARROW, SIGNAL = 1.7; EXPRESSED IN PLACENTA, SIGNAL = 1.5; EXPRESSED IN HEART, SIGNAL = 1.7; EXPRESSED IN BRAIN, SIGNAL = 1.5; EXPRESSED IN ADULT LIVER, SIGNAL = 1.4; NT HIT: gi5834897, EVALUE 7.20e-02; EST_HUMAN HIT: R13464.1, EVALUE 4.20e-01
atgtcaatctcagaaagaggtgctttattaatttccatatttgtgtcttctatcaggctatgatctcctggagaatgatgacaatattctctgaatcctgttttatcaccagcatcttgcataattcc

SEQ ID NO: 23000 - DNA, 209 bp, Homo sapiens
  MAP TO AC005939.1; EXPRESSED IN LUNG, SIGNAL = 4.9; EXPRESSED IN PLACENTA, SIGNAL = 4.7; EXPRESSED IN HEART, SIGNAL = 4.5; EXPRESSED IN FETAL LIVER, SIGNAL = 4.4; EXPRESSED IN BRAIN, SIGNAL = 5.2; EXPRESSED IN BONE MARROW, SIGNAL = 5.1; EXPRESSED IN HELA, SIGNAL = 4.5; EXPRESSED IN ADULT LIVER, SIGNAL = 4.8; SWISSPROT HIT: O14514, EVALUE 2.90e+00
ctggagttctccaccaccgttgcctgcaaacctgccacctccagtggcaggaacattgcatgcccacacacactacccagaggctcaaggaccagcttctcagggcctgttgccacaccgccagtgcacatgcacaccacccaggggcacaagaagttggatgcctgggcattccattgcaccaccagcatgtgcatgaaccaaacagt

SEQ ID NO: 23001 - DNA, 188 bp, Homo sapiens
  MAP TO AC004064.1; EXPRESSED IN PLACENTA, SIGNAL =   2; EXPRESSED IN HELA, SIGNAL = 2.2; EXPRESSED IN BRAIN, SIGNAL =   2; EXPRESSED IN BONE MARROW, SIGNAL = 2.1; EXPRESSED IN ADULT LIVER, SIGNAL =   2; EXPRESSED IN HEART, SIGNAL = 2.3; EXPRESSED IN LUNG, SIGNAL = 1.5; EXPRESSED IN FETAL LIVER, SIGNAL = 2.6; EST_HUMAN HIT: AI921808.1, EVALUE 6.50e-01; SWISSPROT HIT: P02671, EVALUE 2.00e-10; NT HIT: AF113708.1, EVALUE 5.00e-90
ggcttcggagacccagctggggagcactggctgggcaatgaagtggtgcaccagctcaccagaagggcagcctactctctgcgtgtggagctgcaagactgggaaggccacgaggcctatgcccagtacgaacatttccacctgggcagtgagaaccagctatacaggtgggttcggggcccaggccg

SEQ ID NO: 23002 - DNA, 75 bp, Homo sapiens
  MAP TO AC004458.1; EXPRESSED IN PLACENTA, SIGNAL = 4.7; EXPRESSED IN HELA, SIGNAL = 2.4; EXPRESSED IN BRAIN, SIGNAL = 2.1; EXPRESSED IN BONE MARROW, SIGNAL = 1.9; EXPRESSED IN ADULT LIVER, SIGNAL = 2.2; EXPRESSED IN HEART, SIGNAL = 1.8; EXPRESSED IN LUNG, SIGNAL = 2.4; EXPRESSED IN FETAL LIVER, SIGNAL = 1.9; NT HIT: AF210842.1, EVALUE 1.50e-01; EST_HUMAN HIT: N77803.1, EVALUE 8.70e-01
ccatctttttggtcattcctgacttcatcctgcagcttcactttcctgataaagtttctagttagttcaattaag

SEQ ID NO: 23003 - DNA, 129 bp, Homo sapiens
  MAP TO AC005702.1; EXPRESSED IN BONE MARROW, SIGNAL = 2.5; EXPRESSED IN PLACENTA, SIGNAL = 2.3; EXPRESSED IN LUNG, SIGNAL =   2; EXPRESSED IN HELA, SIGNAL = 2.4; EXPRESSED IN HEART, SIGNAL = 2.3; EXPRESSED IN FETAL LIVER, SIGNAL = 2.4; EXPRESSED IN BRAIN, SIGNAL = 2.5; EXPRESSED IN ADULT LIVER, SIGNAL =   2; EST_HUMAN HIT: BE298535.1, EVALUE 6.00e-65; NT HIT: gi11545780, EVALUE 4.00e-65; SWISSPROT HIT: P47107, EVALUE 5.40e+00
gatgtcatatttgttgcagacgcagcaaatgcaatattgatgtcacttgaagacaagtctctgaatgttcgagccaaagcagcctggtccctgggcaacctgacagacactctgattgtcaacatgtag

SEQ ID NO: 23004 - DNA, 292 bp, Homo sapiens
  MAP TO AC004466.1; EXPRESSED IN LUNG, SIGNAL = 4.3; EXPRESSED IN FETAL LIVER, SIGNAL = 4.7; EXPRESSED IN BRAIN, SIGNAL =   5; EXPRESSED IN BONE MARROW, SIGNAL = 4.4; EXPRESSED IN PLACENTA, SIGNAL = 4.1; EXPRESSED IN HELA, SIGNAL = 4.4; EXPRESSED IN HEART, SIGNAL = 3.6; EXPRESSED IN ADULT LIVER, SIGNAL = 4.3; NT HIT: gi11436699, EVALUE 0.00e+00; EST_HUMAN HIT: AW505439.1, EVALUE 9.00e-63; SWISSPROT HIT: P11473, EVALUE 8.00e-45
atcgtcctggggtgcaggacgccgcgctgattgaggccatccaggaccgcctgtccaacacactgcagacgtacatccgctgccgccacccgcccccgggcagccacctgctctatgccaagatgatccagaagctagccgacctgcgcagcctcaatgaggagcactccaagcagtaccgctgcctctccttccagcctgagtgcagcatgaagctaacgccccttgtgctcgaagtgtttggcaatgagatctcctgactaggacagcctgtggcggtgcctgggtgggg

SEQ ID NO: 23005 - DNA, 100 bp, Homo sapiens
  MAP TO AC005839.1; EXPRESSED IN LUNG, SIGNAL = 2.9; EXPRESSED IN BRAIN, SIGNAL = 3.5; EXPRESSED IN BONE MARROW, SIGNAL = 3.3; EXPRESSED IN PLACENTA, SIGNAL = 2.8; EXPRESSED IN HELA, SIGNAL = 3.2; EXPRESSED IN HEART, SIGNAL = 2.9; EXPRESSED IN FETAL LIVER, SIGNAL = 3.3; EXPRESSED IN ADULT LIVER, SIGNAL = 2.8; SWISSPROT HIT: P15531, EVALUE 4.00e-14; NT HIT: X75598.1, EVALUE 1.00e-49; EST_HUMAN HIT: BE398110.1, EVALUE 1.00e-49
tgattctgtggagagtgcagagaaggagatcggcttgtggtttcaccctgaggaactggtagattacacgagctgtgctcagaactggatctatgaatga

SEQ ID NO: 23006 - DNA, 209 bp, Homo sapiens
  MAP TO AC004134.1; EXPRESSED IN HELA, SIGNAL = 1.8; EXPRESSED IN FETAL LIVER, SIGNAL = 2.2; EXPRESSED IN BRAIN, SIGNAL =   2; EXPRESSED IN BONE MARROW, SIGNAL = 2.1; EXPRESSED IN ADULT LIVER, SIGNAL = 2.1; EXPRESSED IN PLACENTA, SIGNAL =   2; EXPRESSED IN HEART, SIGNAL = 2.4; EXPRESSED IN LUNG, SIGNAL = 2.2; SWISSPROT HIT: P21851, EVALUE 1.00e-31; EST_HUMAN HIT: AA332494.1, EVALUE 2.00e-97; NT HIT: gi11425572, EVALUE 1.00e-104
ctctgagcctcccgatcatctttagggttgtaattagacaggcagtccaggatgaaaatctggccccattcagtgcattcattcagggctgtcagcagcttattaatgttctgtgggttcagatcaagtaagttgctgtttgggtgagactcactgatttcagataatgccgctacggcattagccaccacctggaaaagaagggggta

SEQ ID NO: 23007 - DNA, 191 bp, Homo sapiens
  MAP TO AC005877.2; EXPRESSED IN PLACENTA, SIGNAL = 1.9; EXPRESSED IN LUNG, SIGNAL = 1.4; EXPRESSED IN FETAL LIVER, SIGNAL = 1.3; EXPRESSED IN BRAIN, SIGNAL = 1.6; EXPRESSED IN BONE MARROW, SIGNAL = 2.6; EXPRESSED IN ADULT LIVER, SIGNAL = 1.4; EXPRESSED IN HEART, SIGNAL = 1.6; SWISSPROT HIT: P37275, EVALUE 7.00e-33; NT HIT: D15050.1, EVALUE 1.00e-103; EST_HUMAN HIT: AW965776.1, EVALUE 1.00e-103
tgtcatcctcccagcagttcttagcattcccttctctttcactgctcctccctggtaacactgtctggtctgttggcaggtcatcctctggtacaccttcacagtcagctgcatctgtaacactttcttcttccacaatatgcagtttgtcttcatcatctgaatctgaatttgtttctaccacagtatta

SEQ ID NO: 23008 - DNA, 160 bp, Homo sapiens
  MAP TO AC004470.1; EXPRESSED IN PLACENTA, SIGNAL = 2.1; EXPRESSED IN LUNG, SIGNAL = 1.9; EXPRESSED IN FETAL LIVER, SIGNAL = 2.8; EXPRESSED IN BONE MARROW, SIGNAL = 1.9; EXPRESSED IN HELA, SIGNAL = 2.5; EXPRESSED IN BRAIN, SIGNAL = 2.4; EXPRESSED IN ADULT LIVER, SIGNAL = 2.1; EXPRESSED IN HEART, SIGNAL = 1.9; NT HIT: AL163278.2, EVALUE 2.00e-03; SWISSPROT HIT: P08548, EVALUE 3.00e-06; EST_HUMAN HIT: AA506486.1, EVALUE 9.00e-06
cttcacccctacgacagcatcatacacatttttttcagtgcccacagaacacatactaggatatatcatgtcccaagccatgaaaacaacctcaacaaattcaaaagaattgaaatcatacagaacgtgttctccaacaatgaatgaaactggaaatcaa

SEQ ID NO: 23009 - DNA, 182 bp, Homo sapiens
  MAP TO AC005969.4; EXPRESSED IN PLACENTA, SIGNAL = 2.6; EXPRESSED IN LUNG, SIGNAL = 2.6; EXPRESSED IN HEART, SIGNAL = 2.5; EXPRESSED IN FETAL LIVER, SIGNAL = 2.4; EXPRESSED IN BONE MARROW, SIGNAL = 2.5; EXPRESSED IN ADULT LIVER, SIGNAL = 2.4; EXPRESSED IN HELA, SIGNAL = 2.4; EXPRESSED IN BRAIN, SIGNAL = 2.6; EST_HUMAN HIT: AU121712.1, EVALUE 2.00e-04; SWISSPROT HIT: P50874, EVALUE 1.30e+00
acaatgaaaagccgtctttaacaaaagaaaaaacctgtcaatttagaattcttgatcaagtgggacaatctcttaaaaatgaagatagtgaagtcttttcagaaaaagaaaagttgaaagaactcattgctagcaaacgtgcactactaatattaaagaaagttcttcaggtagaaggaaaa

SEQ ID NO: 23010 - DNA, 197 bp, Homo sapiens
  MAP TO AC005881.2; EXPRESSED IN LUNG, SIGNAL = 1.2; EXPRESSED IN BRAIN, SIGNAL = 1.4; EXPRESSED IN BONE MARROW, SIGNAL = 1.3; EXPRESSED IN PLACENTA, SIGNAL = 1.2; EXPRESSED IN HEART, SIGNAL = 1.5; EXPRESSED IN FETAL LIVER, SIGNAL = 1.3; EXPRESSED IN ADULT LIVER, SIGNAL = 1.2; EST_HUMAN HIT: AA054316.1, EVALUE 2.70e+00; SWISSPROT HIT: O95544, EVALUE 2.90e+00; NT HIT: M86524.1, EVALUE 3.00e-02
tccttggtgtggggcaggaagcaggctgcagctgttccatctttcgctgggtcttccctcagcttcactgactcctcatctgactgtgtatcctcaaccagatgtgtgtttatctctgtgacaaagagcaccgggttctcctgcaggatacccacatcatgaaggttggagacagagagagcctgagatgggttcca

SEQ ID NO: 23011 - DNA, 124 bp, Homo sapiens
  MAP TO AC004149.1; EXPRESSED IN PLACENTA, SIGNAL = 2.5; EXPRESSED IN LUNG, SIGNAL =   3; EXPRESSED IN FETAL LIVER, SIGNAL = 2.5; EXPRESSED IN HELA, SIGNAL = 2.4; EXPRESSED IN BRAIN, SIGNAL = 2.3; EXPRESSED IN BONE MARROW, SIGNAL = 2.9; EXPRESSED IN ADULT LIVER, SIGNAL = 2.5; EXPRESSED IN HEART, SIGNAL = 2.6; NT HIT: gi11525879, EVALUE 6.00e-64; EST_HUMAN HIT: BE898972.1, EVALUE 9.00e-64; SWISSPROT HIT: P50221, EVALUE 1.00e-17
gcctggatgatttcttctctgtctcattggcagtgctcccaagcaccccgtagtcatcgcctgggcctcctgtggtgtccaccaggcccaggctgctggtccccatttccttggaaccccctgc

SEQ ID NO: 23012 - DNA, 176 bp, Homo sapiens
  MAP TO AC005899.1; EXPRESSED IN HELA, SIGNAL = 1.7; EXPRESSED IN FETAL LIVER, SIGNAL = 1.4; EXPRESSED IN BRAIN, SIGNAL = 1.8; EXPRESSED IN BONE MARROW, SIGNAL = 1.6; EXPRESSED IN ADULT LIVER, SIGNAL = 1.6; EXPRESSED IN PLACENTA, SIGNAL = 1.4; EXPRESSED IN HEART, SIGNAL = 1.8; EXPRESSED IN LUNG, SIGNAL = 1.6; SWISSPROT HIT: P34481, EVALUE 4.00e-06; EST_HUMAN HIT: AU120629.1, EVALUE 1.00e-94; NT HIT: gi11426529, EVALUE 8.00e-95
gttgaaaaagatggacgacaaagctcttttggtggaagtacagcttttagaaagcaaaacataccatgccctgagcaacctgccgaaagcccgagctgccttaacttctgctcgaaccacagcaaatgccatctactgcccccctaaattgcaggccaccttggacatgcagtcgg

SEQ ID NO: 23013 - DNA, 204 bp, Homo sapiens
  MAP TO AC004503.1; EXPRESSED IN PLACENTA, SIGNAL = 1.7; EXPRESSED IN LUNG, SIGNAL = 1.3; EXPRESSED IN FETAL LIVER, SIGNAL = 2.3; EXPRESSED IN ADULT LIVER, SIGNAL = 2.5; EXPRESSED IN HELA, SIGNAL = 1.7; EXPRESSED IN HEART, SIGNAL = 1.9; EXPRESSED IN BRAIN, SIGNAL = 1.4; EXPRESSED IN BONE MARROW, SIGNAL = 1.3; NT HIT: gi11416585, EVALUE 4.00e-88; EST_HUMAN HIT: BF526886.1, EVALUE 5.00e-88; SWISSPROT HIT: Q15582, EVALUE 5.00e-27
gaagtgctggactccctggtcagcaatgtcaacattgagctgctcaatgccctccgctaccatatggtgggcaggcgagtcctgactgatgagctgaaacacggcatgaccctcacctctatgtaccagaattccaacatccagatccaccactatcctaatggggtaggggatccccagccatactgcatggcccttggtgca

SEQ ID NO: 23014 - DNA, 122 bp, Homo sapiens
  MAP TO AC005906.1; EXPRESSED IN LUNG, SIGNAL = 2.6; EXPRESSED IN FETAL LIVER, SIGNAL = 2.3; EXPRESSED IN BONE MARROW, SIGNAL = 2.5; EXPRESSED IN PLACENTA, SIGNAL = 2.4; EXPRESSED IN HELA, SIGNAL = 2.6; EXPRESSED IN HEART, SIGNAL = 2.6; EXPRESSED IN BRAIN, SIGNAL = 2.7; EXPRESSED IN ADULT LIVER, SIGNAL = 2.2; EST_HUMAN HIT: BE697267.1, EVALUE 1.60e+00; SWISSPROT HIT: P22306, EVALUE 7.10e+00
ctatacaggcaggtgtagcatgcccacatcagtcagtgagtttcctgagggtagaatctgtctcatttctatccccaccacactacctaggattgacgggcttgttctgagacttgagatcc

SEQ ID NO: 23015 - DNA, 109 bp, Homo sapiens
  MAP TO AC004514.1; EXPRESSED IN PLACENTA, SIGNAL = 3.4; EXPRESSED IN HEART, SIGNAL = 3.8; EXPRESSED IN FETAL LIVER, SIGNAL = 3.5; EXPRESSED IN BRAIN, SIGNAL = 3.6; EXPRESSED IN BONE MARROW, SIGNAL = 3.4; EXPRESSED IN ADULT LIVER, SIGNAL = 3.2; EXPRESSED IN HELA, SIGNAL = 3.6; EXPRESSED IN LUNG, SIGNAL = 3.2; EST_HUMAN HIT: AV699721.1, EVALUE 2.20e-02
aagctcgtgacacagttatttcttatgaaaactacaattttaaaagagaaaaaagaaagaatagatcttggggatttaggaattcacagttgtaaaggagctgtttcgg

SEQ ID NO: 23016 - DNA, 136 bp, Homo sapiens
  MAP TO AC005912.1; EXPRESSED IN PLACENTA, SIGNAL =  10; EXPRESSED IN LUNG, SIGNAL =  11; EXPRESSED IN FETAL LIVER, SIGNAL =  10; EXPRESSED IN HELA, SIGNAL =  11; EXPRESSED IN BRAIN, SIGNAL =  12; EXPRESSED IN BONE MARROW, SIGNAL =  11; EXPRESSED IN ADULT LIVER, SIGNAL =  10; EXPRESSED IN HEART, SIGNAL =  10; SWISSPROT HIT: P80492, EVALUE 2.40e+00; EST_HUMAN HIT: BE271437.1, EVALUE 2.90e-02; NT HIT: AF111103.1, EVALUE 7.70e-02
ccgaaagccaagctctgcatacctctggcgctccgtcacaggaccaggaaagggttctggtgtcatggacactgcaccctgagccagccaacctgagatgggtgatatctgtggctgctgagaagctggcctcagc

SEQ ID NO: 23017 - DNA, 174 bp, Homo sapiens
  MAP TO AC004222.1; EXPRESSED IN PLACENTA, SIGNAL = 3.2; EXPRESSED IN LUNG, SIGNAL = 6.3; EXPRESSED IN HEART, SIGNAL = 4.1; EXPRESSED IN FETAL LIVER, SIGNAL = 5.6; EXPRESSED IN BONE MARROW, SIGNAL = 3.1; EXPRESSED IN ADULT LIVER, SIGNAL = 3.5; EXPRESSED IN HELA, SIGNAL = 3.7; EXPRESSED IN BRAIN, SIGNAL = 3.5; SWISSPROT HIT: Q04690, EVALUE 3.00e-27; EST_HUMAN HIT: BE779692.1, EVALUE 2.00e-59; NT HIT: D42072.1, EVALUE 1.00e-93
cttaagatcaaccaccatggactgaacaagtaggaaaatgacagagttatcttcccaattgatgtaagtacttgctttacacagtttgacacaggcaattgcagcactttctgtcagctgcctacttcctccatggccagcaagagcttttcgtagactgtccagaaataactt

SEQ ID NO: 23018 - DNA, 186 bp, Homo sapiens
  MAP TO AC005922.1; EXPRESSED IN PLACENTA, SIGNAL = 3.7; EXPRESSED IN LUNG, SIGNAL = 3.1; EXPRESSED IN FETAL LIVER, SIGNAL = 3.2; EXPRESSED IN BONE MARROW, SIGNAL =   3; EXPRESSED IN ADULT LIVER, SIGNAL = 2.9; EXPRESSED IN HELA, SIGNAL = 2.9; EXPRESSED IN HEART, SIGNAL = 3.1; EXPRESSED IN BRAIN, SIGNAL = 3.6; SWISSPROT HIT: P26770, EVALUE 7.60e-01; NT HIT: gi6005700, EVALUE 5.00e-04; EST_HUMAN HIT: AI822115.1, EVALUE 7.00e-81
ataactttagctttcctgatgagtgtgttgataaagaaacctttccttacgggcttggttgtgtttctccttattgtcttttgggggatcctgggattcccagcattgtatacacgtcttcctgcatttttggaatggactttgtgtcttcttagcccctttgccttcactgttgggatggcccag

SEQ ID NO: 23019 - DNA, 256 bp, Homo sapiens
  MAP TO AC005895.1; EXPRESSED IN PLACENTA, SIGNAL = 1.9; EXPRESSED IN LUNG, SIGNAL =   2; EXPRESSED IN HELA, SIGNAL = 2.1; EXPRESSED IN FETAL LIVER, SIGNAL = 2.1; EXPRESSED IN ADULT LIVER, SIGNAL = 1.8; EXPRESSED IN HEART, SIGNAL =   2; EXPRESSED IN BRAIN, SIGNAL = 2.6; EXPRESSED IN BONE MARROW, SIGNAL = 2.1; NT HIT: gi11416777, EVALUE 1.00e-130; SWISSPROT HIT: Q99884, EVALUE 9.00e-43; EST_HUMAN HIT: AA984230.1, EVALUE 1.00e-89
gcgccggcgcagccatgctgctcatcgtgggcttggtggccatctactacaacatgatcatcgcctacgtgctcttctacctcttcgcctccctcaccagcgacctaccctgggagcactgtggcaactggtggaacacagaactctgcctggagcacagagtctccaaggacggcaacggggccctgcccctcaacctcacctgcaccgtcagccccagcgaggagtactggaggtcaggcagctgctggccccg

SEQ ID NO: 23020 - DNA, 414 bp, Homo sapiens
  MAP TO AC005295.1; EXPRESSED IN BRAIN, SIGNAL =  38; EXPRESSED IN ADULT LIVER, SIGNAL =  36; EXPRESSED IN HELA, SIGNAL =  34; EXPRESSED IN HEART, SIGNAL =  26; EXPRESSED IN BONE MARROW, SIGNAL =  36; EXPRESSED IN PLACENTA, SIGNAL =  36; EXPRESSED IN LUNG, SIGNAL =  45; EXPRESSED IN FETAL LIVER, SIGNAL =  29; EST_HUMAN HIT: AI128344.1, EVALUE 0.00e+00; SWISSPROT HIT: P51689, EVALUE 2.00e-82; NT HIT: gi4502238, EVALUE 0.00e+00
ggaaacagcttcctttagcataagactcgctgttttctccagaaccatgggttgctccgtgacgtcatggtttctcatcaggatacagttccagcgtcgcacaaacccgaaggaggagtaccaagagatgaaaaacaggcagcccacgccggccatgccggtgactgctctcgcggagacagagaagaaaccgcaggtctggccggcagccagggtgagaatccccagcgccaggaactgggtgtaaccccagagctgcgccctcagggcggcgtccacttcggggggcctgcctgggtcacagtcgtttgtgagcgtgaagggcatgccgtagaaatagtcaaatccgtggttcagggggtggtggcagtgatccccgcgggatgcacaattcacaccctggtgccattttcc

SEQ ID NO: 23021 - DNA, 98 bp, Homo sapiens
  MAP TO AC005516.1; EXPRESSED IN BRAIN, SIGNAL = 2.5; EXPRESSED IN HEART, SIGNAL = 2.2; EXPRESSED IN BONE MARROW, SIGNAL = 3.1; EXPRESSED IN ADULT LIVER, SIGNAL =   3; EXPRESSED IN PLACENTA, SIGNAL = 2.2; EXPRESSED IN LUNG, SIGNAL = 2.7; EXPRESSED IN HELA, SIGNAL = 2.4; EXPRESSED IN FETAL LIVER, SIGNAL = 2.6; SWISSPROT HIT: P42858, EVALUE 2.00e-12; EST_HUMAN HIT: H92240.1, EVALUE 9.00e-11; NT HIT: gi4755137, EVALUE 1.00e-48
cctcacagctgtacaagctaacttgcaagtaacagaagactcatccttcagtgttttccgcagcaaaggaatgcaatccgccaaagaaaatgtatttc

SEQ ID NO: 23022 - DNA, 302 bp, Homo sapiens
  MAP TO AC005323.1; EXPRESSED IN LUNG, SIGNAL = 5.3; EXPRESSED IN BRAIN, SIGNAL = 4.6; EXPRESSED IN HEART, SIGNAL =  19; EXPRESSED IN BONE MARROW, SIGNAL = 5.4; EXPRESSED IN ADULT LIVER, SIGNAL = 3.5; EXPRESSED IN PLACENTA, SIGNAL = 5.4; EXPRESSED IN HELA, SIGNAL = 4.1; EXPRESSED IN FETAL LIVER, SIGNAL = 4.1; EST_HUMAN HIT: F00185.1, EVALUE 4.00e-62; NT HIT: gi11426392, EVALUE 0.00e+00; SWISSPROT HIT: P13535, EVALUE 2.00e-54
cactagcatacgtggaaaagagactggctagagtcttcattgcagacttctggtacagcccaaccacagtatcattcagggggtccttatttttgtccagccagccagtaatgttgtagtccacagtgccagcatagtgaatcagagagaagtgggcctcagccttgcctttgaccaccttgggcttctggaagttggcagacttgcccaggtgctggtcatacagcttgttcttgaaggaggtgtccgttgccttagggaacatgcactcctcttccaggatggagaagatgcccagtggc

SEQ ID NO: 23023 - DNA, 147 bp, Homo sapiens
  MAP TO AC004103.1; EXPRESSED IN PLACENTA, SIGNAL =   2; EXPRESSED IN HELA, SIGNAL = 1.6; EXPRESSED IN HEART, SIGNAL =   2; EXPRESSED IN FETAL LIVER, SIGNAL = 1.9; EXPRESSED IN LUNG, SIGNAL = 1.7; EXPRESSED IN BRAIN, SIGNAL =   2; EXPRESSED IN BONE MARROW, SIGNAL = 2.2; EXPRESSED IN ADULT LIVER, SIGNAL = 1.9; SWISSPROT HIT: P38085, EVALUE 5.30e+00; EST_HUMAN HIT: H48664.1, EVALUE 1.30e-01
aacatgaactgtgggtcttcccatgaccgtggctataccaatggtgaggtttggcaaaatgtttttgagttttccagcaggattgatagcattaattcccatcaggaagactttctcctgtggattttattgtttgtttttaaaatt

SEQ ID NO: 23024 - DNA, 315 bp, Homo sapiens
  MAP TO AC005332.1; EXPRESSED IN LUNG, SIGNAL =  15; EXPRESSED IN BRAIN, SIGNAL =  15; EXPRESSED IN ADULT LIVER, SIGNAL =  13; EXPRESSED IN PLACENTA, SIGNAL =  13; EXPRESSED IN BONE MARROW, SIGNAL =  14; EXPRESSED IN FETAL LIVER, SIGNAL =  14; EXPRESSED IN HEART, SIGNAL =  14; EXPRESSED IN HELA, SIGNAL =  14; NT HIT: X99662.1, EVALUE 1.00e-117; SWISSPROT HIT: Q62419, EVALUE 6.00e-46; EST_HUMAN HIT: BF337375.1, EVALUE 0.00e+00
aacaccgcgtgcaagatccggggccaggtgaagaaccccggctacctgcagtcaggggggctcctgggcgagtgcctgatccgccatgggaaggagctgcgcgacgagtccaacttcagcgatgcactgctggatgccggcgagcccatgaagcacctggcagaggtgaaggactccctggacatagaggtcaagcataacttcattgaccccctccagaacctatgtgagaaagacctgaaggagatccagcaccacctgcagaagctggagggccgccgcctggactttgactaaaagaagcggcagggcaag

SEQ ID NO: 23025 - DNA, 131 bp, Homo sapiens
  MAP TO AC005988.1; EXPRESSED IN HEART, SIGNAL = 6.1; EXPRESSED IN BRAIN, SIGNAL = 7.7; EXPRESSED IN ADULT LIVER, SIGNAL = 7.9; EXPRESSED IN PLACENTA, SIGNAL = 8.1; EXPRESSED IN BONE MARROW, SIGNAL = 7.9; EXPRESSED IN FETAL LIVER, SIGNAL = 8.6; EXPRESSED IN LUNG, SIGNAL = 7.8; EXPRESSED IN HELA, SIGNAL =   7; EST_HUMAN HIT: AI183500.1, EVALUE 8.00e-09; NT HIT: AF195953.1, EVALUE 1.00e-06
ctgagtccacagcttgcaggcggcctgttgtgggaattcttagtctccataatcatgtgagccaattccggcagcaaatcccctctcatatatgtatatatcacctcccatttctctctctctggagaacc

SEQ ID NO: 23026 - DNA, 339 bp, Homo sapiens
  MAP TO AC006097.1; EXPRESSED IN LUNG, SIGNAL =   3; EXPRESSED IN FETAL LIVER, SIGNAL = 3.4; EXPRESSED IN BONE MARROW, SIGNAL = 2.7; EXPRESSED IN HELA, SIGNAL = 2.4; EXPRESSED IN HEART, SIGNAL = 5.1; EXPRESSED IN BRAIN, SIGNAL = 2.9; EXPRESSED IN PLACENTA, SIGNAL = 3.5; EXPRESSED IN ADULT LIVER, SIGNAL = 2.9; NT HIT: U58109.1, EVALUE 2.00e-04; SWISSPROT HIT: gi127998, EVALUE 2.00e-18; EST_HUMAN HIT: AA128453.1, EVALUE 0.00e+00
ttccggtacaaagaggctttcctgcgggaccgaggcctgcagatcgggtactgcagtgtcgacgatgacccaaggatgaagcatttcctcaacgttggcaggctccagagtgacaatgagtacaagaaggactttgccaagagtcggtcccagtttcacagcagcacagaccagcccggcctccttcaggccaagaggagccagcagctggccagtgatgtgcactacaggcagcccctgccccagcccacctgcgacccggagcagctgggcctcaggcatgctcagaaggcccaccagctgcagagtgatgtgagccacctccacccactcccttga

SEQ ID NO: 23027 - DNA, 135 bp, Homo sapiens
  MAP TO AC005297.1; EXPRESSED IN PLACENTA, SIGNAL = 2.7; EXPRESSED IN LUNG, SIGNAL = 2.8; EXPRESSED IN HEART, SIGNAL = 2.2; EXPRESSED IN BRAIN, SIGNAL = 2.6; EXPRESSED IN FETAL LIVER, SIGNAL = 2.5; EXPRESSED IN BONE MARROW, SIGNAL = 2.6; EXPRESSED IN ADULT LIVER, SIGNAL = 2.2; EXPRESSED IN HELA, SIGNAL = 2.2; EST_HUMAN HIT: AA704195.1, EVALUE 2.00e-15; NT HIT: AJ006345.1, EVALUE 5.00e-12; SWISSPROT HIT: Q03100, EVALUE 2.70e-01
atggccaaagagaaggcttcaaccatcatgcccaccataggaacaccaaatttgacaactacctacaaacaaaaaagcaccctcataagaaccaaaaatcaggtgaatcaggtgggcatttacagtaactggttt

SEQ ID NO: 23028 - DNA, 85 bp, Homo sapiens
  MAP TO AC006019.2; EXPRESSED IN HEART, SIGNAL = 1.4; EXPRESSED IN BONE MARROW, SIGNAL = 1.8; EXPRESSED IN ADULT LIVER, SIGNAL = 1.7; EXPRESSED IN HELA, SIGNAL = 1.8; EXPRESSED IN FETAL LIVER, SIGNAL = 1.8; EXPRESSED IN BRAIN, SIGNAL = 1.9; EXPRESSED IN PLACENTA, SIGNAL = 1.7; EXPRESSED IN LUNG, SIGNAL = 1.7; NT HIT: AL161586.2, EVALUE 6.90e-01; EST_HUMAN HIT: AV730759.1, EVALUE 8.00e-17
tcaaattaaatgattcaactagaactttctcagtatctacttctggggccatctcagtgcaacgtgctctacaggataaagagat

SEQ ID NO: 23029 - DNA, 131 bp, Homo sapiens
  MAP TO AC004605.1; EXPRESSED IN HEART, SIGNAL = 1.4; EXPRESSED IN ADULT LIVER, SIGNAL = 1.1; EXPRESSED IN PLACENTA, SIGNAL = 1.3; EXPRESSED IN FETAL LIVER, SIGNAL = 1.1; EXPRESSED IN BRAIN, SIGNAL = 1.3; EXPRESSED IN BONE MARROW, SIGNAL = 1.1; EXPRESSED IN LUNG, SIGNAL = 1.3; EST_HUMAN HIT: AW207390.1, EVALUE 2.00e-43; SWISSPROT HIT: P54841, EVALUE 1.80e+00; NT HIT: U43165.1, EVALUE 2.90e-01
cagcttactgctcggtgtctcctgagccacagaggaagacgtggcaggagcacctggtgctaatatatattcatgtctatggcaatgccgaccatctggctggtctgaaccaggataaaagtgaagacttc

SEQ ID NO: 23030 - DNA, 211 bp, Homo sapiens
  MAP TO AC001237.1; EXPRESSED IN LUNG, SIGNAL = 1.4; EXPRESSED IN FETAL LIVER, SIGNAL = 1.2; EXPRESSED IN BRAIN, SIGNAL = 1.5; EXPRESSED IN BONE MARROW, SIGNAL = 1.2; EXPRESSED IN ADULT LIVER, SIGNAL = 1.3; EXPRESSED IN PLACENTA, SIGNAL = 1.2; EXPRESSED IN HEART, SIGNAL = 1.6; SWISSPROT HIT: P05142, EVALUE 1.70e-02; EST_HUMAN HIT: AI076598.1, EVALUE 1.00e-115; NT HIT: gi11119423, EVALUE 1.00e-115
cccggaggagctgtctcaccaggagaccacgtcctggaagtgtccgggactcgcgggacctgtggctgcagaccccgccggcacgcaggcccagagctggcgcactcctgaggatgagactctgggggccctagccggggtccacgggagggctgtccttggggactctaggatggcttcgttctggcccggctcacttctggagctgtga

SEQ ID NO: 23031 - DNA, 256 bp, Homo sapiens
  MAP TO AC006070.1; EXPRESSED IN BONE MARROW, SIGNAL = 3.7; EXPRESSED IN ADULT LIVER, SIGNAL = 3.1; EXPRESSED IN HELA, SIGNAL = 3.5; EXPRESSED IN HEART, SIGNAL = 2.9; EXPRESSED IN FETAL LIVER, SIGNAL = 3.5; EXPRESSED IN BRAIN, SIGNAL = 2.9; EXPRESSED IN PLACENTA, SIGNAL = 3.1; EXPRESSED IN LUNG, SIGNAL =   4; EST_HUMAN HIT: BE250684.1, EVALUE 6.00e-05; NT HIT: M27685.1, EVALUE 3.00e-15; SWISSPROT HIT: P10969, EVALUE 1.00e+00
aggtgggctggcagcagggtgtgctgcagcaggaaggctggcagcagctggccacacaagtgggctggcagcaggtggtcctgcagcaggtgttttgacagcaagttgggtggcagcaaggctggcagcagctgggcacacagcaggagggctggcaacagggtgtgctgctgcaggtggtcacagtggtgggcttccagcaggttgtcctgcagcaggtggtcctgcagcatgtaggctgacagcaaggggaaca

SEQ ID NO: 23032 - DNA, 121 bp, Homo sapiens
  MAP TO AC005878.2; EXPRESSED IN BRAIN, SIGNAL = 8.7; EXPRESSED IN PLACENTA, SIGNAL = 8.2; EXPRESSED IN LUNG, SIGNAL = 8.7; EXPRESSED IN HEART, SIGNAL = 7.7; EXPRESSED IN BONE MARROW, SIGNAL = 7.2; EXPRESSED IN ADULT LIVER, SIGNAL = 8.4; EXPRESSED IN HELA, SIGNAL = 7.4; EXPRESSED IN FETAL LIVER, SIGNAL = 8.1; SWISSPROT HIT: P47696, EVALUE 1.80e+00; NT HIT: AL163268.2, EVALUE 6.80e-02
gggtgtcagaagctgtggaagtggatgaatgggaagtttgctttgaagaagctaattgtcaagattcatttgctattcaggttctcctcttgctggcctgggcagtgtataatttgtccca

SEQ ID NO: 23033 - DNA, 208 bp, Homo sapiens
  MAP TO AC005529.7; EXPRESSED IN PLACENTA, SIGNAL = 8.2; EXPRESSED IN ADULT LIVER, SIGNAL = 7.3; EXPRESSED IN LUNG, SIGNAL =   9; EXPRESSED IN HEART, SIGNAL = 7.1; EXPRESSED IN FETAL LIVER, SIGNAL = 7.1; EXPRESSED IN BRAIN, SIGNAL = 8.3; EXPRESSED IN HELA, SIGNAL =   9; EXPRESSED IN BONE MARROW, SIGNAL = 5.6; EST_HUMAN HIT: AA418463.1, EVALUE 5.00e-85; NT HIT: Y18000.1, EVALUE 1.00e-114; SWISSPROT HIT: P35240, EVALUE 3.00e-25
agtggaatacatggaaaagagcaagcatctgcaggagcagctcaatgaactcaagacagaaatcgaggccttgaaactgaaagagagggagacagctctggatattctgcacaatgagaactccgacaggggtggcagcagcaagcacaataccattaaaaaggtacccagggtctctttcttgtattttgctgatcaggaccatcat

SEQ ID NO: 23034 - DNA, 113 bp, Homo sapiens
  MAP TO AC006078.1; EXPRESSED IN BRAIN, SIGNAL = 1.9; EXPRESSED IN ADULT LIVER, SIGNAL = 1.5; EXPRESSED IN LUNG, SIGNAL = 1.9; EXPRESSED IN FETAL LIVER, SIGNAL = 1.7; EXPRESSED IN BONE MARROW, SIGNAL = 1.9; EXPRESSED IN HEART, SIGNAL = 1.7; EXPRESSED IN HELA, SIGNAL = 1.8; EXPRESSED IN PLACENTA, SIGNAL = 1.5; EST_HUMAN HIT: AW027174.1, EVALUE 3.60e-01; SWISSPROT HIT: P02074, EVALUE 7.10e+00
atggtcaccagccagcagcttctgaaatgcacctctgttccatggacccaaagttgctttaaccattttggacacatggaccagcaggggcgcggctatttctgtgcaaggct

SEQ ID NO: 23035 - DNA, 155 bp, Homo sapiens
  MAP TO AC004253.1; EXPRESSED IN BONE MARROW, SIGNAL =   2; EXPRESSED IN PLACENTA, SIGNAL =   2; EXPRESSED IN LUNG, SIGNAL = 2.3; EXPRESSED IN HELA, SIGNAL = 2.2; EXPRESSED IN FETAL LIVER, SIGNAL = 2.3; EXPRESSED IN ADULT LIVER, SIGNAL = 2.4; EXPRESSED IN HEART, SIGNAL = 1.9; EXPRESSED IN BRAIN, SIGNAL = 2.1; NT HIT: AJ133269.1, EVALUE 1.40e+00
atgatgatgatgatgatgatgatgatgatgatgatgataagagccaatattcattgagtgtgccggtctcacagtgttttacttgtttcaactcctttgatcctcctaactgcctggagaggcaagaattattatcgccctcattttaccaagat

SEQ ID NO: 23036 - DNA, 102 bp, Homo sapiens
  MAP TO AC005900.1; EXPRESSED IN PLACENTA, SIGNAL = 2.4; EXPRESSED IN LUNG, SIGNAL = 2.1; EXPRESSED IN HEART, SIGNAL =   2; EXPRESSED IN FETAL LIVER, SIGNAL =   2; EXPRESSED IN BRAIN, SIGNAL = 1.9; EXPRESSED IN BONE MARROW, SIGNAL = 2.1; EXPRESSED IN ADULT LIVER, SIGNAL = 1.9; EXPRESSED IN HELA, SIGNAL = 1.8; NT HIT: M24136.1, EVALUE 2.20e-01
tctttccatgtaataggtcttctttcactgttgtatgttgtgttctgggacagcacagggttgctggtttcaacagcatctgagctaaagagagcagcaaca

SEQ ID NO: 23037 - DNA, 191 bp, Homo sapiens
  MAP TO AC004382.1; EXPRESSED IN BONE MARROW, SIGNAL = 8.6; EXPRESSED IN PLACENTA, SIGNAL = 8.5; EXPRESSED IN LUNG, SIGNAL =  11; EXPRESSED IN HELA, SIGNAL = 8.8; EXPRESSED IN HEART, SIGNAL =   8; EXPRESSED IN FETAL LIVER, SIGNAL = 8.9; EXPRESSED IN ADULT LIVER, SIGNAL =  11; EXPRESSED IN BRAIN, SIGNAL = 8.8; SWISSPROT HIT: O18303, EVALUE 2.60e-01; EST_HUMAN HIT: BE734179.1, EVALUE 1.70e-01; NT HIT: AF238381.1, EVALUE 1.80e+00
gatgaaaacaactcatctctgctgaataactacgtcctgggggcccagctgagtcatgggcacgtgaacaacctcagggatcctgtgaacatcagcttctggcacaaccaaagcctggtactgctgggggcgcccccgtttccactgcacccctgcccctctgtgactctcctgttgaacactggtttgac

SEQ ID NO: 23038 - DNA, 166 bp, Homo sapiens
  MAP TO AC005906.1; EXPRESSED IN HELA, SIGNAL = 2.9; EXPRESSED IN HEART, SIGNAL = 4.3; EXPRESSED IN BONE MARROW, SIGNAL = 3.4; EXPRESSED IN PLACENTA, SIGNAL =   3; EXPRESSED IN LUNG, SIGNAL = 4.8; EXPRESSED IN FETAL LIVER, SIGNAL = 3.3; EXPRESSED IN BRAIN, SIGNAL = 3.2; EXPRESSED IN ADULT LIVER, SIGNAL = 3.3; NT HIT: Z99119.1, EVALUE 9.70e-02; EST_HUMAN HIT: AW803916.1, EVALUE 5.70e-01; SWISSPROT HIT: P30052, EVALUE 5.20e+00
caagaggcaattctcagcgatgcatgttccaggaaggagtgtggtcggctgattttcaacagagctgccaggagaaatatgagacaaggttgaaaccaccactgggccctcaaccccaggatagccactcttaaaagcctgtggccttatggctttatggtcagaa

SEQ ID NO: 23039 - DNA, 100 bp, Homo sapiens
  MAP TO AC006101.2; EXPRESSED IN LUNG, SIGNAL = 2.6; EXPRESSED IN BRAIN, SIGNAL = 2.2; EXPRESSED IN HELA, SIGNAL = 2.5; EXPRESSED IN FETAL LIVER, SIGNAL = 2.3; EXPRESSED IN ADULT LIVER, SIGNAL = 2.2; EXPRESSED IN BONE MARROW, SIGNAL = 2.2; EXPRESSED IN HEART, SIGNAL = 2.2; EXPRESSED IN PLACENTA, SIGNAL = 2.1; SWISSPROT HIT: P33176, EVALUE 1.00e-13; EST_HUMAN HIT: N25884.1, EVALUE 1.00e-49; NT HIT: gi4758647, EVALUE 1.00e-49
gaaacttggcgatgtacttgtcgccgcggttcacttcagactcgttgagaggtctgaagcgacacatcactttgatgttgcactcggccaggtccgccat

SEQ ID NO: 23040 - DNA, 164 bp, Homo sapiens
  MAP TO AC006010.2; EXPRESSED IN LUNG, SIGNAL = 5.3; EXPRESSED IN FETAL LIVER, SIGNAL = 4.5; EXPRESSED IN BRAIN, SIGNAL = 4.7; EXPRESSED IN ADULT LIVER, SIGNAL =   5; EXPRESSED IN PLACENTA, SIGNAL = 4.6; EXPRESSED IN BONE MARROW, SIGNAL = 4.1; EXPRESSED IN HEART, SIGNAL = 3.7; EXPRESSED IN HELA, SIGNAL = 4.9; SWISSPROT HIT: Q58558, EVALUE 3.90e+00; NT HIT: AB003473.1, EVALUE 9.50e-02
agttctggagacattggtatgcaagatcatgcccctgagactatttgttttccaaagctccttcatagcatccagtcctcaaacaacaaacattcttttgctattgaaactggttcagaacagaacagaaagaacaaggcttgctggttgaagcattggaggta

SEQ ID NO: 23041 - DNA, 164 bp, Homo sapiens
  MAP TO AC005912.1; EXPRESSED IN LUNG, SIGNAL = 2.7; EXPRESSED IN BRAIN, SIGNAL = 2.8; EXPRESSED IN PLACENTA, SIGNAL = 2.9; EXPRESSED IN HEART, SIGNAL = 2.6; EXPRESSED IN FETAL LIVER, SIGNAL = 3.5; EXPRESSED IN BONE MARROW, SIGNAL = 2.8; EXPRESSED IN ADULT LIVER, SIGNAL = 2.9; EXPRESSED IN HELA, SIGNAL = 2.7; EST_HUMAN HIT: AA714521.1, EVALUE 3.60e-02
atcaggaactggggtgaaggagtggcctcctccctgcaaagaggagagaacagagagagctgcctaatcaattggagagggaaatccagcctctacattaatgacagcaggtgagtctctaatatccacaggcagtaactcacaccagaggttttctgtatcct

SEQ ID NO: 23042 - DNA, 100 bp, Homo sapiens
  MAP TO AC004414.1; EXPRESSED IN PLACENTA, SIGNAL =   5; EXPRESSED IN HELA, SIGNAL = 4.9; EXPRESSED IN HEART, SIGNAL = 4.8; EXPRESSED IN FETAL LIVER, SIGNAL = 4.9; EXPRESSED IN ADULT LIVER, SIGNAL = 5.6; EXPRESSED IN LUNG, SIGNAL = 5.7; EXPRESSED IN BRAIN, SIGNAL = 5.7; EXPRESSED IN BONE MARROW, SIGNAL = 4.9; NT HIT: gi8393724, EVALUE 2.80e+00; EST_HUMAN HIT: AA085169.1, EVALUE 3.40e+00
ctctttgtcatcagtgaagccactgagacctcctcttggccctccccctcctcctcctcctcctcctcctcctcatctttgctggataatgaggacttca

SEQ ID NO: 23043 - DNA, 161 bp, Homo sapiens
  MAP TO AC006015.2; EXPRESSED IN LUNG, SIGNAL =  90; EXPRESSED IN BRAIN, SIGNAL =  13; EXPRESSED IN HELA, SIGNAL =  14; EXPRESSED IN ADULT LIVER, SIGNAL =  11; EXPRESSED IN BONE MARROW, SIGNAL =  13; EXPRESSED IN FETAL LIVER, SIGNAL =  12; EXPRESSED IN HEART, SIGNAL =  11; EXPRESSED IN PLACENTA, SIGNAL =  13; SWISSPROT HIT: O88935, EVALUE 1.80e+00; NT HIT: U80753.1, EVALUE 1.00e-71; EST_HUMAN HIT: AL040369.1, EVALUE 2.00e-71
acagagctgctaccctggaggaagggaacccaacagacgaagtccccagtacccccttagccctggagccgagcagcaccccaggttccaagaagagccccccagagcctgtggacaagcgagccaaggcccccaaggtgcgccgggcactgccgcagccc

SEQ ID NO: 23044 - DNA, 208 bp, Homo sapiens
  MAP TO AC006142.1; EXPRESSED IN LUNG, SIGNAL = 7.3; EXPRESSED IN BRAIN, SIGNAL =  11; EXPRESSED IN ADULT LIVER, SIGNAL =  12; EXPRESSED IN BONE MARROW, SIGNAL = 8.5; EXPRESSED IN FETAL LIVER, SIGNAL =  19; EXPRESSED IN HEART, SIGNAL = 6.4; EXPRESSED IN HELA, SIGNAL = 8.6; EXPRESSED IN PLACENTA, SIGNAL = 8.5; SWISSPROT HIT: P13716, EVALUE 5.70e-01; EST_HUMAN HIT: AV732093.1, EVALUE 1.20e-02
gacgggggccgcggggaagaggaggatgtcgggatgtttctccctgacttttctcactagaggtagcatctgcagtgatggcagtacctctacaatggtctcagctcctccaagcaatgcctgctccacactgtcagctccagcctgctggcgcatcttcccctgcggtaatctctgcgtttcctcaccttcccttgtcttcagctcc

SEQ ID NO: 23045 - DNA, 312 bp, Homo sapiens
  MAP TO AC006097.1; EXPRESSED IN BONE MARROW, SIGNAL =   2; EXPRESSED IN PLACENTA, SIGNAL = 1.7; EXPRESSED IN LUNG, SIGNAL = 2.2; EXPRESSED IN HELA, SIGNAL =   2; EXPRESSED IN FETAL LIVER, SIGNAL = 1.8; EXPRESSED IN ADULT LIVER, SIGNAL = 2.1; EXPRESSED IN HEART, SIGNAL = 6.7; EXPRESSED IN BRAIN, SIGNAL =   2; SWISSPROT HIT: gi127998, EVALUE 8.00e-20; EST_HUMAN HIT: AA196329.1, EVALUE 2.00e-24; NT HIT: AF005213.1, EVALUE 0.00e+00
gtgaagtacaaggaggattatgagagatccagagggaagctcattggggcaaaagatgtacagggagattcgcaaatgagccactcactgcaaatgtccaagctgcagagtgagctggagtacaagaagggattcgaggacaccaaatcccaatgccacgtctccctggacatggtccacctcgtgcatgcccgcaaagctcagcatttagccacagacgtaggctacaagacagcggaacatcactttacggctttgcccacagacatgaaggtggaatgggccaagaaggcttatggcttacagagtgat

SEQ ID NO: 23046 - DNA, 83 bp, Homo sapiens
  MAP TO AC004554.1; EXPRESSED IN PLACENTA, SIGNAL =   4; EXPRESSED IN LUNG, SIGNAL = 4.7; EXPRESSED IN HELA, SIGNAL = 4.5; EXPRESSED IN HEART, SIGNAL =   4; EXPRESSED IN FETAL LIVER, SIGNAL = 4.1; EXPRESSED IN BRAIN, SIGNAL = 4.3; EXPRESSED IN ADULT LIVER, SIGNAL = 3.8; EXPRESSED IN BONE MARROW, SIGNAL = 4.6; NT HIT: AE004606.1, EVALUE 6.70e-01
ttcaggtctctgacagctgtcgccttctgtgtctcagagaccttggacttatcctcaggcatcagtgggaagttctattaatt

SEQ ID NO: 23047 - DNA, 202 bp, Homo sapiens
  MAP TO AC006004.1; EXPRESSED IN PLACENTA, SIGNAL = 1.8; EXPRESSED IN HELA, SIGNAL = 2.3; EXPRESSED IN HEART, SIGNAL =   2; EXPRESSED IN FETAL LIVER, SIGNAL = 1.9; EXPRESSED IN BRAIN, SIGNAL =   2; EXPRESSED IN ADULT LIVER, SIGNAL =   2; EXPRESSED IN LUNG, SIGNAL = 2.1; EXPRESSED IN BONE MARROW, SIGNAL =   2; SWISSPROT HIT: Q21215, EVALUE 9.80e-01; NT HIT: gi5031650, EVALUE 4.80e-01; EST_HUMAN HIT: AW169864.1, EVALUE 7.10e-01
actaagaaccaaccatgtactaggggctggatatgcccagggtatcatgatgaaaataaaaaccagtctctgcctttgtggggagactgacattacagatctgcacagtggaggtcatattgcacctgtactcatcctggaggatggtagtgctctcaaggtaatagaagccaacggaaatgtgacttcagtagtgatctga

SEQ ID NO: 23048 - DNA, 250 bp, Homo sapiens
  MAP TO AC005922.1; EXPRESSED IN FETAL LIVER, SIGNAL = 1.4; EXPRESSED IN BONE MARROW, SIGNAL = 1.4; EXPRESSED IN ADULT LIVER, SIGNAL = 1.4; EXPRESSED IN PLACENTA, SIGNAL = 1.7; EXPRESSED IN LUNG, SIGNAL = 1.5; EXPRESSED IN HEART, SIGNAL = 1.7; EXPRESSED IN BRAIN, SIGNAL = 1.7; SWISSPROT HIT: P46448, EVALUE 1.70e+00; NT HIT: gi6005700, EVALUE 3.80e-02
tagctttatccctcaacttttggaacatctattctacgagtcatatcagaaaagttacccgtgggaactgtctccaaatacatacttcctctcaccaggacaacaaccacaggatcctctgacccatttactggtcatcaataagacaggtgaacatggggctgaaatgcagctgttaaatgttgttcttgttgagagattccccccaaaaaacatgaacagccaagaaaaaaataaactctgtatgttt

SEQ ID NO: 23049 - DNA, 107 bp, Homo sapiens
  MAP TO AC004454.1; EXPRESSED IN LUNG, SIGNAL = 1.6; EXPRESSED IN HELA, SIGNAL = 1.6; EXPRESSED IN BRAIN, SIGNAL = 1.6; EXPRESSED IN BONE MARROW, SIGNAL = 1.6; EXPRESSED IN ADULT LIVER, SIGNAL = 1.7; EXPRESSED IN PLACENTA, SIGNAL = 1.7; EXPRESSED IN HEART, SIGNAL = 1.7; EXPRESSED IN FETAL LIVER, SIGNAL = 1.6; EST_HUMAN HIT: N22711.1, EVALUE 5.30e+00; NT HIT: gi11467282, EVALUE 1.50e-02
ggggaaaggagatatctgagagtcaatcacaacactctggttggcaaaataataaatatctgtgcttttaaaagtgttcaggtccataaaatttgcaccttctattc

SEQ ID NO: 23050 - DNA, 187 bp, Homo sapiens
  MAP TO AC006115.1; EXPRESSED IN LUNG, SIGNAL = 5.3; EXPRESSED IN HELA, SIGNAL = 4.9; EXPRESSED IN BONE MARROW, SIGNAL = 4.8; EXPRESSED IN ADULT LIVER, SIGNAL = 4.4; EXPRESSED IN PLACENTA, SIGNAL = 4.2; EXPRESSED IN HEART, SIGNAL = 4.2; EXPRESSED IN FETAL LIVER, SIGNAL = 4.9; EXPRESSED IN BRAIN, SIGNAL = 5.6; SWISSPROT HIT: O43309, EVALUE 5.00e-15; NT HIT: AF208970.1, EVALUE 1.00e-101; EST_HUMAN HIT: AI338601.1, EVALUE 2.00e-16
cttctggttggtacatctccttgtaattctccagcagagtgacgagcttctcacagttctccggcttttttgctcgcacccaaggcttgagcttttcagggatgatggtcaggtactgctcaaggaccaagagctcgatgatctcctccttggtgcgggtctccggctgcaaccaatcgaggcagag

SEQ ID NO: 23051 - DNA, 145 bp, Homo sapiens
  MAP TO AC005879.2; EXPRESSED IN PLACENTA, SIGNAL = 1.9; EXPRESSED IN HEART, SIGNAL = 1.8; EXPRESSED IN ADULT LIVER, SIGNAL = 1.9; EXPRESSED IN LUNG, SIGNAL = 1.8; EXPRESSED IN FETAL LIVER, SIGNAL = 1.8; EXPRESSED IN BRAIN, SIGNAL = 1.5; EXPRESSED IN BONE MARROW, SIGNAL = 1.7; EXPRESSED IN HELA, SIGNAL = 1.7; EST_HUMAN HIT: BF105159.1, EVALUE 5.00e-10; SWISSPROT HIT: Q10086, EVALUE 1.00e+00; NT HIT: AF195953.1, EVALUE 3.00e-04
aattttttttccttctgtgcttcatcttgaaagtttctgtgggtatatcttcaagttcactgatctttccttctgcaagttctaatcttctgttaatcccatacaatgtatttgccatctcatacattgtggattttctttttag

SEQ ID NO: 23052 - DNA, 135 bp, Homo sapiens
  MAP TO AC004129.1; EXPRESSED IN PLACENTA, SIGNAL = 4.3; EXPRESSED IN LUNG, SIGNAL = 2.3; EXPRESSED IN FETAL LIVER, SIGNAL =   6; EXPRESSED IN BRAIN, SIGNAL = 2.8; EXPRESSED IN ADULT LIVER, SIGNAL = 5.7; EXPRESSED IN HELA, SIGNAL = 3.3; EXPRESSED IN HEART, SIGNAL = 2.6; EXPRESSED IN BONE MARROW, SIGNAL = 4.7; EST_HUMAN HIT: AV720065.1, EVALUE 4.50e-01; NT HIT: gi10947007, EVALUE 3.00e-01
catactatgacaacgaccttgagaaatacacaaaggaaaaaaaatgtattgactctgggacaaatttctcagtgagaaaaatgaaaggtcagtgttcacctaactgtgaccgacaaaatgaaatggacaaggaag

SEQ ID NO: 23053 - DNA, 93 bp, Homo sapiens
  MAP TO AC006144.1; EXPRESSED IN PLACENTA, SIGNAL = 3.6; EXPRESSED IN LUNG, SIGNAL = 2.1; EXPRESSED IN HELA, SIGNAL =   2; EXPRESSED IN FETAL LIVER, SIGNAL = 1.8; EXPRESSED IN BONE MARROW, SIGNAL = 2.5; EXPRESSED IN ADULT LIVER, SIGNAL =   2; EXPRESSED IN HEART, SIGNAL = 1.6; EXPRESSED IN BRAIN, SIGNAL = 1.9; EST_HUMAN HIT: AI198941.1, EVALUE 4.00e-28; NT HIT: AF046139.1, EVALUE 1.00e-14
gaggcagggtagcttcttgatggccaggggtggtgtcttcacctagaactgggtggaaccttttttgcatgatcatctgaagcttgatggtcc

SEQ ID NO: 23054 - DNA, 280 bp, Homo sapiens
  MAP TO AC004522.1; EXPRESSED IN BONE MARROW, SIGNAL = 7.2; EXPRESSED IN PLACENTA, SIGNAL = 6.5; EXPRESSED IN LUNG, SIGNAL =  11; EXPRESSED IN HELA, SIGNAL = 7.2; EXPRESSED IN FETAL LIVER, SIGNAL = 8.9; EXPRESSED IN ADULT LIVER, SIGNAL =  14; EXPRESSED IN HEART, SIGNAL = 7.6; EXPRESSED IN BRAIN, SIGNAL =   8; SWISSPROT HIT: P25311, EVALUE 9.00e-48; NT HIT: X70172.1, EVALUE 0.00e+00; EST_HUMAN HIT: AV690612.1, EVALUE 1.00e-130
atcctccctctgtggtggtcaccagccaccaggccccaggagaaaagaagaaactgaagtgcctggcctacgacttctacccagggaaaattgatgtgcactggactcgggccggcgaggtgcaggagcctgagttacggggagatgttcttcacggtggaaacggcacttacctgacctggttgttggtgcatgtgcccccgcaggacacagccccctactcctgccacgtgcagcacagcagcctggcccagcccctcgtggtgcccggggaggccag

SEQ ID NO: 23055 - DNA, 214 bp, Homo sapiens
  MAP TO AC004775.1; EXPRESSED IN PLACENTA, SIGNAL = 3.6; EXPRESSED IN HELA, SIGNAL = 3.4; EXPRESSED IN BRAIN, SIGNAL = 6.9; EXPRESSED IN ADULT LIVER, SIGNAL = 3.7; EXPRESSED IN HEART, SIGNAL = 3.2; EXPRESSED IN LUNG, SIGNAL =   4; EXPRESSED IN FETAL LIVER, SIGNAL = 3.4; EXPRESSED IN BONE MARROW, SIGNAL = 3.5; SWISSPROT HIT: Q92599, EVALUE 2.00e-19; EST_HUMAN HIT: BE748158.1, EVALUE 1.00e-103; NT HIT: AF179995.1, EVALUE 1.00e-103
ctccatgagaagtttgagcacctgaagcgggtccaccaggaggagaagcgcaaggtggaggaaaagcgccgggaactggaggaggagaccaacgccttcaatcgccggaaggctgcggtggaggccctgcagtcgcaggccttgcacgccacctcgcagcagcccctgaggaaggacaaggacaagaagaagtaggtggcaggctgcgcctgcg

SEQ ID NO: 23056 - DNA, 301 bp, Homo sapiens
  MAP TO AC005940.3; EXPRESSED IN PLACENTA, SIGNAL = 5.8; EXPRESSED IN LUNG, SIGNAL = 7.8; EXPRESSED IN HELA, SIGNAL = 9.6; EXPRESSED IN HEART, SIGNAL =  11; EXPRESSED IN FETAL LIVER, SIGNAL = 8.2; EXPRESSED IN ADULT LIVER, SIGNAL = 9.5; EXPRESSED IN BRAIN, SIGNAL = 8.5; EXPRESSED IN BONE MARROW, SIGNAL = 6.8; SWISSPROT HIT: P51575, EVALUE 4.00e-19; NT HIT: U45448.1, EVALUE 0.00e+00
acctctggctcctgtcctctggctccacctgcaccgccctgctcttcctaaggggccaggaagcccccagaagctctaccatcgacgtgggtggtggcacccggctcaccctgagagcagaggccgtgcagggggctcagttctgagccccagccggcccaccatggcacggcggttccaggaggagctggccgccttcctcttcgagtatgacaccccccgcatggtgctggtgcgtaataagaaggtgggcgttatcttccgactgatccagctggtggtcctggtctacgtcatcggg

SEQ ID NO: 23057 - DNA, 206 bp, Homo sapiens
  MAP TO AC005895.1; EXPRESSED IN FETAL LIVER, SIGNAL = 1.6; EXPRESSED IN BONE MARROW, SIGNAL = 1.6; EXPRESSED IN PLACENTA, SIGNAL = 1.5; EXPRESSED IN LUNG, SIGNAL = 1.7; EXPRESSED IN HEART, SIGNAL = 1.8; EXPRESSED IN BRAIN, SIGNAL = 1.9; EXPRESSED IN ADULT LIVER, SIGNAL = 1.7; NT HIT: gi11416777, EVALUE 1.00e-112; SWISSPROT HIT: Q99884, EVALUE 6.00e-26; EST_HUMAN HIT: BE727576.1, EVALUE 7.20e-01
cggctccaacaggccagccggccggccatggactggggaccatcgctggaggagaaccggacgggcatgtatgtggccacgctggctgggagccagtcaccaaagccactgatggtgcacatgcgcaagtacgggggcatcaccagcttcgagaacacggccatcgaggtggaccgtgagattgcagaggaggaggagtcgatgat

SEQ ID NO: 23058 - DNA, 88 bp, Homo sapiens
  MAP TO AC004686.1; EXPRESSED IN LUNG, SIGNAL = 9.3; EXPRESSED IN HELA, SIGNAL =   8; EXPRESSED IN BONE MARROW, SIGNAL = 6.7; EXPRESSED IN ADULT LIVER, SIGNAL =  13; EXPRESSED IN PLACENTA, SIGNAL =   8; EXPRESSED IN HEART, SIGNAL =   9; EXPRESSED IN FETAL LIVER, SIGNAL = 7.1; EXPRESSED IN BRAIN, SIGNAL =  12; EST_HUMAN HIT: BF541110.1, EVALUE 4.00e-31; SWISSPROT HIT: O95169, EVALUE 2.00e-10; NT HIT: gi4826853, EVALUE 3.00e-31
gatctagtagtgaaccaccgactcaggttctttggagggatcaccgcctcgttccaggtacagattattgtaaggatactgctttggt

SEQ ID NO: 23059 - DNA, 83 bp, Homo sapiens; identical to SEQ ID NO: 22396
  MAP TO AC004787.1; EXPRESSED IN LUNG, SIGNAL = 1.2; EXPRESSED IN FETAL LIVER, SIGNAL = 0.9; EXPRESSED IN BRAIN, SIGNAL = 0.92; EXPRESSED IN BONE MARROW, SIGNAL = 0.98; EXPRESSED IN ADULT LIVER, SIGNAL = 0.98; EXPRESSED IN PLACENTA, SIGNAL = 0.94; EXPRESSED IN HEART, SIGNAL = 1.5; NT HIT: AE001486.1, EVALUE 6.70e-01

SEQ ID NO: 23060 - DNA, 238 bp, Homo sapiens
  MAP TO AC004824.1; EXPRESSED IN PLACENTA, SIGNAL = 1.3; EXPRESSED IN LUNG, SIGNAL = 1.3; EXPRESSED IN FETAL LIVER, SIGNAL = 1.4; EXPRESSED IN BONE MARROW, SIGNAL = 1.5; EXPRESSED IN ADULT LIVER, SIGNAL = 1.4; EXPRESSED IN HEART, SIGNAL = 1.5; EXPRESSED IN BRAIN, SIGNAL = 1.5; SWISSPROT HIT: O88807, EVALUE 7.00e-16; EST_HUMAN HIT: AW084484.1, EVALUE 6.00e-08; NT HIT: AB008803.1, EVALUE 1.00e-08
ctaaggtaccatcttccaccatttgaaggcaaagggcacccggcggatgttggcacaggcacagatgtctccgacctctgtcaggtaacagtcaaagtcattgatgaaggtgcacttgaagcccaggggctccagcaagcagcaaatcttttcttccaggcagcaggtccccttgatttggggcccaaaaggcttggggatccccaggttcttgcccatcacaatcatccgcaactgt

SEQ ID NO: 23061 - DNA, 119 bp, Homo sapiens
  MAP TO AC002039.1; EXPRESSED IN PLACENTA, SIGNAL = 1.5; EXPRESSED IN HELA, SIGNAL = 1.8; EXPRESSED IN HEART, SIGNAL = 1.9; EXPRESSED IN ADULT LIVER, SIGNAL = 1.6; EXPRESSED IN BONE MARROW, SIGNAL = 1.5; EXPRESSED IN BRAIN, SIGNAL = 1.8; EXPRESSED IN FETAL LIVER, SIGNAL = 1.7; EXPRESSED IN LUNG, SIGNAL = 1.6; SWISSPROT HIT: P98161, EVALUE 3.60e-01; EST_HUMAN HIT: AL046190.1, EVALUE 2.00e-33; NT HIT: U24498.1, EVALUE 6.00e-61
agacgtctcccacaacctgctccgggcgctggacgttgggctcctggcgaacctctcggcgctggcagagctgtgagtgtcccccagtcgtgccagcatgcggggctcactccgggtgg

SEQ ID NO: 23062 - DNA, 111 bp, Homo sapiens
  MAP TO AC005905.1; EXPRESSED IN PLACENTA, SIGNAL = 7.8; EXPRESSED IN BONE MARROW, SIGNAL = 7.9; EXPRESSED IN ADULT LIVER, SIGNAL =  10; EXPRESSED IN LUNG, SIGNAL = 9.7; EXPRESSED IN HELA, SIGNAL = 8.5; EXPRESSED IN HEART, SIGNAL = 8.9; EXPRESSED IN FETAL LIVER, SIGNAL = 8.8; EXPRESSED IN BRAIN, SIGNAL = 9.5; SWISSPROT HIT: Q95885, EVALUE 5.40e+00; EST_HUMAN HIT: AA873339.1, EVALUE 3.60e-01; NT HIT: L43001.1, EVALUE 2.40e-01
ggctccctgccgctgaaaatgctgacctcagcgtctcagcaggaggcctttctgctgcagcaccactcacccagtgcccccaccaggcttccacacagcgctatgctgtgg

SEQ ID NO: 23063 - DNA, 204 bp, Homo sapiens
  MAP TO AC004659.1; EXPRESSED IN PLACENTA, SIGNAL = 1.9; EXPRESSED IN HELA, SIGNAL = 1.8; EXPRESSED IN BRAIN, SIGNAL = 1.9; EXPRESSED IN ADULT LIVER, SIGNAL = 1.9; EXPRESSED IN HEART, SIGNAL = 2.1; EXPRESSED IN LUNG, SIGNAL = 1.8; EXPRESSED IN FETAL LIVER, SIGNAL =   2; EXPRESSED IN BONE MARROW, SIGNAL = 2.2; NT HIT: AL445065.1, EVALUE 7.50e+00
tagaaatatatacattagaatcctgccaattggtcagtttgttctcctcctcctccttctccttccccttctttctttcctcctcctcctcctccctctcctcctcctctttcttcttcttcttcttcttcttcttcttcttgttcttcttcctcttcttcttcttcctctcattgtaccttaagccgttacttctatctgaca

SEQ ID NO: 23064 - DNA, 432 bp, Homo sapiens
  MAP TO AC006077.1; EXPRESSED IN PLACENTA, SIGNAL = 0.89; EXPRESSED IN LUNG, SIGNAL = 1.1; EXPRESSED IN FETAL LIVER, SIGNAL = 0.98; EXPRESSED IN BRAIN, SIGNAL = 0.86; EXPRESSED IN ADULT LIVER, SIGNAL = 0.88; EXPRESSED IN HEART, SIGNAL = 1.4; EXPRESSED IN BONE MARROW, SIGNAL = 0.81; EST_HUMAN HIT: AW956503.1, EVALUE 0.00e+00; NT HIT: gi11465922, EVALUE 1.70e-02; SWISSPROT HIT: Q03386, EVALUE 1.10e+00
gtgggggctgtgtacctgggtgaggaggagctcctgcatgacccgatgggccaggacagggcagcagaagaggccaatgcggtgctggggctggacacccaaggcgatcacatggtgatgctgtctgtgattcctggggaagctgaggacaaagtgagttcagagcctagcggcgtcacctgtggtgctggaggagcggaggactcaaggtgcaacgtccgagagagccttttctctctggatggcgctggagcacacttccctgacagagaagaggagtattacacagagccagaagtggcggaatctgacgcagccccgacagaggactccaataacactgaaagtctgaaatccccaaaggtgaactgtgaggagagaaacattacaggattagaaaatttcactctgaaaattttaaatatgtcacag

SEQ ID NO: 23065 - DNA, 146 bp, Homo sapiens
  MAP TO AC004690.1; EXPRESSED IN PLACENTA, SIGNAL =  17; EXPRESSED IN LUNG, SIGNAL =  18; EXPRESSED IN HELA, SIGNAL =  19; EXPRESSED IN HEART, SIGNAL =  16; EXPRESSED IN FETAL LIVER, SIGNAL =  16; EXPRESSED IN ADULT LIVER, SIGNAL =  16; EXPRESSED IN BRAIN, SIGNAL =  17; EXPRESSED IN BONE MARROW, SIGNAL =  16; EST_HUMAN HIT: AW070885.1, EVALUE 5.00e-07; SWISSPROT HIT: Q09600, EVALUE 6.90e+00; NT HIT: U83702.1, EVALUE 9.00e-05
tttgtgtgaacgagttctttgggtatagatactcattattttttgcatatgaccaatcagagtttaatttctttaagctacattttgccacaagcaaagagatggcaaatcagtttactgttcatcattttatacaagtaaagaag

SEQ ID NO: 23066 - DNA, 287 bp, Homo sapiens
  MAP TO AC004801.1; EXPRESSED IN LUNG, SIGNAL = 2.6; EXPRESSED IN FETAL LIVER, SIGNAL = 3.3; EXPRESSED IN BONE MARROW, SIGNAL = 2.9; EXPRESSED IN PLACENTA, SIGNAL = 2.3; EXPRESSED IN HELA, SIGNAL = 2.5; EXPRESSED IN HEART, SIGNAL = 2.5; EXPRESSED IN BRAIN, SIGNAL = 2.5; EXPRESSED IN ADULT LIVER, SIGNAL = 2.3; SWISSPROT HIT: P02458, EVALUE 5.00e-42; NT HIT: J00116.1, EVALUE 0.00e+00; EST_HUMAN HIT: AW950516.1, EVALUE 0.00e+00
ttcagctatggagatgacaatctggctcccaacactgccaacgtccagatgaccttcctacgcctgctgtccacggaaggctcccagaacatcacctaccactgcaagaacagcattgcctatctggacgaagcagctggcaacctcaagaaggccctgctcatccagggctccaatgacgtggagatccgggcagagggcaatagcaggttcacgtacactgccctgaaggatggctgcacggtgagtggggctgccagagagaagagctgcctgtgcccaaaccg

SEQ ID NO: 23067 - DNA, 250 bp, Homo sapiens
  MAP TO AC005909.1; EXPRESSED IN ADULT LIVER, SIGNAL = 6.6; EXPRESSED IN PLACENTA, SIGNAL = 6.5; EXPRESSED IN LUNG, SIGNAL = 8.5; EXPRESSED IN HELA, SIGNAL = 6.3; EXPRESSED IN HEART, SIGNAL = 6.2; EXPRESSED IN BRAIN, SIGNAL =   7; EXPRESSED IN BONE MARROW, SIGNAL = 5.5; EXPRESSED IN FETAL LIVER, SIGNAL = 5.3; NT HIT: AJ277661.1, EVALUE 6.00e-01
ttacacaaggaattatgaacagaaaagatgtgagtctcctggtagaacatttaactgcttttcccttcttcactctgctcaagcaacattccagagagtacctggatcttggaggacagcgtgcagcagatctcctcagtgaactagcaacaaacgtgctgcacgaacaagaaataaacctttgtttttaaaatccattgaagttttgagagttgctttcaccagagcatactctacctcatcttgacct

SEQ ID NO: 23068 - DNA, 189 bp, Homo sapiens
  MAP TO AC004666.7; EXPRESSED IN LUNG, SIGNAL = 9.2; EXPRESSED IN HELA, SIGNAL = 8.1; EXPRESSED IN FETAL LIVER, SIGNAL = 7.4; EXPRESSED IN BRAIN, SIGNAL = 8.2; EXPRESSED IN BONE MARROW, SIGNAL = 8.8; EXPRESSED IN ADULT LIVER, SIGNAL = 8.4; EXPRESSED IN PLACENTA, SIGNAL =   8; EXPRESSED IN HEART, SIGNAL = 6.6; NT HIT: AJ238994.1, EVALUE 1.00e-102; SWISSPROT HIT: Q64398, EVALUE 2.30e-02; EST_HUMAN HIT: R67241.1, EVALUE 1.00e-100
agcagggatatgaagcctacgaagacctgcccaagggcatccgaggaaatcgctggaaagccggactcaccattgtcaccccagagcggagatttgtcctcacttgccccagtgagaaggaacagcaggaatggctggaaagtttgcggggtgtcctgtccagccccttgacgcccctcaaccggctta

SEQ ID NO: 23069 - DNA, 116 bp, Homo sapiens
  MAP TO AC005971.5; EXPRESSED IN PLACENTA, SIGNAL = 1.9; EXPRESSED IN LUNG, SIGNAL = 2.2; EXPRESSED IN HELA, SIGNAL = 1.8; EXPRESSED IN FETAL LIVER, SIGNAL = 1.9; EXPRESSED IN BRAIN, SIGNAL = 1.9; EXPRESSED IN ADULT LIVER, SIGNAL =   2; EXPRESSED IN HEART, SIGNAL = 1.8; EXPRESSED IN BONE MARROW, SIGNAL = 2.1; NT HIT: gi5454137, EVALUE 3.00e-59; EST_HUMAN HIT: AA426524.1, EVALUE 5.00e-59
tatcgttcctctcatcttgaagtgagtcaggcatcacagcttttgcagcaacagcagcagcaacagcttcgaaggcgaccttccttgctttcagaatttcacccaggttctgacag

SEQ ID NO: 23070 - DNA, 99 bp, Homo sapiens
  MAP TO AC004673.1; EXPRESSED IN PLACENTA, SIGNAL = 2.3; EXPRESSED IN LUNG, SIGNAL = 2.4; EXPRESSED IN HEART, SIGNAL = 1.9; EXPRESSED IN FETAL LIVER, SIGNAL = 2.1; EXPRESSED IN BONE MARROW, SIGNAL = 2.1; EXPRESSED IN HELA, SIGNAL = 2.3; EXPRESSED IN BRAIN, SIGNAL = 2.1; EXPRESSED IN ADULT LIVER, SIGNAL = 2.5; NT HIT: S78221.1, EVALUE 5.30e-02
tacatgtagatcttaccctgctagactttttactggataaagattctttgcacatagatggggattgttaactgggagattgcattttagaaggcctcc

SEQ ID NO: 23071 - DNA, 313 bp, Homo sapiens
  MAP TO AC006094.1; EXPRESSED IN BONE MARROW, SIGNAL =   3; EXPRESSED IN PLACENTA, SIGNAL = 2.3; EXPRESSED IN LUNG, SIGNAL = 3.1; EXPRESSED IN HELA, SIGNAL = 2.4; EXPRESSED IN HEART, SIGNAL = 2.4; EXPRESSED IN FETAL LIVER, SIGNAL = 2.8; EXPRESSED IN BRAIN, SIGNAL = 2.6; EXPRESSED IN ADULT LIVER, SIGNAL = 2.6; SWISSPROT HIT: P04052, EVALUE 3.40e+00
tcagggctgttccaagccttcaccccagagggtttcacattcttggtgaagtaggaggtggagtcctctgcagacaggggatgtgacaggattcgggtctggaaactcagagagtgtaagatctgcattgagataagggacagagagcatctttctccagttgcagagagggctctgtgggtgtaggagatgtggaattgtcactgttcttttgggcacgcttggtggtatgttcaccaggggcagtggagttggtggcagttgcagctggaggagatcaggaacaagggcgttgtggcactggtggcacaaa

SEQ ID NO: 23072 - DNA, 113 bp, Homo sapiens
  MAP TO AC000003.1; EXPRESSED IN ADULT LIVER, SIGNAL = 4.3; EXPRESSED IN PLACENTA, SIGNAL = 4.3; EXPRESSED IN LUNG, SIGNAL = 3.6; EXPRESSED IN HEART, SIGNAL = 4.7; EXPRESSED IN BRAIN, SIGNAL = 4.3; EXPRESSED IN HELA, SIGNAL = 3.8; EXPRESSED IN FETAL LIVER, SIGNAL = 6.1; EXPRESSED IN BONE MARROW, SIGNAL = 4.1; NT HIT: M23907.1, EVALUE 3.90e+00; EST_HUMAN HIT: BE799038.1, EVALUE 5.70e+00
ctatggaccacgtcttatataacagcaaggctttcagtagcaaggtgtagattgtcacctgctctccccaggtgcttgaggacagcaaaatgatcctgtgcttggagaataag

SEQ ID NO: 23073 - DNA, 217 bp, Homo sapiens
  MAP TO AC004812.1; EXPRESSED IN LUNG, SIGNAL = 1.5; EXPRESSED IN PLACENTA, SIGNAL = 1.3; EXPRESSED IN HEART, SIGNAL = 1.5; EXPRESSED IN FETAL LIVER, SIGNAL = 1.4; EXPRESSED IN BRAIN, SIGNAL = 1.4; EXPRESSED IN BONE MARROW, SIGNAL = 1.2; EXPRESSED IN HELA, SIGNAL = 1.8; EXPRESSED IN ADULT LIVER, SIGNAL = 1.5; SWISSPROT HIT: P33892, EVALUE 3.00e-08; EST_HUMAN HIT: AW503913.1, EVALUE 1.00e-107; NT HIT: U77700.1, EVALUE 1.00e-107
tcccaggccagatggcaggtacctgctgggagggggtggagagggcagcgatgagcttggcaacaatgggcttcactttggggtcactcttgtccaggtgcttggccagagagcccatcaggaccaccacactctgtcgcacagcatcatagctggcatcattgggcgcgttcttcaggaactcctcgaatactggcaacagcgagttgacgttctc

SEQ ID NO: 23074 - DNA, 83 bp, Homo sapiens
  MAP TO AC005996.2; EXPRESSED IN LUNG, SIGNAL = 2.2; EXPRESSED IN HELA, SIGNAL = 2.1; EXPRESSED IN BRAIN, SIGNAL = 1.8; EXPRESSED IN BONE MARROW, SIGNAL = 2.1; EXPRESSED IN ADULT LIVER, SIGNAL = 2.1; EXPRESSED IN PLACENTA, SIGNAL = 2.2; EXPRESSED IN HEART, SIGNAL = 1.7; EXPRESSED IN FETAL LIVER, SIGNAL = 2.3; NT HIT: D78132.1, EVALUE 1.00e-39; EST_HUMAN HIT: BF383140.1, EVALUE 2.00e-39; SWISSPROT HIT: Q15382, EVALUE 2.00e-09
gatgaatattctatctttcctcagacatactccatagatattaatggctatattcttgtgtattctgttacatcaatcaaaag

SEQ ID NO: 23075 - DNA, 211 bp, Homo sapiens
  MAP TO AC002094.1; EXPRESSED IN LUNG, SIGNAL = 1.9; EXPRESSED IN HELA, SIGNAL = 1.7; EXPRESSED IN BONE MARROW, SIGNAL = 1.9; EXPRESSED IN ADULT LIVER, SIGNAL =   2; EXPRESSED IN PLACENTA, SIGNAL = 1.9; EXPRESSED IN HEART, SIGNAL = 1.8; EXPRESSED IN FETAL LIVER, SIGNAL =   2; EXPRESSED IN BRAIN, SIGNAL = 1.8; EST_HUMAN HIT: BE379074.1, EVALUE 9.00e-56; NT HIT: gi9506864, EVALUE 2.00e-22; SWISSPROT HIT: O43525, EVALUE 2.90e+00
tgggtgaagcagggctacactttgatgaactgaacaagctgagggtgttggacccagaggttacccagcagaccatagagctgaaggaagagtgcaaagactttgtggacagtgagtattggggagatacagtgccactcagctttgagctgccatttcaactgtaccccaggctcatcttggccctgccacagtggagctgctggctccc

SEQ ID NO: 23076 - DNA, 184 bp, Homo sapiens
  MAP TO AC004837.1; EXPRESSED IN LUNG, SIGNAL = 1.3; EXPRESSED IN BRAIN, SIGNAL = 1.5; EXPRESSED IN BONE MARROW, SIGNAL = 1.3; EXPRESSED IN ADULT LIVER, SIGNAL = 1.2; EXPRESSED IN PLACENTA, SIGNAL = 1.3; EXPRESSED IN HEART, SIGNAL = 1.5; EXPRESSED IN FETAL LIVER, SIGNAL = 1.4; NT HIT: D14547.1, EVALUE 1.00e-29; EST_HUMAN HIT: BE888016.1, EVALUE 6.00e-32
aaagtggatcatcataaaggtcttcattctcatcattttcatgttgagtaggctgaagaggaggaggaagaggaaggattggtcctgctgtctcaggggtagcagaggaaaaagaggtggaggaggtggaaaggaggcagaaaaagcaggcacactcattgtagctaaagaaatgcattgtaat

SEQ ID NO: 23077 - DNA, 97 bp, Homo sapiens
  MAP TO AC004877.1; EXPRESSED IN PLACENTA, SIGNAL = 2.1; EXPRESSED IN LUNG, SIGNAL = 2.4; EXPRESSED IN HELA, SIGNAL = 2.2; EXPRESSED IN HEART, SIGNAL = 2.2; EXPRESSED IN FETAL LIVER, SIGNAL = 1.9; EXPRESSED IN BRAIN, SIGNAL = 2.4; EXPRESSED IN BONE MARROW, SIGNAL = 2.3; EXPRESSED IN ADULT LIVER, SIGNAL = 2.1; EST_HUMAN HIT: AA080867.1, EVALUE 2.00e-39; NT HIT: M19828.1, EVALUE 3.20e+00
tgtggccgtgcgccctcttctgggggtcttgcatactccctctgactgtgaaatacaagacttgtctctggttaaaagacatttcaaggatcagtaa

SEQ ID NO: 23078 - DNA, 195 bp, Homo sapiens
  MAP TO AC006101.2; EXPRESSED IN PLACENTA, SIGNAL = 5.7; EXPRESSED IN HELA, SIGNAL = 4.9; EXPRESSED IN BRAIN, SIGNAL = 5.2; EXPRESSED IN BONE MARROW, SIGNAL = 5.3; EXPRESSED IN ADULT LIVER, SIGNAL = 5.6; EXPRESSED IN HEART, SIGNAL = 5.6; EXPRESSED IN LUNG, SIGNAL = 6.1; EXPRESSED IN FETAL LIVER, SIGNAL = 5.8; SWISSPROT HIT: P33176, EVALUE 2.00e-32; EST_HUMAN HIT: AA663779.1, EVALUE 1.00e-106; NT HIT: gi4758647, EVALUE 1.00e-106
cttgtcatcaagctgtttgtataatttagcaatttcttcttcacactttcttctttcagcatcagtaaaatttcctataactccaattgcggttgctggtttatcattggtaagagtaatatctttatccactgtgaaagcttccaagttggctttctctttgtcaaactgttcatcaataggcaccgtctcccc

SEQ ID NO: 23079 - DNA, 242 bp, Homo sapiens
  MAP TO AC004737.1; EXPRESSED IN PLACENTA, SIGNAL = 3.7; EXPRESSED IN LUNG, SIGNAL = 4.3; EXPRESSED IN HELA, SIGNAL = 3.9; EXPRESSED IN FETAL LIVER, SIGNAL = 4.1; EXPRESSED IN BRAIN, SIGNAL = 4.5; EXPRESSED IN ADULT LIVER, SIGNAL = 4.1; EXPRESSED IN HEART, SIGNAL = 3.7; EXPRESSED IN BONE MARROW, SIGNAL =   4; NT HIT: AF224669.1, EVALUE 4.00e-11; EST_HUMAN HIT: BE154643.1, EVALUE 2.00e-10; SWISSPROT HIT: P11369, EVALUE 2.00e-06
gatgaatccgctattatcgttggagactttcaacactcctctatcagaaatagacagatccaccaagcagaaaaaatcagtaaggacatagttgaactcaacagtatcatcagtcaattggatataattgacatctacagactttatccaacaacgggcagaatacacattgaactcaagcccacaggaccactcatcgagatgcaccacattctcctccataaaacacacctgaaaccatt

SEQ ID NO: 23080 - DNA, 136 bp, Homo sapiens
  MAP TO AC004817.1; EXPRESSED IN PLACENTA, SIGNAL = 7.9; EXPRESSED IN LUNG, SIGNAL = 8.7; EXPRESSED IN FETAL LIVER, SIGNAL = 7.4; EXPRESSED IN BONE MARROW, SIGNAL = 8.2; EXPRESSED IN ADULT LIVER, SIGNAL = 8.1; EXPRESSED IN HELA, SIGNAL = 8.5; EXPRESSED IN HEART, SIGNAL = 7.9; EXPRESSED IN BRAIN, SIGNAL = 8.9; SWISSPROT HIT: P73141, EVALUE 3.10e+00; EST_HUMAN HIT: AA442230.1, EVALUE 7.00e-71; NT HIT: gi11425031, EVALUE 1.20e+00
cctgaccacctcccacctcctgagctggggctgggtctgcaggggggcagatacctgaacaaaactggagttttgataacaacaaagaaaatacaattttacttaaagtgatccaaggggacactgagtcagccat

SEQ ID NO: 23081 - DNA, 187 bp, Homo sapiens
  MAP TO AC002115.1; EXPRESSED IN BONE MARROW, SIGNAL =  11; EXPRESSED IN PLACENTA, SIGNAL =   9; EXPRESSED IN LUNG, SIGNAL =  11; EXPRESSED IN HELA, SIGNAL =  13; EXPRESSED IN HEART, SIGNAL =  14; EXPRESSED IN FETAL LIVER, SIGNAL =  17; EXPRESSED IN ADULT LIVER, SIGNAL =  14; EXPRESSED IN BRAIN, SIGNAL = 3.7; NT HIT: M23604.1, EVALUE 5.00e-04; EST_HUMAN HIT: BE185685.1, EVALUE 4.20e-02
atggccctgaaaccaccttctgccacccagcctgctcccaacgcgccagctaccccagacgccccccctaccacaggtgatccaggtgcttcagctgccccaggttctcccactaccacaggtggtccaggtgccccagctgaggtgccccaggagccgcaagagcctacacagacaccagaggaac

SEQ ID NO: 23082 - DNA, 102 bp, Homo sapiens
  MAP TO AC004844.1; EXPRESSED IN BONE MARROW, SIGNAL = 1.9; EXPRESSED IN PLACENTA, SIGNAL = 1.6; EXPRESSED IN LUNG, SIGNAL = 1.9; EXPRESSED IN HEART, SIGNAL = 1.6; EXPRESSED IN FETAL LIVER, SIGNAL = 1.8; EXPRESSED IN BRAIN, SIGNAL =   2; EXPRESSED IN ADULT LIVER, SIGNAL = 1.6; SWISSPROT HIT: P15715, EVALUE 4.20e+00; NT HIT: gi6755902, EVALUE 5.50e-02
tgtcatgaaagagaccatagagaaggctactttgggcctgatggggaaggcaactctgaggaaacagtatctgacccaagacctggaggctgagaacttaga

SEQ ID NO: 23083 - DNA, 116 bp, Homo sapiens
  MAP TO AC005905.1; EXPRESSED IN LUNG, SIGNAL = 2.1; EXPRESSED IN BONE MARROW, SIGNAL = 1.1; EXPRESSED IN PLACENTA, SIGNAL = 1.1; EXPRESSED IN HEART, SIGNAL = 1.3; EXPRESSED IN FETAL LIVER, SIGNAL = 1.4; EXPRESSED IN BRAIN, SIGNAL = 1.3; EXPRESSED IN ADULT LIVER, SIGNAL = 1.5; SWISSPROT HIT: P38396, EVALUE 1.10e+00; NT HIT: AF134119.1, EVALUE 2.50e-01
cccacaatccccagtccatgaaatatcctgattatgatttgtatgtcctcagtcccaaggtctttaatgaattagcaatggccttcactgatgggctgacagagattgactggata

SEQ ID NO: 23084 - DNA, 175 bp, Homo sapiens
  MAP TO AC002069.1; EXPRESSED IN PLACENTA, SIGNAL = 6.4; EXPRESSED IN LUNG, SIGNAL = 6.3; EXPRESSED IN HEART, SIGNAL = 5.8; EXPRESSED IN BRAIN, SIGNAL = 6.5; EXPRESSED IN ADULT LIVER, SIGNAL = 8.3; EXPRESSED IN FETAL LIVER, SIGNAL = 7.8; EXPRESSED IN BONE MARROW, SIGNAL = 6.2; EXPRESSED IN HELA, SIGNAL = 5.7; EST_HUMAN HIT: BE791082.1, EVALUE 2.00e-10; SWISSPROT HIT: Q02771, EVALUE 1.20e-01
gtgggagaaagaggccttggaagctggcacagagatgtcgaggagtttgaaggcactgctgggcctctcggtggtgatgctgatggcagccacagtggccagcatgcatctggagcaatggcaggaccagcagaggcttcatgatggagttatcagagacactgagagacaaaat

SEQ ID NO: 23085 - DNA, 163 bp, Homo sapiens
  MAP TO AC004685.1; EXPRESSED IN LUNG, SIGNAL = 2.1; EXPRESSED IN PLACENTA, SIGNAL = 2.3; EXPRESSED IN HEART, SIGNAL =   2; EXPRESSED IN FETAL LIVER, SIGNAL = 1.9; EXPRESSED IN BRAIN, SIGNAL = 2.1; EXPRESSED IN BONE MARROW, SIGNAL = 2.3; EXPRESSED IN ADULT LIVER, SIGNAL = 2.3; EXPRESSED IN HELA, SIGNAL = 2.3; SWISSPROT HIT: P32113, EVALUE 6.80e+00; NT HIT: AF025665.1, EVALUE 2.40e-02; EST_HUMAN HIT: AW009277.1, EVALUE 9.00e-37
tgccagcctggagttttttgaatacttttatggccactggagctctgtggtattctcctttataaagtgtgctgacttcattttcccttagcagaatccacggggatcctgaaagctgctccttcttgatctccttgatttgctcttgcgggatctcctgcat

SEQ ID NO: 23086 - DNA, 116 bp, Homo sapiens
  MAP TO AC005909.1; EXPRESSED IN PLACENTA, SIGNAL = 1.9; EXPRESSED IN LUNG, SIGNAL = 2.2; EXPRESSED IN HELA, SIGNAL = 2.2; EXPRESSED IN FETAL LIVER, SIGNAL = 1.8; EXPRESSED IN ADULT LIVER, SIGNAL =   2; EXPRESSED IN HEART, SIGNAL = 2.5; EXPRESSED IN BRAIN, SIGNAL = 2.8; EXPRESSED IN BONE MARROW, SIGNAL = 1.8; NT HIT: gi11432214, EVALUE 3.00e-19; SWISSPROT HIT: P45377, EVALUE 4.80e-01; EST_HUMAN HIT: BF031500.1, EVALUE 5.00e-19
ggcctatgatggccatcttgtctttggtactgagctctacaaaggtggccatggttagtgcaaaaatggttcttagtgagcagatagaagtctgtattagtccattctcacattgc

SEQ ID NO: 23087 - DNA, 159 bp, Homo sapiens
  MAP TO AC006142.1; EXPRESSED IN LUNG, SIGNAL = 1.9; EXPRESSED IN FETAL LIVER, SIGNAL = 1.8; EXPRESSED IN BONE MARROW, SIGNAL = 1.7; EXPRESSED IN PLACENTA, SIGNAL = 1.8; EXPRESSED IN HELA, SIGNAL = 1.8; EXPRESSED IN BRAIN, SIGNAL = 1.5; EXPRESSED IN ADULT LIVER, SIGNAL = 1.8; EXPRESSED IN HEART, SIGNAL = 1.6; SWISSPROT HIT: P54744, EVALUE 7.80e-01; EST_HUMAN HIT: AW015373.1, EVALUE 1.40e-01
gctgaccaattgctactcctcatcagctcctgcctctgcaaccaaccccacattctcatacttccagggaccccttgcctttgcagaattcatttcagaggctccagctttcacatcaggcccatgggaaagtacccccttcatgccaaatggtgaaag

SEQ ID NO: 23088 - DNA, 112 bp, Homo sapiens
  MAP TO AC004765.2; EXPRESSED IN BONE MARROW, SIGNAL =  13; EXPRESSED IN PLACENTA, SIGNAL =  12; EXPRESSED IN LUNG, SIGNAL =  14; EXPRESSED IN HELA, SIGNAL =  13; EXPRESSED IN HEART, SIGNAL =  12; EXPRESSED IN FETAL LIVER, SIGNAL =  12; EXPRESSED IN BRAIN, SIGNAL =  15; EXPRESSED IN ADULT LIVER, SIGNAL =  12; SWISSPROT HIT: P16950, EVALUE 9.30e+00; NT HIT: AF094481.1, EVALUE 2.40e-01; EST_HUMAN HIT: AW160658.1, EVALUE 9.10e-02
ctgctagtaaagttagtcactgtgtaggtgactctacggccgaactcatcccctttctgtgtctcagtttccccatatattttattccagtttgcacccttcctcaaaggga

SEQ ID NO: 23089 - DNA, 108 bp, Homo sapiens
  MAP TO AC005915.1; EXPRESSED IN LUNG, SIGNAL = 1.5; EXPRESSED IN BONE MARROW, SIGNAL = 1.5; EXPRESSED IN ADULT LIVER, SIGNAL = 1.4; EXPRESSED IN PLACENTA, SIGNAL = 1.3; EXPRESSED IN HEART, SIGNAL = 1.7; EXPRESSED IN FETAL LIVER, SIGNAL = 1.5; EXPRESSED IN BRAIN, SIGNAL = 2.1; EST_HUMAN HIT: AA844061.1, EVALUE 3.00e-54; NT HIT: AB009372.1, EVALUE 3.70e+00
agttaagttgtatcttttccccgactgagaagccatgtgggggtgggaaggtgaggaaggggagcgtcttctccttgttcctggcagcttctgatccttgtagggttg

SEQ ID NO: 23090 - DNA, 167 bp, Homo sapiens
  MAP TO AC003109.1; EXPRESSED IN PLACENTA, SIGNAL = 1.6; EXPRESSED IN LUNG, SIGNAL = 1.8; EXPRESSED IN HELA, SIGNAL = 1.7; EXPRESSED IN FETAL LIVER, SIGNAL = 1.5; EXPRESSED IN HEART, SIGNAL = 1.9; EXPRESSED IN BRAIN, SIGNAL =   3; EXPRESSED IN BONE MARROW, SIGNAL = 1.7; EXPRESSED IN ADULT LIVER, SIGNAL = 1.7; EST_HUMAN HIT: AI973157.1, EVALUE 1.50e-01; SWISSPROT HIT: P12752, EVALUE 5.90e-01
gagtggcacagaggcaggctgtgcgtggctggtgggggctccgtgtgcccagagtcctgggtaccttctgtcttccacgccaccatcctaagggtgggtttcatcctcactgcttccagatggctgctccacccccacaggagggtgcggcagggcagaaggggtcc

SEQ ID NO: 23091 - DNA, 142 bp, Homo sapiens
  MAP TO AC004993.1; EXPRESSED IN BONE MARROW, SIGNAL = 4.8; EXPRESSED IN ADULT LIVER, SIGNAL = 5.1; EXPRESSED IN PLACENTA, SIGNAL = 5.1; EXPRESSED IN LUNG, SIGNAL = 5.3; EXPRESSED IN HELA, SIGNAL = 4.9; EXPRESSED IN HEART, SIGNAL = 5.1; EXPRESSED IN FETAL LIVER, SIGNAL = 4.5; EXPRESSED IN BRAIN, SIGNAL = 5.2; EST_HUMAN HIT: W05064.1, EVALUE 2.00e-15; SWISSPROT HIT: P11628, EVALUE 4.00e+00; NT HIT: gi11431886, EVALUE 2.00e-15
aaatgccaaatgaccacaaaatggttgacactgagttctccagcaacttctcctgcagtcgtgaaaggatcagcttcgatgattgctctcagttggtcattgtcagcttccagtagttggccacaatgctccttattatcaa

SEQ ID NO: 23092 - DNA, 174 bp, Homo sapiens
  MAP TO AC002299.1; EXPRESSED IN BONE MARROW, SIGNAL = 1.2; EXPRESSED IN PLACENTA, SIGNAL = 1.1; EXPRESSED IN LUNG, SIGNAL = 1.1; EXPRESSED IN FETAL LIVER, SIGNAL = 1.2; EXPRESSED IN BRAIN, SIGNAL = 1.2; EXPRESSED IN ADULT LIVER, SIGNAL = 1.3; EXPRESSED IN HEART, SIGNAL = 1.6; EST_HUMAN HIT: AA774953.1, EVALUE 2.00e-87; NT HIT: gi11431590, EVALUE 1.00e-87; SWISSPROT HIT: P04411, EVALUE 4.00e-26
agaacgaaaaggcacagatgagctctatgctgtgaagatcctgaagaaggacgttgtgatccaagatgatgacgtggagtgcactatggtggagaagcgggtgttggccctgcctgggaagccgcccttcctgacccagctccactcctgcttccagaccatggtaacttgtcc

SEQ ID NO: 23093 - DNA, 109 bp, Homo sapiens
  MAP TO AC004903.2; EXPRESSED IN BRAIN, SIGNAL = 1.2; EXPRESSED IN BONE MARROW, SIGNAL = 1.4; EXPRESSED IN ADULT LIVER, SIGNAL = 1.4; EXPRESSED IN LUNG, SIGNAL = 1.7; EXPRESSED IN PLACENTA, SIGNAL = 1.6; EXPRESSED IN HEART, SIGNAL = 1.4; EXPRESSED IN FETAL LIVER, SIGNAL = 1.4; NT HIT: gi11418713, EVALUE 1.50e-02; EST_HUMAN HIT: AA382324.1, EVALUE 2.20e-02; SWISSPROT HIT: P10277, EVALUE 3.20e+00
agttacagtgaacttggagggacactatgtgtattctgaattttcaaaagaatcacagcaacagccactggacacggacactgtgcaaagtgctattttgttgtttgaa

SEQ ID NO: 23094 - DNA, 193 bp, Homo sapiens
  MAP TO AC004687.1; EXPRESSED IN LUNG, SIGNAL = 2.9; EXPRESSED IN FETAL LIVER, SIGNAL =   3; EXPRESSED IN BRAIN, SIGNAL = 3.2; EXPRESSED IN BONE MARROW, SIGNAL =   3; EXPRESSED IN PLACENTA, SIGNAL = 2.5; EXPRESSED IN HELA, SIGNAL = 2.8; EXPRESSED IN HEART, SIGNAL = 2.8; EXPRESSED IN ADULT LIVER, SIGNAL = 2.6; SWISSPROT HIT: P51450, EVALUE 8.70e-02; NT HIT: AB014512.1, EVALUE 1.00e-38; EST_HUMAN HIT: AI653251.1, EVALUE 2.00e-38
aaggaggacacagcagagcttggggttcatctggtgaactccctcgtggaccacggccgcaactcagacctgtcagacatccaggaggaagaggaagaggaggaggaggaggaggaagaggagctgggttccaggacttgctccttccagaagcaggttgctggcaacagcatcagggagaatggggccaagg

SEQ ID NO: 23095 - DNA, 212 bp, Homo sapiens
  MAP TO AC004825.2; EXPRESSED IN HELA, SIGNAL = 7.4; EXPRESSED IN FETAL LIVER, SIGNAL = 6.8; EXPRESSED IN BRAIN, SIGNAL = 8.2; EXPRESSED IN BONE MARROW, SIGNAL = 7.1; EXPRESSED IN ADULT LIVER, SIGNAL = 7.1; EXPRESSED IN PLACENTA, SIGNAL = 8.5; EXPRESSED IN HEART, SIGNAL = 7.4; EXPRESSED IN LUNG, SIGNAL = 8.1; NT HIT: AB023212.1, EVALUE 1.00e-115; SWISSPROT HIT: P52115, EVALUE 7.80e+00; EST_HUMAN HIT: BF694807.1, EVALUE 3.00e+00
ctcggtccattgctgtcttttctcctggttgaacagttgccttgttcagctttggttcgctgatccgtgaactcatttgcagtcctatctacaacttctccagcatcaagtgctctgtgtagtcgatagttgaccatcttcagaacaatgaaaacagcagctatcacaggacaataaactgctactataatcatggtagaaggaagggcctt

SEQ ID NO: 23096 - DNA, 166 bp, Homo sapiens
  MAP TO AC002041.1; EXPRESSED IN LUNG, SIGNAL = 1.9; EXPRESSED IN HEART, SIGNAL = 1.4; EXPRESSED IN FETAL LIVER, SIGNAL =   3; EXPRESSED IN BRAIN, SIGNAL =   2; EXPRESSED IN BONE MARROW, SIGNAL = 1.3; EXPRESSED IN PLACENTA, SIGNAL = 3.3; EXPRESSED IN ADULT LIVER, SIGNAL = 6.5; NT HIT: gi5729867, EVALUE 4.00e-72; EST_HUMAN HIT: AI224931.1, EVALUE 3.00e-58
gcaggccttgctgactgccacccatagcagcacactggtggaggtggtggtggcactgctgtgcacgctgcactccctgactcagtggaatgggctcatcaacaagtacatcaactcccagctccgctccatcacccacagctttgcgggaaggccttctgaaggg

SEQ ID NO: 23097 - DNA, 234 bp, Homo sapiens
  MAP TO AC003665.1; EXPRESSED IN BONE MARROW, SIGNAL = 1.3; EXPRESSED IN ADULT LIVER, SIGNAL = 1.1; EXPRESSED IN PLACENTA, SIGNAL = 1.1; EXPRESSED IN LUNG, SIGNAL = 1.3; EXPRESSED IN HEART, SIGNAL = 1.4; EXPRESSED IN FETAL LIVER, SIGNAL = 1.3; EXPRESSED IN BRAIN, SIGNAL = 1.5; SWISSPROT HIT: Q12765, EVALUE 9.00e-11; NT HIT: X82288.1, EVALUE 1.40e-01; EST_HUMAN HIT: BE796614.1, EVALUE 1.00e-119
agggggcccgcaacatctccaaccagctgagcattggcacggacatctcggcccaacacccggagctgcggactcatgcccaggccaagggctggtgggatgggcagggtgcctttgactttgctcagatcttctccctgacccagcagcctgtgcgcatggaggctgccaaggcccgcttccaggcagggcgggagctgctgcggcaacggcaaggttagtgaacggtggagg

SEQ ID NO: 23098 - DNA, 112 bp, Homo sapiens
  MAP TO AC004692.1; EXPRESSED IN LUNG, SIGNAL = 1.3; EXPRESSED IN FETAL LIVER, SIGNAL = 1.4; EXPRESSED IN BONE MARROW, SIGNAL = 1.5; EXPRESSED IN PLACENTA, SIGNAL = 1.2; EXPRESSED IN BRAIN, SIGNAL = 1.8; EXPRESSED IN ADULT LIVER, SIGNAL = 1.3; EXPRESSED IN HEART, SIGNAL = 1.6
tctccctcctcctcctcctcctcctccttttcctcctcctcctcctcctcctcctcctccttttcctcctccttctcctgtccctcttcccccatctccccgttctcctcct

SEQ ID NO: 23099 - DNA, 91 bp, Homo sapiens
  MAP TO AC004829.2; EXPRESSED IN LUNG, SIGNAL = 3.7; EXPRESSED IN FETAL LIVER, SIGNAL =   4; EXPRESSED IN BONE MARROW, SIGNAL = 3.8; EXPRESSED IN PLACENTA, SIGNAL = 3.8; EXPRESSED IN HELA, SIGNAL = 4.1; EXPRESSED IN HEART, SIGNAL = 3.9; EXPRESSED IN BRAIN, SIGNAL = 4.6; EXPRESSED IN ADULT LIVER, SIGNAL = 3.5; NT HIT: gi11419226, EVALUE 2.00e-44; EST_HUMAN HIT: BE887282.1, EVALUE 7.20e-02
aggaccaaccatgagccagagcccgggtgcaggctcaccgccgccgctgccaccgcggtcagctccagttcctgccaggagttgtcggtgc

SEQ ID NO: 23100 - DNA, 105 bp, Homo sapiens
  MAP TO AC003668.1; EXPRESSED IN PLACENTA, SIGNAL = 2.5; EXPRESSED IN LUNG, SIGNAL = 2.7; EXPRESSED IN HELA, SIGNAL = 2.8; EXPRESSED IN FETAL LIVER, SIGNAL = 2.4; EXPRESSED IN HEART, SIGNAL = 2.6; EXPRESSED IN BRAIN, SIGNAL = 3.1; EXPRESSED IN BONE MARROW, SIGNAL = 2.6; EXPRESSED IN ADULT LIVER, SIGNAL = 2.8; NT HIT: AF175389.1, EVALUE 2.30e-01
atccaagtaattgaagagcatcacaagatttggaagggacgagagtctggtcgtgactatactattggtcccgagggaaagatcattgctcttagttgccttaat

SEQ ID NO: 23101 - DNA, 97 bp, Homo sapiens
  MAP TO AC004703.1; EXPRESSED IN HELA, SIGNAL =   2; EXPRESSED IN FETAL LIVER, SIGNAL = 2.2; EXPRESSED IN BRAIN, SIGNAL = 2.4; EXPRESSED IN BONE MARROW, SIGNAL = 2.3; EXPRESSED IN ADULT LIVER, SIGNAL = 2.1; EXPRESSED IN PLACENTA, SIGNAL = 1.9; EXPRESSED IN HEART, SIGNAL =   2; EXPRESSED IN LUNG, SIGNAL = 2.1; SWISSPROT HIT: P42381, EVALUE 7.20e+00; NT HIT: AE000972.1, EVALUE 2.10e-01
gtctgtgaatgagaagacctccacaaagatacagaggctggatgaagatgtacgcaagctctttcctcctgagacccagtgagggaggcaagggagg

SEQ ID NO: 23102 - DNA, 172 bp, Homo sapiens
  MAP TO AC004836.2; EXPRESSED IN PLACENTA, SIGNAL = 9.8; EXPRESSED IN LUNG, SIGNAL =  12; EXPRESSED IN FETAL LIVER, SIGNAL = 9.9; EXPRESSED IN HELA, SIGNAL =  10; EXPRESSED IN BRAIN, SIGNAL =  12; EXPRESSED IN BONE MARROW, SIGNAL =  11; EXPRESSED IN ADULT LIVER, SIGNAL = 9.1; EXPRESSED IN HEART, SIGNAL = 9.6; SWISSPROT HIT: O50562, EVALUE 5.10e+00; EST_HUMAN HIT: H39479.1, EVALUE 3.00e-49
tgtgaaggatgaggttggtgtcacagacctgcaagtcctgactgtccaggtaacagatgtgaacgagccacctcagtttcaaggcaacttggcagaaggtaggatacaccaggatgtgcactgcagcccagacagtggcatcagggagggccctgggggacagagagaaaca

SEQ ID NO: 23103 - DNA, 133 bp, Homo sapiens
  MAP TO AC003089.1; EXPRESSED IN BRAIN, SIGNAL = 1.8; EXPRESSED IN BONE MARROW, SIGNAL = 1.5; EXPRESSED IN LUNG, SIGNAL = 1.4; EXPRESSED IN ADULT LIVER, SIGNAL = 1.4; EXPRESSED IN PLACENTA, SIGNAL = 1.7; EXPRESSED IN HEART, SIGNAL = 1.4; EXPRESSED IN FETAL LIVER, SIGNAL = 1.4; NT HIT: U52351.1, EVALUE 3.00e-69; SWISSPROT HIT: P30999, EVALUE 1.00e-09; EST_HUMAN HIT: AI610058.1, EVALUE 4.00e-20
ctcggctttaattttgttgtctccaaaacagaggtgttgcaagtaggctgccgcgttagactggaccgagggaaactggtgctgcaacatctgaatcacttccggcagttccgggtctctccatccaaattct

SEQ ID NO: 23104 - DNA, 121 bp, Homo sapiens
  MAP TO AC005703.1; EXPRESSED IN ADULT LIVER, SIGNAL = 1.3; EXPRESSED IN PLACENTA, SIGNAL = 1.4; EXPRESSED IN HEART, SIGNAL = 1.5; EXPRESSED IN LUNG, SIGNAL = 1.4; EXPRESSED IN FETAL LIVER, SIGNAL = 1.6; EXPRESSED IN BRAIN, SIGNAL = 1.2; EXPRESSED IN BONE MARROW, SIGNAL = 1.3; EST_HUMAN HIT: T88747.1, EVALUE 1.10e+00; NT HIT: D38621.1, EVALUE 9.00e-01
acatcccattaccttgagtaatgaggattataggaaggaatcacatagaattaagaaatgccatggaaatgggagcatgtttgcaaacgacaaagtccttcagaatgtaagaaggctccag

SEQ ID NO: 23105 - DNA, 502 bp, Homo sapiens
  MAP TO AC005841.3; EXPRESSED IN PLACENTA, SIGNAL = 1.8; EXPRESSED IN LUNG, SIGNAL = 1.9; EXPRESSED IN HEART, SIGNAL = 1.7; EXPRESSED IN BRAIN, SIGNAL = 1.9; EXPRESSED IN FETAL LIVER, SIGNAL = 2.4; EXPRESSED IN BONE MARROW, SIGNAL = 2.4; EXPRESSED IN HELA, SIGNAL = 2.7; EXPRESSED IN ADULT LIVER, SIGNAL = 1.7; NT HIT: U74613.1, EVALUE 0.00e+00; SWISSPROT HIT: Q08050, EVALUE 6.00e-83; EST_HUMAN HIT: AW239326.1, EVALUE 0.00e+00
atgaaaactagcccccgtcggccactgattctcaaaagacggaggctgccccttcctgttcaaaatgccccaagtgaaacatcagaggaggaacctaagagatcccctgcccaacaggagtctaatcaagcagaggcctccaaggaagtggcagagtccaactcttgcaagtttccagctgggatcaagattattaaccaccccaccatgcccaacacgcaagtagtggccatccccaacaatgctaatattcacagcatcatcacagcactgactgccaagggaaaagagagtggcagtagtgggcccaacaaattcatcctcatcagctgtgggggagccccaactcagcctccaggactccggcctcaaacccaaaccagctatgatgccaaaaggacagaagtgaccctggagaccttgggaccaaaacctgcagctagggatgtgaatcttcctagaccacctggagccctttgcgagcagaaacgggagacctgtg

SEQ ID NO: 23106 - DNA, 230 bp, Homo sapiens
  MAP TO AC002099.1; EXPRESSED IN FETAL LIVER, SIGNAL = 4.9; EXPRESSED IN BRAIN, SIGNAL = 5.3; EXPRESSED IN BONE MARROW, SIGNAL =   5; EXPRESSED IN PLACENTA, SIGNAL = 4.2; EXPRESSED IN HELA, SIGNAL = 4.6; EXPRESSED IN HEART, SIGNAL = 4.8; EXPRESSED IN ADULT LIVER, SIGNAL = 4.6; EXPRESSED IN LUNG, SIGNAL = 5.2; NT HIT: gi11429617, EVALUE 1.00e-106; SWISSPROT HIT: P53331, EVALUE 8.00e-05; EST_HUMAN HIT: BE208472.1, EVALUE 1.00e-103
cctgcttgaggttctcaggccgaatcccactgaccgctgtcctatagtccgtcacgggctcagttggtttgacgtacttgtcataaacgcacttcccatactggttcacgatggacacacgggcggccatgctctcctcccccttagggcccacgcccaccatctcacagtccaaggctaaggctcttgtcaggctgaagggtaaccaaaggctgtagtttaataaacac

SEQ ID NO: 23107 - DNA, 292 bp, Homo sapiens
  MAP TO AC004841.2; EXPRESSED IN PLACENTA, SIGNAL =  16; EXPRESSED IN HEART, SIGNAL =  10; EXPRESSED IN FETAL LIVER, SIGNAL =  11; EXPRESSED IN BRAIN, SIGNAL = 6.9; EXPRESSED IN BONE MARROW, SIGNAL =  11; EXPRESSED IN HELA, SIGNAL =   9; EXPRESSED IN ADULT LIVER, SIGNAL =  18; EXPRESSED IN LUNG, SIGNAL =  10; NT HIT: gi11446188, EVALUE 1.00e-110; SWISSPROT HIT: O43999, EVALUE 4.00e-22; EST_HUMAN HIT: AV714276.1, EVALUE 1.00e-110
gaccatcagatgcaattttggttccttgggtcctggtgacgagcgtctttccaatatttcttatactgaacatagcaggtgctttcacatcataccaatctttcttagaaaatggatcaaccactttcttcttggctccctttttgccgcctttcgtaaggcgcttgttcttgccaaccgccatggtgctggtcagagagccaaaagcaggaatcaacatttctacaatgttctttccgagaacttttttttgtctctcatcgacttctctcctatattcaactttccaaag

SEQ ID NO: 23108 - DNA, 114 bp, Homo sapiens
  MAP TO AC005722.1; EXPRESSED IN ADULT LIVER, SIGNAL = 0.51; EXPRESSED IN LUNG, SIGNAL =   4; EXPRESSED IN HEART, SIGNAL = 4.5; EXPRESSED IN BONE MARROW, SIGNAL = 0.65; SWISSPROT HIT: P79331, EVALUE 9.30e+00; EST_HUMAN HIT: BE873743.1, EVALUE 3.70e-01
tgagaggaactgggaagcaggcctttggtgccgctgtgaatgccatcacatattacatcatcggcctaccactgggcatccttctgacctttgtggtcagaatgagaatcatgg

SEQ ID NO: 23109 - DNA, 129 bp, Homo sapiens
  MAP TO AC004845.1; EXPRESSED IN PLACENTA, SIGNAL = 1.3; EXPRESSED IN LUNG, SIGNAL = 1.6; EXPRESSED IN FETAL LIVER, SIGNAL = 1.8; EXPRESSED IN BONE MARROW, SIGNAL = 1.8; EXPRESSED IN ADULT LIVER, SIGNAL = 1.5; EXPRESSED IN HELA, SIGNAL = 1.9; EXPRESSED IN HEART, SIGNAL = 2.5; EXPRESSED IN BRAIN, SIGNAL = 1.9; NT HIT: M57718.1, EVALUE 1.10e+00; SWISSPROT HIT: Q37374, EVALUE 2.40e+00; EST_HUMAN HIT: BF348001.1, EVALUE 4.30e-01
gtgcacgttagacactagtatgccaattttaaccacctccaagatgtctttgtgggccacagaaatgctctctgcaatggtgataggaacctgtccaactgtcattgtgtggagtatgaaaagacacgt

SEQ ID NO: 23110 - DNA, 105 bp, Homo sapiens
  MAP TO AC005726.1; EXPRESSED IN PLACENTA, SIGNAL = 2.1; EXPRESSED IN LUNG, SIGNAL = 2.5; EXPRESSED IN HEART, SIGNAL = 3.2; EXPRESSED IN BRAIN, SIGNAL = 5.3; EXPRESSED IN FETAL LIVER, SIGNAL = 2.2; EXPRESSED IN BONE MARROW, SIGNAL = 2.4; EXPRESSED IN HELA, SIGNAL = 2.6; EXPRESSED IN ADULT LIVER, SIGNAL = 2.6; NT HIT: X07292.1, EVALUE 1.00e-52; EST_HUMAN HIT: BE548647.1, EVALUE 2.00e-52; SWISSPROT HIT: P09972, EVALUE 5.00e-12
actcgtacccagccctttctgctgagcagaagaaggagttgtctgacattgccctgcggattgtagccccgggcaaaggcattctggctgcggatgagtctgtag

SEQ ID NO: 23111 - DNA, 178 bp, Homo sapiens
  MAP TO AC004849.1; EXPRESSED IN LUNG, SIGNAL = 2.6; EXPRESSED IN ADULT LIVER, SIGNAL =   3; EXPRESSED IN PLACENTA, SIGNAL = 2.5; EXPRESSED IN HELA, SIGNAL = 2.7; EXPRESSED IN HEART, SIGNAL = 2.9; EXPRESSED IN FETAL LIVER, SIGNAL = 2.7; EXPRESSED IN BRAIN, SIGNAL = 2.8; EXPRESSED IN BONE MARROW, SIGNAL =   3; SWISSPROT HIT: P51009, EVALUE 3.00e+00; NT HIT: U67535.1, EVALUE 4.10e-01; EST_HUMAN HIT: BE276897.1, EVALUE 6.20e-01
tgccgatgaaataattataaagatgcatggcagccagctgacacaaagatatctggagaaacatggatttgatgtccctattatggtcccaaaattagatgatctaggactcaggctcccttcacctacattttctgtgatggatgtggaacgttatgtaggtacgaactttatttct

SEQ ID NO: 23112 - DNA, 157 bp, Homo sapiens
  MAP TO AC004763.1; EXPRESSED IN PLACENTA, SIGNAL = 5.2; EXPRESSED IN LUNG, SIGNAL = 5.4; EXPRESSED IN FETAL LIVER, SIGNAL = 6.1; EXPRESSED IN BONE MARROW, SIGNAL = 5.5; EXPRESSED IN ADULT LIVER, SIGNAL = 5.7; EXPRESSED IN HELA, SIGNAL = 5.4; EXPRESSED IN HEART, SIGNAL = 5.9; EXPRESSED IN BRAIN, SIGNAL = 6.4; NT HIT: AF129533.1, EVALUE 2.00e-83; SWISSPROT HIT: Q9V1R3, EVALUE 8.90e+00; EST_HUMAN HIT: H19634.1, EVALUE 3.40e-02
gagcaaaatgctttttaatgatctgctgaatgagatcaggatgagtggacttaaaagatgaagtagctgactggttcagttcaaattcaaactttctccaaaggtcagaaatatgaaaaacttcattccacctcctacatacagaagatgcacaggc

SEQ ID NO: 23113 - DNA, 123 bp, Homo sapiens
  MAP TO AC005737.1; EXPRESSED IN BONE MARROW, SIGNAL = 3.5; EXPRESSED IN ADULT LIVER, SIGNAL = 2.5; EXPRESSED IN PLACENTA, SIGNAL = 2.5; EXPRESSED IN LUNG, SIGNAL = 1.6; EXPRESSED IN HELA, SIGNAL = 2.5; EXPRESSED IN HEART, SIGNAL =   2; EXPRESSED IN BRAIN, SIGNAL =   2; EXPRESSED IN FETAL LIVER, SIGNAL = 2.4; NT HIT: Y13402.1, EVALUE 4.30e+00
ctgccatcatcatcgtcatcattaccatcatcatcaccaacatcaccactgccgttgtcaccactgtcaccatcatcatcactaccacaccaccaccatcgttattaccactgctgttgtcac

SEQ ID NO: 23114 - DNA, 198 bp, Homo sapiens
  MAP TO AC004770.1; EXPRESSED IN LUNG, SIGNAL = 3.5; EXPRESSED IN HELA, SIGNAL = 2.1; EXPRESSED IN ADULT LIVER, SIGNAL = 4.1; EXPRESSED IN PLACENTA, SIGNAL = 2.1; EXPRESSED IN HEART, SIGNAL = 3.3; EXPRESSED IN FETAL LIVER, SIGNAL = 3.4; EXPRESSED IN BRAIN, SIGNAL = 3.5; EXPRESSED IN BONE MARROW, SIGNAL =   2; SWISSPROT HIT: Q89420, EVALUE 6.50e+00; NT HIT: gi4758333, EVALUE 1.00e-108; EST_HUMAN HIT: BF315881.1, EVALUE 1.00e-107
ctgagaggtagcaaggacaaaggccgtgatgagggtaggaatccagccattgccaaagtaaaagacagtgaaccatgcaatgctctccagggcgatgatgtgggccaggaggaggaggaagaacacgtggttggtcttgaacaggttcatgtcctcagccgtcttcctcagggcccggaagtcctcagtgatctttga

SEQ ID NO: 23115 - DNA, 325 bp, Homo sapiens
  MAP TO AC005740.1; EXPRESSED IN PLACENTA, SIGNAL = 1.5; EXPRESSED IN HEART, SIGNAL = 1.8; EXPRESSED IN LUNG, SIGNAL = 1.4; EXPRESSED IN FETAL LIVER, SIGNAL = 1.2; EXPRESSED IN BRAIN, SIGNAL = 1.3; EXPRESSED IN BONE MARROW, SIGNAL = 1.2; EXPRESSED IN ADULT LIVER, SIGNAL = 1.4; EST_HUMAN HIT: AU117553.1, EVALUE 0.00e+00; NT HIT: gi11416223, EVALUE 0.00e+00; SWISSPROT HIT: Q99372, EVALUE 1.40e-01
gggcttttggggccaggtggctacttatttcttttaggggattgtcaggaggtgaccactctcacggtgaaataccaagtgtcagaggaagtgccatctggtacagtgatcgggaagctgtcccaggaactgggccgggaggagaggcggaggcaagctggggctgccttccaggtgttgcagctgcctcaggcgctccccattcaggtggactctgaggaaggcttgctcagcacaggcaggcggctggatcgagagcagctgtgccgacagtgggatccctgcctggtttcctttgatgtgcttgccacaggggatttggctc

SEQ ID NO: 23116 - DNA, 315 bp, Homo sapiens
  MAP TO AC005747.1; EXPRESSED IN BONE MARROW, SIGNAL = 3.9; EXPRESSED IN ADULT LIVER, SIGNAL = 4.4; EXPRESSED IN LUNG, SIGNAL =   4; EXPRESSED IN HELA, SIGNAL = 4.1; EXPRESSED IN HEART, SIGNAL = 3.6; EXPRESSED IN FETAL LIVER, SIGNAL = 3.6; EXPRESSED IN BRAIN, SIGNAL = 3.7; EXPRESSED IN PLACENTA, SIGNAL = 3.8; NT HIT: gi11427135, EVALUE 0.00e+00; EST_HUMAN HIT: AA878038.1, EVALUE 7.30e-02; SWISSPROT HIT: P52824, EVALUE 1.50e+00
aaatactgggtccgcttcttgctagcccgccactcaggctgcagagcctgtgtcctggggaaggacttccggttcctaggaaaatgtcccaagaagctctcggaaggagatggcgctgagaagcttcggaagctgcagccctcacttaacagtgggcggctcctacatctagccatgcgaggtcttggggagctgggcgcccagccccaacaggaccatgcacgctggccccggggcagcagcctgtccgagtgcagtgagggggatgtcaccatggccaacaccatggaggagattctggaagagagtgagatc

SEQ ID NO: 23117 - DNA, 207 bp, Homo sapiens
  MAP TO AC004865.1; EXPRESSED IN LUNG, SIGNAL = 2.9; EXPRESSED IN BRAIN, SIGNAL =   3; EXPRESSED IN ADULT LIVER, SIGNAL = 2.7; EXPRESSED IN PLACENTA, SIGNAL =   3; EXPRESSED IN HELA, SIGNAL = 2.9; EXPRESSED IN HEART, SIGNAL =   3; EXPRESSED IN FETAL LIVER, SIGNAL = 2.7; EXPRESSED IN BONE MARROW, SIGNAL = 2.6; NT HIT: AF111103.1, EVALUE 4.90e-01; SWISSPROT HIT: P03203, EVALUE 1.10e-01; EST_HUMAN HIT: BF366228.1, EVALUE 1.00e-111
acctgactgcagagctgtctggtgggccaaagaatgtatcagtgcaacctgaaatatcagagggtcttgctactacgcccagcactcaacaagtaaaaagttctgagaaaacccagattgctgtcccccagccagtggctccctcctacagttatgctacccctaccccccaggcctctttccagagcacctcagcaccatacccag

SEQ ID NO: 23118 - DNA, 320 bp, Homo sapiens
  MAP TO AC004958.1; EXPRESSED IN PLACENTA, SIGNAL = 1.8; EXPRESSED IN LUNG, SIGNAL = 1.9; EXPRESSED IN FETAL LIVER, SIGNAL = 1.8; EXPRESSED IN BRAIN, SIGNAL = 1.7; EXPRESSED IN ADULT LIVER, SIGNAL =   2; EXPRESSED IN HELA, SIGNAL = 2.1; EXPRESSED IN HEART, SIGNAL =   2; EXPRESSED IN BONE MARROW, SIGNAL = 1.7; EST_HUMAN HIT: BE875422.1, EVALUE 3.00e-84; SWISSPROT HIT: P11793, EVALUE 4.70e+00; NT HIT: gi4757721, EVALUE 9.00e-87
ttgggttccgagagggagggggcggtggggattttcgtaggggagacgtaggactgcaggatggaggagtgagggtcagggtcattattttcgccttttctctccactccctcctttcccggttcctgcctggaggagacgcctcattgatggagctagagaagaggaaggaaaaccgcttcgtggagcgccagagcatcgtgccactgcgcctcatctaccgctcgggcggcgaagacgaaagtcggcacgacgcgctcgacacgcgggtgcggggcgacctcggtggcccgcaggtgagaggctcggtccgggaggtg

SEQ ID NO: 23119 - DNA, 214 bp, Homo sapiens
  MAP TO AC004873.1; EXPRESSED IN PLACENTA, SIGNAL = 5.1; EXPRESSED IN LUNG, SIGNAL = 6.1; EXPRESSED IN HEART, SIGNAL =   5; EXPRESSED IN FETAL LIVER, SIGNAL = 5.2; EXPRESSED IN BRAIN, SIGNAL =   5; EXPRESSED IN BONE MARROW, SIGNAL = 4.5; EXPRESSED IN ADULT LIVER, SIGNAL = 7.2; EXPRESSED IN HELA, SIGNAL = 5.2; SWISSPROT HIT: Q15466, EVALUE 3.00e-36; NT HIT: L76571.1, EVALUE 1.00e-117; EST_HUMAN HIT: W67611.1, EVALUE 1.00e-112
aggccagcgatgtcaacatctccaatgatagggcgaaagaagaggtccccaagcaggctggtcggaatggacttgagggtggaggccgtgaggaggacacgggtcaggcggccttgggctgctgggcaccagggttccaggacttcacacagcacccagtgagcctcctgctgcaggtgcccaatgtgggaggcggcttggaggcctggcacat

SEQ ID NO: 23120 - DNA, 465 bp, Homo sapiens
  MAP TO AC004968.1; EXPRESSED IN LUNG, SIGNAL = 8.9; EXPRESSED IN BRAIN, SIGNAL = 8.4; EXPRESSED IN PLACENTA, SIGNAL = 8.8; EXPRESSED IN HEART, SIGNAL = 8.9; EXPRESSED IN FETAL LIVER, SIGNAL = 8.5; EXPRESSED IN BONE MARROW, SIGNAL = 7.6; EXPRESSED IN ADULT LIVER, SIGNAL = 8.7; EXPRESSED IN HELA, SIGNAL = 7.4; SWISSPROT HIT: P23961, EVALUE 2.00e-04; NT HIT: AF317635.1, EVALUE 2.00e-05; EST_HUMAN HIT: AA461430.1, EVALUE 2.00e-09
agaggatcatgcctgtaatcccagcactttgggccaaggcaggaaggaggattgcttgatcctaggaattccacaccagcctgggcaacatagcaagactgtatctcgtaaaaaaaaaaaaaaagagagagagagaagaaggaggaggaggaggaggaggaggaggagggaggaggagaagggagaaggaaggaggaggaggaggagggaggaggaggaggggaagaaagaagtggaagaagaaggggaggaggagggggagggggaggaagaggaggaggaggaagaagaaggaggaggaagagaaggaggaagaggaggaggaggaagagaggaggaggaagaggaggaggaggaagaggaaggacgacgaggagaagaagcagaagaagcagaagcagaagcagcagcagcagcaggaagaagaagcagaagcagcagcagcagcaggaagaagaagcagaa

SEQ ID NO: 23121 - DNA, 206 bp, Homo sapiens
  MAP TO AC004976.1; EXPRESSED IN LUNG, SIGNAL = 1.6; EXPRESSED IN FETAL LIVER, SIGNAL = 1.9; EXPRESSED IN BRAIN, SIGNAL = 1.6; EXPRESSED IN BONE MARROW, SIGNAL = 1.7; EXPRESSED IN ADULT LIVER, SIGNAL = 1.6; EXPRESSED IN PLACENTA, SIGNAL = 1.6; EXPRESSED IN HEART, SIGNAL = 1.8; EXPRESSED IN HELA, SIGNAL = 1.7; NT HIT: AB040051.1, EVALUE 4.90e-01; SWISSPROT HIT: P51653, EVALUE 4.90e+00
ccctgaacactgactggagtaggagggggaaggggaggggagggagaggtgacttggcccaacataggggcaggaactggccagcaggaggtcccgtagcaggccacttggcctaaagctatctccttaattatcaacacatctaatgtccagtttgcataaaagtcacatctcttctgatttgttttggagtctgtccgaatgtc

SEQ ID NO: 23122 - DNA, 164 bp, Homo sapiens
  MAP TO AC004883.2; EXPRESSED IN PLACENTA, SIGNAL =  37; EXPRESSED IN LUNG, SIGNAL =  43; EXPRESSED IN HEART, SIGNAL =  32; EXPRESSED IN BRAIN, SIGNAL =  40; EXPRESSED IN FETAL LIVER, SIGNAL =  32; EXPRESSED IN BONE MARROW, SIGNAL =  37; EXPRESSED IN ADULT LIVER, SIGNAL =  31; EXPRESSED IN HELA, SIGNAL =  31; NT HIT: gi4506544, EVALUE 2.00e-03; EST_HUMAN HIT: N48128.1, EVALUE 2.00e-87
aatgtcagatgtgcttctacgaactaagctgactcttttaattctttggcaaagggttggcaaactaggactgtttgccaaattcaggctgcctcctatttttagagtcttcctgaaacacagctacacccgtattatccatggctgctttcctgtcacagtga

SEQ ID NO: 23123 - DNA, 86 bp, Homo sapiens
  MAP TO AC004983.2; EXPRESSED IN ADULT LIVER, SIGNAL = 2.4; EXPRESSED IN PLACENTA, SIGNAL = 2.7; EXPRESSED IN LUNG, SIGNAL =  11; EXPRESSED IN HEART, SIGNAL = 2.2; EXPRESSED IN BRAIN, SIGNAL = 2.5; EXPRESSED IN HELA, SIGNAL = 2.3; EXPRESSED IN FETAL LIVER, SIGNAL = 2.5; EXPRESSED IN BONE MARROW, SIGNAL = 2.4; EST_HUMAN HIT: AA281925.1, EVALUE 2.80e+00; NT HIT: gi6978554, EVALUE 2.30e+00
ttgctggaagatgacctggcactgtcagagtgagcagcatccgattcgtggctcatgaccgcgctgggactcttgttctgggcgtc

SEQ ID NO: 23124 - DNA, 202 bp, Homo sapiens
  MAP TO AC004891.1; EXPRESSED IN LUNG, SIGNAL =   3; EXPRESSED IN HEART, SIGNAL = 2.7; EXPRESSED IN FETAL LIVER, SIGNAL = 2.8; EXPRESSED IN BRAIN, SIGNAL = 3.2; EXPRESSED IN BONE MARROW, SIGNAL = 2.6; EXPRESSED IN PLACENTA, SIGNAL = 2.9; EXPRESSED IN HELA, SIGNAL = 2.8; EXPRESSED IN ADULT LIVER, SIGNAL = 2.9; NT HIT: AB020675.1, EVALUE 1.00e-110; SWISSPROT HIT: Q05793, EVALUE 6.00e-05
tagagctccaggcgggtgtggccttctgttggggccttgcggatctgctgcggtagccggtccacctgtaggctggcctgcttgacattcctctctgcagtgacccggtgccactggtcatcgttgagaggggttggtgacctcactacaatctctactggcccatttcccacatcaaatgaaaaggacacttctgtggcag

SEQ ID NO: 23125 - DNA, 187 bp, Homo sapiens
  MAP TO AC004991.1; EXPRESSED IN ADULT LIVER, SIGNAL = 5.2; EXPRESSED IN PLACENTA, SIGNAL = 6.2; EXPRESSED IN HEART, SIGNAL = 5.2; EXPRESSED IN LUNG, SIGNAL = 5.8; EXPRESSED IN FETAL LIVER, SIGNAL =   6; EXPRESSED IN BRAIN, SIGNAL = 6.8; EXPRESSED IN BONE MARROW, SIGNAL = 5.3; EXPRESSED IN HELA, SIGNAL = 5.3; SWISSPROT HIT: P46589, EVALUE 2.90e+00
cctgcagcttcagcgaggcggagaagtccccggtcttctgcttcacagccctcgtggcatccggctccacctcttcccactccgccaccactttgagcttcacggtgaaggtcccgatgatggaatagttataatagaccacggagtcttcagtcaccatctgggtcctgttaggagacagggagga

SEQ ID NO: 23126 - DNA, 446 bp, Homo sapiens
  MAP TO AC005323.1; EXPRESSED IN PLACENTA, SIGNAL = 0.62; EXPRESSED IN ADULT LIVER, SIGNAL = 0.54; EXPRESSED IN LUNG, SIGNAL = 1.8; EXPRESSED IN HEART, SIGNAL =  55; EXPRESSED IN FETAL LIVER, SIGNAL = 0.68; EXPRESSED IN BONE MARROW, SIGNAL = 1.8; SWISSPROT HIT: gi127772, EVALUE 6.00e-32; EST_HUMAN HIT: AA211663.1, EVALUE 0.00e+00; NT HIT: gi11024711, EVALUE 0.00e+00
tgcaaataaagatgaaaagggcacaagttaatgaagaccttggctttggagacagtctccatgttactagcaaggtcattgatctccatcttcagctcactcttttccttctccagcttctgcttgacccgctgaaggctgtcaatctgctccccaagctcagccacactatctgcgtgcttcttccgaagagcagctgccgtggcttcgtgctgcagggtggactcttccaggtccctgcgcattttctggaactcagcctcccgcttcttgttcatctcaatctgggctgaagtggccccaccggcttcttccagcctctcactgatctcctccagctcccgggagaggtcagagcgctgcttctctgctttggcccgggaggcccgctctgcctcgatttcctcctccagctcctcaatgcgggcctggttgtgatatgtcaa

SEQ ID NO: 23127 - DNA, 172 bp, Homo sapiens
  MAP TO AC004820.2; EXPRESSED IN PLACENTA, SIGNAL = 0.61; EXPRESSED IN LUNG, SIGNAL = 0.74; EXPRESSED IN BONE MARROW, SIGNAL = 0.81; EXPRESSED IN ADULT LIVER, SIGNAL = 0.59; EXPRESSED IN FETAL LIVER, SIGNAL = 0.75; EXPRESSED IN HEART, SIGNAL = 2.2; EXPRESSED IN BRAIN, SIGNAL = 0.61; NT HIT: U67780.1, EVALUE 2.00e-92; SWISSPROT HIT: Q61212, EVALUE 2.00e-21
aagatattcggggcagccagcaggctccaaaggtcaccacgatggaaatcaacattgtgttgatcctcttgttctcattgagccggccctcattttccttcttcttatctacctttgcatttctcctgcggaggcagataacaatcttcaagtagcagatgaggatgaagcc

SEQ ID NO: 23128 - DNA, 201 bp, Homo sapiens
  MAP TO AC005924.2; EXPRESSED IN BRAIN, SIGNAL = 1.5; EXPRESSED IN PLACENTA, SIGNAL = 1.1; EXPRESSED IN LUNG, SIGNAL = 1.1; EXPRESSED IN HEART, SIGNAL = 1.5; EXPRESSED IN BONE MARROW, SIGNAL = 1.2; EXPRESSED IN ADULT LIVER, SIGNAL = 1.2; EXPRESSED IN FETAL LIVER, SIGNAL = 1.4; EST_HUMAN HIT: AW402306.1, EVALUE 2.00e-78; SWISSPROT HIT: P43574, EVALUE 3.80e+00; NT HIT: gi9629818, EVALUE 1.20e-01
atggccggagccgagggcgccgctgggcggcagtcggagctggagcccgtggtatcgttggtcgacgtccttgaggaggacgaggagctggagaatgaggcgtgcgctgtcctgggcggcagcgactccgagaagtgctcctactctcaggtgggcgcgcggcccgggcctcctctcccccggctcccgccgaacctcccc

SEQ ID NO: 23129 - DNA, 103 bp, Homo sapiens
  MAP TO AC006152.2; EXPRESSED IN LUNG, SIGNAL =   2; EXPRESSED IN HELA, SIGNAL = 2.2; EXPRESSED IN HEART, SIGNAL = 2.4; EXPRESSED IN FETAL LIVER, SIGNAL = 4.4; EXPRESSED IN PLACENTA, SIGNAL = 2.4; EXPRESSED IN BRAIN, SIGNAL = 2.6; EXPRESSED IN BONE MARROW, SIGNAL = 2.5; EXPRESSED IN ADULT LIVER, SIGNAL = 3.2; SWISSPROT HIT: P05143, EVALUE 7.30e-02; NT HIT: AF055066.1, EVALUE 2.20e-01
ttgtgcctctgcagtcctccaggtgtatgtgggggaatgtctgtggggttctgaagatgtggagatgctggttctgctgggcctgaaggcaaactataatcag

SEQ ID NO: 23130 - DNA, 159 bp, Homo sapiens
  MAP TO AC004655.1; EXPRESSED IN BONE MARROW, SIGNAL = 4.7; EXPRESSED IN PLACENTA, SIGNAL =  10; EXPRESSED IN LUNG, SIGNAL = 2.8; EXPRESSED IN HEART, SIGNAL = 3.1; EXPRESSED IN FETAL LIVER, SIGNAL = 3.3; EXPRESSED IN ADULT LIVER, SIGNAL = 4.3; EXPRESSED IN BRAIN, SIGNAL = 1.3; SWISSPROT HIT: P09884, EVALUE 4.00e-25; NT HIT: gi8393994, EVALUE 1.00e-84; EST_HUMAN HIT: AA383406.1, EVALUE 2.00e-12
aggggcaatggagtttgaagatggtgactttgatgagcccatggaagttgaagaggtggacctggagcctatggctgccaaggcttgggacaaagagagtgagccagcagaggaagtgaaacaagaggcggattctgggaaagggaccgtgtcctactt

SEQ ID NO: 23131 - DNA, 158 bp, Homo sapiens
  MAP TO AC004671.1; EXPRESSED IN PLACENTA, SIGNAL = 3.1; EXPRESSED IN HELA, SIGNAL = 3.1; EXPRESSED IN HEART, SIGNAL = 3.2; EXPRESSED IN FETAL LIVER, SIGNAL = 3.2; EXPRESSED IN BRAIN, SIGNAL = 2.9; EXPRESSED IN ADULT LIVER, SIGNAL = 3.5; EXPRESSED IN LUNG, SIGNAL = 3.5; EXPRESSED IN BONE MARROW, SIGNAL = 3.3; SWISSPROT HIT: P18667, EVALUE 5.20e+00; NT HIT: AB015617.1, EVALUE 1.00e-71; EST_HUMAN HIT: BE810371.1, EVALUE 6.00e-84
acattggacacctgacaaccctctgccatgaccgagaccccctgatcctccgtggactcactccaccagcttcctataacttggacgatgaccaggcggcttgggagaatgagctgcagaagatgacccgggggcaggtgagcctctcactcaaactt

SEQ ID NO: 23132 - DNA, 194 bp, Homo sapiens
  MAP TO AC002064.1; EXPRESSED IN PLACENTA, SIGNAL = 7.7; EXPRESSED IN BRAIN, SIGNAL = 7.5; EXPRESSED IN BONE MARROW, SIGNAL = 7.4; EXPRESSED IN ADULT LIVER, SIGNAL =  18; EXPRESSED IN LUNG, SIGNAL = 5.8; EXPRESSED IN HELA, SIGNAL = 4.9; EXPRESSED IN HEART, SIGNAL = 5.6; EXPRESSED IN FETAL LIVER, SIGNAL =  12; SWISSPROT HIT: P30749, EVALUE 1.30e+00; NT HIT: AF165158.1, EVALUE 1.20e-01; EST_HUMAN HIT: AW008475.1, EVALUE 1.00e-101
tttggctttgtttacctatgttaagaagcctgagaagcaaaaaataattgactggtctgcagcacagcatgaagaattacaactgcatgcaattgccactttgtcatcagtggctcctttattaatagaagaatacatgtcatgccagggaaatgctcgagtccttgcatttctagaatggtgtgagagtgaag

SEQ ID NO: 23133 - DNA, 165 bp, Homo sapiens
  MAP TO AC004675.1; EXPRESSED IN BONE MARROW, SIGNAL = 8.7; EXPRESSED IN PLACENTA, SIGNAL = 9.7; EXPRESSED IN LUNG, SIGNAL = 9.2; EXPRESSED IN HELA, SIGNAL = 8.4; EXPRESSED IN FETAL LIVER, SIGNAL = 8.6; EXPRESSED IN ADULT LIVER, SIGNAL =   9; EXPRESSED IN HEART, SIGNAL = 8.4; EXPRESSED IN BRAIN, SIGNAL = 9.3; SWISSPROT HIT: P20273, EVALUE 1.00e+00; NT HIT: AF095703.1, EVALUE 1.50e+00
cacgccctcgctgcccgctatctggtggtaactgtgcaggggtctgttgtgtttcagttccttaggctggtcgatgaatgtccagggtcatcactgctacctgcctcagagaagtggacgcttaaggtcctgtgggccccaaggaagctggaaatagtagctgtg

SEQ ID NO: 23134 - DNA, 222 bp, Homo sapiens
  MAP TO AC004682.1; EXPRESSED IN LUNG, SIGNAL = 8.5; EXPRESSED IN HELA, SIGNAL = 7.3; EXPRESSED IN BRAIN, SIGNAL = 7.7; EXPRESSED IN BONE MARROW, SIGNAL = 7.7; EXPRESSED IN ADULT LIVER, SIGNAL = 7.3; EXPRESSED IN PLACENTA, SIGNAL = 7.1; EXPRESSED IN HEART, SIGNAL = 6.8; EXPRESSED IN FETAL LIVER, SIGNAL = 6.9; SWISSPROT HIT: P27400, EVALUE 9.60e-01; NT HIT: gi9910569, EVALUE 2.00e-46
gtgattctctatgaggaggaaatgggaaatcacaacgagaacacaggggagaagctccatttggcgcaggagcaactcgccttggccggggacaagatcgcctctctagagaggagcttaaacctctacagggataaataccagtcttccctgagcaacatcgagttactagaatgccaagtgaagatgttgcagggggaactcggcgggatcatgggtcag

SEQ ID NO: 23135 - DNA, 403 bp, Homo sapiens
  MAP TO AC003009.1; EXPRESSED IN LUNG, SIGNAL = 0.76; EXPRESSED IN PLACENTA, SIGNAL = 1.1; EXPRESSED IN HEART, SIGNAL = 1.4; EXPRESSED IN FETAL LIVER, SIGNAL = 1.7; EXPRESSED IN BONE MARROW, SIGNAL = 2.4; EXPRESSED IN ADULT LIVER, SIGNAL = 2.6; SWISSPROT HIT: P28514, EVALUE 4.60e-01; NT HIT: AJ229042.1, EVALUE 1.00e-03; EST_HUMAN HIT: BF525680.1, EVALUE 6.00e-03
attgtggctggtgcaattacatttgcaccaacttaatatgctcctctcaatgccctttccaggtccaatattcaaaggacatcactattgccagtttcttgttcatcttttcggagatgttctacctatgcacgcatataagcactcatttgtctttctctgtctctacctttctctctccataaatggcagaatactattcttcccccatatttttattaaggatatatgttcaagatcattccatatcagatctgcctcattcttttttaagtatctgcatattattatcttgtattttacacacactcctgccttgagcctttggctcttgctgcttcctcttcatggaatgcagctttctccattcccacgtcctccagatctttgctccagtcttccc

SEQ ID NO: 23136 - DNA, 144 bp, Homo sapiens
  MAP TO AC006254.10; EXPRESSED IN PLACENTA, SIGNAL = 1.2; EXPRESSED IN BONE MARROW, SIGNAL = 1.4; EXPRESSED IN ADULT LIVER, SIGNAL = 1.4; EXPRESSED IN LUNG, SIGNAL = 1.7; EXPRESSED IN HEART, SIGNAL = 1.3; EXPRESSED IN FETAL LIVER, SIGNAL = 1.8; EXPRESSED IN BRAIN, SIGNAL = 1.3; SWISSPROT HIT: P51957, EVALUE 4.00e-23; EST_HUMAN HIT: AU125616.1, EVALUE 3.00e-73; NT HIT: gi11435215, EVALUE 8.00e-76
ctaacaagaacaaacatcatcaaagtaggggacctaggaattgcccgagtgttagagaaccactgtgacatggctagcaccctcattggcacaccctactacatgagccctgaattgttctcaaacaaaccctacaactataag

SEQ ID NO: 23137 - DNA, 122 bp, Homo sapiens
  MAP TO AC005010.2; EXPRESSED IN PLACENTA, SIGNAL = 2.2; EXPRESSED IN BONE MARROW, SIGNAL = 1.8; EXPRESSED IN ADULT LIVER, SIGNAL = 2.1; EXPRESSED IN LUNG, SIGNAL = 1.9; EXPRESSED IN HELA, SIGNAL = 2.2; EXPRESSED IN HEART, SIGNAL = 1.9; EXPRESSED IN FETAL LIVER, SIGNAL = 2.1; EXPRESSED IN BRAIN, SIGNAL = 2.2; SWISSPROT HIT: P49821, EVALUE 5.40e+00; NT HIT: Z72338.1, EVALUE 1.10e+00
ctacaggtacaaccccgggcggagacccagagcgagccttccctgcaaggatccaacgcagacccagatctgccccagacccagatctgccttttcatgaaaattggaagacaacagtgatt

SEQ ID NO: 23138 - DNA, 91 bp, Homo sapiens
  MAP TO AC000062.1; EXPRESSED IN PLACENTA, SIGNAL = 1.4; EXPRESSED IN HEART, SIGNAL = 1.4; EXPRESSED IN BONE MARROW, SIGNAL = 1.3; EXPRESSED IN FETAL LIVER, SIGNAL = 1.3; EXPRESSED IN LUNG, SIGNAL = 1.3; EXPRESSED IN BRAIN, SIGNAL = 1.4; EXPRESSED IN ADULT LIVER, SIGNAL = 1.1; EST_HUMAN HIT: AA085006.1, EVALUE 2.80e-01; NT HIT: U80922.1, EVALUE 1.90e-01
cagagacacaaccacagctcctttcagcagacctggtcttagccctccaggtgctcatgctttgggagatgacagaggcaaacaaagtact

SEQ ID NO: 23139 - DNA, 114 bp, Homo sapiens
  MAP TO AC006379.2; EXPRESSED IN FETAL LIVER, SIGNAL = 8.6; EXPRESSED IN BONE MARROW, SIGNAL = 9.4; EXPRESSED IN ADULT LIVER, SIGNAL = 8.9; EXPRESSED IN HELA, SIGNAL = 8.2; EXPRESSED IN PLACENTA, SIGNAL = 7.6; EXPRESSED IN LUNG, SIGNAL = 7.7; EXPRESSED IN HEART, SIGNAL =   9; EXPRESSED IN BRAIN, SIGNAL = 9.1; SWISSPROT HIT: P93471, EVALUE 4.10e+00; NT HIT: AF029308.1, EVALUE 3.00e-07; EST_HUMAN HIT: N55081.1, EVALUE 1.00e-07
gcaatggttcaacttacaaattttcagctttacaatggtgcaaaagcagtaggcattcaatacagtcctcagcttatgatggtgttatatctggacttagacacttttgactta

SEQ ID NO: 23140 - DNA, 85 bp, Homo sapiens
  MAP TO AC004918.1; EXPRESSED IN FETAL LIVER, SIGNAL = 1.6; EXPRESSED IN PLACENTA, SIGNAL = 1.2; EXPRESSED IN LUNG, SIGNAL = 1.4; EXPRESSED IN HEART, SIGNAL = 1.4; EXPRESSED IN BRAIN, SIGNAL = 1.3; EXPRESSED IN BONE MARROW, SIGNAL = 1.3; EXPRESSED IN ADULT LIVER, SIGNAL = 1.4; NT HIT: gi11420329, EVALUE 3.00e-31; EST_HUMAN HIT: AU124538.1, EVALUE 4.00e-31
accccaagctgcacgtggagggcacggagtgtctccaagccagccagtgcactttgcttatcccggaggtgagtggggaaggggt

SEQ ID NO: 23141 - DNA, 78 bp, Homo sapiens
  MAP TO AC002075.1; EXPRESSED IN PLACENTA, SIGNAL = 3.6; EXPRESSED IN LUNG, SIGNAL = 2.9; EXPRESSED IN FETAL LIVER, SIGNAL = 3.1; EXPRESSED IN BRAIN, SIGNAL = 3.4; EXPRESSED IN ADULT LIVER, SIGNAL = 2.8; EXPRESSED IN HELA, SIGNAL = 2.8; EXPRESSED IN HEART, SIGNAL = 3.1; EXPRESSED IN BONE MARROW, SIGNAL = 2.8; EST_HUMAN HIT: BF572030.1, EVALUE 9.20e-01; NT HIT: AF022253.1, EVALUE 6.20e-01
agagatcaagtggttattgcatttaaacactacagtgatgatggcgcttacagagattttggcaccaggtggtttgct

SEQ ID NO: 23142 - DNA, 343 bp, Homo sapiens
  MAP TO AC006157.2; EXPRESSED IN PLACENTA, SIGNAL = 4.2; EXPRESSED IN ADULT LIVER, SIGNAL =   4; EXPRESSED IN LUNG, SIGNAL = 4.6; EXPRESSED IN HEART, SIGNAL = 4.3; EXPRESSED IN FETAL LIVER, SIGNAL = 3.8; EXPRESSED IN BRAIN, SIGNAL = 4.5; EXPRESSED IN HELA, SIGNAL = 3.8; EXPRESSED IN BONE MARROW, SIGNAL = 4.3; EST_HUMAN HIT: BF357678.1, EVALUE 8.00e-05; NT HIT: K02269.1, EVALUE 3.00e-03; SWISSPROT HIT: P21416, EVALUE 9.00e-15
aagcagacccgcactgggacccaaacaaggaagcccaactacagcaactgcagaggtaccaagaggcactcctgcaagttttgagaaaaggagagaaaaaggcattcaatatgggaaacatttcagaggtgcttcagagagcagatgaaagctgtagccagttttatgagagactctatgaggccttccagctttgcagtccatttgaccctgaggctactgagaaccagtgcatggtaaacgcagtgtttgtagggcaaacccagggagacatcaggcgaaagctgcaaaagctagagtgtttcactggcatgaatgtcactcaggttttagaagtggccac

SEQ ID NO: 23143 - DNA, 166 bp, Homo sapiens
  MAP TO AC004922.2; EXPRESSED IN PLACENTA, SIGNAL = 1.8; EXPRESSED IN BONE MARROW, SIGNAL = 1.4; EXPRESSED IN ADULT LIVER, SIGNAL = 1.9; EXPRESSED IN LUNG, SIGNAL = 1.8; EXPRESSED IN HEART, SIGNAL = 1.8; EXPRESSED IN FETAL LIVER, SIGNAL = 1.9; EXPRESSED IN BRAIN, SIGNAL = 2.1; EST_HUMAN HIT: BE622964.1, EVALUE 1.00e-88; NT HIT: gi11420754, EVALUE 7.00e-89; SWISSPROT HIT: Q92747, EVALUE 8.00e-26
gtgatgctattctggtgcagcgtctccaaggccgtgttgcggtcctcagttgtggctctcttgtccatgttgcggaagcgttccatggcagacatgttgcgttggatgctctgttttggaatatctaacttggagacgaaggtcaggcagccgcggtcatcgtagt

SEQ ID NO: 23144 - DNA, 135 bp, Homo sapiens
  MAP TO AC004957.1; EXPRESSED IN PLACENTA, SIGNAL = 1.5; EXPRESSED IN LUNG, SIGNAL = 1.6; EXPRESSED IN HELA, SIGNAL = 1.7; EXPRESSED IN FETAL LIVER, SIGNAL = 1.9; EXPRESSED IN BRAIN, SIGNAL = 1.4; EXPRESSED IN ADULT LIVER, SIGNAL = 2.4; EXPRESSED IN HEART, SIGNAL = 1.3; EXPRESSED IN BONE MARROW, SIGNAL = 1.3; SWISSPROT HIT: P13368, EVALUE 4.10e+00; NT HIT: AF071810.1, EVALUE 3.00e-01
taaatcacaaagaaatattggaggcttctgaaagaaaacaagcagagtcattagattttccctttaaaaaacttcgctggcatctctgtgaaggatggattgaagaggaaagagatgagtcaagaaaatcggaaa

SEQ ID NO: 23145 - DNA, 156 bp, Homo sapiens
  MAP TO AC002080.1; EXPRESSED IN PLACENTA, SIGNAL =   2; EXPRESSED IN HEART, SIGNAL = 1.8; EXPRESSED IN FETAL LIVER, SIGNAL =   2; EXPRESSED IN BONE MARROW, SIGNAL = 2.1; EXPRESSED IN ADULT LIVER, SIGNAL = 1.6; EXPRESSED IN HELA, SIGNAL =   2; EXPRESSED IN LUNG, SIGNAL = 1.8; EXPRESSED IN BRAIN, SIGNAL = 2.3; NT HIT: gi11422024, EVALUE 6.00e-83; EST_HUMAN HIT: BF208095.1, EVALUE 2.00e-71; SWISSPROT HIT: P08581, EVALUE 2.00e-23
cgtgatgaatatcgaacagagtttaccacagctttgcagcgcgttgacttattcatgggtcaattcagcgaagtcctcttaacatctatatccaccttcattaaaggagacctcaccatagctaatcttgggacatcagagggtcgcttcatgcag

SEQ ID NO: 23146 - DNA, 195 bp, Homo sapiens
  MAP TO AC006191.1; EXPRESSED IN FETAL LIVER, SIGNAL = 1.2; EXPRESSED IN BONE MARROW, SIGNAL = 1.2; EXPRESSED IN PLACENTA, SIGNAL = 1.6; EXPRESSED IN LUNG, SIGNAL = 1.2; EXPRESSED IN HEART, SIGNAL = 1.3; EXPRESSED IN BRAIN, SIGNAL = 1.2; EXPRESSED IN ADULT LIVER, SIGNAL = 1.4; EST_HUMAN HIT: BE292722.1, EVALUE 1.00e-106; SWISSPROT HIT: O95340, EVALUE 4.00e-33; NT HIT: AF160505.2, EVALUE 1.00e-106
gaggagtaccttgtctcccatgccatcccttgttactccctggatggggacaatgtccgtcatggccttaacagaaatctcggattctctcctggggacagagaggaaaatatccgccggattgctgaggtggctaagctgtttgctgatgctggtctggtctgcattaccagctttatttctccattcgcaaag

SEQ ID NO: 23147 - DNA, 272 bp, Homo sapiens
  MAP TO AC004926.2; EXPRESSED IN ADULT LIVER, SIGNAL =  21; EXPRESSED IN PLACENTA, SIGNAL =  24; EXPRESSED IN LUNG, SIGNAL =  26; EXPRESSED IN HELA, SIGNAL =  21; EXPRESSED IN HEART, SIGNAL =  20; EXPRESSED IN BRAIN, SIGNAL =  22; EXPRESSED IN BONE MARROW, SIGNAL =  22; EXPRESSED IN FETAL LIVER, SIGNAL =  20; EST_HUMAN HIT: BE158761.1, EVALUE 2.00e-14; NT HIT: AB011129.1, EVALUE 1.00e-08; SWISSPROT HIT: P39188, EVALUE 4.00e-05
agagacagagagagagaagaagaagaagaggaagaagaagaagaagaagaagaagaagaagaagaagaagaagaagaagaagaagaacaagaagaagaagaggaagaggaagaggaagaggaagagaggaacagagaaagagagagagagagggagagagggagacttgctatgttacccagacttaagtgcagtcatgtgatcatagctcactgcagcctgaaattcctgggctcaagtgatccagttgccccagcctccgaggtgactag

SEQ ID NO: 23148 - DNA, 89 bp, Homo sapiens
  MAP TO AC004960.1; EXPRESSED IN LUNG, SIGNAL = 4.1; EXPRESSED IN HELA, SIGNAL = 3.2; EXPRESSED IN BRAIN, SIGNAL = 3.5; EXPRESSED IN BONE MARROW, SIGNAL = 3.3; EXPRESSED IN ADULT LIVER, SIGNAL =   4; EXPRESSED IN PLACENTA, SIGNAL = 3.5; EXPRESSED IN HEART, SIGNAL =   3; EXPRESSED IN FETAL LIVER, SIGNAL = 3.2; NT HIT: gi7662213, EVALUE 1.80e-01; EST_HUMAN HIT: AW797168.1, EVALUE 3.00e-07
ctagaaggcaccctctgaaccagatgtctggccctcactagacaccgaatgggccagcactttgttcttggacttctcagcctccagag

SEQ ID NO: 23149 - DNA, 136 bp, Homo sapiens
  MAP TO AC004526.1; EXPRESSED IN PLACENTA, SIGNAL = 1.8; EXPRESSED IN LUNG, SIGNAL = 1.7; EXPRESSED IN FETAL LIVER, SIGNAL = 2.6; EXPRESSED IN BRAIN, SIGNAL = 1.5; EXPRESSED IN BONE MARROW, SIGNAL = 1.6; EXPRESSED IN ADULT LIVER, SIGNAL = 1.7; EXPRESSED IN HEART, SIGNAL = 1.6; SWISSPROT HIT: Q04690, EVALUE 8.00e-20; NT HIT: M38106.1, EVALUE 5.00e-71
gaacagcatcggtgcagtaggaagtgccatgttcctcagatttatcaatcctgccattgtctcaccgtatgaagcagggattttagataaaaagccaccacctagaatcgaaaggggcttgaagttaatgtcaaag

SEQ ID NO: 23150 - DNA, 127 bp, Homo sapiens
  MAP TO AC006203.1; EXPRESSED IN PLACENTA, SIGNAL = 8.3; EXPRESSED IN ADULT LIVER, SIGNAL = 8.7; EXPRESSED IN LUNG, SIGNAL = 6.7; EXPRESSED IN HEART, SIGNAL = 7.5; EXPRESSED IN FETAL LIVER, SIGNAL = 9.7; EXPRESSED IN BRAIN, SIGNAL = 8.8; EXPRESSED IN BONE MARROW, SIGNAL = 8.1; EXPRESSED IN HELA, SIGNAL = 7.2; SWISSPROT HIT: Q99089, EVALUE 2.40e+00; NT HIT: AL161588.2, EVALUE 1.10e+00
tccatgaggtcattcagggacatgagtcccacccagcttggagcccttagaatttacacggtcaaaactgattcatccccattgccttttcctcaccagaaaagtgagaaaagtaagtctgaaccag

SEQ ID NO: 23151 - DNA, 81 bp, Homo sapiens
  MAP TO AC004931.1; EXPRESSED IN LUNG, SIGNAL = 1.9; EXPRESSED IN HELA, SIGNAL = 1.8; EXPRESSED IN FETAL LIVER, SIGNAL = 1.8; EXPRESSED IN BRAIN, SIGNAL = 2.1; EXPRESSED IN PLACENTA, SIGNAL = 1.8; EXPRESSED IN HEART, SIGNAL = 1.8; EXPRESSED IN BONE MARROW, SIGNAL =   2; EXPRESSED IN ADULT LIVER, SIGNAL =   2; NT HIT: gi7662347, EVALUE 4.10e-02; EST_HUMAN HIT: BE514000.1, EVALUE 6.20e-02
ttgatcataaggaagaggagcagagcacctacctagctgtgccttttcaggccaaccacgtgctggcagcgtctgttcctt

SEQ ID NO: 23152 - DNA, 213 bp, Homo sapiens
  MAP TO AC004874.1; EXPRESSED IN PLACENTA, SIGNAL = 4.1; EXPRESSED IN HELA, SIGNAL = 3.3; EXPRESSED IN BRAIN, SIGNAL = 4.3; EXPRESSED IN ADULT LIVER, SIGNAL = 4.8; EXPRESSED IN HEART, SIGNAL = 4.9; EXPRESSED IN LUNG, SIGNAL = 4.4; EXPRESSED IN FETAL LIVER, SIGNAL = 4.2; EXPRESSED IN BONE MARROW, SIGNAL = 4.2; NT HIT: gi11141878, EVALUE 1.30e-01; EST_HUMAN HIT: BF370000.1, EVALUE 1.00e-95; SWISSPROT HIT: Q10473, EVALUE 2.00e-09
atgtttatagaccttcttgcatttttgtcatttgcagaggagctgaaggtccccctagaggagtatgtccacaaacgctaccccgggctggtgaaggtggtaagaaatcagaagagggaaggcctgatccgcgctcgcattgagggctggaaggtggctaccgggcaggtcactggcttctttgatgcccacgtggaattcaccgctggctgg

SEQ ID NO: 23153 - DNA, 165 bp, Homo sapiens
  MAP TO AC004240.1; EXPRESSED IN PLACENTA, SIGNAL = 4.3; EXPRESSED IN HEART, SIGNAL = 4.8; EXPRESSED IN FETAL LIVER, SIGNAL = 4.8; EXPRESSED IN BONE MARROW, SIGNAL = 4.3; EXPRESSED IN ADULT LIVER, SIGNAL = 4.3; EXPRESSED IN HELA, SIGNAL = 4.5; EXPRESSED IN LUNG, SIGNAL = 4.6; EXPRESSED IN BRAIN, SIGNAL = 4.4; SWISSPROT HIT: P78363, EVALUE 1.80e+00; NT HIT: X61597.1, EVALUE 3.80e-01
atgggtcctactgagaagacggcagtggaggtagagtgggttttaggagatgagggtgaactgcagcaggacaaggatgagaggccagtccacaatgttcctgatgtagattctgagagctttagctttcattctggagccttgggagtataacagcagggaact

SEQ ID NO: 23154 - DNA, 83 bp, Homo sapiens
  MAP TO AC004969.1; EXPRESSED IN LUNG, SIGNAL = 1.4; EXPRESSED IN FETAL LIVER, SIGNAL = 1.4; EXPRESSED IN BONE MARROW, SIGNAL = 1.3; EXPRESSED IN PLACENTA, SIGNAL = 1.5; EXPRESSED IN HEART, SIGNAL = 1.3; EXPRESSED IN BRAIN, SIGNAL = 1.3; EXPRESSED IN ADULT LIVER, SIGNAL = 1.4; NT HIT: AB035414.1, EVALUE 4.30e-02; EST_HUMAN HIT: AI221371.1, EVALUE 8.00e-20
ttccccaaccaaacaggggcacaggctgcgtttgcagctcctgtaaaagctccatacccagagcagtgtctcccagctcccag

SEQ ID NO: 23155 - DNA, 122 bp, Homo sapiens
  MAP TO AC004529.1; EXPRESSED IN LUNG, SIGNAL = 4.4; EXPRESSED IN BRAIN, SIGNAL = 4.8; EXPRESSED IN ADULT LIVER, SIGNAL = 3.8; EXPRESSED IN PLACENTA, SIGNAL =   4; EXPRESSED IN HELA, SIGNAL = 4.2; EXPRESSED IN HEART, SIGNAL = 4.3; EXPRESSED IN FETAL LIVER, SIGNAL = 4.2; EXPRESSED IN BONE MARROW, SIGNAL = 3.9; SWISSPROT HIT: P52947, EVALUE 4.10e+00; EST_HUMAN HIT: BF370339.1, EVALUE 7.00e-46; NT HIT: AB040934.1, EVALUE 2.00e-48
ctggttctccgtggctggctggcagtcctccagcctgaccccaaatgcccttgggacagccttcttatttttcttgatgatgttgatgccccagggggttttgggggctgcagcactgtcat

SEQ ID NO: 23156 - DNA, 179 bp, Homo sapiens
  MAP TO AC006206.3; EXPRESSED IN ADULT LIVER, SIGNAL = 5.7; EXPRESSED IN PLACENTA, SIGNAL = 4.8; EXPRESSED IN LUNG, SIGNAL = 4.2; EXPRESSED IN HELA, SIGNAL = 5.2; EXPRESSED IN HEART, SIGNAL =   5; EXPRESSED IN BRAIN, SIGNAL = 5.5; EXPRESSED IN FETAL LIVER, SIGNAL = 5.8; EXPRESSED IN BONE MARROW, SIGNAL = 5.3; NT HIT: Z35838.1, EVALUE 7.00e-03; SWISSPROT HIT: gi2506870, EVALUE 1.70e+00
tgggtagtgttgtgggctgggtattgttcgtgctgtctttttgatctgaaagacaatggactgagcttaacctggtctccaggttcttctccagtgttgatattctatgactattggagtatagcctaagaatgaaaaatataataagaaattaaatattatgagccttgatgttatta

SEQ ID NO: 23157 - DNA, 257 bp, Homo sapiens
  MAP TO AC004254.1; EXPRESSED IN PLACENTA, SIGNAL = 3.7; EXPRESSED IN HELA, SIGNAL = 3.2; EXPRESSED IN HEART, SIGNAL = 3.7; EXPRESSED IN ADULT LIVER, SIGNAL = 3.7; EXPRESSED IN BONE MARROW, SIGNAL = 3.2; EXPRESSED IN BRAIN, SIGNAL = 3.6; EXPRESSED IN FETAL LIVER, SIGNAL = 3.4; EXPRESSED IN LUNG, SIGNAL =   4; SWISSPROT HIT: P16109, EVALUE 3.60e-01; EST_HUMAN HIT: R63251.1, EVALUE 9.20e-01; NT HIT: AB021736.1, EVALUE 3.00e-03
taatctttaatcaggcccagaccctggtaaacaatgtgaagccctaactcagcctgggtctggaaggtcttggtgcctaagtctgggaaggaagttggtgatacaagctgtttaaatctgtactgcatgatgtcttcagcattgtgataaataaataagtaaaaataaagcccttgaaagaaagatgaaaggtgacattgacagaccaaactgagacatgattcaggcttcaccttcaggaatattggcaggaccct

SEQ ID NO: 23158 - DNA, 238 bp, Homo sapiens
  MAP TO AC004533.1; EXPRESSED IN LUNG, SIGNAL = 2.7; EXPRESSED IN FETAL LIVER, SIGNAL = 2.4; EXPRESSED IN BRAIN, SIGNAL = 2.5; EXPRESSED IN BONE MARROW, SIGNAL = 2.5; EXPRESSED IN ADULT LIVER, SIGNAL = 2.5; EXPRESSED IN HELA, SIGNAL = 2.4; EXPRESSED IN PLACENTA, SIGNAL = 2.4; EXPRESSED IN HEART, SIGNAL = 2.7; NT HIT: gi11449332, EVALUE 2.20e+00; EST_HUMAN HIT: BE542612.1, EVALUE 8.50e-01
gacaataaaacatgccctacctggcaagagaaggaagaagaaggagagggagagggtgacagagagggagaaagacaaggagaaggaagaggaagtgaaggaggaagatgaagtggaagaggaggagggggagaaggaggaggagaaggaagtgaaaagaaagaagaagaaaaaggaggaggaagaggaggagatgaaatttaaatgcacgtttgagaagagattttgaaaagcattg

SEQ ID NO: 23159 - DNA, 82 bp, Homo sapiens
  MAP TO AC006210.1; EXPRESSED IN LUNG, SIGNAL = 3.9; EXPRESSED IN HELA, SIGNAL = 4.4; EXPRESSED IN FETAL LIVER, SIGNAL = 5.3; EXPRESSED IN BRAIN, SIGNAL = 4.7; EXPRESSED IN PLACENTA, SIGNAL = 4.3; EXPRESSED IN HEART, SIGNAL = 4.5; EXPRESSED IN BONE MARROW, SIGNAL = 4.5; EXPRESSED IN ADULT LIVER, SIGNAL = 4.6; SWISSPROT HIT: Q28509, EVALUE 3.30e+00; NT HIT: AF276752.1, EVALUE 4.20e-02; EST_HUMAN HIT: AI133650.1, EVALUE 2.50e-01
actgatgtttgcacttactagcccgttcatgtactcatcgaccttaacaagtgaaaagcatagaagaacaaggcttttcagt

SEQ ID NO: 23160 - DNA, 213 bp, Homo sapiens
  MAP TO AC003669.1; EXPRESSED IN LUNG, SIGNAL = 1.4; EXPRESSED IN FETAL LIVER, SIGNAL = 1.3; EXPRESSED IN BRAIN, SIGNAL = 1.5; EXPRESSED IN BONE MARROW, SIGNAL = 1.5; EXPRESSED IN ADULT LIVER, SIGNAL = 1.1; EXPRESSED IN PLACENTA, SIGNAL = 1.4; EXPRESSED IN HEART, SIGNAL = 1.6; SWISSPROT HIT: P25943, EVALUE 4.50e+00; EST_HUMAN HIT: AI765078.1, EVALUE 1.00e-107; NT HIT: AF229179.1, EVALUE 1.00e-107
cttctacgttgccagatccctgataaaatcagtagtgcaattgcaactatgatgatgcaaaatatcacaccaaatataataatccagatgggcacagatgggtccatgggtggtgcaagtgtggaagggatttttaaaaattccagagtttggtcatttagaaagaaggcattgttgatccggttcttgttcattctaaaatgcaatgataat

SEQ ID NO: 23161 - DNA, 296 bp, Homo sapiens
  MAP TO AC005754.1; EXPRESSED IN BRAIN, SIGNAL =  14; EXPRESSED IN BONE MARROW, SIGNAL =  12; EXPRESSED IN ADULT LIVER, SIGNAL =  11; EXPRESSED IN PLACENTA, SIGNAL =  12; EXPRESSED IN LUNG, SIGNAL =  16; EXPRESSED IN HEART, SIGNAL =  15; EXPRESSED IN HELA, SIGNAL =  14; EXPRESSED IN FETAL LIVER, SIGNAL =  12; NT HIT: gi11416799, EVALUE 5.00e-11; EST_HUMAN HIT: AU131635.1, EVALUE 5.00e-06; SWISSPROT HIT: P16879, EVALUE 3.10e+00
ggcatggtcatttacatcttggagctgtagttcaccttgaataaactgcaccggatttttcagtaacatctggaaatgtagtatacatggatctatgtcaccgcacaactcttcccggtccaatttttcttttaggagcaaattcccactcttccgttcgagctgcaaatactgtttgttccctttggaaagaatccgggcgcctctcgcggccagttcccctacacccagccccagatcttttgctaagttggccacaaaagagccgctgtccctctcttctagaactgaatact

SEQ ID NO: 23162 - DNA, 149 bp, Homo sapiens
  MAP TO AC004986.2; EXPRESSED IN LUNG, SIGNAL = 3.7; EXPRESSED IN FETAL LIVER, SIGNAL = 3.5; EXPRESSED IN BRAIN, SIGNAL = 3.3; EXPRESSED IN BONE MARROW, SIGNAL = 3.5; EXPRESSED IN PLACENTA, SIGNAL = 3.5; EXPRESSED IN HELA, SIGNAL = 3.8; EXPRESSED IN HEART, SIGNAL = 2.9; EXPRESSED IN ADULT LIVER, SIGNAL = 4.9; SWISSPROT HIT: Q04206, EVALUE 3.00e-13; NT HIT: gi11496238, EVALUE 2.00e-48; EST_HUMAN HIT: AA206944.1, EVALUE 4.00e-48
ctaaaactcggagttgttgatggatgccaggtctgtgaacacagctgggtctgtgctgttgccaagcaaggcccccaggtcttcatcatcaaactgcagatgcagcagggccttctgttccttccccagcctaggcaggcttgggggca

SEQ ID NO: 23163 - DNA, 128 bp, Homo sapiens
  MAP TO AC002542.1; EXPRESSED IN PLACENTA, SIGNAL = 7.5; EXPRESSED IN HEART, SIGNAL =   7; EXPRESSED IN FETAL LIVER, SIGNAL = 7.2; EXPRESSED IN BRAIN, SIGNAL = 7.2; EXPRESSED IN BONE MARROW, SIGNAL = 7.7; EXPRESSED IN LUNG, SIGNAL = 9.1; EXPRESSED IN HELA, SIGNAL = 7.6; EXPRESSED IN ADULT LIVER, SIGNAL =   8; SWISSPROT HIT: O88307, EVALUE 5.40e+00; EST_HUMAN HIT: BF684628.1, EVALUE 1.10e-01
tacctactgcaacatcttttctccctacacagcgactccagcttgggagggcagggccagggttgtcacagcttcccctgtggtgtctgcctgccaagcacagctctggagttagccctgggtgtgag

SEQ ID NO: 23164 - DNA, 92 bp, Homo sapiens
  MAP TO AC004384.1; EXPRESSED IN LUNG, SIGNAL = 3.2; EXPRESSED IN FETAL LIVER, SIGNAL = 2.9; EXPRESSED IN BRAIN, SIGNAL = 3.1; EXPRESSED IN BONE MARROW, SIGNAL = 2.5; EXPRESSED IN HELA, SIGNAL = 2.7; EXPRESSED IN PLACENTA, SIGNAL = 2.6; EXPRESSED IN HEART, SIGNAL = 3.1; EXPRESSED IN ADULT LIVER, SIGNAL = 2.7; NT HIT: AF072724.1, EVALUE 1.90e-01
caatgtctttgaaaggtgctccctcagcctttctttccaggtcaaggatgttggtgaaaggggctgcaactccaatagaatcacttatctca

SEQ ID NO: 23165 - DNA, 250 bp, Homo sapiens
  MAP TO AC006372.2; EXPRESSED IN LUNG, SIGNAL =  12; EXPRESSED IN HELA, SIGNAL =  11; EXPRESSED IN HEART, SIGNAL =  11; EXPRESSED IN FETAL LIVER, SIGNAL =  11; EXPRESSED IN BRAIN, SIGNAL =  12; EXPRESSED IN PLACENTA, SIGNAL =  10; EXPRESSED IN BONE MARROW, SIGNAL =  12; EXPRESSED IN ADULT LIVER, SIGNAL =  10; SWISSPROT HIT: P35616, EVALUE 5.00e-02; EST_HUMAN HIT: BE909318.1, EVALUE 2.30e-01
agctcgcccttgggcttggcagccgtggtgcctcctgcctgtgaacgcccctctcctcctttctgtgaacgtccctctccttcctgtgaacgtcccagactctcctcctgcctgtgaacgtccctctcctgcccgtgaacgtccctctcctgcccgtgaacgcccctgtcctcctgctccgctctctcgacctttccttccttttgttggagaataaagacctgcgtctcatggaggtggggcccaatac

SEQ ID NO: 23166 - DNA, 187 bp, Homo sapiens
  MAP TO AC004926.2; EXPRESSED IN PLACENTA, SIGNAL = 1.4; EXPRESSED IN LUNG, SIGNAL = 1.6; EXPRESSED IN FETAL LIVER, SIGNAL = 1.4; EXPRESSED IN ADULT LIVER, SIGNAL = 1.5; EXPRESSED IN HEART, SIGNAL = 1.4; EXPRESSED IN BRAIN, SIGNAL = 1.7; EXPRESSED IN BONE MARROW, SIGNAL = 1.4; NT HIT: AL163246.2, EVALUE 3.00e-08; SWISSPROT HIT: Q01200, EVALUE 1.70e+00; EST_HUMAN HIT: F10586.1, EVALUE 2.00e-04
agacaataccttcttcacaaggaggcaggaaagaaagaaagcaaagtgggaagagccccttataaaaccatcagatcttgcaagaaatcactattgtgagaaaagcatggggaatgctgtcccccatgatccaatcacctcctccctgcctcaacaggtggggattacagttcgagatgagatttgg

SEQ ID NO: 23167 - DNA, 165 bp, Homo sapiens
  MAP TO AC005844.7; EXPRESSED IN BONE MARROW, SIGNAL = 6.4; EXPRESSED IN BRAIN, SIGNAL = 6.1; EXPRESSED IN ADULT LIVER, SIGNAL = 5.2; EXPRESSED IN PLACENTA, SIGNAL = 5.5; EXPRESSED IN HEART, SIGNAL = 6.7; EXPRESSED IN LUNG, SIGNAL = 6.2; EXPRESSED IN HELA, SIGNAL =   7; EXPRESSED IN FETAL LIVER, SIGNAL = 5.8; SWISSPROT HIT: P29375, EVALUE 1.00e-17; EST_HUMAN HIT: BE886088.1, EVALUE 4.00e-88; NT HIT: gi11436400, EVALUE 3.00e-88
cttgggcggccgaattttgcagatgccggttttctccgccaaaggccggatgcggccgataaagctgagcggatctgtgaactcctcccaactcggctcaaagacggggcactctggcggtggcacgaactccgccgcgtagccccccggccccacgcccgccat

SEQ ID NO: 23168 - DNA, 201 bp, Homo sapiens
  MAP TO AC005025.1; EXPRESSED IN BONE MARROW, SIGNAL = 1.8; EXPRESSED IN PLACENTA, SIGNAL = 1.8; EXPRESSED IN LUNG, SIGNAL = 1.9; EXPRESSED IN HELA, SIGNAL = 1.8; EXPRESSED IN HEART, SIGNAL = 1.9; EXPRESSED IN FETAL LIVER, SIGNAL = 1.8; EXPRESSED IN ADULT LIVER, SIGNAL = 1.8; EXPRESSED IN BRAIN, SIGNAL =   2; SWISSPROT HIT: P40468, EVALUE 1.70e+00; EST_HUMAN HIT: R88249.1, EVALUE 1.80e-01; NT HIT: AB038267.1, EVALUE 8.00e-03
acagctcatccgagaaccagaactgcaccatgtggggccatgtggctgcatgctgactcagaagaggggtggggaaggagggccgcttctgattcaccaagaccacatcctgcccctccttcattctttcccctggaagctgcatatcaatcttcttagtgaaatctccccaaagcatggggctcaggtattttcagcaaa

SEQ ID NO: 23169 - DNA, 89 bp, Homo sapiens
  MAP TO AC004898.1; EXPRESSED IN LUNG, SIGNAL =   8; EXPRESSED IN PLACENTA, SIGNAL = 7.2; EXPRESSED IN HEART, SIGNAL = 7.4; EXPRESSED IN FETAL LIVER, SIGNAL = 7.8; EXPRESSED IN BRAIN, SIGNAL = 7.8; EXPRESSED IN BONE MARROW, SIGNAL = 7.5; EXPRESSED IN HELA, SIGNAL = 8.2; EXPRESSED IN ADULT LIVER, SIGNAL = 8.6; NT HIT: M26511.1, EVALUE 7.30e-01; EST_HUMAN HIT: BE141696.1, EVALUE 1.10e+00
tgccgttcaccttctacaaccgaaaacgcccttcaggtggcattcgaaaagcagccactccctgatgccatgcgggagcgagcatggaa

SEQ ID NO: 23170 - DNA, 337 bp, Homo sapiens
  MAP TO AC006425.9; EXPRESSED IN LUNG, SIGNAL = 3.5; EXPRESSED IN BRAIN, SIGNAL = 1.7; EXPRESSED IN BONE MARROW, SIGNAL = 3.7; EXPRESSED IN PLACENTA, SIGNAL = 2.8; EXPRESSED IN HELA, SIGNAL = 4.7; EXPRESSED IN HEART, SIGNAL = 3.8; EXPRESSED IN FETAL LIVER, SIGNAL = 4.5; EXPRESSED IN ADULT LIVER, SIGNAL = 3.6; NT HIT: gi11418526, EVALUE 1.00e-115; SWISSPROT HIT: P53025, EVALUE 4.00e-16; EST_HUMAN HIT: AV717788.1, EVALUE 1.00e-117
gaggcggtgcgcgaagtcctgcaccgaaaccagcgcaagcaccccaagtttctggagatggtggagttgcagatcagcttcaagaactatgactccccagaaggacaagcgcttctcgggcaccgtcaggcttaagtccactccctgccccaagttctccatgtgtgtcctgggtaaccagcagcactgtgacaaggccaagcctgtggatttccaccacatggaaaacgaggtactgaaaaaactcaacaagaataagaaactggtcaagaaactggccaagagtatgatgcatttttggcctcagagtctctgatcaagcagatcccacgaatcc

SEQ ID NO: 23171 - DNA, 297 bp, Homo sapiens
  MAP TO AC004389.1; EXPRESSED IN PLACENTA, SIGNAL = 4.8; EXPRESSED IN ADULT LIVER, SIGNAL = 5.1; EXPRESSED IN LUNG, SIGNAL = 5.1; EXPRESSED IN HEART, SIGNAL = 4.1; EXPRESSED IN FETAL LIVER, SIGNAL = 4.1; EXPRESSED IN BRAIN, SIGNAL = 4.3; EXPRESSED IN HELA, SIGNAL = 3.9; EXPRESSED IN BONE MARROW, SIGNAL =   4; NT HIT: AL163303.2, EVALUE 1.00e-24; EST_HUMAN HIT: AW991989.1, EVALUE 5.00e-18; SWISSPROT HIT: P40050, EVALUE 2.70e-01
cctcagatggatctgggcaaagtacattgaaaatcttctggaaaggattcaccagtctagttgccactaagaatatttgtgatcaaatattaacattaacattaatgggaattttgaagaagttgattacaaccctaataaatgactttaaggagttcaagacttcagctgaagaggtaactgcacatgtggtggaaatagccaaagaattagaattagaagtggaacctgatgatgtggctgaattgctgccatctcatgataaaacttgaatgaatgaggagttgctccttacag

SEQ ID NO: 23172 - DNA, 133 bp, Homo sapiens
  MAP TO AC004549.1; EXPRESSED IN LUNG, SIGNAL = 9.3; EXPRESSED IN HEART, SIGNAL = 8.4; EXPRESSED IN FETAL LIVER, SIGNAL = 7.8; EXPRESSED IN BRAIN, SIGNAL = 8.3; EXPRESSED IN BONE MARROW, SIGNAL = 8.4; EXPRESSED IN HELA, SIGNAL = 8.1; EXPRESSED IN PLACENTA, SIGNAL = 8.4; EXPRESSED IN ADULT LIVER, SIGNAL = 8.3; EST_HUMAN HIT: AU143287.1, EVALUE 4.00e-69; SWISSPROT HIT: P39650, EVALUE 1.10e+00; NT HIT: AF268075.1, EVALUE 3.00e-69
cacaaagcttaaaaatggaaaatgaagagtttaagaagaggttcagtgatgctacatccaaagcccatcagcttgaggaagatattgtgtcagtaacacataaagcaattgaaaaagaaaccgaattagacag

SEQ ID NO: 23173 - DNA, 204 bp, Homo sapiens
  MAP TO AC006453.3; EXPRESSED IN LUNG, SIGNAL = 3.7; EXPRESSED IN FETAL LIVER, SIGNAL = 2.8; EXPRESSED IN BONE MARROW, SIGNAL = 3.8; EXPRESSED IN PLACENTA, SIGNAL = 3.4; EXPRESSED IN HELA, SIGNAL = 3.7; EXPRESSED IN BRAIN, SIGNAL = 2.6; EXPRESSED IN ADULT LIVER, SIGNAL = 3.6; EXPRESSED IN HEART, SIGNAL = 2.7; SWISSPROT HIT: P21394, EVALUE 2.90e+00; NT HIT: Z78950.1, EVALUE 1.90e+00; EST_HUMAN HIT: BE141849.1, EVALUE 6.00e-97
ataactcccaaagatgtccacgtcctaacctccagaactagtgaatgggatgttggcagaagagactctgtggatgagattacttcaaagatttgcgacggggagactattgtgggttatctgtgtggatacgcaatgtcatcacaaagtgtccttatagatgaagagggaggcagaggagattcgactacagaagagaaggtg

SEQ ID NO: 23174 - DNA, 154 bp, Homo sapiens
  MAP TO AC004934.1; EXPRESSED IN BONE MARROW, SIGNAL =   2; EXPRESSED IN PLACENTA, SIGNAL = 1.8; EXPRESSED IN LUNG, SIGNAL = 2.2; EXPRESSED IN HELA, SIGNAL =   2; EXPRESSED IN HEART, SIGNAL = 1.8; EXPRESSED IN FETAL LIVER, SIGNAL = 2.1; EXPRESSED IN BRAIN, SIGNAL = 2.1; EXPRESSED IN ADULT LIVER, SIGNAL = 1.8; NT HIT: Z79021.1, EVALUE 8.90e-02; EST_HUMAN HIT: AW818323.1, EVALUE 1.30e-01
agtaagcatgctttcagaaaggatgggagaacttgttgggctaattttagttgtagttcaaatttaaattctttggttttttagctttcttgacaatgatgaaatacagcttcctatgtctttaaagaccaaactttaagattttaaaagtatt

SEQ ID NO: 23175 - DNA, 495 bp, Homo sapiens
  MAP TO AC005849.1; EXPRESSED IN BRAIN, SIGNAL = 4.2; EXPRESSED IN BONE MARROW, SIGNAL = 4.1; EXPRESSED IN LUNG, SIGNAL = 4.1; EXPRESSED IN ADULT LIVER, SIGNAL = 4.1; EXPRESSED IN PLACENTA, SIGNAL = 4.4; EXPRESSED IN HEART, SIGNAL = 4.2; EXPRESSED IN HELA, SIGNAL = 4.4; EXPRESSED IN FETAL LIVER, SIGNAL = 4.5; SWISSPROT HIT: Q63086, EVALUE 8.00e-03; NT HIT: gi11439486, EVALUE 0.00e+00; EST_HUMAN HIT: AI752561.1, EVALUE 0.00e+00
tcagaagccatgagcccccaggtgcagggtgactgcagctgctggaggctgcatcttcttcttgagccggttgaagtccttggccgagcgccacagccaggtctgcagctccttcagcagccagaagtcgtccatcttctggaggaagtcactgtgggcagggccaggagtccaagtgggttcagtcccaggcagcggctggggcagtgggtagcccagagctgccatgacgcccgcaatgctgcccagcaggccctggaggctggtgcagaagtgggccaggctgcggcgcagctcagcagtggcagcctgacggttgaggccacgcaagtaacacagaaggtggctgtaggcctcgtagttctgggtcagccgcagtttgtcattgaggcttcgccacacctccaagtcaacagtggccctgggcagagtctttgcccccaggcggggagggttgaagtctggctcgttgaaaggggggcccaggtagttcag

SEQ ID NO: 23176 - DNA, 529 bp, Homo sapiens
  MAP TO AC004552.1; EXPRESSED IN ADULT LIVER, SIGNAL = 1.9; EXPRESSED IN PLACENTA, SIGNAL = 1.1; EXPRESSED IN LUNG, SIGNAL = 1.2; EXPRESSED IN HEART, SIGNAL = 1.3; EXPRESSED IN BRAIN, SIGNAL = 1.1; EXPRESSED IN HELA, SIGNAL = 9.3; EXPRESSED IN FETAL LIVER, SIGNAL =   2; EXPRESSED IN BONE MARROW, SIGNAL = 1.2; NT HIT: AJ130894.1, EVALUE 1.00e-59; EST_HUMAN HIT: AI090894.1, EVALUE 5.00e-38; SWISSPROT HIT: O14174, EVALUE 1.00e-06
gaaaaactttatgacatttatgttgaagaatgtggaaaagagcctgaggatcctcaggaattgagaagcaatgtaaacttgttagaaaagcttgttaggagagagtccttgccatgtttactggtcaatctatacccaggcaatcaggggtattctgtgatgctccagagagaagatgggtcctttgcagagaccattcggctgccttatgaagaaagggcattgctggactacttggatgcagaagaattaccccctgctttgggtgatgtcctggataaagcttcggttaacatttttcatagtgggtgtgtcatagtagaagttcgtgactacaggcagtccagtaatatgcaacctcctggttaccaaagcaggcatattcttctacgtccaacgatgcagactttagcccatgatgtgaagatgatgacaagagatggccagaaatggagccaggaagacaagcttcagcttgagagccagctgatcttagcgacagctgaaccactgtgtcttgatccttctg

SEQ ID NO: 23177 - DNA, 168 bp, Homo sapiens
  MAP TO AC005736.1; EXPRESSED IN PLACENTA, SIGNAL =   8; EXPRESSED IN LUNG, SIGNAL = 5.5; EXPRESSED IN HELA, SIGNAL = 7.7; EXPRESSED IN HEART, SIGNAL = 7.9; EXPRESSED IN FETAL LIVER, SIGNAL =  14; EXPRESSED IN BRAIN, SIGNAL =   9; EXPRESSED IN BONE MARROW, SIGNAL = 8.8; EXPRESSED IN ADULT LIVER, SIGNAL = 9.5; SWISSPROT HIT: O60503, EVALUE 4.00e-26; EST_HUMAN HIT: AU140135.1, EVALUE 7.00e-90; NT HIT: gi4557258, EVALUE 5.00e-90
ggtcagagagccaaggagtctcgctgcagctgtgcagaggccttgctttctggctttgaggtcattgacggctcacaggtgtcctcaggccctaggggacaggggacagcgtcatcagggaatgtcagtgacttggcgcagactgtcaaaacctttgataaccttaag

SEQ ID NO: 23178 - DNA, 159 bp, Homo sapiens
  MAP TO AC006460.3; EXPRESSED IN FETAL LIVER, SIGNAL = 1.2; EXPRESSED IN BONE MARROW, SIGNAL = 0.63; EXPRESSED IN ADULT LIVER, SIGNAL = 0.82; EXPRESSED IN HELA, SIGNAL = 2.4; EXPRESSED IN LUNG, SIGNAL = 0.65; EXPRESSED IN PLACENTA, SIGNAL = 1.1; EXPRESSED IN BRAIN, SIGNAL = 2.4; EXPRESSED IN HEART, SIGNAL = 1.8; SWISSPROT HIT: O35589, EVALUE 1.00e-15; NT HIT: gi11430846, EVALUE 1.00e-84; EST_HUMAN HIT: AA488645.1, EVALUE 2.00e-84
tccatctgagttatcggaagtcaagccgttaggactgtgctcttctgagctctgcctgtaaagccctgcagacaacctcctctcggcatgctgcagtctctcatagccagcttggttgcaaaggaactccatctgctttgccatcaccttttcaggctg

SEQ ID NO: 23179 - DNA, 201 bp, Homo sapiens
  MAP TO AC004943.1; EXPRESSED IN PLACENTA, SIGNAL = 3.7; EXPRESSED IN LUNG, SIGNAL = 3.6; EXPRESSED IN HELA, SIGNAL = 3.5; EXPRESSED IN FETAL LIVER, SIGNAL = 4.1; EXPRESSED IN BRAIN, SIGNAL =   4; EXPRESSED IN BONE MARROW, SIGNAL = 3.3; EXPRESSED IN ADULT LIVER, SIGNAL = 3.9; EXPRESSED IN HEART, SIGNAL = 3.7; EST_HUMAN HIT: AI866657.1, EVALUE 3.00e-46; NT HIT: gi11432574, EVALUE 1.00e-109; SWISSPROT HIT: P17010, EVALUE 3.00e-06
cgtcataatgagcttctccacgcagtcaggtgccacgctgtggaggtgggtgaggtgcagctggaggtggatcttgttgttgagcatgtcctggcacagggggcagcgaagcatgggttgcaccgagtgctgcgtcatggcatgcacccggagccggttgacatcggcattactgtacttgcagtagggacactggtacat

SEQ ID NO: 23180 - DNA, 200 bp, Homo sapiens
  MAP TO AC005038.1; EXPRESSED IN BONE MARROW, SIGNAL = 5.5; EXPRESSED IN PLACENTA, SIGNAL = 4.9; EXPRESSED IN LUNG, SIGNAL = 5.2; EXPRESSED IN HELA, SIGNAL = 5.4; EXPRESSED IN FETAL LIVER, SIGNAL = 5.9; EXPRESSED IN BRAIN, SIGNAL = 5.3; EXPRESSED IN ADULT LIVER, SIGNAL = 4.9; EXPRESSED IN HEART, SIGNAL =   5; SWISSPROT HIT: Q10206, EVALUE 1.00e-05; NT HIT: gi11422650, EVALUE 1.00e-109; EST_HUMAN HIT: BF182707.1, EVALUE 1.00e-109
cactcagcagcaccacaggcgctttggggtctgggttctgggcctcaaaggccttgacacagagctccaaggccacagaacgttgacgaagcacgaaggcaacgggcagtgggcgggctggagggcttaagcaggcagggccaaaatgtatgagagcctgagctccagcttgctcagcacccagcacatccacgcagcag

SEQ ID NO: 23181 - DNA, 163 bp, Homo sapiens
  MAP TO AC005738.1; EXPRESSED IN FETAL LIVER, SIGNAL = 6.9; EXPRESSED IN BRAIN, SIGNAL = 7.7; EXPRESSED IN BONE MARROW, SIGNAL = 7.2; EXPRESSED IN LUNG, SIGNAL = 8.5; EXPRESSED IN ADULT LIVER, SIGNAL =   8; EXPRESSED IN PLACENTA, SIGNAL = 7.8; EXPRESSED IN HEART, SIGNAL = 7.5; EXPRESSED IN HELA, SIGNAL = 8.2; SWISSPROT HIT: P93566, EVALUE 1.80e+00; NT HIT: AL161538.2, EVALUE 9.50e-02
tttttcagaatgttcttgttataacagcaactcaggagcagttgattcagcgagggcttgggcagccttcagcctcactgagcagacgctggcgatgggcgatgagcacctgtgctgtgcaggtggcactgcagagaggcaggtagagttgttggtggcttgg

SEQ ID NO: 23182 - DNA, 218 bp, Homo sapiens
  MAP TO AC004914.1; EXPRESSED IN LUNG, SIGNAL = 1.6; EXPRESSED IN FETAL LIVER, SIGNAL = 1.8; EXPRESSED IN BONE MARROW, SIGNAL = 1.8; EXPRESSED IN PLACENTA, SIGNAL = 1.8; EXPRESSED IN BRAIN, SIGNAL = 1.8; EXPRESSED IN ADULT LIVER, SIGNAL = 1.7; EXPRESSED IN HEART, SIGNAL = 1.5; EST_HUMAN HIT: AW297480.1, EVALUE 1.00e-79; NT HIT: D34619.1, EVALUE 1.00e-120; SWISSPROT HIT: P24557, EVALUE 2.00e-26
ctgcccaacttgctggagtcatcgcagcgccccgggctgcagccgcacttacagagtaaaaccaggataggtctggggatgcagaattcgaagaaacgcttgcagtgtttcacaaagggatcctcaggggcctgccaggagtccaccggggtgccaaaggcgacgctggcaaccacatctgtggtgtaattgcagtagcacctacgggagatgggagc

SEQ ID NO: 23183 - DNA, 331 bp, Homo sapiens
  MAP TO AC005871.2; EXPRESSED IN FETAL LIVER, SIGNAL = 2.6; EXPRESSED IN BONE MARROW, SIGNAL = 2.6; EXPRESSED IN BRAIN, SIGNAL = 2.5; EXPRESSED IN ADULT LIVER, SIGNAL = 2.8; EXPRESSED IN PLACENTA, SIGNAL =   8; EXPRESSED IN LUNG, SIGNAL = 2.9; EXPRESSED IN HEART, SIGNAL = 2.7; EXPRESSED IN HELA, SIGNAL = 2.9; NT HIT: M60556.1, EVALUE 2.10e-01; SWISSPROT HIT: P17599, EVALUE 7.30e-01; EST_HUMAN HIT: AI948731.1, EVALUE 1.00e-80
ggatgaaccagtggcaagaaaatgccaggtggaaacatcccaacagacagtccatgagcgatggtggaactctgtgctgcaccacccacatgcctcgcagctgagtccttctccagaactttccttcacctggaggaaggtgcctagttcaaggttacccccctccctggggcagctagcatccaaggactggtccaagcaggagtacaaagacccagtccccagcctcattcaggtcatctctgaaaggccatcccagctccagggtcccatggggtctgcaactgaatcacagcccaacatctccctccaccccatcctccttccctga

SEQ ID NO: 23184 - DNA, 187 bp, Homo sapiens
  MAP TO AC004531.1; EXPRESSED IN PLACENTA, SIGNAL =   2; EXPRESSED IN LUNG, SIGNAL =   2; EXPRESSED IN HEART, SIGNAL = 1.6; EXPRESSED IN BRAIN, SIGNAL = 1.8; EXPRESSED IN BONE MARROW, SIGNAL = 1.8; EXPRESSED IN ADULT LIVER, SIGNAL = 1.9; EXPRESSED IN HELA, SIGNAL = 1.7; EXPRESSED IN FETAL LIVER, SIGNAL = 1.9; NT HIT: U14510.1, EVALUE 1.00e-101; SWISSPROT HIT: Q12968, EVALUE 5.00e-30; EST_HUMAN HIT: BE257384.1, EVALUE 1.00e-101
tggctgacatattattttcaggaagaagtggaatttccagaacttttgtactggcaattattatctcttggcttgcagtagcgactgtcttcccagtgattcgatgcacctggtaaaatgcatgaggtcgtaaatatcgatcatctgctgtcccaataaacatttgtagatttattggcttttcgtt

SEQ ID NO: 23185 - DNA, 105 bp, Homo sapiens
  MAP TO AC005751.1; EXPRESSED IN LUNG, SIGNAL =  19; EXPRESSED IN PLACENTA, SIGNAL =  17; EXPRESSED IN HELA, SIGNAL =  18; EXPRESSED IN HEART, SIGNAL =  16; EXPRESSED IN FETAL LIVER, SIGNAL =  16; EXPRESSED IN BRAIN, SIGNAL =  18; EXPRESSED IN BONE MARROW, SIGNAL =  16; EXPRESSED IN ADULT LIVER, SIGNAL =  17; NT HIT: gi6680639, EVALUE 3.00e+00; EST_HUMAN HIT: AA806623.1, EVALUE 9.10e-01
tgcatttttccaacaacgggaatgaatattgaggcagatttttctccagcacctccagatgaaaattcagcaaggtcgacagtttgatgtcaggcttgtaggact

SEQ ID NO: 23186 - DNA, 233 bp, Homo sapiens
  MAP TO AC005017.1; EXPRESSED IN LUNG, SIGNAL =   5; EXPRESSED IN FETAL LIVER, SIGNAL = 4.8; EXPRESSED IN PLACENTA, SIGNAL = 4.9; EXPRESSED IN HELA, SIGNAL = 4.6; EXPRESSED IN BRAIN, SIGNAL = 4.9; EXPRESSED IN BONE MARROW, SIGNAL = 4.9; EXPRESSED IN ADULT LIVER, SIGNAL = 4.8; EXPRESSED IN HEART, SIGNAL = 4.8; EST_HUMAN HIT: AI031593.1, EVALUE 1.30e-02; SWISSPROT HIT: P29899, EVALUE 4.30e+00; NT HIT: Y00122.1, EVALUE 5.60e-01
acctcatcatccctctgtcttaagatgttaccattgccatccaagccttcagggatcactgaggtgggggaagagaacatgtgaccagctcttacatacttcctcatggaagagacacacatcaattctgctcactatttattggctaaagagtcaggtgaccactcataattttaaaggggcaaggaagaatagtcttcccactgcccatagtagcagaacagaaaatgctg

SEQ ID NO: 23187 - DNA, 126 bp, Homo sapiens
  MAP TO AC004924.2; EXPRESSED IN LUNG, SIGNAL = 1.8; EXPRESSED IN FETAL LIVER, SIGNAL = 1.2; EXPRESSED IN BONE MARROW, SIGNAL = 1.2; EXPRESSED IN PLACENTA, SIGNAL = 2.3; EXPRESSED IN HEART, SIGNAL = 1.7; EXPRESSED IN BRAIN, SIGNAL =   3; EXPRESSED IN ADULT LIVER, SIGNAL = 1.9; SWISSPROT HIT: P10267, EVALUE 2.00e-09; NT HIT: U64453.1, EVALUE 2.00e-27; EST_HUMAN HIT: R15914.1, EVALUE 3.00e-51
gacacagtaacagtctgatctctctttctttcccctacatatcccccttttcgttttgacaaaaccaccaccatcatcatggccccttctccctggtcgctgtctctctggagctgctggatacac

SEQ ID NO: 23188 - DNA, 138 bp, Homo sapiens
  MAP TO AC005031.1; EXPRESSED IN LUNG, SIGNAL = 1.6; EXPRESSED IN ADULT LIVER, SIGNAL = 2.5; EXPRESSED IN PLACENTA, SIGNAL =   2; EXPRESSED IN HELA, SIGNAL = 1.8; EXPRESSED IN HEART, SIGNAL = 2.3; EXPRESSED IN FETAL LIVER, SIGNAL = 1.9; EXPRESSED IN BRAIN, SIGNAL = 2.1; EXPRESSED IN BONE MARROW, SIGNAL = 1.9; SWISSPROT HIT: Q16637, EVALUE 1.20e-01; EST_HUMAN HIT: BF037871.1, EVALUE 2.00e-62; NT HIT: U80017.1, EVALUE 3.00e-72
taacctgttgtaaggaagctgcagtattcttcttttggcttttattcttcttagcaggttttcttttaggtgtggtttttggtttacccgaagtttcacaaatgtcaccattctttagagcatgctacgaaaatagga

SEQ ID NO: 23189 - DNA, 183 bp, Homo sapiens
  MAP TO AC004941.2; EXPRESSED IN PLACENTA, SIGNAL = 1.8; EXPRESSED IN LUNG, SIGNAL =   2; EXPRESSED IN FETAL LIVER, SIGNAL = 1.8; EXPRESSED IN BONE MARROW, SIGNAL = 1.8; EXPRESSED IN ADULT LIVER, SIGNAL =   3; EXPRESSED IN HELA, SIGNAL = 1.7; EXPRESSED IN HEART, SIGNAL = 2.1; EXPRESSED IN BRAIN, SIGNAL = 2.1; SWISSPROT HIT: O62845, EVALUE 3.00e+00; EST_HUMAN HIT: T81043.1, EVALUE 5.00e-17; NT HIT: AL163303.2, EVALUE 8.00e-12
gatgaatgttattttcatgcctgtgaagaaaacatccattctgcagcccatggatcaagaaataattttgactttgaagttgtattacttaagaaacacattttataaggctgtagctgtgatagataatgtggtccctctgacagatccggacaaagtaaattgaaaactttctggaaagga

SEQ ID NO: 23190 - DNA, 217 bp, Homo sapiens
  MAP TO AC005035.1; EXPRESSED IN PLACENTA, SIGNAL =   1; EXPRESSED IN LUNG, SIGNAL = 0.55; EXPRESSED IN HEART, SIGNAL = 1.3; EXPRESSED IN FETAL LIVER, SIGNAL = 0.91; EXPRESSED IN BONE MARROW, SIGNAL = 0.84; EXPRESSED IN ADULT LIVER, SIGNAL = 1.3; EXPRESSED IN BRAIN, SIGNAL = 1.9; EST_HUMAN HIT: BE762749.1, EVALUE 4.00e-89; NT HIT: AB014587.1, EVALUE 3.00e-67
ctctcgcgctcggtcagcaggctcgtagtgggctttgggctcgggagcatggaagcttggcttgctcctttcctgctgcggtggtggcggctgctgcgagtgctgcgggtgcggcctcctatggtcatgctgtagagacaggagatatgcttgttcttgttgcaactgcctctggagcctctctgcctgccggtgctcctccatctcccgccatcgg

SEQ ID NO: 23191 - DNA, 376 bp, Homo sapiens
  MAP TO AC004945.1; EXPRESSED IN LUNG, SIGNAL = 7.5; EXPRESSED IN ADULT LIVER, SIGNAL = 6.7; EXPRESSED IN PLACENTA, SIGNAL = 6.5; EXPRESSED IN HELA, SIGNAL =   7; EXPRESSED IN HEART, SIGNAL = 7.6; EXPRESSED IN FETAL LIVER, SIGNAL = 6.8; EXPRESSED IN BRAIN, SIGNAL = 8.3; EXPRESSED IN BONE MARROW, SIGNAL = 6.3; NT HIT: Z74024.1, EVALUE 2.30e-01; EST_HUMAN HIT: BF373664.1, EVALUE 3.00e-38; SWISSPROT HIT: P40563, EVALUE 1.20e+00
tcatggaggaagccttgctgtctctggctgtggcatcttctcccagatcccttaatcaacaactcccagagcttccagacccaagatacattttggaaccccaggacaatcctgaactggcacccgccctggtgtgtgccctttgctgctgctgctttggaatcatctcctgcagctatggccaccactgcttcaaggcagtgatgtttctctcaggcctgctgtctggagctctggtgatcttcctgctctttcacaaggagcaggtgctggagatacagctgagattgggggtgagcacgggcatcacactgggcattggactcttctgcagcctggtcaccatgttgatttgcagtgttgggctcttcctgat

SEQ ID NO: 23192 - DNA, 162 bp, Homo sapiens
  MAP TO AC005774.1; EXPRESSED IN FETAL LIVER, SIGNAL = 2.3; EXPRESSED IN PLACENTA, SIGNAL = 0.68; EXPRESSED IN ADULT LIVER, SIGNAL = 0.62; EXPRESSED IN LUNG, SIGNAL = 0.61; EXPRESSED IN BONE MARROW, SIGNAL = 0.54; EXPRESSED IN BRAIN, SIGNAL = 2.4; EXPRESSED IN HELA, SIGNAL = 2.6; EXPRESSED IN HEART, SIGNAL = 2.7; SWISSPROT HIT: P33450, EVALUE 4.00e+00; NT HIT: L78833.1, EVALUE 9.40e-02
attatgaacaccagcatcatttttcagactcttatcagagccactcgtcaatttctgcctcacattaaaggtctgtgtgcatgtgactcgttgcaccttaaaagctacaccctgtggcttaactaacattctattctcagttcctgacacactgcttgttac

SEQ ID NO: 23193 - DNA, 190 bp, Homo sapiens
  MAP TO AC005029.1; EXPRESSED IN BRAIN, SIGNAL = 2.5; EXPRESSED IN PLACENTA, SIGNAL = 2.2; EXPRESSED IN LUNG, SIGNAL = 1.8; EXPRESSED IN HEART, SIGNAL = 2.3; EXPRESSED IN BONE MARROW, SIGNAL = 2.5; EXPRESSED IN ADULT LIVER, SIGNAL = 2.6; EXPRESSED IN HELA, SIGNAL = 2.1; EXPRESSED IN FETAL LIVER, SIGNAL = 2.5; NT HIT: AF202888.1, EVALUE 4.40e-01; SWISSPROT HIT: P37648, EVALUE 2.60e-01; EST_HUMAN HIT: BE149611.1, EVALUE 1.10e-02
ctgagcatttcttcattcactgctttgtgcacccgcctactaaggcacacgtgatcaacgatgccctagtgcatcagatccctgaggtctctgccttccccagccttgaggaacttcccctggccatccacaagagcctcgagccctacatctattacaggagctgggccttggtggggcacaggagtga

SEQ ID NO: 23194 - DNA, 177 bp, Homo sapiens
  MAP TO AC006327.3; EXPRESSED IN HELA, SIGNAL = 1.9; EXPRESSED IN HEART, SIGNAL = 1.7; EXPRESSED IN PLACENTA, SIGNAL = 1.7; EXPRESSED IN LUNG, SIGNAL = 1.6; EXPRESSED IN FETAL LIVER, SIGNAL = 1.7; EXPRESSED IN BRAIN, SIGNAL =   2; EXPRESSED IN BONE MARROW, SIGNAL = 1.8; EXPRESSED IN ADULT LIVER, SIGNAL = 1.5; EST_HUMAN HIT: AW500611.1, EVALUE 1.50e-01; NT HIT: AF081350.1, EVALUE 6.40e+00
gagaagaaatgggctccatcaagcagcagctagccattgtggcatgcattatttatgcgaaagatacgaacatttctgcctctaatcctaatgagatgagttcgagggagaaccctgggattcataaatttgtctacggagcagaattcataataaagccaaatgtgagtgcagagt

SEQ ID NO: 23195 - DNA, 225 bp, Homo sapiens
  MAP TO AC005034.1; EXPRESSED IN LUNG, SIGNAL = 5.4; EXPRESSED IN HELA, SIGNAL = 4.9; EXPRESSED IN HEART, SIGNAL = 4.1; EXPRESSED IN FETAL LIVER, SIGNAL = 4.9; EXPRESSED IN PLACENTA, SIGNAL = 4.7; EXPRESSED IN BRAIN, SIGNAL = 5.6; EXPRESSED IN BONE MARROW, SIGNAL = 5.1; EXPRESSED IN ADULT LIVER, SIGNAL = 5.2; EST_HUMAN HIT: AA429310.1, EVALUE 1.00e-113; SWISSPROT HIT: P16383, EVALUE 4.00e-10; NT HIT: gi11431050, EVALUE 1.00e-118
catcctttgtctaagtgtttgaggtcttagagtaaatggtattctcttttcatggtcatcaggctcactctcagggtcatcttcgctctctctcttcataccagagatggaggaggtatgttgtacatccaaagaaatatagtcatcttgggccctggccaattcacgttttctgcgggctgcctgaataaaagctgcatctgggatcttaactgaaggaaacaa

SEQ ID NO: 23196 - DNA, 202 bp, Homo sapiens
  MAP TO AC004943.1; EXPRESSED IN BRAIN, SIGNAL = 2.9; EXPRESSED IN PLACENTA, SIGNAL = 3.4; EXPRESSED IN LUNG, SIGNAL = 3.4; EXPRESSED IN HEART, SIGNAL = 2.8; EXPRESSED IN BONE MARROW, SIGNAL =   3; EXPRESSED IN ADULT LIVER, SIGNAL = 3.3; EXPRESSED IN HELA, SIGNAL = 3.1; EXPRESSED IN FETAL LIVER, SIGNAL = 3.1; NT HIT: gi11432574, EVALUE 4.00e-32; SWISSPROT HIT: P09044, EVALUE 1.30e+00
gcaagctcctctggatcagcagctgtttcactgggtccttcaacatcttcaatggcttcttctgaaacagaagaaaaacatgtcaagggttaaaaataaaaagaagatgaaggacttttggcctctgttgcaaacaactgccaacgacagaacagacaccaatgactcgtcccccttctctttccagaggcccctgggagac

SEQ ID NO: 23197 - DNA, 195 bp, Homo sapiens
  MAP TO AC005038.1; EXPRESSED IN BRAIN, SIGNAL = 3.1; EXPRESSED IN ADULT LIVER, SIGNAL = 2.7; EXPRESSED IN PLACENTA, SIGNAL = 2.8; EXPRESSED IN LUNG, SIGNAL =   3; EXPRESSED IN HELA, SIGNAL =   3; EXPRESSED IN HEART, SIGNAL = 2.8; EXPRESSED IN BONE MARROW, SIGNAL =   3; EXPRESSED IN FETAL LIVER, SIGNAL = 2.9; NT HIT: gi11422647, EVALUE 8.00e-80; EST_HUMAN HIT: AW854061.1, EVALUE 5.00e-79; SWISSPROT HIT: Q10136, EVALUE 1.10e-01
caatggtgaacatgacagtgtctgccagctgcacgttgctgatgctgatccgtgggatgaggccaatgagcccaggcaccacatcagaatagttgacgtcaatggtctctgcgatggattggaagccgtagaggagggcctctgtgtgctggggaaagagggtgccactggcttggatgaggaggagggtgtgac

SEQ ID NO: 23198 - DNA, 160 bp, Homo sapiens
  MAP TO AC002545.1; EXPRESSED IN BONE MARROW, SIGNAL =  18; EXPRESSED IN PLACENTA, SIGNAL =  12; EXPRESSED IN LUNG, SIGNAL =  15; EXPRESSED IN HELA, SIGNAL =  17; EXPRESSED IN HEART, SIGNAL =  52; EXPRESSED IN FETAL LIVER, SIGNAL =  25; EXPRESSED IN ADULT LIVER, SIGNAL =  20; EXPRESSED IN BRAIN, SIGNAL =  19; SWISSPROT HIT: P26626, EVALUE 5.20e+00; EST_HUMAN HIT: AA449012.1, EVALUE 2.20e+00
aaaactacttatacttgagtcctttcctgaaggtgtgctttttagacaattgctaccaaaattggcccttgatagttaccctcaggataagattctgcaattgaatcacttgccagtcaatggcaaggggcatcctcctgctgatggtaagtgtggtcat

SEQ ID NO: 23199 - DNA, 376 bp, Homo sapiens
  MAP TO AC004914.1; EXPRESSED IN LUNG, SIGNAL = 3.8; EXPRESSED IN BRAIN, SIGNAL = 2.9; EXPRESSED IN ADULT LIVER, SIGNAL = 3.5; EXPRESSED IN PLACENTA, SIGNAL = 4.3; EXPRESSED IN HELA, SIGNAL = 3.6; EXPRESSED IN HEART, SIGNAL = 3.2; EXPRESSED IN BONE MARROW, SIGNAL = 3.4; EXPRESSED IN FETAL LIVER, SIGNAL = 3.6; NT HIT: gi6754779, EVALUE 2.30e-01; SWISSPROT HIT: Q70622, EVALUE 4.60e+00
acttattggcttctccaacttctttaatcagcactccttgctgaggctgatggagcaacaagctacagctgcatttaataatcagaatcagtttcttgacagacggcttccaggggactttgagcgaggagatagcaatgcagtgtttgggaaagagaatctagaggcagcagagaagcagttaaacttctgcaattccttcggccatcctgaagggatggaggtagcaggccagccgcctccctccaggccacatccctctagaggccacgtgatgtctggagttgggcatgatgctctggggctggaagaagatgagcaaattttgggtgagtggccaattactccactcaaccttgacatcctgaaatgtcac

SEQ ID NO: 23200 - DNA, 135 bp, Homo sapiens
  MAP TO AC003025.1; EXPRESSED IN PLACENTA, SIGNAL = 2.4; EXPRESSED IN HEART, SIGNAL = 2.5; EXPRESSED IN FETAL LIVER, SIGNAL = 2.5; EXPRESSED IN BRAIN, SIGNAL = 2.5; EXPRESSED IN LUNG, SIGNAL = 2.7; EXPRESSED IN HELA, SIGNAL = 2.5; EXPRESSED IN BONE MARROW, SIGNAL = 2.6; EXPRESSED IN ADULT LIVER, SIGNAL = 2.5; EST_HUMAN HIT: AI858849.1, EVALUE 4.50e-01; SWISSPROT HIT: Q9Z188, EVALUE 2.40e+00
cctccctccctctatctccctctgcctgctccatcccaagcctggcagccttgaccacagacccttggctgaaggcagctgaggagcaggagacagtcagcctggacaacccaggccctgattctggacttacag

SEQ ID NO: 23201 - DNA, 339 bp, Homo sapiens
  MAP TO AC003677.1; EXPRESSED IN PLACENTA, SIGNAL = 1.1; EXPRESSED IN LUNG, SIGNAL = 1.2; EXPRESSED IN FETAL LIVER, SIGNAL = 1.3; EXPRESSED IN BONE MARROW, SIGNAL = 1.2; EXPRESSED IN ADULT LIVER, SIGNAL = 1.3; EXPRESSED IN HEART, SIGNAL = 1.8; EXPRESSED IN BRAIN, SIGNAL = 1.2; NT HIT: AL163218.2, EVALUE 5.00e-27; SWISSPROT HIT: P39147, EVALUE 8.70e+00; EST_HUMAN HIT: BE782184.1, EVALUE 2.00e-45
ttagttacttccaagatacaatggtggtacaagcattgggtaagtgctcccattccaaaagggagaaatcagccaaaagaaaggggctacagtttgaaacatgcaagtttgaaacacaccagggcagtcattaaatcttaaagctccaaaataatctcctttgactccatgtctcacatccaggctacactgatgcaaggagtattttcccaaggccttgggcagctctgttcctgtggttctgcagggctcagtgtccatggctgctctcaagagctggcactgagtgtctgcagcttttccaggtgcacggtacaagctgtcagtgtggcttccatt

SEQ ID NO: 23202 - DNA, 195 bp, Homo sapiens
  MAP TO AC006468.9; EXPRESSED IN BRAIN, SIGNAL = 9.3; EXPRESSED IN ADULT LIVER, SIGNAL = 9.4; EXPRESSED IN PLACENTA, SIGNAL = 8.1; EXPRESSED IN LUNG, SIGNAL =  10; EXPRESSED IN HELA, SIGNAL = 8.4; EXPRESSED IN HEART, SIGNAL = 7.6; EXPRESSED IN BONE MARROW, SIGNAL = 8.5; EXPRESSED IN FETAL LIVER, SIGNAL = 8.8; NT HIT: gi11425503, EVALUE 1.00e-106; SWISSPROT HIT: Q9Y5W9, EVALUE 1.00e-18; EST_HUMAN HIT: BE742402.1, EVALUE 1.00e-101
ttagccaggtgagaagagctctgcctctcttcctgggcccagccacagtttgacatagcatatcgaagaatggcatcagacacagtcatggtacttcggccctggacacaggcttctatctcaggcaccgagagctggctttgcaggaataggtgcaactggctgtctgacaggagaaccacactctgcaggacc

SEQ ID NO: 23203 - DNA, 256 bp, Homo sapiens
  MAP TO AC004928.2; EXPRESSED IN LUNG, SIGNAL = 1.6; EXPRESSED IN BRAIN, SIGNAL = 1.4; EXPRESSED IN PLACENTA, SIGNAL = 1.6; EXPRESSED IN HEART, SIGNAL = 1.6; EXPRESSED IN FETAL LIVER, SIGNAL = 1.6; EXPRESSED IN BONE MARROW, SIGNAL = 1.4; EXPRESSED IN ADULT LIVER, SIGNAL = 1.6; EST_HUMAN HIT: BE888071.1, EVALUE 2.30e-01
gcaaacatgggcccttttcaatctgatatgatttgtcagaactctgcttgcataggtaattttgctgttttaataccactagatagagaagctgcttggggcttgctgccctcaatatgggtttgggatgatacgatgagaagtgttcttcccttttgtggggtctcccatggccagagctgcccacctgggagcctacttgaaatatgacagatgtctgcacctgcacgcttgctctgctattctgtgggaggtc

SEQ ID NO: 23204 - DNA, 299 bp, Homo sapiens
  MAP TO AC003692.1; EXPRESSED IN PLACENTA, SIGNAL = 1.4; EXPRESSED IN LUNG, SIGNAL = 1.2; EXPRESSED IN FETAL LIVER, SIGNAL = 1.5; EXPRESSED IN BRAIN, SIGNAL = 1.2; EXPRESSED IN ADULT LIVER, SIGNAL = 1.5; EXPRESSED IN HELA, SIGNAL = 2.3; EXPRESSED IN HEART, SIGNAL = 1.8; EXPRESSED IN BONE MARROW, SIGNAL = 1.6; SWISSPROT HIT: P07354, EVALUE 2.00e-03; NT HIT: X93084.1, EVALUE 7.30e-01; EST_HUMAN HIT: AI138751.1, EVALUE 2.70e-01
ctcacatcggtactctcctgcttcctccagctggattccaggcagccgcagtgaggcgtccccactcttcagcctccatggagacacaatggctccaggtcggaatgcctcttggtgatctccaaaaaattcaaagactttgacttctttgtcaaacgtcagactcttccaaaaccaggtgatacccatagacgtgatgttgaggggttgggaataaaagatattgcagaatatggtgacattgtcattcaggggtgtgatctgagtcccccctgccatcatctctactttcagatcac

SEQ ID NO: 23205 - DNA, 119 bp, Homo sapiens
  MAP TO AC004883.2; EXPRESSED IN PLACENTA, SIGNAL = 1.9; EXPRESSED IN HELA, SIGNAL = 1.9; EXPRESSED IN HEART, SIGNAL =   2; EXPRESSED IN FETAL LIVER, SIGNAL = 1.9; EXPRESSED IN BRAIN, SIGNAL = 1.7; EXPRESSED IN ADULT LIVER, SIGNAL = 1.8; EXPRESSED IN LUNG, SIGNAL = 2.2; EXPRESSED IN BONE MARROW, SIGNAL = 1.9; EST_HUMAN HIT: R81199.1, EVALUE 8.00e-61; NT HIT: AF035737.1, EVALUE 6.00e-61; SWISSPROT HIT: P18947, EVALUE 7.10e+00
caaagccgaagtggcctgcattgcagtgtatgaaacagacgtgtttgtcgtcggaactgaaagaggacgtgcttttgtcaataccagaaaggattttcaaaaagattttgtaaaatatt

SEQ ID NO: 23206 - DNA, 128 bp, Homo sapiens
  MAP TO AC003950.1; EXPRESSED IN PLACENTA, SIGNAL =  14; EXPRESSED IN LUNG, SIGNAL =  15; EXPRESSED IN HELA, SIGNAL =  14; EXPRESSED IN FETAL LIVER, SIGNAL =  13; EXPRESSED IN BRAIN, SIGNAL =  15; EXPRESSED IN BONE MARROW, SIGNAL =  15; EXPRESSED IN ADULT LIVER, SIGNAL =  14; EXPRESSED IN HEART, SIGNAL =  11; SWISSPROT HIT: P08548, EVALUE 2.00e-04; EST_HUMAN HIT: AA256200.1, EVALUE 4.20e-01; NT HIT: M18818.1, EVALUE 1.00e-03
ggggaacgccttcagtcttttgccattaagtatgatgatggtggaggcactttcatagatgcccttatcaaggttgatgaaggtttccttcttgtagagtattttcattatgaaagggtgttgaattt

SEQ ID NO: 23207 - DNA, 143 bp, Homo sapiens
  MAP TO AC004889.1; EXPRESSED IN BONE MARROW, SIGNAL = 2.8; EXPRESSED IN PLACENTA, SIGNAL = 2.7; EXPRESSED IN LUNG, SIGNAL = 3.2; EXPRESSED IN HELA, SIGNAL = 2.8; EXPRESSED IN FETAL LIVER, SIGNAL = 3.3; EXPRESSED IN ADULT LIVER, SIGNAL = 3.1; EXPRESSED IN HEART, SIGNAL = 2.9; EXPRESSED IN BRAIN, SIGNAL = 2.5; SWISSPROT HIT: Q12774, EVALUE 9.00e-23; NT HIT: gi4885632, EVALUE 3.00e-75; EST_HUMAN HIT: BE183479.1, EVALUE 5.00e-75
atcaggctctggaaggtgcgttcctgataggtctggttggtgacataaggcaggtagacccggcggaagtctggggcgtggttcaggactacgtcacatacttggaaggagaagatattgttctcaaagttctcttccaggtc

SEQ ID NO: 23208 - DNA, 188 bp, Homo sapiens
  MAP TO AC003079.1; EXPRESSED IN PLACENTA, SIGNAL = 2.6; EXPRESSED IN LUNG, SIGNAL = 2.9; EXPRESSED IN HELA, SIGNAL = 2.9; EXPRESSED IN HEART, SIGNAL = 2.5; EXPRESSED IN FETAL LIVER, SIGNAL = 2.7; EXPRESSED IN BRAIN, SIGNAL = 2.5; EXPRESSED IN ADULT LIVER, SIGNAL = 2.7; EXPRESSED IN BONE MARROW, SIGNAL = 2.6; NT HIT: gi11421851, EVALUE 2.00e-95; SWISSPROT HIT: O18303, EVALUE 1.30e+00; EST_HUMAN HIT: AV710738.1, EVALUE 1.00e-102
agatgccaaaaccatattctcatcttcgacttcaaaaacagtgtccacatctatttgcctttggatcaaaatagccttcaattttccgaagtcattggactttagcgcctcaaggaaatttctcttaactaacttggcagctccagatttagtgacaggggcagtggtgccgtccatccttcctctcc

SEQ ID NO: 23209 - DNA, 133 bp, Homo sapiens
  MAP TO AC004990.1; EXPRESSED IN PLACENTA, SIGNAL = 3.5; EXPRESSED IN LUNG, SIGNAL = 3.9; EXPRESSED IN HELA, SIGNAL = 3.6; EXPRESSED IN HEART, SIGNAL = 3.3; EXPRESSED IN FETAL LIVER, SIGNAL = 3.4; EXPRESSED IN ADULT LIVER, SIGNAL = 3.7; EXPRESSED IN BRAIN, SIGNAL =   3; EXPRESSED IN BONE MARROW, SIGNAL = 3.3; EST_HUMAN HIT: AI762801.1, EVALUE 6.00e-62; SWISSPROT HIT: P71389, EVALUE 2.40e+00; NT HIT: gi5729975, EVALUE 2.00e-05
tgcaaaggcaaagcctgaaagtccttggacttctctgaccagaaagggaattgttcgagttgtatttttcccctttttcttccggtggtggttacaagtaacatcaaaggtcatctttttctggcttcttgtc

SEQ ID NO: 23210 - DNA, 162 bp, Homo sapiens
  MAP TO AC004952.1; EXPRESSED IN PLACENTA, SIGNAL = 1.5; EXPRESSED IN ADULT LIVER, SIGNAL = 1.1; EXPRESSED IN LUNG, SIGNAL = 1.2; EXPRESSED IN HEART, SIGNAL = 1.6; EXPRESSED IN FETAL LIVER, SIGNAL = 1.3; EXPRESSED IN BRAIN, SIGNAL = 1.4; EXPRESSED IN BONE MARROW, SIGNAL = 1.2; EST_HUMAN HIT: R01462.1, EVALUE 8.60e+00; SWISSPROT HIT: P54296, EVALUE 2.00e-04; NT HIT: AF022798.1, EVALUE 6.00e-03
acacagccgtggaggggttgctgggctccccgtagcccgcctcattcacagccaccacccggaactcgtaagtcactccttgccggagcttatccaggctgagggtgtaggatgtggcgctccgcgggatgtccttcacaaacatgtcccataagccttcat

SEQ ID NO: 23211 - DNA, 143 bp, Homo sapiens
  MAP TO AC006530.4; EXPRESSED IN PLACENTA, SIGNAL = 2.2; EXPRESSED IN LUNG, SIGNAL = 2.3; EXPRESSED IN HEART, SIGNAL = 2.2; EXPRESSED IN FETAL LIVER, SIGNAL = 2.5; EXPRESSED IN BRAIN, SIGNAL = 2.5; EXPRESSED IN BONE MARROW, SIGNAL = 2.6; EXPRESSED IN ADULT LIVER, SIGNAL = 2.4; EXPRESSED IN HELA, SIGNAL = 2.1; NT HIT: gi7657057, EVALUE 4.00e-62; SWISSPROT HIT: P49770, EVALUE 3.00e-16; EST_HUMAN HIT: BE619053.1, EVALUE 6.00e-62
gggagctgatggagctgatccgcagagagggcaggaggatgacggccgctcagccctccgagaccaccgtgggcaacatggtgcggagagtgctcaagattatccgggaggagtatggcaggtcaggctcacgtcctgggctc

SEQ ID NO: 23212 - DNA, 245 bp, Homo sapiens
  MAP TO AC005041.2; EXPRESSED IN PLACENTA, SIGNAL = 1.8; EXPRESSED IN ADULT LIVER, SIGNAL = 1.1; EXPRESSED IN LUNG, SIGNAL = 1.3; EXPRESSED IN HEART, SIGNAL = 1.6; EXPRESSED IN FETAL LIVER, SIGNAL = 1.5; EXPRESSED IN BRAIN, SIGNAL = 1.8; EXPRESSED IN BONE MARROW, SIGNAL = 1.2; NT HIT: AF064205.1, EVALUE 0.00e+00; SWISSPROT HIT: Q14203, EVALUE 3.00e-32; EST_HUMAN HIT: BE619157.1, EVALUE 1.00e-112
gaagccaaggaggcgctggaggcaaaggaacgctatatggaggagatggctgatactgctgatgccattgagatggccactttggacaaggagatggctgaagagcgggctgagtccctgcagcaggaggtggaggcactgaaggagcgggtggacgagctcactactgacttagagatcctcaaggctgagattgaagagaagggtaaggggcccacagctgctgggggccaaacggtcaggtg

SEQ ID NO: 23213 - DNA, 114 bp, Homo sapiens
  MAP TO AC003959.1; EXPRESSED IN PLACENTA, SIGNAL = 4.2; EXPRESSED IN HELA, SIGNAL = 4.9; EXPRESSED IN BRAIN, SIGNAL = 3.6; EXPRESSED IN ADULT LIVER, SIGNAL =   5; EXPRESSED IN HEART, SIGNAL = 3.7; EXPRESSED IN LUNG, SIGNAL = 4.9; EXPRESSED IN FETAL LIVER, SIGNAL = 4.5; EXPRESSED IN BONE MARROW, SIGNAL = 3.9; SWISSPROT HIT: Q90592, EVALUE 7.10e+00; NT HIT: AL163282.2, EVALUE 2.50e-01
gatcaagaaggatgccccccaggacagtgactctgctggacttctctacagaaaacagtatatccctcagtggcgtgagaagatccaatagggtcaccacactccacaactgca

SEQ ID NO: 23214 - DNA, 432 bp, Homo sapiens
  MAP TO AC004903.2; EXPRESSED IN PLACENTA, SIGNAL = 3.5; EXPRESSED IN LUNG, SIGNAL = 4.3; EXPRESSED IN HELA, SIGNAL = 3.9; EXPRESSED IN HEART, SIGNAL = 3.8; EXPRESSED IN FETAL LIVER, SIGNAL = 3.8; EXPRESSED IN ADULT LIVER, SIGNAL = 3.7; EXPRESSED IN BRAIN, SIGNAL = 3.7; EXPRESSED IN BONE MARROW, SIGNAL = 3.7; NT HIT: Y19185.1, EVALUE 1.00e-27; EST_HUMAN HIT: BE175434.1, EVALUE 1.00e-72; SWISSPROT HIT: Q01961, EVALUE 3.80e-01
ggttaaatccacagagattacacacttgattcttgcattcagtgcaagtattgaagttaggaggatccttagaacctatgttgagttcagttttgcagagaggacaggttgattctggtttgggcgatttctccagttttgtgggaaggacagccttttgaggctcagctgttaaagatttgctatccttaataggtggtggctttttttctgtttctgttctttttactgttggagcttgttcagctttgggctctaatttttcagctgctggggcttttgtttcctttttcacaggtatactttttgcaggtgctggtggtgcttgacctgtggatttgggtggcccttgtgaagtaggtggctgtgaaggggcaggggcttgtttcattggggcccctggtccactttgtgaatgaggtccaggttggc

SEQ ID NO: 23215 - DNA, 170 bp, Homo sapiens
  MAP TO AC004408.1; EXPRESSED IN PLACENTA, SIGNAL = 4.5; EXPRESSED IN LUNG, SIGNAL = 4.7; EXPRESSED IN HELA, SIGNAL = 4.5; EXPRESSED IN HEART, SIGNAL = 4.4; EXPRESSED IN BONE MARROW, SIGNAL = 4.1; EXPRESSED IN FETAL LIVER, SIGNAL =   4; EXPRESSED IN BRAIN, SIGNAL =   5; EXPRESSED IN ADULT LIVER, SIGNAL = 3.8; EST_HUMAN HIT: AW952275.1, EVALUE 6.00e-81; SWISSPROT HIT: P54283, EVALUE 8.00e-22; NT HIT: U86959.1, EVALUE 3.00e-91
cttgggagaggtgatcttgatgtaaacaatgatgggggccagcgaggtcttggacagctgggctgggtgattgatggtgtcagcatccagagcgaccaactgaagggtccgggccagctcgaagattcgctcgatttcactctgcacctcagctgggggcatggagtcat

SEQ ID NO: 23216 - DNA, 154 bp, Homo sapiens
  MAP TO AC005084.1; EXPRESSED IN FETAL LIVER, SIGNAL = 1.7; EXPRESSED IN BONE MARROW, SIGNAL = 1.7; EXPRESSED IN HELA, SIGNAL = 1.7; EXPRESSED IN PLACENTA, SIGNAL =   2; EXPRESSED IN LUNG, SIGNAL = 1.8; EXPRESSED IN HEART, SIGNAL = 1.6; EXPRESSED IN BRAIN, SIGNAL = 1.8; EXPRESSED IN ADULT LIVER, SIGNAL = 1.8; NT HIT: U52111.2, EVALUE 1.00e-03; EST_HUMAN HIT: T49411.1, EVALUE 2.00e-03
cttcctggactttctgctccatctttcaactcaggagtctgctagactctgcctgaatctctctgcaggagttgtgacctggaaattttctcaatgcagtgagcttgccttgtttgcttccatctctcagggatcactgtccttcactgactga

SEQ ID NO: 23217 - DNA, 168 bp, Homo sapiens
  MAP TO AC003029.1; EXPRESSED IN LUNG, SIGNAL = 2.2; EXPRESSED IN FETAL LIVER, SIGNAL = 2.1; EXPRESSED IN BRAIN, SIGNAL = 1.7; EXPRESSED IN BONE MARROW, SIGNAL = 2.1; EXPRESSED IN PLACENTA, SIGNAL = 1.9; EXPRESSED IN HELA, SIGNAL = 2.1; EXPRESSED IN HEART, SIGNAL = 1.8; EXPRESSED IN ADULT LIVER, SIGNAL = 2.3; NT HIT: gi11436530, EVALUE 7.00e-43; SWISSPROT HIT: P56945, EVALUE 1.00e+00; EST_HUMAN HIT: AW361213.1, EVALUE 7.00e-56
catcgagggagtgctggaccacccctggctcaattccaccgaggccctggataatgtgctgccttctgctcagctgatgatggacaaggttttgaatgatgtttactttgttggctgaaaagactgtgttgggaaggaatgctggggcttggctcagtgaggggttag

SEQ ID NO: 23218 - DNA, 101 bp, Homo sapiens
  MAP TO AC003681.1; EXPRESSED IN LUNG, SIGNAL = 5.4; EXPRESSED IN HELA, SIGNAL = 4.6; EXPRESSED IN FETAL LIVER, SIGNAL = 4.4; EXPRESSED IN BRAIN, SIGNAL = 4.9; EXPRESSED IN BONE MARROW, SIGNAL = 4.3; EXPRESSED IN ADULT LIVER, SIGNAL = 4.3; EXPRESSED IN PLACENTA, SIGNAL =   5; EXPRESSED IN HEART, SIGNAL =   4; NT HIT: AF233436.2, EVALUE 3.00e-50; EST_HUMAN HIT: BF446535.1, EVALUE 1.00e-31; SWISSPROT HIT: Q02597, EVALUE 1.90e+00
ttcatggagagagcacagagtttgtgggccgtgccgaggatgccatcattgccctttccaattacagacttcacatcaagttcaaggagtctcttgttaat

SEQ ID NO: 23219 - DNA, 171 bp, Homo sapiens
  MAP TO AC003036.1; EXPRESSED IN PLACENTA, SIGNAL = 0.8; EXPRESSED IN BRAIN, SIGNAL = 0.69; EXPRESSED IN ADULT LIVER, SIGNAL = 0.7; EXPRESSED IN HEART, SIGNAL =   2; EXPRESSED IN LUNG, SIGNAL = 0.76; EXPRESSED IN FETAL LIVER, SIGNAL = 0.76; EXPRESSED IN BONE MARROW, SIGNAL = 0.63; NT HIT: AF128894.1, EVALUE 6.00e-03; SWISSPROT HIT: P35721, EVALUE 6.70e+00; EST_HUMAN HIT: AW469303.1, EVALUE 1.00e-02
atggacacggaacttggtaacatccctgtgccggacacaacgttagtgaaattccatttctacttgtgtttctttttcttcagtactgtcgccaccaccatcatcacatggtttttattaacttgtctgcctgttcctggtggtgtgtggacgtcagtcacaaagctccag

SEQ ID NO: 23220 - DNA, 158 bp, Homo sapiens
  MAP TO AC005007.1; EXPRESSED IN PLACENTA, SIGNAL =  14; EXPRESSED IN LUNG, SIGNAL =  15; EXPRESSED IN HELA, SIGNAL =  14; EXPRESSED IN FETAL LIVER, SIGNAL =  14; EXPRESSED IN BRAIN, SIGNAL =  14; EXPRESSED IN ADULT LIVER, SIGNAL =  14; EXPRESSED IN HEART, SIGNAL =  12; EXPRESSED IN BONE MARROW, SIGNAL =  13; NT HIT: gi11421326, EVALUE 4.00e-84; SWISSPROT HIT: P55198, EVALUE 7.00e-04; EST_HUMAN HIT: BE815811.1, EVALUE 9.00e-77
tccagcatctgtctccttgaaaattccatcctgattaggacacagttcacagctaggagaaacaccacatttacaggcatcacaaaaccaaggttcagtggagttttcagaagctgaactcataatagagtcactctctccatcaactccataacaac

SEQ ID NO: 23221 - DNA, 136 bp, Homo sapiens
  MAP TO AC005045.2; EXPRESSED IN LUNG, SIGNAL = 2.8; EXPRESSED IN BRAIN, SIGNAL = 2.5; EXPRESSED IN BONE MARROW, SIGNAL = 2.6; EXPRESSED IN PLACENTA, SIGNAL = 2.9; EXPRESSED IN HELA, SIGNAL = 2.8; EXPRESSED IN HEART, SIGNAL = 2.4; EXPRESSED IN FETAL LIVER, SIGNAL = 2.8; EXPRESSED IN ADULT LIVER, SIGNAL = 2.6; EST_HUMAN HIT: AW889793.1, EVALUE 1.80e+00; SWISSPROT HIT: P25563, EVALUE 5.30e+00; NT HIT: X74207.1, EVALUE 1.20e+00
cttttttcctcaggagctaccaaatttcggtgttccaaagcactaccatggtgtttatctggttcctggtgccaggtactaggcttccgcctgttgttatagctttcccaacgctcattctcactgtcatacatct

SEQ ID NO: 23222 - DNA, 334 bp, Homo sapiens
  MAP TO AC004453.1; EXPRESSED IN PLACENTA, SIGNAL = 2.2; EXPRESSED IN LUNG, SIGNAL =   2; EXPRESSED IN FETAL LIVER, SIGNAL = 1.8; EXPRESSED IN BRAIN, SIGNAL = 2.2; EXPRESSED IN ADULT LIVER, SIGNAL = 1.9; EXPRESSED IN HELA, SIGNAL = 1.9; EXPRESSED IN HEART, SIGNAL = 1.9; EXPRESSED IN BONE MARROW, SIGNAL = 1.9; NT HIT: AB028991.1, EVALUE 1.00e-123; EST_HUMAN HIT: BE263001.1, EVALUE 1.00e-123
gtattcaaaacctttgaccacatggcccgtcaggatgatgagaagagaaggcaggaacttgaagagaaaatcagaagaaaggaagaggaagaggccaagactgtgtcagctgctgcagctgagaaggagccagtcccagttccagtccaggaaatagagattgactccaccacagaattggatgggcatcaggaagtagagaaagtgcagcctccaggccctgtgaaggaaatggcccatggttcacaggaggcagaagctccaggagcagttgctggtgctgctgaagtccctagggaaccaccaattcttcccaggtgggaatttctacttt

SEQ ID NO: 23223 - DNA, 129 bp, Homo sapiens
  MAP TO AC005137.1; EXPRESSED IN ADULT LIVER, SIGNAL = 1.8; EXPRESSED IN PLACENTA, SIGNAL = 2.1; EXPRESSED IN LUNG, SIGNAL = 1.7; EXPRESSED IN HELA, SIGNAL =   2; EXPRESSED IN HEART, SIGNAL = 2.3; EXPRESSED IN BRAIN, SIGNAL = 2.2; EXPRESSED IN BONE MARROW, SIGNAL =   2; EXPRESSED IN FETAL LIVER, SIGNAL = 2.1; SWISSPROT HIT: P77894, EVALUE 8.10e-01; EST_HUMAN HIT: AW934844.1, EVALUE 3.00e-48; NT HIT: gi11439587, EVALUE 8.00e-51
catgccgctcagcagctccccgctcatacacagcagaaacgaccaccttcccaatgggggagtccacaccgccttccagggccaggtctaaggatccctcctggttagaggaaaacaggccttagggag

SEQ ID NO: 23224 - DNA, 77 bp, Homo sapiens
  MAP TO AC003043.1; EXPRESSED IN LUNG, SIGNAL = 2.1; EXPRESSED IN HELA, SIGNAL = 1.7; EXPRESSED IN FETAL LIVER, SIGNAL = 1.8; EXPRESSED IN BRAIN, SIGNAL = 1.6; EXPRESSED IN BONE MARROW, SIGNAL = 1.7; EXPRESSED IN ADULT LIVER, SIGNAL = 1.9; EXPRESSED IN PLACENTA, SIGNAL = 1.8; EXPRESSED IN HEART, SIGNAL = 1.7; SWISSPROT HIT: P08514, EVALUE 9.00e-03; NT HIT: M33320.1, EVALUE 4.00e-36; EST_HUMAN HIT: BE409167.1, EVALUE 3.00e-22
cttgcagatggcgtcgtattttgggcattcagtggctgtcactgacgtcaacggggatgggtgaggagggacatgcc

SEQ ID NO: 23225 - DNA, 129 bp, Homo sapiens
  MAP TO AC004558.1; EXPRESSED IN PLACENTA, SIGNAL = 6.3; EXPRESSED IN LUNG, SIGNAL = 5.6; EXPRESSED IN FETAL LIVER, SIGNAL = 6.7; EXPRESSED IN BRAIN, SIGNAL = 5.9; EXPRESSED IN BONE MARROW, SIGNAL = 6.2; EXPRESSED IN ADULT LIVER, SIGNAL =   6; EXPRESSED IN HELA, SIGNAL =   6; EXPRESSED IN HEART, SIGNAL =   6; SWISSPROT HIT: P73002, EVALUE 9.20e+00; EST_HUMAN HIT: AU138761.1, EVALUE 9.00e-21; NT HIT: U06672.1, EVALUE 7.00e-36
agtgcagaagaaggaaaacagcacagctgacagctgtgttcagaaagtttctggatcccatgctcatctccacaaaggaggacaagcaggcagcagagaccatggtgatttcctcagctcctccctgca

SEQ ID NO: 23226 - DNA, 193 bp, Homo sapiens
  MAP TO AC005243.1; EXPRESSED IN PLACENTA, SIGNAL = 2.2; EXPRESSED IN ADULT LIVER, SIGNAL = 1.9; EXPRESSED IN LUNG, SIGNAL = 2.3; EXPRESSED IN HELA, SIGNAL = 1.8; EXPRESSED IN HEART, SIGNAL = 1.7; EXPRESSED IN FETAL LIVER, SIGNAL = 1.8; EXPRESSED IN BRAIN, SIGNAL = 1.9; EXPRESSED IN BONE MARROW, SIGNAL = 1.8; NT HIT: AL163285.2, EVALUE 1.80e+00; SWISSPROT HIT: P41067, EVALUE 1.10e-01
actggaaggggaagacaaatccctagcggcagcttctgtgcctcccccgactcctttttggcagagtctccctgtgccttccactcctctatggccactttcacaggctgagtttccagctctttgcccaccctttcccctttggaagccccattctgtttgggaacaaaatgcctgggagtcatgagaagca

SEQ ID NO: 23227 - DNA, 895 bp, Homo sapiens
  MAP TO AC005146.1; EXPRESSED IN LUNG, SIGNAL = 1.9; EXPRESSED IN FETAL LIVER, SIGNAL = 1.4; EXPRESSED IN BRAIN, SIGNAL = 1.5; EXPRESSED IN PLACENTA, SIGNAL = 1.6; EXPRESSED IN HEART, SIGNAL = 1.4; EXPRESSED IN BONE MARROW, SIGNAL = 1.5; EXPRESSED IN ADULT LIVER, SIGNAL = 1.6; EST_HUMAN HIT: AL040727.1, EVALUE 5.50e-02; SWISSPROT HIT: P35084, EVALUE 7.00e-10; NT HIT: AB051897.1, EVALUE 2.30e+00
ttgtgtgcatgtgtgtgtgcggtgtctgtcttagtgagtgtccttggtggtctggactttctctcatagcagcctttgaaggagatgcaatgcttaactcccttcttggaggaggggagggaggagcacagaatgcaggtacaagcattggagggtaagaacctgagcccagggatgtctgagtcaggagtactcactaggctgttccaatgctgcatgagtgatacaagagaaaactaggaattgcagtgaggaacagaacagctaaacagtaggggagcaacgaaagactggtcgggcgcagatccacctcttctagagcccaagttctggcagttgttttataagattcaaaggtcctgtttttggtgagacagaacacagtgacagaaagataaaaggcagaactctgttgcttacagttccaaaagagagggaacttccaggcgggactatgcagacggctgcgttgtgggtgaaggctgcatcatggtcagggaaggctgcgtcatgggcagtgagggctgcgtcatggtcagggaaggctgtgtcatgggcagtgagggctgcgtcacgggcagtgagggctgtgtcatggtcagggaaggctgcagcatgggcagtgaaggctgcgtcatggtcagggaaggctgcgtcatgatcagggaaggctgcgtcatggtcaggaaaggctgcgtcatggtcagggaaggctgcgtcatggtcagggaaggctgcgtcatgggcagtgagggctgcatcatgggcagtgaaggttgcagggcacataatgtgtggcgagtgcagtggcttggttaagtttccagggctccctgtggactggcaatttgaggactttcttgggctcttgggctcagagctgtctctagttgtt

SEQ ID NO: 23228 - DNA, 274 bp, Homo sapiens
  MAP TO AC004615.1; EXPRESSED IN PLACENTA, SIGNAL =   1; EXPRESSED IN HEART, SIGNAL = 1.3; EXPRESSED IN FETAL LIVER, SIGNAL = 1.1; EXPRESSED IN BONE MARROW, SIGNAL =   1; EXPRESSED IN ADULT LIVER, SIGNAL = 1.2; EXPRESSED IN LUNG, SIGNAL = 1.1; EXPRESSED IN BRAIN, SIGNAL = 1.1; NT HIT: gi11417342, EVALUE 0.00e+00; SWISSPROT HIT: Q13591, EVALUE 2.00e-50
atcttatgacatcggaaattttacctacttctttttccgagaaaatgcagtagagcatgactgtgggaaaacagtgttctccagagctgcccgggtgtgcaagaacgatattggtgggcgcttcctgctggaagacacctggaccacattcatgaaggctcgcctgaactgctcccgtcctggggaagtccccttttactacaacgaattgcagagtactttcttcctgcctgagctggatttgatctatggcatctttaccaccaatgtgtat

SEQ ID NO: 23229 - DNA, 192 bp, Homo sapiens
  MAP TO AC005187.1; EXPRESSED IN BONE MARROW, SIGNAL = 2.1; EXPRESSED IN PLACENTA, SIGNAL = 2.2; EXPRESSED IN LUNG, SIGNAL = 2.4; EXPRESSED IN HELA, SIGNAL = 2.1; EXPRESSED IN HEART, SIGNAL = 2.1; EXPRESSED IN FETAL LIVER, SIGNAL = 2.4; EXPRESSED IN BRAIN, SIGNAL = 2.2; EXPRESSED IN ADULT LIVER, SIGNAL = 2.4; SWISSPROT HIT: P34233, EVALUE 1.70e+00; EST_HUMAN HIT: AA196146.1, EVALUE 1.00e-05; NT HIT: gi11422229, EVALUE 2.00e-12
gcaaagggtagatcttgcattggccagccggtagctgccgtctttgacgttgtccaggaggccttggcccctgaccacagagttctccatctgctgcctctcgaagacaagcaggaagggcagcctcttgtagcgtgggtccaggaagatggtgacatttggaaacatgcccatttcaggcgtctcctagca

SEQ ID NO: 23230 - DNA, 117 bp, Homo sapiens
  MAP TO AC004770.1; EXPRESSED IN LUNG, SIGNAL = 8.1; EXPRESSED IN BRAIN, SIGNAL = 8.7; EXPRESSED IN ADULT LIVER, SIGNAL =   8; EXPRESSED IN PLACENTA, SIGNAL = 7.7; EXPRESSED IN HELA, SIGNAL = 7.7; EXPRESSED IN HEART, SIGNAL = 7.6; EXPRESSED IN FETAL LIVER, SIGNAL = 8.1; EXPRESSED IN BONE MARROW, SIGNAL = 7.9; SWISSPROT HIT: O23810, EVALUE 4.10e+00
tgaggcacagccaggccgagggtgagtcagccagggaaatcccggcactggcgcccaccgctggtgacggttccgctgacacctacggaacggggtgcccagcccctcccgcagagg

SEQ ID NO: 23231 - DNA, 483 bp, Homo sapiens
  MAP TO AC005255.1; EXPRESSED IN PLACENTA, SIGNAL = 1.8; EXPRESSED IN LUNG, SIGNAL = 2.1; EXPRESSED IN HEART, SIGNAL = 1.8; EXPRESSED IN BRAIN, SIGNAL = 1.9; EXPRESSED IN BONE MARROW, SIGNAL = 1.7; EXPRESSED IN ADULT LIVER, SIGNAL = 1.8; EXPRESSED IN FETAL LIVER, SIGNAL = 1.8; EST_HUMAN HIT: AI909504.1, EVALUE 2.00e-52; NT HIT: gi11427410, EVALUE 2.00e-76; SWISSPROT HIT: P23265, EVALUE 2.00e-63
ctcatgatccaggacaccagaaccagcagtccacagagctgagggctcatgatgaccgtgtagtgcagggggtgacagatggccacaaactggtcataggccatcacggtcaggagtaagctgtccaacactataaagagtacaaaaaagcacatctgggtgatgcaacctgcataggtaatgactttgctctgtgtctggatgttcaccaacatctttgggaccatggtggaggcaaaacagatatctacgaaggacaggttggagagaaagaagtacatgggggtgtggaggcaggagtctgagattgcggccaggatgatgagcaggttcccgagcacagtgaccaggtacatggacaggaacagcccaaagaggaagggctgcaattcttgtttctctgaaaatcctagaagaagaaattctgaaatttgtgtctcattccctgctttcacctggttgatgtttctaccaaaaacaaac

SEQ ID NO: 23232 - DNA, 118 bp, Homo sapiens
  MAP TO AC005274.1; EXPRESSED IN LUNG, SIGNAL = 1.8; EXPRESSED IN HEART, SIGNAL = 1.6; EXPRESSED IN FETAL LIVER, SIGNAL = 1.5; EXPRESSED IN BRAIN, SIGNAL = 1.7; EXPRESSED IN PLACENTA, SIGNAL = 1.7; EXPRESSED IN BONE MARROW, SIGNAL = 1.5; EXPRESSED IN ADULT LIVER, SIGNAL = 1.7; SWISSPROT HIT: Q00194, EVALUE 9.30e+00; NT HIT: AF223391.1, EVALUE 6.60e-02; EST_HUMAN HIT: BF526722.1, EVALUE 2.50e-02
ttaacttttcatgtctatctggcacactcctccactgaggtactcctcttgtttttctctcttccttcttatctcctgctgtctccttatttttacttttgatttgctctttatcttt

SEQ ID NO: 23233 - DNA, 167 bp, Homo sapiens
  MAP TO AC004648.1; EXPRESSED IN LUNG, SIGNAL = 5.7; EXPRESSED IN BRAIN, SIGNAL = 5.3; EXPRESSED IN ADULT LIVER, SIGNAL = 5.5; EXPRESSED IN PLACENTA, SIGNAL = 5.3; EXPRESSED IN HELA, SIGNAL = 4.8; EXPRESSED IN HEART, SIGNAL = 4.9; EXPRESSED IN FETAL LIVER, SIGNAL = 4.5; EXPRESSED IN BONE MARROW, SIGNAL = 4.1; SWISSPROT HIT: P30999, EVALUE 3.00e-13; NT HIT: U81004.1, EVALUE 2.00e-89; EST_HUMAN HIT: AI936774.1, EVALUE 2.00e-78
tcggatgaccgaagtccaccgtagtgcctgtggagctctgagaaacctggtgtatgggaaggccaacgatgataacaaaattgccctgaaaaactgtggtggcatcccagcactggtgaggttactccgcaagacgactgacctggagatccgggagctggtcacag

SEQ ID NO: 23234 - DNA, 169 bp, Homo sapiens
  MAP TO AC004659.1; EXPRESSED IN LUNG, SIGNAL =   3; EXPRESSED IN FETAL LIVER, SIGNAL = 2.5; EXPRESSED IN BRAIN, SIGNAL = 2.8; EXPRESSED IN BONE MARROW, SIGNAL = 2.6; EXPRESSED IN ADULT LIVER, SIGNAL = 2.4; EXPRESSED IN HELA, SIGNAL = 2.6; EXPRESSED IN PLACENTA, SIGNAL = 2.3; EXPRESSED IN HEART, SIGNAL = 2.9; SWISSPROT HIT: P48664, EVALUE 2.00e-25; NT HIT: gi11426758, EVALUE 1.00e-90; EST_HUMAN HIT: BE551895.1, EVALUE 2.00e-90
tccccgggatgcccccttctcctgtgccatgagggacttgtagggtttccccaggctggggagggtaagctcagcttcctgaagctccagctcccgctgagacaagtgctcgatgacggccgctccaattgagtcccccagtacgttggtcattgtgcgaagccggtca

SEQ ID NO: 23235 - DNA, 86 bp, Homo sapiens
  MAP TO AC005104.1; EXPRESSED IN PLACENTA, SIGNAL = 9.3; EXPRESSED IN LUNG, SIGNAL = 7.5; EXPRESSED IN HELA, SIGNAL = 6.7; EXPRESSED IN FETAL LIVER, SIGNAL = 6.7; EXPRESSED IN ADULT LIVER, SIGNAL = 7.1; EXPRESSED IN HEART, SIGNAL = 6.6; EXPRESSED IN BRAIN, SIGNAL = 8.1; EXPRESSED IN BONE MARROW, SIGNAL = 6.4; EST_HUMAN HIT: AU127021.1, EVALUE 3.00e-41; NT HIT: AF038404.1, EVALUE 2.00e-41
agagccccgccatcgccatccccgccctgcatctgcatctgcatctgcgcctgcatccttgcaatcatctcttgcatgcggcggag

SEQ ID NO: 23236 - DNA, 367 bp, Homo sapiens
  MAP TO AC005146.1; EXPRESSED IN LUNG, SIGNAL = 2.8; EXPRESSED IN HELA, SIGNAL = 2.5; EXPRESSED IN BONE MARROW, SIGNAL = 2.5; EXPRESSED IN ADULT LIVER, SIGNAL = 2.7; EXPRESSED IN PLACENTA, SIGNAL = 2.8; EXPRESSED IN HEART, SIGNAL = 2.8; EXPRESSED IN FETAL LIVER, SIGNAL = 2.7; EXPRESSED IN BRAIN, SIGNAL =   3; EST_HUMAN HIT: AA121118.1, EVALUE 3.40e-01; SWISSPROT HIT: Q61102, EVALUE 4.40e+00; NT HIT: M99150.1, EVALUE 5.80e-02
gcctacccgggaaagcgatgacgaggacgatgaggagaagaagggacgaggctgctccctgcagtaccagcacgccacagtgcgtgtcctcacccagtttgtggccgagtcacctgacttagggcagctgacctacatgctgggccccgactggcagtttgacatcactgaccttgtgaccgagttcatgaaggtggaggagccgaaaatcgctcagttacaggacggcaggaccctggctggtcgggagccgggaataaccacggtgcaggtacacgccgccatgccttgcccaacagcagtctgtgttgatgagtggccaggtagatgctgttgtgcagatgtgtgtctgtgtgcacatgtgcat

SEQ ID NO: 23237 - DNA, 79 bp, Homo sapiens
  MAP TO AC005247.1; EXPRESSED IN PLACENTA, SIGNAL = 1.8; EXPRESSED IN LUNG, SIGNAL = 1.9; EXPRESSED IN HELA, SIGNAL = 1.8; EXPRESSED IN FETAL LIVER, SIGNAL = 1.9; EXPRESSED IN BONE MARROW, SIGNAL = 1.7; EXPRESSED IN ADULT LIVER, SIGNAL = 1.8; EXPRESSED IN HEART, SIGNAL =   2; EXPRESSED IN BRAIN, SIGNAL = 2.1; EST_HUMAN HIT: AI204275.1, EVALUE 6.00e-02
tcctgacgtagcacaggtcctcctttgtgaaatatttgttttcttcaagccccttggttctccccgtgggaacacacat

SEQ ID NO: 23238 - DNA, 190 bp, Homo sapiens
  MAP TO AC004671.1; EXPRESSED IN PLACENTA, SIGNAL = 3.7; EXPRESSED IN LUNG, SIGNAL =   4; EXPRESSED IN HEART, SIGNAL = 3.6; EXPRESSED IN BRAIN, SIGNAL = 3.8; EXPRESSED IN ADULT LIVER, SIGNAL = 3.1; EXPRESSED IN FETAL LIVER, SIGNAL = 3.6; EXPRESSED IN BONE MARROW, SIGNAL = 3.6; EXPRESSED IN HELA, SIGNAL = 3.5; SWISSPROT HIT: Q10691, EVALUE 2.90e+00; EST_HUMAN HIT: AV660506.1, EVALUE 6.60e-01; NT HIT: X02158.1, EVALUE 6.90e+00
cgaaggagaccagcgatcgggcaggagaaagagtggaaggaaggtcttgaaggagaagtgccaggaggtggacagggccatgcagctgcaggggcacagttcccatacgacctccagctgcccagtggttttctggcagtccctcagccagatgtttgtatagtacccaggccaggtgctgcctggctct

SEQ ID NO: 23239 - DNA, 164 bp, Homo sapiens; identical to SEQ ID NO: 23122
  MAP TO AC005080.1; EXPRESSED IN PLACENTA, SIGNAL =  35; EXPRESSED IN HELA, SIGNAL =  34; EXPRESSED IN HEART, SIGNAL =  28; EXPRESSED IN FETAL LIVER, SIGNAL =  33; EXPRESSED IN BRAIN, SIGNAL =  35; EXPRESSED IN BONE MARROW, SIGNAL =  36; EXPRESSED IN LUNG, SIGNAL =  40; EXPRESSED IN ADULT LIVER, SIGNAL =  34; EST_HUMAN HIT: N48128.1, EVALUE 2.00e-87; NT HIT: gi4506544, EVALUE 2.00e-03

SEQ ID NO: 23240 - DNA, 120 bp, Homo sapiens
  MAP TO AC004676.1; EXPRESSED IN LUNG, SIGNAL = 2.3; EXPRESSED IN HEART, SIGNAL = 2.2; EXPRESSED IN FETAL LIVER, SIGNAL = 2.2; EXPRESSED IN BRAIN, SIGNAL = 2.2; EXPRESSED IN BONE MARROW, SIGNAL = 1.9; EXPRESSED IN HELA, SIGNAL =   2; EXPRESSED IN PLACENTA, SIGNAL = 2.1; EXPRESSED IN ADULT LIVER, SIGNAL = 2.2; NT HIT: AF248054.1, EVALUE 2.70e-01; SWISSPROT HIT: P05423, EVALUE 4.10e+00
aggctgcctcccaacgtggggccttcggcattgttctggcctttgtggttcctggaaatcacccacagcaggatctgttaggcctgaatacccatccacaagggcaggagggagaggtgt

SEQ ID NO: 23241 - DNA, 262 bp, Homo sapiens
  MAP TO AC004816.1; EXPRESSED IN PLACENTA, SIGNAL =   6; EXPRESSED IN HEART, SIGNAL = 5.7; EXPRESSED IN ADULT LIVER, SIGNAL = 6.1; EXPRESSED IN LUNG, SIGNAL = 6.2; EXPRESSED IN FETAL LIVER, SIGNAL = 5.8; EXPRESSED IN BRAIN, SIGNAL = 6.6; EXPRESSED IN BONE MARROW, SIGNAL = 6.1; EXPRESSED IN HELA, SIGNAL = 5.8; SWISSPROT HIT: O75607, EVALUE 1.90e+00; EST_HUMAN HIT: BE873307.1, EVALUE 2.40e-01; NT HIT: L23838.1, EVALUE 4.00e-02
caagaaagagagggagcgagaggggaatggcctatttcagaaagtttgggaagccatgcatgccaggttggagcagagaaccagagggaagggtaaaaaaggtgaagctggaaaagaaagaaaccatgacacagagacccttctggtccacgtagaagatctgggacttcattgtgaggcaagagtggatttggatgatgaagtgatggtgactcaggtgaccagagtggaggcggataagcaggaaaaacagatcaatgta

SEQ ID NO: 23242 - DNA, 157 bp, Homo sapiens
  MAP TO AC004622.1; EXPRESSED IN PLACENTA, SIGNAL = 3.5; EXPRESSED IN HEART, SIGNAL = 3.6; EXPRESSED IN BONE MARROW, SIGNAL = 3.2; EXPRESSED IN ADULT LIVER, SIGNAL = 3.3; EXPRESSED IN LUNG, SIGNAL = 3.8; EXPRESSED IN HELA, SIGNAL = 3.2; EXPRESSED IN FETAL LIVER, SIGNAL = 3.3; EXPRESSED IN BRAIN, SIGNAL = 3.7; EST_HUMAN HIT: AA058626.1, EVALUE 6.00e-07; NT HIT: AJ271735.1, EVALUE 4.00e-04; SWISSPROT HIT: P08547, EVALUE 6.00e-11
atgtaataaatgccacatatgaaaagcccacagcagacatcatactcaatggtgaaagactgtgagcttttcctctatgatcaggaacaagacatggttgtctactttcatgagttctactgaacaaaatactggaagtcttagccagagcaattag

SEQ ID NO: 23243 - DNA, 522 bp, Homo sapiens
  MAP TO AC005191.1; EXPRESSED IN PLACENTA, SIGNAL = 1.8; EXPRESSED IN LUNG, SIGNAL = 1.5; EXPRESSED IN FETAL LIVER, SIGNAL = 2.9; EXPRESSED IN BONE MARROW, SIGNAL = 3.1; EXPRESSED IN ADULT LIVER, SIGNAL = 2.6; EXPRESSED IN HELA, SIGNAL = 2.1; EXPRESSED IN HEART, SIGNAL =   2; EXPRESSED IN BRAIN, SIGNAL = 1.5; NT HIT: gi6912735, EVALUE 0.00e+00; EST_HUMAN HIT: BF376859.1, EVALUE 4.90e-01; SWISSPROT HIT: Q9UL62, EVALUE 3.00e-83
ctctttctggtggtatttgattgccaccttcaacttggccaggtcatggtacttctgagggtcaagctcttcactgtggtcatctcgatggttgaggatgatctccagttccctggagctccgagcttggtccagcaggtctttggcaaagagcttgcactgctgagagagctcctcatactcggccttgaactcattctccaccttgctgagctccttgagctcccagcccagacggaaggcagttaggatggggtcctcacttgataaggcaatgagtgaggggcttgccagagccttatagatgttcagtcgggagcgagagtggcgcaggctgtctacctctgaactagacacacactccacacagttgcagcggatctggtggggccgtgggatagtgacccgtttttggacaagcaatttgatgatttcgtagttgttggtgtgggcagccagcatgatgggagtgatgtccggtgtgaattcagagaactgcgtgtccatcatcagagtggggac

SEQ ID NO: 23244 - DNA, 134 bp, Homo sapiens
  MAP TO AC004782.1; EXPRESSED IN PLACENTA, SIGNAL = 3.1; EXPRESSED IN BONE MARROW, SIGNAL =   3; EXPRESSED IN ADULT LIVER, SIGNAL = 3.3; EXPRESSED IN LUNG, SIGNAL = 2.8; EXPRESSED IN HELA, SIGNAL = 2.9; EXPRESSED IN HEART, SIGNAL = 3.1; EXPRESSED IN FETAL LIVER, SIGNAL = 3.5; EXPRESSED IN BRAIN, SIGNAL = 3.4; SWISSPROT HIT: O88712, EVALUE 8.00e-01; NT HIT: gi11641282, EVALUE 3.00e-01; EST_HUMAN HIT: AA788784.1, EVALUE 1.10e-01
actcttgctgctatgtgaagaaggggttctgggagcaagagtggaagccagtgacaagatgtgtcaggcggccagtggaagcgcccaggtgagaggtgaaggtggcctgggcttgggcgtggcagcgaagatgg

SEQ ID NO: 23245 - DNA, 81 bp, Homo sapiens
  MAP TO AC002454.1; EXPRESSED IN PLACENTA, SIGNAL =  11; EXPRESSED IN LUNG, SIGNAL = 7.5; EXPRESSED IN HEART, SIGNAL = 5.4; EXPRESSED IN FETAL LIVER, SIGNAL =   6; EXPRESSED IN BONE MARROW, SIGNAL =  32; EXPRESSED IN ADULT LIVER, SIGNAL =   9; EXPRESSED IN HELA, SIGNAL = 5.5; EXPRESSED IN BRAIN, SIGNAL =   6; NT HIT: AF235502.1, EVALUE 2.60e+00
ttgactttgccctggtcaaaattaacaatgtccctattcttagcactaacggccattccattatttctctcttacttgctc

SEQ ID NO: 23246 - DNA, 492 bp, Homo sapiens
  MAP TO AC005156.1; EXPRESSED IN BRAIN, SIGNAL = 5.9; EXPRESSED IN PLACENTA, SIGNAL = 6.1; EXPRESSED IN LUNG, SIGNAL = 6.8; EXPRESSED IN HEART, SIGNAL = 5.4; EXPRESSED IN BONE MARROW, SIGNAL = 5.4; EXPRESSED IN ADULT LIVER, SIGNAL = 5.4; EXPRESSED IN HELA, SIGNAL = 5.6; EXPRESSED IN FETAL LIVER, SIGNAL = 5.3; SWISSPROT HIT: Q69154, EVALUE 8.90e+00; NT HIT: L35129.1, EVALUE 4.80e+00; EST_HUMAN HIT: BF217905.1, EVALUE 0.00e+00
atgtctggattttgtaaagctgctttgaacacttctgcagggaactcaaatccttatcttccgtattcctgtgaattgcctttatgttatttctcctcaaaatgtatgtgttcatccgggggacctgtagacagagcaccagactcctctaaggatggtagaaaccatcataaaacaatggggcattataaccacaatgactctttgcggaaaacacagataaactctttgaaaaactcagtggcctgccctggtgcacaaaaggctattacgtcttcagaggcagttgacagatttatgcctaggacaacacaactgcaggagcgcaaaagaagaagagaagatgatcgtaaacttggaacttttcttcaaacaaacccaactggtaatgagattatgattggacctctgttaccagacatctctaaagtggatatgcacgatgactcattgaatacaacggcgaatttaattcggcataaacttaaagag

SEQ ID NO: 23247 - DNA, 99 bp, Homo sapiens
  MAP TO AC005291.1; EXPRESSED IN PLACENTA, SIGNAL = 1.5; EXPRESSED IN HEART, SIGNAL = 1.7; EXPRESSED IN BRAIN, SIGNAL = 1.9; EXPRESSED IN BONE MARROW, SIGNAL = 1.8; EXPRESSED IN ADULT LIVER, SIGNAL = 1.8; EXPRESSED IN LUNG, SIGNAL = 1.7; EXPRESSED IN HELA, SIGNAL = 1.8; EXPRESSED IN FETAL LIVER, SIGNAL =   2; EST_HUMAN HIT: N90025.1, EVALUE 3.10e-01; SWISSPROT HIT: P29694, EVALUE 9.50e+00; NT HIT: AF000949.1, EVALUE 2.10e-01
ttcactttggatgtactgcagagtggagtcaagggtgtttagatcacaaacccctggttctggctcctggatcttgacaacagtcatcacataaatttt

SEQ ID NO: 23248 - DNA, 114 bp, Homo sapiens
  MAP TO AC005165.1; EXPRESSED IN BRAIN, SIGNAL = 3.4; EXPRESSED IN ADULT LIVER, SIGNAL = 3.3; EXPRESSED IN PLACENTA, SIGNAL = 3.4; EXPRESSED IN LUNG, SIGNAL = 3.7; EXPRESSED IN HELA, SIGNAL = 3.6; EXPRESSED IN HEART, SIGNAL = 3.1; EXPRESSED IN BONE MARROW, SIGNAL = 3.2; EXPRESSED IN FETAL LIVER, SIGNAL = 3.2; EST_HUMAN HIT: H93838.1, EVALUE 2.00e-03; NT HIT: M63376.1, EVALUE 1.00e-03
cgtgtttgctatcaccatcatcgttattatcatcacgatcatcatcattaccatgatcatcaaatccattttacagaagaagaaactgagttgtcaagtaatttacatataagt

SEQ ID NO: 23249 - DNA, 117 bp, Homo sapiens
  MAP TO AC005234.1; EXPRESSED IN LUNG, SIGNAL = 1.4; EXPRESSED IN BRAIN, SIGNAL = 1.6; EXPRESSED IN PLACENTA, SIGNAL = 1.5; EXPRESSED IN HEART, SIGNAL = 1.3; EXPRESSED IN BONE MARROW, SIGNAL = 1.5; EXPRESSED IN ADULT LIVER, SIGNAL = 1.5; EXPRESSED IN FETAL LIVER, SIGNAL = 1.4; SWISSPROT HIT: P45795, EVALUE 4.10e+00; NT HIT: AF192531.1, EVALUE 1.00e+00; EST_HUMAN HIT: AV754841.1, EVALUE 5.90e+00
aagagacactcagggtcctggggacagaagaggccttaaggaggcacaagtgggaactggaagaatggggtgagatcactgcagaagttcaggcaaaggtcacagtggggtggccac

SEQ ID NO: 23250 - DNA, 141 bp, Homo sapiens
  MAP TO AC005102.1; EXPRESSED IN HELA, SIGNAL =  35; EXPRESSED IN HEART, SIGNAL =  34; EXPRESSED IN BONE MARROW, SIGNAL =  37; EXPRESSED IN PLACENTA, SIGNAL =  43; EXPRESSED IN LUNG, SIGNAL =  48; EXPRESSED IN FETAL LIVER, SIGNAL =  37; EXPRESSED IN BRAIN, SIGNAL =  47; EXPRESSED IN ADULT LIVER, SIGNAL =  35; EST_HUMAN HIT: BF309590.1, EVALUE 3.00e-08; SWISSPROT HIT: P39188, EVALUE 2.00e-06; NT HIT: AL163284.2, EVALUE 4.00e-16
tcactgttcattgttctgcaatgctttgcggtttgcaaagtgctcctgtgtcggccgggtgtggtggttcacgcctataatcccagcatcttgggaggccaaggcaggcagatggcttgagtccaagggttcaagatccac

SEQ ID NO: 23251 - DNA, 366 bp, Homo sapiens
  MAP TO AC004132.1; EXPRESSED IN PLACENTA, SIGNAL = 3.5; EXPRESSED IN HELA, SIGNAL = 3.9; EXPRESSED IN HEART, SIGNAL =   3; EXPRESSED IN FETAL LIVER, SIGNAL = 4.3; EXPRESSED IN BRAIN, SIGNAL = 5.4; EXPRESSED IN ADULT LIVER, SIGNAL = 4.4; EXPRESSED IN LUNG, SIGNAL = 5.5; EXPRESSED IN BONE MARROW, SIGNAL = 3.8; EST_HUMAN HIT: AU129622.1, EVALUE 0.00e+00; SWISSPROT HIT: P35680, EVALUE 7.00e-43; NT HIT: U90279.1, EVALUE 0.00e+00
atggtgtccaagctcacgtcgctccagcaagaactcctgagcgccctgctgagctccggggtcaccaaggaggtgctggttcaggccttggaggagttgctgccatccccgaacttcggggtgaagctggagacgctgcccctgtcccctggcagcggggccgagcccgacaccaagccggtcttccatactctcaccaacggccacgccaagggccgcttgtccggcgacgagggctccgaggacggcgacgactatgacacacctcccatcctcaaggagctgcaggcgctcaacaccgaggaggcggcggagcagcgggcggaggtggaccggatgctcaggtaggcgcagagcgaggtggag

SEQ ID NO: 23252 - DNA, 173 bp, Homo sapiens
  MAP TO AC005237.2; EXPRESSED IN PLACENTA, SIGNAL = 3.5; EXPRESSED IN LUNG, SIGNAL = 3.8; EXPRESSED IN FETAL LIVER, SIGNAL = 3.7; EXPRESSED IN BRAIN, SIGNAL = 3.6; EXPRESSED IN BONE MARROW, SIGNAL = 3.3; EXPRESSED IN ADULT LIVER, SIGNAL = 3.4; EXPRESSED IN HELA, SIGNAL = 3.4; EXPRESSED IN HEART, SIGNAL = 3.7; NT HIT: AF067136.1, EVALUE 5.00e-93; SWISSPROT HIT: P45969, EVALUE 4.00e-10; EST_HUMAN HIT: AI912215.1, EVALUE 8.00e-93
atgaacgacaatctccttgagagctggagcgacctcgacgagctgaagggagccaggagcctggagacagtgtacctggagcggaaccccttgcagaaggacccccagtaccggcggaaggtcatgctcgccctcccctccgtgcggcagatcgatgccacgttcgtcaggtt

SEQ ID NO: 23253 - DNA, 180 bp, Homo sapiens
  MAP TO AC005317.1; EXPRESSED IN BRAIN, SIGNAL =   2; EXPRESSED IN ADULT LIVER, SIGNAL =   2; EXPRESSED IN PLACENTA, SIGNAL = 2.2; EXPRESSED IN HELA, SIGNAL = 2.3; EXPRESSED IN HEART, SIGNAL = 1.6; EXPRESSED IN FETAL LIVER, SIGNAL =   2; EXPRESSED IN BONE MARROW, SIGNAL = 2.2; EXPRESSED IN LUNG, SIGNAL = 2.6; SWISSPROT HIT: P54098, EVALUE 1.00e-10; NT HIT: U60325.1, EVALUE 7.00e-40; EST_HUMAN HIT: BE281630.1, EVALUE 1.00e-39
ctctccaagaagagcggtagctgctgctggaaaacctcatgggtggcccacacgtcctgggcacagtactgcatcaggtcctggcacaaggtgacaggaaggcgcaaggtgggcagccatcccattaccaccaccagctctcagggtcaggcctggcagctgcatctccccaagtgcagc

SEQ ID NO: 23254 - DNA, 104 bp, Homo sapiens
  MAP TO AC005244.1; EXPRESSED IN PLACENTA, SIGNAL = 2.6; EXPRESSED IN HEART, SIGNAL = 1.5; EXPRESSED IN FETAL LIVER, SIGNAL = 1.8; EXPRESSED IN BONE MARROW, SIGNAL = 1.5; EXPRESSED IN LUNG, SIGNAL =   2; EXPRESSED IN BRAIN, SIGNAL = 1.1; EXPRESSED IN ADULT LIVER, SIGNAL = 1.8; NT HIT: D50663.1, EVALUE 6.00e-11; SWISSPROT HIT: P24400, EVALUE 1.40e+00; EST_HUMAN HIT: N44291.1, EVALUE 4.00e-13
agtctcctccgcagcctggtagtcttccatctttctccggcccgtcacctctacctcctttataccatattttgaccgtaccttttctatatttagacacacaa

SEQ ID NO: 23255 - DNA, 202 bp, Homo sapiens
  MAP TO AC005151.1; EXPRESSED IN PLACENTA, SIGNAL =  12; EXPRESSED IN LUNG, SIGNAL =  12; EXPRESSED IN FETAL LIVER, SIGNAL =  11; EXPRESSED IN BRAIN, SIGNAL = 8.3; EXPRESSED IN BONE MARROW, SIGNAL =  10; EXPRESSED IN ADULT LIVER, SIGNAL =  11; EXPRESSED IN HELA, SIGNAL =  11; EXPRESSED IN HEART, SIGNAL =  11; EST_HUMAN HIT: AA045250.1, EVALUE 7.10e-01; NT HIT: gi7305360, EVALUE 6.00e-25; SWISSPROT HIT: Q62919, EVALUE 1.90e-01
cccaggcagcaggggtccttggtgggtaggagcaaggccacctccccgaatcgcaggcagctctcagggcggggactggggcagcccagatccaccgggacaatggtgtctggggcttggcactggtgctggcagcagccgctgagggagctgttccaggtctcccccagggccctcggcacccccatgctgtcagtgcagg

SEQ ID NO: 23256 - DNA, 187 bp, Homo sapiens
  MAP TO AC004148.1; EXPRESSED IN LUNG, SIGNAL = 7.3; EXPRESSED IN HELA, SIGNAL = 6.6; EXPRESSED IN BONE MARROW, SIGNAL = 6.3; EXPRESSED IN ADULT LIVER, SIGNAL = 7.8; EXPRESSED IN PLACENTA, SIGNAL = 6.5; EXPRESSED IN HEART, SIGNAL = 5.3; EXPRESSED IN FETAL LIVER, SIGNAL = 7.9; EXPRESSED IN BRAIN, SIGNAL = 7.4; NT HIT: gi11426985, EVALUE 1.00e-101; SWISSPROT HIT: O09175, EVALUE 1.70e+00; EST_HUMAN HIT: BF330759.1, EVALUE 1.00e-101
cgtgtggtcatcttcttcttccccttctagcacgacacagtgatacagcattcctgattcagtagcgatcactaagatattggggacacagggtaagcagagtacagcacacgcatcataaccatagttatcttcagccgcaggatgcatgggcaatggacccaacagctttccaatatttccaggg

SEQ ID NO: 23257 - DNA, 77 bp, Homo sapiens
  MAP TO AC002519.1; EXPRESSED IN PLACENTA, SIGNAL =   2; EXPRESSED IN LUNG, SIGNAL = 2.3; EXPRESSED IN HELA, SIGNAL = 2.2; EXPRESSED IN HEART, SIGNAL = 2.3; EXPRESSED IN BONE MARROW, SIGNAL = 2.1; EXPRESSED IN FETAL LIVER, SIGNAL =  17; EXPRESSED IN BRAIN, SIGNAL = 2.5; EXPRESSED IN ADULT LIVER, SIGNAL =  23; EST_HUMAN HIT: BF183230.1, EVALUE 1.00e-30
tggcagctgtccatggaatggatttctctcttcctagagttcccccatctgagctggactctgattctgtggataaa

SEQ ID NO: 23258 - DNA, 83 bp, Homo sapiens
  MAP TO AC004159.1; EXPRESSED IN PLACENTA, SIGNAL =   6; EXPRESSED IN LUNG, SIGNAL = 7.3; EXPRESSED IN HELA, SIGNAL = 8.1; EXPRESSED IN HEART, SIGNAL =   6; EXPRESSED IN FETAL LIVER, SIGNAL = 7.9; EXPRESSED IN ADULT LIVER, SIGNAL = 9.3; EXPRESSED IN BRAIN, SIGNAL = 5.3; EXPRESSED IN BONE MARROW, SIGNAL = 6.1; EST_HUMAN HIT: AA775191.1, EVALUE 1.00e+00
gtttcattggtttaatgactgcagaaaaaatggtgggttttttttctccattactagtaggcttgggagcagcaaagttggca

SEQ ID NO: 23259 - DNA, 219 bp, Homo sapiens
  MAP TO AC005281.2; EXPRESSED IN FETAL LIVER, SIGNAL = 3.5; EXPRESSED IN BONE MARROW, SIGNAL = 3.2; EXPRESSED IN ADULT LIVER, SIGNAL = 3.4; EXPRESSED IN HELA, SIGNAL = 3.8; EXPRESSED IN PLACENTA, SIGNAL = 3.4; EXPRESSED IN LUNG, SIGNAL = 3.7; EXPRESSED IN HEART, SIGNAL = 3.9; EXPRESSED IN BRAIN, SIGNAL =   4; EST_HUMAN HIT: BF689800.1, EVALUE 2.00e-78; SWISSPROT HIT: Q28046, EVALUE 2.00e-30; NT HIT: D26549.1, EVALUE 3.00e-55
atggcgcgggagctataccacgaagagttcgcccgggcgggcaagcaggcggggctgcaggtctggaggattgagaagctggagctggtgcccgtgccccagagcgctcacggcgacttctacgtcggggatgcctacctggtgctgcacacggccaagacgagccgaggcttcacctaccacctgcacttctggctcggtaagggacggcgggcggcg

SEQ ID NO: 23260 - DNA, 151 bp, Homo sapiens
  MAP TO AC005074.1; EXPRESSED IN LUNG, SIGNAL =  26; EXPRESSED IN HELA, SIGNAL =  22; EXPRESSED IN BONE MARROW, SIGNAL =  23; EXPRESSED IN ADULT LIVER, SIGNAL =  23; EXPRESSED IN PLACENTA, SIGNAL =  21; EXPRESSED IN HEART, SIGNAL =  20; EXPRESSED IN FETAL LIVER, SIGNAL =  21; EXPRESSED IN BRAIN, SIGNAL =  23; NT HIT: AF072810.1, EVALUE 5.00e-71; SWISSPROT HIT: P51609, EVALUE 4.60e-01; EST_HUMAN HIT: BF326857.1, EVALUE 8.00e-71
atactggctcttctcagatgaagttccaggattattcattgaaaaaggctgggtacatgacagcattgactaccgattcaaccatcactgcaaagaccacacagtctctggtgatgaggattactgtcctcgcagtgagtatatctgtata

SEQ ID NO: 23261 - DNA, 178 bp, Homo sapiens
  MAP TO AC005284.1; EXPRESSED IN PLACENTA, SIGNAL = 2.4; EXPRESSED IN ADULT LIVER, SIGNAL =   2; EXPRESSED IN LUNG, SIGNAL = 2.6; EXPRESSED IN HEART, SIGNAL = 2.5; EXPRESSED IN FETAL LIVER, SIGNAL = 2.3; EXPRESSED IN BRAIN, SIGNAL = 2.7; EXPRESSED IN BONE MARROW, SIGNAL = 2.2; EXPRESSED IN HELA, SIGNAL = 2.5; NT HIT: Y12488.1, EVALUE 1.00e-01; EST_HUMAN HIT: H53552.1, EVALUE 6.20e-01; SWISSPROT HIT: P46023, EVALUE 3.90e+00
gggcctgagtcttagagtcagagaagtccacagtaatctgacttttctgaattgcagttactcttctgcaaagtgagagagtactaaatgagaccctacatgtaaagctgttagcatgatgcctggtgcataaataccaagggttacaatgagagctactgttatcaagtctgtgatg

SEQ ID NO: 23262 - DNA, 300 bp, Homo sapiens
  MAP TO AC005212.1; EXPRESSED IN PLACENTA, SIGNAL = 6.7; EXPRESSED IN LUNG, SIGNAL = 7.1; EXPRESSED IN HELA, SIGNAL = 6.7; EXPRESSED IN FETAL LIVER, SIGNAL = 6.5; EXPRESSED IN BONE MARROW, SIGNAL = 6.6; EXPRESSED IN ADULT LIVER, SIGNAL = 6.8; EXPRESSED IN HEART, SIGNAL = 6.5; EXPRESSED IN BRAIN, SIGNAL = 6.3; NT HIT: gi4501848, EVALUE 0.00e+00; SWISSPROT HIT: Q99758, EVALUE 3.00e-47; EST_HUMAN HIT: R59253.1, EVALUE 6.00e-98
gtgacctggaggagttcttgatcttcagggcttctgtggaggggggcggctttaatgagcggtgccttgtggcagcgtccttcagagatgtgggagagcgcacggtcgtcaacgccttgttcaacaaccaggcgtaccactctccagccactgccctggccgtcgtggacaaccttctgttcaagctgctgtgcgggcctcacgcctccattgtggtctccaacttcccccagccccggagcgccctgcaggctgccaaggaccagtttaacgagtatgtgcactgcccgtccctgtctg

SEQ ID NO: 23263 - DNA, 107 bp, Homo sapiens
  MAP TO AC004061.1; EXPRESSED IN PLACENTA, SIGNAL = 2.8; EXPRESSED IN LUNG, SIGNAL = 1.8; EXPRESSED IN HELA, SIGNAL = 2.3; EXPRESSED IN FETAL LIVER, SIGNAL = 3.1; EXPRESSED IN BRAIN, SIGNAL = 2.3; EXPRESSED IN BONE MARROW, SIGNAL = 2.6; EXPRESSED IN ADULT LIVER, SIGNAL = 2.2; EXPRESSED IN HEART, SIGNAL = 2.2; EST_HUMAN HIT: AW379146.1, EVALUE 1.30e+00; NT HIT: U72995.1, EVALUE 9.10e-01
aggtcatggtcagactagcagcacatgccgccatcagacttcagacactctctgaaggtgtttcacacctcaccctccatttctccaaatcactgcaaaagcactaa

SEQ ID NO: 23264 - DNA, 86 bp, Homo sapiens
  MAP TO AC005544.1; EXPRESSED IN LUNG, SIGNAL = 1.9; EXPRESSED IN BRAIN, SIGNAL = 1.9; EXPRESSED IN HEART, SIGNAL = 1.5; EXPRESSED IN FETAL LIVER, SIGNAL = 1.6; EXPRESSED IN BONE MARROW, SIGNAL = 1.5; EXPRESSED IN ADULT LIVER, SIGNAL = 1.6; EXPRESSED IN PLACENTA, SIGNAL = 1.7; EST_HUMAN HIT: R10365.1, EVALUE 2.60e-01; SWISSPROT HIT: P05665, EVALUE 3.20e+00
acgctgccctcgcacagccccacccaagccctcctgcccgtcccctccctgacccaaggcatccaggaacatgttctccatgtcaa

SEQ ID NO: 23265 - DNA, 114 bp, Homo sapiens
  MAP TO AC004126.1; EXPRESSED IN PLACENTA, SIGNAL = 1.1; EXPRESSED IN HEART, SIGNAL = 1.5; EXPRESSED IN BONE MARROW, SIGNAL = 0.95; EXPRESSED IN LUNG, SIGNAL = 0.9; EXPRESSED IN FETAL LIVER, SIGNAL = 1.3; EXPRESSED IN BRAIN, SIGNAL = 0.89; EXPRESSED IN ADULT LIVER, SIGNAL = 1.6; EST_HUMAN HIT: BE084667.1, EVALUE 1.00e-22; NT HIT: AL163248.2, EVALUE 2.00e-05; SWISSPROT HIT: P47363, EVALUE 4.10e+00
tgattccaacccttcagccctcatggatgactttgagggattgaggacttccatggagggagtaactgcagatgtggaggaaatggtaagagaattagaatccaaaggggagtc

SEQ ID NO: 23266 - DNA, 420 bp, Homo sapiens
  MAP TO AC005552.1; EXPRESSED IN PLACENTA, SIGNAL = 1.7; EXPRESSED IN HELA, SIGNAL = 1.9; EXPRESSED IN HEART, SIGNAL = 1.8; EXPRESSED IN ADULT LIVER, SIGNAL = 2.2; EXPRESSED IN BONE MARROW, SIGNAL =   2; EXPRESSED IN BRAIN, SIGNAL = 1.8; EXPRESSED IN FETAL LIVER, SIGNAL = 1.7; EXPRESSED IN LUNG, SIGNAL = 1.7; EST_HUMAN HIT: AA938189.1, EVALUE 2.50e-02; NT HIT: AJ010770.1, EVALUE 1.70e-02
agggagggattctctgaggaggtggcatttgagaaaatgcttgaatgttgagaagcggtagccatacagtgatttaagagaagggagtttcattctccatcaccatcaccatcaacaacatcatcatcatcatcaccatcaccatcatcattaccatcattattatcaacatcatcctcaccatcatcattatcatcatcaccatcattaccatcaccatcatcatcttaaccattgttatcatcatcactgtcatcaccatcattatcatcatcaccatcactatcatttgcttctgattatataacaccttccatgccaagcactgctctttacatgtattgactcatttaatcctcttaactacgctatgaagcagatgtatgattttctccattttacacataagaaggatgagac

SEQ ID NO: 23267 - DNA, 488 bp, Homo sapiens
  MAP TO AC004219.1; EXPRESSED IN PLACENTA, SIGNAL = 5.8; EXPRESSED IN LUNG, SIGNAL = 6.9; EXPRESSED IN HELA, SIGNAL = 5.9; EXPRESSED IN FETAL LIVER, SIGNAL = 6.7; EXPRESSED IN BRAIN, SIGNAL = 6.3; EXPRESSED IN ADULT LIVER, SIGNAL = 6.6; EXPRESSED IN HEART, SIGNAL =   5; EXPRESSED IN BONE MARROW, SIGNAL = 5.8; SWISSPROT HIT: P48023, EVALUE 1.40e+00; NT HIT: gi11525795, EVALUE 2.00e-05; EST_HUMAN HIT: BE739870.1, EVALUE 0.00e+00
aatttccttgaagtcaatgagccgtcctctgctcttggcattctcattgatcatctccatcacctgtaggacggtatcatccagtgctgttcttaaaatgctactgaggctctgtcgagggggctggttctcagctgctgagtatagaagcttccctgtcaggaactcccattctatcacttcatttctctcccgaggctggaagtggttgaaagaaggtatcactcccagctgctggtcctctttgctcacttctgtgttactgagcttgctcatcagggcactttccctgtggagctggatggtgcggtagcgaagttcagaaattttgcggctgagcatgtaattatgcagcctgtattggtatgcaggccttttgttgggatgaagtgttatggctgcatggattttgctattgtgaaggtcttggatgtaacccttccgattgtgttcataattttcatggaacagttgttgcatctgaaaag

SEQ ID NO: 23268 - DNA, 384 bp, Homo sapiens
  MAP TO AC005291.1; EXPRESSED IN ADULT LIVER, SIGNAL = 0.85; EXPRESSED IN PLACENTA, SIGNAL = 1.1; EXPRESSED IN LUNG, SIGNAL = 1.7; EXPRESSED IN HEART, SIGNAL =  61; EXPRESSED IN BRAIN, SIGNAL = 0.71; EXPRESSED IN FETAL LIVER, SIGNAL =   1; EXPRESSED IN BONE MARROW, SIGNAL = 3.3; NT HIT: gi11426392, EVALUE 0.00e+00; EST_HUMAN HIT: AU120424.1, EVALUE 0.00e+00; SWISSPROT HIT: P13535, EVALUE 4.00e-33
tttggaaatggcctctgcgttactgctgaggtcatcagtctccatcttcagctcactcttctccttctccagcttctgtttgacccgctgcaagttgtcaatctgctccccaagctcagccatactgtctgcgtgcttcttccgaagagcagccaccatagcttcatgctgcagggtggcctcctccaggtccctgcgcagtttctgaaactcagcctcccgcttcttgttcaattccacctgagcagaagttgccccaccggcttcttccagcctctcgctgatctcctccagttcccgggagaggtcagagcgctgcttctccgctttggctcgggacgccctctctgcctcgatttcttcccccagctcctcaatgcgggc

SEQ ID NO: 23269 - DNA, 112 bp, Homo sapiens
  MAP TO AC005217.1; EXPRESSED IN LUNG, SIGNAL = 2.2; EXPRESSED IN BONE MARROW, SIGNAL = 2.7; EXPRESSED IN PLACENTA, SIGNAL = 1.5; EXPRESSED IN HELA, SIGNAL = 2.3; EXPRESSED IN HEART, SIGNAL =  68; EXPRESSED IN FETAL LIVER, SIGNAL = 2.7; EXPRESSED IN BRAIN, SIGNAL = 1.7; EXPRESSED IN ADULT LIVER, SIGNAL = 3.9; SWISSPROT HIT: P33124, EVALUE 7.00e-13; EST_HUMAN HIT: AL044279.1, EVALUE 1.00e-56; NT HIT: AB020644.1, EVALUE 8.00e-57
catcccagatactatcattcctgatgattccactccggacctcggcttgcttacgctttgctgcaaactccaggagccagcgctttaatggtgtgtttgcctggctgaagat

SEQ ID NO: 23270 - DNA, 128 bp, Homo sapiens
  MAP TO AC004065.1; EXPRESSED IN LUNG, SIGNAL = 2.7; EXPRESSED IN BRAIN, SIGNAL = 3.6; EXPRESSED IN BONE MARROW, SIGNAL = 3.9; EXPRESSED IN PLACENTA, SIGNAL = 3.3; EXPRESSED IN HELA, SIGNAL = 3.4; EXPRESSED IN HEART, SIGNAL =   3; EXPRESSED IN FETAL LIVER, SIGNAL = 4.2; EXPRESSED IN ADULT LIVER, SIGNAL = 3.3; EST_HUMAN HIT: AI436352.1, EVALUE 3.00e-08; SWISSPROT HIT: Q64737, EVALUE 3.10e+00; NT HIT: U08988.1, EVALUE 7.20e-02
gaaagttttaatagactggataaaagatcaaaccacctatgacattctcttaagccaaaacctaatctacagcatgagcctaattcccatcaagtttgaagctaagagaggtgagtttatgagactta

SEQ ID NO: 23271 - DNA, 100 bp, Homo sapiens
  MAP TO AC005355.1; EXPRESSED IN PLACENTA, SIGNAL = 1.4; EXPRESSED IN ADULT LIVER, SIGNAL = 1.3; EXPRESSED IN LUNG, SIGNAL = 1.5; EXPRESSED IN HEART, SIGNAL = 1.4; EXPRESSED IN FETAL LIVER, SIGNAL = 1.1; EXPRESSED IN BRAIN, SIGNAL = 1.2; EXPRESSED IN BONE MARROW, SIGNAL = 1.1; SWISSPROT HIT: Q04019, EVALUE 5.50e+00; NT HIT: AF068687.1, EVALUE 2.10e-01
ctatccacagacccatggagaggagagtctatggtctccaggttaagaacggctggcttctcttcccccatgtacatacacacatactcccacatacagt

SEQ ID NO: 23272 - DNA, 257 bp, Homo sapiens
  MAP TO AC004225.1; EXPRESSED IN LUNG, SIGNAL = 2.5; EXPRESSED IN HELA, SIGNAL = 2.6; EXPRESSED IN BRAIN, SIGNAL = 2.7; EXPRESSED IN BONE MARROW, SIGNAL = 2.7; EXPRESSED IN ADULT LIVER, SIGNAL = 2.7; EXPRESSED IN PLACENTA, SIGNAL = 2.8; EXPRESSED IN HEART, SIGNAL = 2.9; EXPRESSED IN FETAL LIVER, SIGNAL = 2.7; EST_HUMAN HIT: N80983.1, EVALUE 2.30e-01; NT HIT: AL161539.2, EVALUE 9.70e+00
aaaactccatgatcatgacggccttgccagaagtgtctgccagtctgcagcaatagcagaaaagggcagaaggagcaggaggacacttaatctggcttcaggctgtgccacctgcagttccaccagcactgcctttagtagcaaaagtagcaaaaacatctgctgtagcttctaggctgaaagatacagcctgttttaaaaagcattgtgttcaaatatttttaaaagtggctggatatatcacacttggtaggaat

SEQ ID NO: 23273 - DNA, 185 bp, Homo sapiens
  MAP TO AC005521.1; EXPRESSED IN PLACENTA, SIGNAL = 1.2; EXPRESSED IN HEART, SIGNAL = 1.3; EXPRESSED IN ADULT LIVER, SIGNAL =   1; EXPRESSED IN LUNG, SIGNAL = 1.1; EXPRESSED IN FETAL LIVER, SIGNAL =   1; EXPRESSED IN BRAIN, SIGNAL = 0.99; EXPRESSED IN BONE MARROW, SIGNAL = 0.97; SWISSPROT HIT: P49260, EVALUE 5.10e+00; NT HIT: Y08805.1, EVALUE 6.70e+00; EST_HUMAN HIT: AW949158.1, EVALUE 2.50e+00
cctgaaggactactggtgaatttagcctgcataagacttaatttctggatttttgtagggtcagagggtttcaggagacttgctggctcttggacccttgcttggtacacagttgttattagtaagcgatacccattaatacagtagtagtggtggaagtcatggtagtagtactcatagtgacc

SEQ ID NO: 23274 - DNA, 92 bp, Homo sapiens
  MAP TO AB019437.1; EXPRESSED IN LUNG, SIGNAL = 1.1; EXPRESSED IN BRAIN, SIGNAL = 1.4; EXPRESSED IN HEART, SIGNAL = 1.3; EXPRESSED IN FETAL LIVER, SIGNAL = 2.3; EXPRESSED IN BONE MARROW, SIGNAL = 1.4; EXPRESSED IN ADULT LIVER, SIGNAL = 1.8; EXPRESSED IN PLACENTA, SIGNAL = 1.4; EST_HUMAN HIT: AV743302.1, EVALUE 3.00e-10
ccaagatttcctttacctggacttcatgggcagcacaggaccagcaggagatgctcagaactcacccaaggcagaaccccagggaagagcag

SEQ ID NO: 23275 - DNA, 204 bp, Homo sapiens
  MAP TO AC004685.1; EXPRESSED IN PLACENTA, SIGNAL = 3.6; EXPRESSED IN HEART, SIGNAL = 3.8; EXPRESSED IN BONE MARROW, SIGNAL = 3.6; EXPRESSED IN ADULT LIVER, SIGNAL = 3.5; EXPRESSED IN HELA, SIGNAL = 3.9; EXPRESSED IN FETAL LIVER, SIGNAL = 3.7; EXPRESSED IN LUNG, SIGNAL = 3.6; EXPRESSED IN BRAIN, SIGNAL =   4; NT HIT: AL161492.2, EVALUE 4.80e-01; SWISSPROT HIT: P29674, EVALUE 5.70e-01
aaagggtatggcatccagcagccaggtgaagaaagtgtactggaggggaggaagggtgatcaatggtgtcaccagttgctgccaggccatgcaaggtaaggtgagcactgaccaccgggtggaggaaggcgaaggtcctggtaacgccagcaagggctgtttctgtgatgtggtgggtttcagagcgcatgggatgcttatcac

SEQ ID NO: 23276 - DNA, 206 bp, Homo sapiens
  MAP TO AC002506.1; EXPRESSED IN PLACENTA, SIGNAL = 1.9; EXPRESSED IN ADULT LIVER, SIGNAL =   2; EXPRESSED IN LUNG, SIGNAL = 2.2; EXPRESSED IN HEART, SIGNAL = 2.1; EXPRESSED IN FETAL LIVER, SIGNAL =   2; EXPRESSED IN BRAIN, SIGNAL = 2.1; EXPRESSED IN HELA, SIGNAL = 2.3; EXPRESSED IN BONE MARROW, SIGNAL = 2.1; SWISSPROT HIT: P00373, EVALUE 5.70e-01; NT HIT: AF093112.1, EVALUE 7.60e+00
actcccccgacaccaccacctccttcttcgccttgcatcggtacgataaggcacttgcttgacgggaaagagaaactcagctgccagctggggttcatttgcactttcccccgcctggtctgcggtctggctgtgcagctagccgctctgacggggaggaggggcccaaagccactgcctgccgcctgggcaggggagaggggcac

SEQ ID NO: 23277 - DNA, 81 bp, Homo sapiens
  MAP TO AC002480.1; EXPRESSED IN LUNG, SIGNAL = 3.3; EXPRESSED IN HELA, SIGNAL = 2.7; EXPRESSED IN BONE MARROW, SIGNAL = 2.6; EXPRESSED IN ADULT LIVER, SIGNAL = 2.9; EXPRESSED IN PLACENTA, SIGNAL = 2.8; EXPRESSED IN HEART, SIGNAL = 2.4; EXPRESSED IN FETAL LIVER, SIGNAL = 3.1; EXPRESSED IN BRAIN, SIGNAL = 3.1; NT HIT: AF026198.1, EVALUE 4.10e-02
aagtcagtggtgcacaagaggaaggagacagcttcaggattgacacccttgagaaggtgagaagggctggattcacaacat

SEQ ID NO: 23278 - DNA, 137 bp, Homo sapiens
  MAP TO AC004150.8; EXPRESSED IN LUNG, SIGNAL = 8.9; EXPRESSED IN FETAL LIVER, SIGNAL = 7.4; EXPRESSED IN BRAIN, SIGNAL = 7.5; EXPRESSED IN BONE MARROW, SIGNAL = 6.8; EXPRESSED IN PLACENTA, SIGNAL = 7.2; EXPRESSED IN HELA, SIGNAL = 7.1; EXPRESSED IN HEART, SIGNAL = 6.3; EXPRESSED IN ADULT LIVER, SIGNAL = 8.9; EST_HUMAN HIT: AA448018.1, EVALUE 7.00e-03; SWISSPROT HIT: O06374, EVALUE 2.40e+00; NT HIT: AB016816.1, EVALUE 5.00e-03
ccaggatagatgaagttattgggttacctttccagatgctggcggtccaagtttcccttgcagctacctctgtgggagctgacaagagtgttggaggagctggacgtgtccaccaacgcaggaggctggcagcttga

SEQ ID NO: 23279 - DNA, 169 bp, Homo sapiens; identical to SEQ ID NO: 22060
  MAP TO AC005317.1; EXPRESSED IN BONE MARROW, SIGNAL = 7.5; EXPRESSED IN PLACENTA, SIGNAL = 7.9; EXPRESSED IN LUNG, SIGNAL = 8.8; EXPRESSED IN HELA, SIGNAL = 7.3; EXPRESSED IN HEART, SIGNAL = 6.4; EXPRESSED IN FETAL LIVER, SIGNAL = 7.9; EXPRESSED IN BRAIN, SIGNAL = 8.4; EXPRESSED IN ADULT LIVER, SIGNAL = 7.7; NT HIT: gi11432966, EVALUE 1.00e-81; EST_HUMAN HIT: BE903223.1, EVALUE 2.00e-81; SWISSPROT HIT: P54098, EVALUE 1.00e-19

SEQ ID NO: 23280 - DNA, 191 bp, Homo sapiens; identical to SEQ ID NO: 22790
  MAP TO AC005527.3; EXPRESSED IN LUNG, SIGNAL = 4.6; EXPRESSED IN BRAIN, SIGNAL = 4.2; EXPRESSED IN BONE MARROW, SIGNAL = 3.7; EXPRESSED IN PLACENTA, SIGNAL =   4; EXPRESSED IN HELA, SIGNAL = 3.8; EXPRESSED IN HEART, SIGNAL = 3.3; EXPRESSED IN FETAL LIVER, SIGNAL = 4.4; EXPRESSED IN ADULT LIVER, SIGNAL = 4.2; SWISSPROT HIT: Q03307, EVALUE 7.60e-01; NT HIT: AB023200.1, EVALUE 1.00e-103; EST_HUMAN HIT: AI590071.1, EVALUE 1.00e-103

SEQ ID NO: 23281 - DNA, 97 bp, Homo sapiens
  MAP TO AC002527.1; EXPRESSED IN LUNG, SIGNAL = 2.6; EXPRESSED IN HEART, SIGNAL = 2.3; EXPRESSED IN FETAL LIVER, SIGNAL = 2.2; EXPRESSED IN BRAIN, SIGNAL = 2.6; EXPRESSED IN BONE MARROW, SIGNAL = 2.5; EXPRESSED IN HELA, SIGNAL = 2.5; EXPRESSED IN PLACENTA, SIGNAL = 2.4; EXPRESSED IN ADULT LIVER, SIGNAL = 2.3; NT HIT: Y13655.1, EVALUE 3.20e+00
atggagatgcgtaaaaccctttcaaaaccatatcacaaagtctcagtgggaggagcaagcctcaaaacaattcaaggacacgtggacttcatgaaat

SEQ ID NO: 23282 - DNA, 159 bp, Homo sapiens
  MAP TO AC005320.1; EXPRESSED IN PLACENTA, SIGNAL =  12; EXPRESSED IN HELA, SIGNAL =  11; EXPRESSED IN BRAIN, SIGNAL =  14; EXPRESSED IN BONE MARROW, SIGNAL =  12; EXPRESSED IN ADULT LIVER, SIGNAL =  13; EXPRESSED IN HEART, SIGNAL =  10; EXPRESSED IN LUNG, SIGNAL =  15; EXPRESSED IN FETAL LIVER, SIGNAL =  12; NT HIT: AJ246003.1, EVALUE 6.00e-03; SWISSPROT HIT: P39188, EVALUE 2.30e+00; EST_HUMAN HIT: AI034370.1, EVALUE 9.00e-06
ctcatcactgtcctcctcagggagaaggctccctggatgccgtagctcccaaaagggcagaagataggtggaatgagggcccaggccaagactagaaggcacccaggtccatctttaataatattaccccagcttgggcaacatggcaagacccggtct

SEQ ID NO: 23283 - DNA, 178 bp, Homo sapiens
  MAP TO AC002066.1; EXPRESSED IN FETAL LIVER, SIGNAL = 1.4; EXPRESSED IN BONE MARROW, SIGNAL = 1.6; EXPRESSED IN PLACENTA, SIGNAL = 1.6; EXPRESSED IN LUNG, SIGNAL = 1.5; EXPRESSED IN HEART, SIGNAL = 1.8; EXPRESSED IN BRAIN, SIGNAL = 1.7; EXPRESSED IN ADULT LIVER, SIGNAL = 1.3; EST_HUMAN HIT: AW246359.1, EVALUE 1.60e-01; SWISSPROT HIT: Q02766, EVALUE 3.00e+00
ttgttgagtaccaagctgcccatgtgtagaattaagctccacgaagatgggctaaggatggccaaggagttgcaaactgaaaaattcccagagctcacaaaggacaggaagacatttgagctctggccttccagaatgaagtccttgatgatgatctgggaaatttggtggagactcc

SEQ ID NO: 23284 - DNA, 207 bp, Homo sapiens
  MAP TO AC000025.2; EXPRESSED IN PLACENTA, SIGNAL =   2; EXPRESSED IN ADULT LIVER, SIGNAL = 2.4; EXPRESSED IN LUNG, SIGNAL = 1.9; EXPRESSED IN HEART, SIGNAL = 1.8; EXPRESSED IN FETAL LIVER, SIGNAL = 2.2; EXPRESSED IN BRAIN, SIGNAL = 1.2; EXPRESSED IN BONE MARROW, SIGNAL = 1.5; SWISSPROT HIT: P19474, EVALUE 1.00e-05
gacatggggacaggcaaataatgggatttgggtgcctgcaaagaatctgttaatcgacaagagaattgtgtggtcttcagaacttggcttctggactgtgggtatgaggaaagaaaagctctttgcagccagcactgtgcctttaaccaccctctgggtgagtccggggctatgcagggtaggcattttcctggatatgggtatgac

SEQ ID NO: 23285 - DNA, 242 bp, Homo sapiens
  MAP TO AC002069.1; EXPRESSED IN PLACENTA, SIGNAL = 1.3; EXPRESSED IN ADULT LIVER, SIGNAL = 1.5; EXPRESSED IN LUNG, SIGNAL = 1.7; EXPRESSED IN HEART, SIGNAL = 1.5; EXPRESSED IN FETAL LIVER, SIGNAL = 1.1; EXPRESSED IN BRAIN, SIGNAL =   1; EXPRESSED IN BONE MARROW, SIGNAL = 1.1; NT HIT: X60265.1, EVALUE 2.30e+00
atggtctgatggtgaggaggaaggagaaggaggagaagaaggaagaggaggaggaagaggaggagaaggaggaggaaagagggaggagggagaaggaaaaaaagaagaagaacaaggaggatggggaggaggacaggaagtggaagaagaaggaggaggaggagggggaaattaatgctggaaatgcagtttgtaagcaaagcaggaagatctttgaatgtcatgcttagggatatgtatgc

SEQ ID NO: 23286 - DNA, 420 bp, Homo sapiens
  MAP TO AC005324.1; EXPRESSED IN LUNG, SIGNAL = 1.7; EXPRESSED IN FETAL LIVER, SIGNAL = 1.7; EXPRESSED IN BRAIN, SIGNAL = 1.8; EXPRESSED IN BONE MARROW, SIGNAL = 1.5; EXPRESSED IN PLACENTA, SIGNAL = 1.9; EXPRESSED IN HELA, SIGNAL =   2; EXPRESSED IN HEART, SIGNAL = 1.5; EXPRESSED IN ADULT LIVER, SIGNAL = 1.6; SWISSPROT HIT: Q62556, EVALUE 2.00e-13; EST_HUMAN HIT: BE787610.1, EVALUE 0.00e+00; NT HIT: gi5453643, EVALUE 0.00e+00
atgcgtatgacatcacgtttgacccggacacagcacacaagtatctccggctgcaggaggagaaccgcaaggtcaccaacaccacgccctgggagcatccctacccggacctccccagcaggttcctgcactggcggcaggtgctgtcccagcagagtctgtacctgcacaggtactattttgaggtggagatcttcggggcaggcacctatgttggcctgacctgcaaaggcatcgaccggaaaggggaggagcgcaacagttgcatttccggaaacaacttctcctggagcctccaatggaacgggaaggagttcacggcctggtacagtgacatggagaccccactcaaagctggccctttccggaggctcggggtctatatcgacttcccgggagggatcctttccttctatggcg

SEQ ID NO: 23287 - DNA, 105 bp, Homo sapiens
  MAP TO AC005539.1; EXPRESSED IN LUNG, SIGNAL =   2; EXPRESSED IN FETAL LIVER, SIGNAL = 1.6; EXPRESSED IN BONE MARROW, SIGNAL = 1.8; EXPRESSED IN PLACENTA, SIGNAL = 1.9; EXPRESSED IN HELA, SIGNAL = 1.8; EXPRESSED IN HEART, SIGNAL = 1.5; EXPRESSED IN BRAIN, SIGNAL = 1.7; EXPRESSED IN ADULT LIVER, SIGNAL = 1.9; NT HIT: gi9507076, EVALUE 3.50e+00; SWISSPROT HIT: P22726, EVALUE 7.20e+00; EST_HUMAN HIT: N85146.1, EVALUE 3.30e-01
ctgtccgcttcaaggaatggcttgatctaagatccaatcatgggatacaactaaagaacaaaacctcctgttaccaggttgcaaatgtccaggtatttgcaagca

SEQ ID NO: 23288 - DNA, 133 bp, Homo sapiens
  MAP TO AC002463.1; EXPRESSED IN LUNG, SIGNAL = 0.75; EXPRESSED IN BONE MARROW, SIGNAL = 0.55; EXPRESSED IN ADULT LIVER, SIGNAL = 0.58; EXPRESSED IN PLACENTA, SIGNAL = 0.59; EXPRESSED IN HEART, SIGNAL = 1.5; NT HIT: U67569.1, EVALUE 4.60e+00
cagatgtataacaatgtgggaaagggtatagctgatagagaagcctgtcaggaccatacaaatcttactaaattctatatattagtaagggattctgctattgaaaaagttgaagcatcctcacctcaggaag

SEQ ID NO: 23289 - DNA, 116 bp, Homo sapiens
  MAP TO AC005343.1; EXPRESSED IN HELA, SIGNAL = 3.8; EXPRESSED IN FETAL LIVER, SIGNAL =   4; EXPRESSED IN BRAIN, SIGNAL = 4.3; EXPRESSED IN BONE MARROW, SIGNAL =   4; EXPRESSED IN ADULT LIVER, SIGNAL = 4.8; EXPRESSED IN PLACENTA, SIGNAL = 3.8; EXPRESSED IN HEART, SIGNAL = 3.3; EXPRESSED IN LUNG, SIGNAL = 4.2; SWISSPROT HIT: P28964, EVALUE 4.10e+00
aaagtgcgggtgaacccatggtggtgacggcaagcacagctgtggcggtgaccgtggacaagaggacagccattgctgcaggtaggaacggcccttgtggtgttgaggccaggaag

SEQ ID NO: 23290 - DNA, 243 bp, Homo sapiens
  MAP TO AC002467.1; EXPRESSED IN BONE MARROW, SIGNAL = 1.3; EXPRESSED IN PLACENTA, SIGNAL = 1.3; EXPRESSED IN LUNG, SIGNAL = 1.4; EXPRESSED IN HEART, SIGNAL = 1.4; EXPRESSED IN FETAL LIVER, SIGNAL = 1.3; EXPRESSED IN BRAIN, SIGNAL = 1.6; EXPRESSED IN ADULT LIVER, SIGNAL = 1.3; EST_HUMAN HIT: BF351233.1, EVALUE 8.00e-69; SWISSPROT HIT: O43511, EVALUE 6.00e-28; NT HIT: gi11421914, EVALUE 1.00e-127
aatggcatcataagtgatgctgtttcaacaaataatgcttttgagcctgatgaggatattgaagatctggaggaacttgatatcccaaccaaggaaatagagattcaagtggattggaactctgagcttccagtcaaagtgaacgttcccaaagtgccaatccatagccttgtgcttgactgtggagctatatctttcctggacgttgttggagtgagatcactgcgggtggtaaggttctgg

SEQ ID NO: 23291 - DNA, 204 bp, Homo sapiens
  MAP TO AC005323.1; EXPRESSED IN LUNG, SIGNAL = 0.91; EXPRESSED IN ADULT LIVER, SIGNAL = 0.49; EXPRESSED IN HEART, SIGNAL = 2.3; EXPRESSED IN BONE MARROW, SIGNAL = 1.5; NT HIT: gi8923939, EVALUE 1.00e-111; SWISSPROT HIT: P12882, EVALUE 4.00e-31; EST_HUMAN HIT: AA133914.1, EVALUE 1.00e-111
ctgggtgtgcagtagctgaacacgctcactggcatccaggagctcctgttctgcgatttttctgctcctctctgtctgttccagagtggcccgcagctcctcgatctcagcctgcagcaggttggctctgcgctccaccatggccagctgttccttcaggtcctcctggctccggagagcatcatccaggtggatctgggtatc

SEQ ID NO: 23292 - DNA, 365 bp, Homo sapiens
  MAP TO AC004552.1; EXPRESSED IN LUNG, SIGNAL = 0.55; EXPRESSED IN PLACENTA, SIGNAL = 2.1; EXPRESSED IN BONE MARROW, SIGNAL = 1.8; EXPRESSED IN HEART, SIGNAL = 2.4; EXPRESSED IN ADULT LIVER, SIGNAL = 0.42; EXPRESSED IN BRAIN, SIGNAL = 3.1; EXPRESSED IN HELA, SIGNAL = 2.8; EXPRESSED IN FETAL LIVER, SIGNAL = 2.5; NT HIT: AJ130894.1, EVALUE 4.00e-15; SWISSPROT HIT: P37198, EVALUE 1.30e-01; EST_HUMAN HIT: AW959501.1, EVALUE 6.00e-15
ctgactgtccacctcctcctgagctgagagtgtcgacttctggccaaaaagaagaaagaaaagtaggtcagccttgtgagctgaacattgctaaagcaggaagttgtgtagacacgtggaaaggcagaccctgtgatttggccgtgccttcagaagtggatgtggagaaacttgctaaagggtatcagtccgtcacagctgctgacccacagctcccagtctggccagcccaggaggtagaagacccttttggatttgcgttggaagctggctgtcaggcctgggacaccaagccaagcatcatgcagtcgtttaatgatccgcttctctgtggtaaaatacggccacgtaaaaaagccaggcag

SEQ ID NO: 23293 - DNA, 361 bp, Homo sapiens
  MAP TO AC012629.4; EXPRESSED IN BONE MARROW, SIGNAL =   2; EXPRESSED IN PLACENTA, SIGNAL = 2.3; EXPRESSED IN ADULT LIVER, SIGNAL = 2.4; EXPRESSED IN HEART, SIGNAL = 1.7; EXPRESSED IN BRAIN, SIGNAL = 1.8; EXPRESSED IN LUNG, SIGNAL = 1.7; EXPRESSED IN FETAL LIVER, SIGNAL = 1.7; NT HIT: AL163246.2, EVALUE 6.00e-85; SWISSPROT HIT: P27401, EVALUE 9.00e-13; EST_HUMAN HIT: AW998611.1, EVALUE 1.00e-100
ttatgacacaaagccagagagttgatataccccctgaggtaggacagtaaatgtgtattgctggtcttgccagatgaaggcaaattgcttctggtgggccttatggacagaaatggagaaaaaggcatttgccaagtcaatggctgcataccaggtaccaggagatgtgttaatttgctcaagcaatgaaactacatctggcacagcagctgcacttagagtcaccactaggttaagcttatgataatccactgttattccccaagatccacctgtcttctgcacaggccaaatgggagagttgaacagggatgtcatgggagtcaccacccctgcgtctttcaagtccttgatggtggca

SEQ ID NO: 23294 - DNA, 165 bp, Homo sapiens
  MAP TO AP001426.1; EXPRESSED IN PLACENTA, SIGNAL = 2.1; EXPRESSED IN BONE MARROW, SIGNAL = 2.1; EXPRESSED IN LUNG, SIGNAL = 1.3; EXPRESSED IN ADULT LIVER, SIGNAL = 0.76; EXPRESSED IN HEART, SIGNAL = 2.1; EXPRESSED IN FETAL LIVER, SIGNAL = 2.1; EXPRESSED IN BRAIN, SIGNAL =   2; NT HIT: gi11526262, EVALUE 3.00e-88; EST_HUMAN HIT: BE245360.1, EVALUE 4.00e-88; SWISSPROT HIT: P11308, EVALUE 7.00e-27
tgggggttgagacagccaatcctgctgagggacgcgtgggctcatcttggaagtctgtccatagtcgctggaggaggacgcggtcatctctgtcttagccaggtgtggcgttccgtaggcacactcaaacaacgactggtcctcactcacaactgataaggcttc

SEQ ID NO: 23295 - DNA, 134 bp, Homo sapiens
  MAP TO AC015999.3; EXPRESSED IN LUNG, SIGNAL = 1.4; EXPRESSED IN PLACENTA, SIGNAL = 2.9; EXPRESSED IN ADULT LIVER, SIGNAL = 5.5; EXPRESSED IN HELA, SIGNAL = 6.5; EXPRESSED IN FETAL LIVER, SIGNAL = 3.8; EXPRESSED IN BRAIN, SIGNAL = 3.4; EXPRESSED IN BONE MARROW, SIGNAL = 3.5; EXPRESSED IN HEART, SIGNAL = 3.1; NT HIT: AF153715.1, EVALUE 7.00e-70; EST_HUMAN HIT: W39765.1, EVALUE 3.00e-08; SWISSPROT HIT: P08547, EVALUE 7.00e-11
ctgttaggattggtattatcaaaaagacaagagataacaagtgtcggcaagggtgtagagaaaagagaatccttgtacactgtaggtgggaatgtaggctggtgcagccgttatggaaaacagtacggaggttc

SEQ ID NO: 23296 - DNA, 293 bp, Homo sapiens
  MAP TO AL162458.1; EXPRESSED IN LUNG, SIGNAL = 1.2; EXPRESSED IN PLACENTA, SIGNAL = 2.3; EXPRESSED IN ADULT LIVER, SIGNAL =   4; EXPRESSED IN HELA, SIGNAL = 3.6; EXPRESSED IN HEART, SIGNAL = 2.1; EXPRESSED IN FETAL LIVER, SIGNAL = 2.3; EXPRESSED IN BRAIN, SIGNAL = 2.5; EXPRESSED IN BONE MARROW, SIGNAL = 2.6; NT HIT: gi11560151, EVALUE 0.00e+00; EST_HUMAN HIT: AI907847.1, EVALUE 3.00e-19; SWISSPROT HIT: P30754, EVALUE 2.00e-04
tgcctcccatcccgccccctggtgccgttgcaggtggctgtggtgaagtcggaagatgtggaagcagggttagcatcccctggtgggcagccctcccctgaaggtgccactccacaggtggtcaccctccacgtggcagagccagggggcggtgcagcagccgagagccagctaggccctcctgacctaccgcagatcaccctggcacctggtccatttggtgggactggctacagtgtcatcacagcaccccctatggaggagggaacatcagctcctggcacaccttacag

SEQ ID NO: 23297 - DNA, 212 bp, Homo sapiens
  MAP TO AC024575.1; EXPRESSED IN HELA, SIGNAL = 5.5; EXPRESSED IN LUNG, SIGNAL = 4.8; EXPRESSED IN PLACENTA, SIGNAL = 4.1; EXPRESSED IN ADULT LIVER, SIGNAL = 5.2; EXPRESSED IN HEART, SIGNAL = 3.8; EXPRESSED IN FETAL LIVER, SIGNAL = 4.6; EXPRESSED IN BRAIN, SIGNAL = 4.4; EXPRESSED IN BONE MARROW, SIGNAL =   5; EST_HUMAN HIT: BF352841.1, EVALUE 1.00e-104; NT HIT: gi11424084, EVALUE 7.80e+00; SWISSPROT HIT: Q03386, EVALUE 1.10e-01
ctgtccacacctgaggcggctcctcttcctgctctcgctcagcctcctccaaaaaatcttccagaagcttctctgctttttgagcctcagcactccctggggccgcccagcccagaaaggttcggacactgcccaggtccgaatgggcaggggggtctcggaaatcctgagggtggtcctgcagccaggagcccagcactgacaccacagcc

SEQ ID NO: 23298 - DNA, 469 bp, Homo sapiens
  MAP TO AC022918.2; EXPRESSED IN PLACENTA, SIGNAL = 6.5; EXPRESSED IN LUNG, SIGNAL = 9.7; EXPRESSED IN ADULT LIVER, SIGNAL = 8.8; EXPRESSED IN FETAL LIVER, SIGNAL =  19; EXPRESSED IN BRAIN, SIGNAL = 9.9; EXPRESSED IN BONE MARROW, SIGNAL =  21; EXPRESSED IN HELA, SIGNAL =  12; EXPRESSED IN HEART, SIGNAL = 8.9; NT HIT: U43701.1, EVALUE 0.00e+00; SWISSPROT HIT: P29316, EVALUE 5.00e-58; EST_HUMAN HIT: AI290909.1, EVALUE 0.00e+00
atggtgccaaaagcgaagaaggaagttcctgcccctcctaaagctgaagcccaagggaaggctttaaatgccaagaaagcggtgttgaaaggtgtccacagccacaaaaaaaaagaagatccacacgtcactcaccttctggaggcccaagacactgggactctggaggccgttcaaatatccttggaagagcgctcacaggagaaacaagtttgaccactatgctatcatgaagtttcctctgatcactgagttggccataaagaagatagaagacaacaacacacttgtgttcactgtggatgttaaagccaacaagcaccagatcaaacaggctgtgaagaagctctatgacattgatgtggccaaggtcaacaccctgattcgacctgatggagagaagaaggcatatgttcaactggctcctgattatgatgctttggatgttgcaaacaaaattgggatcatc

SEQ ID NO: 23299 - DNA, 378 bp, Homo sapiens
  MAP TO AC013611.3; EXPRESSED IN ADULT LIVER, SIGNAL = 1.4; EXPRESSED IN LUNG, SIGNAL = 3.6; EXPRESSED IN HEART, SIGNAL = 1.7; EXPRESSED IN BRAIN, SIGNAL =   2; EXPRESSED IN BONE MARROW, SIGNAL = 3.6; EXPRESSED IN PLACENTA, SIGNAL = 2.1; EXPRESSED IN FETAL LIVER, SIGNAL = 6.6; NT HIT: gi6671651, EVALUE 1.00e-12; SWISSPROT HIT: P02747, EVALUE 4.00e-71; EST_HUMAN HIT: AW953836.1, EVALUE 0.00e+00
ctagtcggggaagagcaggaagccggagaagacgctgtcagagccctggatgcccaccatgtcgtagtagtcattgacagccagccacacctcctcgcccacctgcaacctcagcagcacaccgcccgagttgacctgattggttttggacgtgtggccacagaaggtgaccactttgacgccgctgcggtacagcagcacgcacaggttggctgtatgcgacgcgtggtagacaaagtagtagaggccggggactttgcaggtgaacttgccagtgctcgtgtcataatctccctgcgggttggtgaggaccgcgttgaatctgatcaggctgttgggtgcagggggctggtgggtctgccgagtgaccgtgaacac

SEQ ID NO: 23300 - DNA, 150 bp, Homo sapiens
  MAP TO AC015908.4; EXPRESSED IN LUNG, SIGNAL = 5.6; EXPRESSED IN HEART, SIGNAL = 4.2; EXPRESSED IN HELA, SIGNAL = 8.5; EXPRESSED IN BONE MARROW, SIGNAL =   6; EXPRESSED IN BRAIN, SIGNAL = 4.7; EXPRESSED IN FETAL LIVER, SIGNAL = 4.8; EXPRESSED IN ADULT LIVER, SIGNAL = 5.7; EXPRESSED IN PLACENTA, SIGNAL = 4.7; NT HIT: U19492.1, EVALUE 3.40e-01; EST_HUMAN HIT: BF683064.1, EVALUE 5.10e-01; SWISSPROT HIT: Q10390, EVALUE 3.50e-01
ctgggcgagcttataaatcccagaggttaaggagaatacgatttcacaggagtggccactaggtggtggtgtgacaccatcatcacctcgccgtgggctagtgggcaacttggaccaattgcgcggggccggtggagtggctgggggcct

SEQ ID NO: 23301 - DNA, 126 bp, Homo sapiens
  MAP TO AC019250.3; EXPRESSED IN LUNG, SIGNAL = 7.1; EXPRESSED IN PLACENTA, SIGNAL =  39; EXPRESSED IN ADULT LIVER, SIGNAL =  50; EXPRESSED IN HELA, SIGNAL =  68; EXPRESSED IN HEART, SIGNAL =  61; EXPRESSED IN FETAL LIVER, SIGNAL =  37; EXPRESSED IN BRAIN, SIGNAL =  15; EXPRESSED IN BONE MARROW, SIGNAL =  21; EST_HUMAN HIT: AV730071.1, EVALUE 3.00e-11; SWISSPROT HIT: Q62318, EVALUE 7.00e+00; NT HIT: X89211.1, EVALUE 8.00e-14
tcaaaggtgcagtgttggtttctgctgctggcaaattgggcactctgtagtggcagtagccaggtcagctttccaccggcccatcttgttttctgcactgggaagttggggcatgagcacaaatgt

SEQ ID NO: 23302 - DNA, 178 bp, Homo sapiens
  MAP TO AC019276.3; EXPRESSED IN LUNG, SIGNAL = 1.8; EXPRESSED IN PLACENTA, SIGNAL = 1.5; EXPRESSED IN HEART, SIGNAL = 1.7; EXPRESSED IN BRAIN, SIGNAL = 1.6; EXPRESSED IN BONE MARROW, SIGNAL = 1.9; EXPRESSED IN ADULT LIVER, SIGNAL = 1.7; EXPRESSED IN FETAL LIVER, SIGNAL = 1.8; SWISSPROT HIT: P56695, EVALUE 1.70e+00; NT HIT: AJ277662.1, EVALUE 6.40e+00; EST_HUMAN HIT: BE562687.1, EVALUE 6.20e-01
atgcccactcagggcttctgcctaggtctgcccctggaagccttctggcttctgaaccagcgacacaagggcacacactcttgggagaggctgagacgctccaacgccaagcggggacagagcagctcagagggccacgtccagactcagagccccttgccggtgggaccttgggcaa

SEQ ID NO: 23303 - DNA, 236 bp, Homo sapiens
  MAP TO AC019194.2; EXPRESSED IN BRAIN, SIGNAL =   2; EXPRESSED IN LUNG, SIGNAL = 1.8; EXPRESSED IN PLACENTA, SIGNAL = 1.8; EXPRESSED IN ADULT LIVER, SIGNAL = 1.6; EXPRESSED IN BONE MARROW, SIGNAL = 2.1; EXPRESSED IN HEART, SIGNAL =   2; EXPRESSED IN FETAL LIVER, SIGNAL =   2; EST_HUMAN HIT: R00028.1, EVALUE 8.40e-01; SWISSPROT HIT: O76942, EVALUE 2.30e-01; NT HIT: AF121361.1, EVALUE 1.40e-01
aggttcttaaaggcatcctcgcgcaggtcccgagggagccgctctgtgatgtctggctggagaaagctccctgaggaccccctcagcaccttgcccaggatctccacacactccagggagttcagcatctggaaacacctctccagtgtgatgagaaacaggctgcggttcacgccagggctctgcaaggctcgttctcgaatctctcctaagtcgatgatgatgtctttcaggtc

SEQ ID NO: 23304 - DNA, 174 bp, Homo sapiens
  MAP TO AC015599.3; EXPRESSED IN LUNG, SIGNAL = 1.2; EXPRESSED IN PLACENTA, SIGNAL =   2; EXPRESSED IN ADULT LIVER, SIGNAL = 2.5; EXPRESSED IN HELA, SIGNAL = 2.8; EXPRESSED IN HEART, SIGNAL = 1.8; EXPRESSED IN FETAL LIVER, SIGNAL = 1.6; EXPRESSED IN BRAIN, SIGNAL = 1.8; EXPRESSED IN BONE MARROW, SIGNAL = 1.9; SWISSPROT HIT: Q61116, EVALUE 8.00e-11; NT HIT: AB040918.1, EVALUE 1.00e-93; EST_HUMAN HIT: BE747464.1, EVALUE 5.00e-60
catctgcagtgtgaaggagtttgtgacttttcagtgtcccttttgatttgaatttcttgccacacatgtcacataggtgggttttctcagtgctgtgacgattcatatgagccttgaggttactcttgctacgagttgcatactcacacaaagaacacttgaagggcttcacac

SEQ ID NO: 23305 - DNA, 77 bp, Homo sapiens
  MAP TO AL132981.5; EXPRESSED IN LUNG, SIGNAL = 6.9; EXPRESSED IN ADULT LIVER, SIGNAL = 7.3; EXPRESSED IN HELA, SIGNAL = 7.6; EXPRESSED IN FETAL LIVER, SIGNAL = 7.2; EXPRESSED IN BRAIN, SIGNAL = 7.3; EXPRESSED IN PLACENTA, SIGNAL = 6.7; EXPRESSED IN HEART, SIGNAL = 6.6; EXPRESSED IN BONE MARROW, SIGNAL = 6.9; NT HIT: U00455.1, EVALUE 1.50e-01; EST_HUMAN HIT: AW887498.1, EVALUE 9.00e-01
cccccgacttccaagttggcaaagataccactctcccagctaaagagccttcacaggagggtgctcaggatggagag

SEQ ID NO: 23306 - DNA, 218 bp, Homo sapiens
  MAP TO AC016487.4; EXPRESSED IN PLACENTA, SIGNAL = 2.1; EXPRESSED IN ADULT LIVER, SIGNAL = 4.1; EXPRESSED IN HELA, SIGNAL = 2.8; EXPRESSED IN HEART, SIGNAL = 3.7; EXPRESSED IN BRAIN, SIGNAL = 3.6; EXPRESSED IN BONE MARROW, SIGNAL = 3.6; EXPRESSED IN LUNG, SIGNAL = 3.7; EXPRESSED IN FETAL LIVER, SIGNAL = 3.8; NT HIT: AJ131719.1, EVALUE 8.10e+00
aggtgagcagtatgggatgaagctatttggctcttcttcttcttcttcttcttcttcttcttcttcttcttcttcttcttcttcttcttcttctttctcttcctcttcctcttcttcttttcttgttcttcctccttcttcttcctccttcttcttcatccttcttcttccttttcttcctcttcttcttctccacatattgggtagaagggggagca

SEQ ID NO: 23307 - DNA, 195 bp, Homo sapiens
  MAP TO AC016549.4; EXPRESSED IN PLACENTA, SIGNAL = 1.1; EXPRESSED IN HEART, SIGNAL = 1.2; EXPRESSED IN ADULT LIVER, SIGNAL = 1.2; EXPRESSED IN FETAL LIVER, SIGNAL = 1.3; EXPRESSED IN BRAIN, SIGNAL = 1.3; EXPRESSED IN BONE MARROW, SIGNAL =   1; EXPRESSED IN LUNG, SIGNAL = 1.1; NT HIT: AF091395.1, EVALUE 1.00e-93; SWISSPROT HIT: O75962, EVALUE 8.00e-32; EST_HUMAN HIT: BE082538.1, EVALUE 5.00e-91
caaaccaaagagagagtgaagctattgatacagctggctgatggcttttgtgaaaaagggcatgcccatgcggcagagataaaaaaatgtgttactgctgtggataagaggtacagagatttctctctgcggatggagaagtacaggacctctttggaaaaagccctggggatttcttcagattccaacaaatcg

SEQ ID NO: 23308 - DNA, 211 bp, Homo sapiens
  MAP TO AC021356.5; EXPRESSED IN ADULT LIVER, SIGNAL = 4.9; EXPRESSED IN LUNG, SIGNAL = 3.8; EXPRESSED IN HELA, SIGNAL = 5.5; EXPRESSED IN BRAIN, SIGNAL = 5.8; EXPRESSED IN BONE MARROW, SIGNAL = 5.5; EXPRESSED IN PLACENTA, SIGNAL = 3.5; EXPRESSED IN HEART, SIGNAL = 4.4; EXPRESSED IN FETAL LIVER, SIGNAL = 6.2; NT HIT: AL163227.2, EVALUE 3.00e-58; SWISSPROT HIT: Q46857, EVALUE 1.30e+00; EST_HUMAN HIT: AI342323.1, EVALUE 3.00e-68
tgttatgaacaataagatccaagctgaggtggtatcagatggggatgaagaacttgttgggaactggagcaaaggtgactctttttatgttttagcaaacagactggtagcattttgcccctgctatacagatgtgtggaactttgaacttgacagagatgatttagggtatctggcagaagaaatttctaagcagcaaagcattcaagag

SEQ ID NO: 23309 - DNA, 147 bp, Homo sapiens
  MAP TO AC015474.3; EXPRESSED IN LUNG, SIGNAL = 3.6; EXPRESSED IN HEART, SIGNAL = 3.6; EXPRESSED IN BONE MARROW, SIGNAL = 3.2; EXPRESSED IN FETAL LIVER, SIGNAL = 3.1; EXPRESSED IN PLACENTA, SIGNAL = 2.1; EXPRESSED IN ADULT LIVER, SIGNAL = 3.4; EXPRESSED IN HELA, SIGNAL = 4.3; EXPRESSED IN BRAIN, SIGNAL = 2.7; SWISSPROT HIT: P40900, EVALUE 1.80e+00; NT HIT: AF038409.2, EVALUE 5.20e+00; EST_HUMAN HIT: BF317212.1, EVALUE 5.00e-01
ctattataacatagctggaaaaactcaacagaaccaacagaataatactaatagagctaacatgaaagttcagcaagtttgccagatacaatatcgaaccaagaagaacataaagaagttgaaagggtggagatggagcatggacgg

SEQ ID NO: 23310 - DNA, 366 bp, Homo sapiens
  MAP TO AC025249.2; EXPRESSED IN ADULT LIVER, SIGNAL = 1.1; EXPRESSED IN FETAL LIVER, SIGNAL = 1.2; EXPRESSED IN BONE MARROW, SIGNAL = 1.1; EXPRESSED IN HEART, SIGNAL = 1.2; EXPRESSED IN LUNG, SIGNAL = 1.3; EXPRESSED IN PLACENTA, SIGNAL = 1.1; EXPRESSED IN BRAIN, SIGNAL = 1.2; NT HIT: X89685.1, EVALUE 3.00e-19; SWISSPROT HIT: P34982, EVALUE 9.00e-09; EST_HUMAN HIT: BF310255.1, EVALUE 3.40e-01
atgaggcgggcctgtgcggacatcacgatcaatatatgctatggggtctacgtggttgtttctacagggggcttagactcgctgctcatctttctgtcctataccttcatcctgcacacagtcatgggtctggctgctcccagggagcgcatctgggccctcaacacctgcgtttcccacattccggctgtctttgtcttctttattccaggtatcaccgtgtccatgatccaccattttgggaggcacctgccccacattgtacatgctcttgttacctatgtgtacctggtgatgccttctgtgctccaccccatcatttacagtatgaagtccaagcccatcagggaggccatcctcaggatg

SEQ ID NO: 23311 - DNA, 134 bp, Homo sapiens
  MAP TO AC018761.2; EXPRESSED IN LUNG, SIGNAL = 2.4; EXPRESSED IN ADULT LIVER, SIGNAL = 1.9; EXPRESSED IN HEART, SIGNAL = 1.6; EXPRESSED IN BRAIN, SIGNAL = 2.7; EXPRESSED IN BONE MARROW, SIGNAL =   2; EXPRESSED IN PLACENTA, SIGNAL = 1.7; EXPRESSED IN FETAL LIVER, SIGNAL =   2; EST_HUMAN HIT: N76264.1, EVALUE 1.00e-69; NT HIT: gi11525964, EVALUE 7.00e-70; SWISSPROT HIT: Q92973, EVALUE 2.00e-17
cggatcttgggactgcagtgcttgaagaactgcaggaacttggggatcatgatgttgaggggcctgttgagggcgtcactgtccagaagctctgatgagtcttcacagatcttctgcagggctccaaaggctcc

SEQ ID NO: 23312 - DNA, 208 bp, Homo sapiens
  MAP TO AC007981.43; EXPRESSED IN LUNG, SIGNAL =  17; EXPRESSED IN PLACENTA, SIGNAL =  17; EXPRESSED IN HEART, SIGNAL =  17; EXPRESSED IN FETAL LIVER, SIGNAL =  17; EXPRESSED IN ADULT LIVER, SIGNAL =  19; EXPRESSED IN HELA, SIGNAL =  25; EXPRESSED IN BRAIN, SIGNAL =  17; EXPRESSED IN BONE MARROW, SIGNAL =  19; NT HIT: X60069.1, EVALUE 1.00e-101; SWISSPROT HIT: P19440, EVALUE 9.00e-31; EST_HUMAN HIT: AI906419.1, EVALUE 3.00e-80
gagggctgtcggtggcggtgcctggggagatccgaggctatgagctggcacaccagcggcatgggcggctgccctgggctcgcctcttccagcccagcatccagctggcccgccagggcttccccgtgggcaagggcttggcggcagtcctggaaaacaagcggaccgtcatcgagcagcagcctgtcttgtggtatgtctgtgggtg

SEQ ID NO: 23313 - DNA, 209 bp, Homo sapiens
  MAP TO AL133293.14; EXPRESSED IN PLACENTA, SIGNAL = 2.7; EXPRESSED IN HELA, SIGNAL =   4; EXPRESSED IN HEART, SIGNAL = 3.1; EXPRESSED IN FETAL LIVER, SIGNAL = 3.1; EXPRESSED IN BONE MARROW, SIGNAL = 3.3; EXPRESSED IN LUNG, SIGNAL = 2.9; EXPRESSED IN ADULT LIVER, SIGNAL = 2.7; EXPRESSED IN BRAIN, SIGNAL = 2.8; EST_HUMAN HIT: BE786512.1, EVALUE 2.00e-94; SWISSPROT HIT: P12931, EVALUE 1.00e-38; NT HIT: AF077754.1, EVALUE 1.00e-114
ggatggtgaaccgcgaggtgctggaccaggtggagcggggctaccggatgccctgcccgccggagtgtcccgagtccctgcacgacctcatgtgccagtgctggcggaaggagcctgaggagcggcccaccttcgagtacctgcaggccttcctggaggactacttcacgtccaccgagccccagtaccagcccggggagaacctctag

SEQ ID NO: 23314 - DNA, 127 bp, Homo sapiens
  MAP TO AC013634.3; EXPRESSED IN LUNG, SIGNAL = 2.8; EXPRESSED IN FETAL LIVER, SIGNAL = 4.3; EXPRESSED IN BONE MARROW, SIGNAL = 4.2; EXPRESSED IN HELA, SIGNAL = 3.3; EXPRESSED IN HEART, SIGNAL = 3.6; EXPRESSED IN PLACENTA, SIGNAL = 3.3; EXPRESSED IN ADULT LIVER, SIGNAL = 3.7; EXPRESSED IN BRAIN, SIGNAL = 4.1; EST_HUMAN HIT: AA130165.1, EVALUE 3.00e-23; NT HIT: AF224669.1, EVALUE 9.00e-17; SWISSPROT HIT: P55735, EVALUE 3.10e+00
gaggcatccagaagaaggcattgttatcataggagatgacagctccatgcatgtcattgccccagcagaccgtccagttcggcaagatgtggcggtgggagacagtggtattgatgatcctgaccct

SEQ ID NO: 23315 - DNA, 177 bp, Homo sapiens
  MAP TO AL157381.7; EXPRESSED IN BRAIN, SIGNAL = 1.1; EXPRESSED IN BONE MARROW, SIGNAL = 1.1; EXPRESSED IN LUNG, SIGNAL = 1.3; EXPRESSED IN PLACENTA, SIGNAL = 1.4; EXPRESSED IN ADULT LIVER, SIGNAL = 1.7; EXPRESSED IN HEART, SIGNAL = 1.2; EXPRESSED IN FETAL LIVER, SIGNAL = 0.93; NT HIT: AL139076.2, EVALUE 4.10e-01; SWISSPROT HIT: P05994, EVALUE 2.30e+00; EST_HUMAN HIT: BF239613.1, EVALUE 3.90e-02
tctaaccccaaagaggcaagttatagaatctcccaagatagtctgcattttgagtatttccatttgcctttattcaccaagtggaatttaaaaatgaacaataaccagaaatatgttaataaggaactagtaaaaacatttcataaggacacattaaatccaattaaaaccctctag

SEQ ID NO: 23316 - DNA, 187 bp, Homo sapiens
  MAP TO AC019159.3; EXPRESSED IN LUNG, SIGNAL =  13; EXPRESSED IN PLACENTA, SIGNAL =  12; EXPRESSED IN HELA, SIGNAL =  19; EXPRESSED IN HEART, SIGNAL =  11; EXPRESSED IN FETAL LIVER, SIGNAL =  10; EXPRESSED IN BRAIN, SIGNAL = 9.7; EXPRESSED IN BONE MARROW, SIGNAL =  13; EXPRESSED IN ADULT LIVER, SIGNAL =  13; SWISSPROT HIT: P29070, EVALUE 5.10e+00; NT HIT: Z11679.1, EVALUE 4.40e-01
atgtggcaggatgggaaaatagagctatctagctgcaagcacatgttttcattcaaggaaagggaagaaggactcaaaggtgactcaaagattgcaagggctgtcactgcggccactgtcctggaggacacaggctcaggggtcaaggctgcctccaattcattttctgaggttgaggctaccccct

SEQ ID NO: 23317 - DNA, 82 bp, Homo sapiens
  MAP TO AL158012.2; EXPRESSED IN LUNG, SIGNAL = 1.9; EXPRESSED IN ADULT LIVER, SIGNAL = 1.7; EXPRESSED IN FETAL LIVER, SIGNAL = 2.3; EXPRESSED IN HEART, SIGNAL =   3; EXPRESSED IN PLACENTA, SIGNAL = 2.2; EXPRESSED IN BRAIN, SIGNAL = 2.5; EXPRESSED IN BONE MARROW, SIGNAL = 2.7; NT HIT: L21944.1, EVALUE 6.60e-01; EST_HUMAN HIT: BF109040.1, EVALUE 2.50e-01
atggtgggaattaatttgggagtcaaagttcaaggaaaaaattctcaggtaatgcgccgtttgctgggcacctatttagtag

SEQ ID NO: 23318 - DNA, 203 bp, Homo sapiens
  MAP TO AC022753.3; EXPRESSED IN BONE MARROW, SIGNAL = 5.7; EXPRESSED IN PLACENTA, SIGNAL = 3.7; EXPRESSED IN ADULT LIVER, SIGNAL = 4.1; EXPRESSED IN BRAIN, SIGNAL = 4.5; EXPRESSED IN LUNG, SIGNAL = 3.8; EXPRESSED IN HEART, SIGNAL = 5.2; EXPRESSED IN FETAL LIVER, SIGNAL = 5.9; EXPRESSED IN HELA, SIGNAL = 3.4; EST_HUMAN HIT: F08688.1, EVALUE 9.00e-19; SWISSPROT HIT: O42224, EVALUE 5.00e+00; NT HIT: AJ271735.1, EVALUE 6.00e-13
caaatgctgatggagaagctacagcaagtgatccagaagatctagataagagaattaatgaaagtggtgatgctaaaagacacgttttccaagtagatgcaacagccttctattttaggataccatctaggactttcataactaaagagaagaagtcaatgtctggcttcaaagcttcaaaggacaggctgactctcttttga

SEQ ID NO: 23319 - DNA, 85 bp, Homo sapiens
  MAP TO AC010802.4; EXPRESSED IN PLACENTA, SIGNAL = 1.2; EXPRESSED IN ADULT LIVER, SIGNAL = 1.4; EXPRESSED IN HEART, SIGNAL = 1.3; EXPRESSED IN FETAL LIVER, SIGNAL = 1.1; EXPRESSED IN BONE MARROW, SIGNAL = 1.1; EXPRESSED IN BRAIN, SIGNAL = 1.3; EXPRESSED IN LUNG, SIGNAL = 1.3; EST_HUMAN HIT: R02411.1, EVALUE 2.60e-01
cttggccaggggaggagagatagtggagggcatgaccaggagccccagcttcatggcttctgaagagtgtaaactagggtatgca

SEQ ID NO: 23320 - DNA, 122 bp, Homo sapiens
  MAP TO AC009467.3; EXPRESSED IN LUNG, SIGNAL =   5; EXPRESSED IN PLACENTA, SIGNAL = 6.7; EXPRESSED IN HELA, SIGNAL =  14; EXPRESSED IN FETAL LIVER, SIGNAL = 6.9; EXPRESSED IN BONE MARROW, SIGNAL = 6.6; EXPRESSED IN ADULT LIVER, SIGNAL =  14; EXPRESSED IN HEART, SIGNAL =   7; EXPRESSED IN BRAIN, SIGNAL = 6.9; EST_HUMAN HIT: AI033980.1, EVALUE 6.00e-03; SWISSPROT HIT: P39745, EVALUE 9.20e+00; NT HIT: AF163864.1, EVALUE 6.80e-02
atggtgccagcatctgcatcaggtgatggcttcaagttaaagaaagaaggttcatggaagaaggtgaaggggagccaagctggctgtgtacagatagcacataaccagaaaggaagcaagag

SEQ ID NO: 23321 - DNA, 152 bp, Homo sapiens
  MAP TO AL136146.5; EXPRESSED IN HELA, SIGNAL = 6.3; EXPRESSED IN LUNG, SIGNAL = 5.9; EXPRESSED IN PLACENTA, SIGNAL = 1.9; EXPRESSED IN BRAIN, SIGNAL = 3.2; EXPRESSED IN BONE MARROW, SIGNAL =   8; EXPRESSED IN ADULT LIVER, SIGNAL =   4; EXPRESSED IN FETAL LIVER, SIGNAL = 7.7; EXPRESSED IN HEART, SIGNAL = 4.5; NT HIT: gi11429885, EVALUE 1.00e-28; SWISSPROT HIT: P30050, EVALUE 9.00e-15; EST_HUMAN HIT: AA847394.1, EVALUE 3.00e-18
cggttgccttggcagtgtcatcaccaaccttttttgcagacatacccagagggccaatcttgggggccagcacagacatggcatcaactttatccaaggtacacctcaggtatacgactttgatcttgttggggttgaacttcagtggtgtg

SEQ ID NO: 23322 - DNA, 85 bp, Homo sapiens
  MAP TO AC016648.3; EXPRESSED IN LUNG, SIGNAL = 1.3; EXPRESSED IN PLACENTA, SIGNAL = 1.3; EXPRESSED IN ADULT LIVER, SIGNAL = 1.5; EXPRESSED IN HEART, SIGNAL = 1.2; EXPRESSED IN FETAL LIVER, SIGNAL = 1.3; EXPRESSED IN BRAIN, SIGNAL = 1.3; EXPRESSED IN BONE MARROW, SIGNAL = 1.2; EST_HUMAN HIT: H70691.1, EVALUE 2.60e-01; NT HIT: AF000573.1, EVALUE 1.70e-01
atgaaagagcatgctccagataaagacatagaaaacagagacatagagaacatagagaataatactctttacctttgcttaagag

SEQ ID NO: 23323 - DNA, 190 bp, Homo sapiens
  MAP TO AC009046.4; EXPRESSED IN BONE MARROW, SIGNAL =  15; EXPRESSED IN PLACENTA, SIGNAL = 1.8; EXPRESSED IN ADULT LIVER, SIGNAL = 4.8; EXPRESSED IN HELA, SIGNAL = 9.3; EXPRESSED IN BRAIN, SIGNAL = 9.1; EXPRESSED IN LUNG, SIGNAL = 5.8; EXPRESSED IN HEART, SIGNAL = 3.6; EXPRESSED IN FETAL LIVER, SIGNAL =  22; EST_HUMAN HIT: AI192764.1, EVALUE 6.00e-69; NT HIT: gi11425268, EVALUE 1.00e-66; SWISSPROT HIT: Q07020, EVALUE 6.00e-26
cctcagctggcccgtcagcctctggcgcgctcgaacttccggcccttggagtggacgtagggtttggtgtggctgtgcggggttcccggggccttgccaaaatgcccgtacacctttcggcccttgagaggaccggagagcaggacggtgctgcagcccttgcgggagtccacggccagctggtcgaaaa

SEQ ID NO: 23324 - DNA, 108 bp, Homo sapiens
  MAP TO AL139245.2; EXPRESSED IN PLACENTA, SIGNAL = 4.6; EXPRESSED IN FETAL LIVER, SIGNAL =   3; EXPRESSED IN ADULT LIVER, SIGNAL = 3.7; EXPRESSED IN HEART, SIGNAL = 4.4; EXPRESSED IN BONE MARROW, SIGNAL = 3.2; EXPRESSED IN LUNG, SIGNAL =   4; EXPRESSED IN BRAIN, SIGNAL = 3.3; EST_HUMAN HIT: C14992.1, EVALUE 3.40e-01; SWISSPROT HIT: P46408, EVALUE 6.00e-04
gcaccactcgggaaagacgatcagctcaaaagccttggccactttgctgactcccatcaggatggcggggatgatggcaaagatgtgttgatcagcagggtccccttt

SEQ ID NO: 23325 - DNA, 128 bp, Homo sapiens
  MAP TO AC015908.4; EXPRESSED IN ADULT LIVER, SIGNAL = 5.8; EXPRESSED IN HELA, SIGNAL = 8.1; EXPRESSED IN BONE MARROW, SIGNAL = 4.6; EXPRESSED IN LUNG, SIGNAL = 5.8; EXPRESSED IN HEART, SIGNAL = 4.8; EXPRESSED IN BRAIN, SIGNAL = 4.4; EXPRESSED IN PLACENTA, SIGNAL = 5.6; EXPRESSED IN FETAL LIVER, SIGNAL = 4.3; EST_HUMAN HIT: AI478186.1, EVALUE 9.00e-64; SWISSPROT HIT: Q04436, EVALUE 4.10e+00; NT HIT: AF119117.1, EVALUE 1.00e-03
ggaatggcaaggaacctgaggaaccagcgtgaggaaaacctggatgatctgacgtcttcctcactttatccctacctgtccacgcctccatccatccacccatccatcactgatcaagctctcactat

SEQ ID NO: 23326 - DNA, 81 bp, Homo sapiens
  MAP TO AC018528.3; EXPRESSED IN HELA, SIGNAL = 2.8; EXPRESSED IN LUNG, SIGNAL = 1.6; EXPRESSED IN PLACENTA, SIGNAL = 1.6; EXPRESSED IN ADULT LIVER, SIGNAL = 1.7; EXPRESSED IN FETAL LIVER, SIGNAL = 1.4; EXPRESSED IN BRAIN, SIGNAL = 1.8; EXPRESSED IN BONE MARROW, SIGNAL = 1.3; EXPRESSED IN HEART, SIGNAL = 1.4; EST_HUMAN HIT: AI732364.1, EVALUE 9.70e-01; NT HIT: L49349.1, EVALUE 1.60e-01
atgaggaaaagtgcttcagtcaaggctgctgagcaagaggcctctggatggcagcagcagggtgaggaattagatatgcag

SEQ ID NO: 23327 - DNA, 126 bp, Homo sapiens
  MAP TO AC011686.3; EXPRESSED IN LUNG, SIGNAL = 1.6; EXPRESSED IN ADULT LIVER, SIGNAL = 1.6; EXPRESSED IN PLACENTA, SIGNAL = 1.6; EXPRESSED IN FETAL LIVER, SIGNAL = 1.6; EXPRESSED IN BRAIN, SIGNAL = 1.5; EXPRESSED IN BONE MARROW, SIGNAL = 1.7; EXPRESSED IN HEART, SIGNAL = 1.6; SWISSPROT HIT: Q91062, EVALUE 5.40e+00; EST_HUMAN HIT: BE770642.1, EVALUE 6.50e+00
cttcctccacccgaaaagaggaaattgtgggtgaaatgaaagcaatactaccccaccacaaagcagagcaacaagatgtcaagtcagaaccaggaaaggcaacatcatcttcctcagtccagagga

SEQ ID NO: 23328 - DNA, 177 bp, Homo sapiens
  MAP TO AC022470.3; EXPRESSED IN PLACENTA, SIGNAL = 1.4; EXPRESSED IN BRAIN, SIGNAL = 1.9; EXPRESSED IN BONE MARROW, SIGNAL = 1.6; EXPRESSED IN LUNG, SIGNAL = 1.3; EXPRESSED IN HEART, SIGNAL = 1.6; EXPRESSED IN FETAL LIVER, SIGNAL = 1.5; EST_HUMAN HIT: AW956882.1, EVALUE 4.00e-85; SWISSPROT HIT: O14646, EVALUE 7.70e-01; NT HIT: U44953.1, EVALUE 3.00e-85
ttaataaacaaagcttacaaagatggtgcttgtggcagagttggtctcaatttcactatcagacaaagtgccccgagagcttgccaggtgaacactgccctcgccacctggtccatcacctgcattgctgctcaagtcactgtcagctccaagggtctctccagagctattactcac

SEQ ID NO: 23329 - DNA, 131 bp, Homo sapiens
  MAP TO AC021774.3; EXPRESSED IN LUNG, SIGNAL = 4.6; EXPRESSED IN PLACENTA, SIGNAL = 5.3; EXPRESSED IN ADULT LIVER, SIGNAL = 7.4; EXPRESSED IN HELA, SIGNAL =   8; EXPRESSED IN HEART, SIGNAL = 5.6; EXPRESSED IN FETAL LIVER, SIGNAL = 4.6; EXPRESSED IN BRAIN, SIGNAL = 4.3; EXPRESSED IN BONE MARROW, SIGNAL = 4.3; SWISSPROT HIT: P49766, EVALUE 3.10e+00; EST_HUMAN HIT: AL043810.1, EVALUE 1.00e-16; NT HIT: AF280107.1, EVALUE 2.00e-23
gtgcagctgctgctgctgaagccgcagcagcagactcagatatccctgcactcttgggggtccaggaaggcccccctgacctggcaggctcggaagtgcctcctcctgctgcctggcttctccctgctctc

SEQ ID NO: 23330 - DNA, 109 bp, Homo sapiens
  MAP TO AC009635.4; EXPRESSED IN ADULT LIVER, SIGNAL = 1.7; EXPRESSED IN LUNG, SIGNAL = 1.6; EXPRESSED IN PLACENTA, SIGNAL = 1.4; EXPRESSED IN FETAL LIVER, SIGNAL = 1.4; EXPRESSED IN BRAIN, SIGNAL = 1.6; EXPRESSED IN BONE MARROW, SIGNAL = 1.5; EXPRESSED IN HEART, SIGNAL = 1.5; NT HIT: AL163303.2, EVALUE 1.50e-02; EST_HUMAN HIT: AW891536.1, EVALUE 2.20e-02
aagtatcttcactgttaattttcagtttgctcacccacataaattttagaatcagcttgacaagttctgtgaaaacatcttgttctgattctttgtcattgtactgaga

SEQ ID NO: 23331 - DNA, 169 bp, Homo sapiens
  MAP TO AL157405.2; EXPRESSED IN BRAIN, SIGNAL = 1.1; EXPRESSED IN LUNG, SIGNAL = 0.85; EXPRESSED IN PLACENTA, SIGNAL = 0.8; EXPRESSED IN ADULT LIVER, SIGNAL = 0.64; EXPRESSED IN HEART, SIGNAL = 1.2; EXPRESSED IN BONE MARROW, SIGNAL = 0.99; EXPRESSED IN FETAL LIVER, SIGNAL = 0.83; NT HIT: AF182744.1, EVALUE 3.90e-01; EST_HUMAN HIT: AL039991.1, EVALUE 9.00e-03
ctcctcatcctcacagaggtctgccccagccactgcctgggccactgctgctgcagcctggtctcttaagacacagaccaggtccacagccacagaggccacagggacagctaggacacagcattcagacttccccagctgccgcttctgtgctgagcctttcaggaag

SEQ ID NO: 23332 - DNA, 157 bp, Homo sapiens
  MAP TO AL137786.2; EXPRESSED IN LUNG, SIGNAL = 3.4; EXPRESSED IN PLACENTA, SIGNAL = 4.5; EXPRESSED IN ADULT LIVER, SIGNAL = 6.6; EXPRESSED IN HEART, SIGNAL = 5.7; EXPRESSED IN FETAL LIVER, SIGNAL =   6; EXPRESSED IN BRAIN, SIGNAL = 6.3; EXPRESSED IN HELA, SIGNAL = 6.1; EXPRESSED IN BONE MARROW, SIGNAL = 5.7; SWISSPROT HIT: P30545, EVALUE 3.00e+00; NT HIT: U63610.1, EVALUE 2.30e-02; EST_HUMAN HIT: BE264142.1, EVALUE 8.30e+00
aaagtcgctccaacaattaagcttggtccttttgtctctcctccccttcctccctctctctctctgcttcctgcgagtgtcccactgcgcggggctctgcagccaccctccccatcaggccgtttcgcagtggcaccgcggcgccgtggagaggagc

SEQ ID NO: 23333 - DNA, 116 bp, Homo sapiens
  MAP TO AC016080.3; EXPRESSED IN BONE MARROW, SIGNAL = 2.9; EXPRESSED IN ADULT LIVER, SIGNAL = 2.5; EXPRESSED IN LUNG, SIGNAL = 2.3; EXPRESSED IN PLACENTA, SIGNAL = 2.8; EXPRESSED IN HELA, SIGNAL = 4.4; EXPRESSED IN HEART, SIGNAL = 2.6; EXPRESSED IN FETAL LIVER, SIGNAL =   2; EXPRESSED IN BRAIN, SIGNAL = 1.8; EST_HUMAN HIT: BF035861.1, EVALUE 9.50e-02
ctgttattttccctcagtttaaaggtgctttcacagttcaaagtaatattatttgacagatagaatgcataatggtaattggtgaattcaataaatatgcactgtgggctgtacat

SEQ ID NO: 23334 - DNA, 109 bp, Homo sapiens
  MAP TO AC019276.3; EXPRESSED IN PLACENTA, SIGNAL = 3.1; EXPRESSED IN FETAL LIVER, SIGNAL = 4.2; EXPRESSED IN LUNG, SIGNAL = 4.2; EXPRESSED IN BONE MARROW, SIGNAL = 4.6; EXPRESSED IN BRAIN, SIGNAL = 3.6; EXPRESSED IN HEART, SIGNAL = 3.4; EXPRESSED IN HELA, SIGNAL = 5.2; EXPRESSED IN ADULT LIVER, SIGNAL = 4.2; SWISSPROT HIT: P53804, EVALUE 5.50e+00; NT HIT: gi11417739, EVALUE 1.50e-02; EST_HUMAN HIT: BE781154.1, EVALUE 2.20e-02
caggaagtggaaaggcagcagcaaggctgggagctgctcaggcccagggaggcttacagaccccagggagagtgaccgtgggtggggagggtgctcagcaagctcctga

SEQ ID NO: 23335 - DNA, 134 bp, Homo sapiens
  MAP TO AL136419.2; EXPRESSED IN ADULT LIVER, SIGNAL = 7.8; EXPRESSED IN FETAL LIVER, SIGNAL = 9.6; EXPRESSED IN BRAIN, SIGNAL = 7.7; EXPRESSED IN LUNG, SIGNAL = 7.9; EXPRESSED IN HELA, SIGNAL = 8.1; EXPRESSED IN PLACENTA, SIGNAL = 7.1; EXPRESSED IN HEART, SIGNAL = 5.9; EXPRESSED IN BONE MARROW, SIGNAL = 8.2; NT HIT: U52111.2, EVALUE 3.00e-13; EST_HUMAN HIT: BE162118.1, EVALUE 8.00e-09; SWISSPROT HIT: P08548, EVALUE 4.00e-08
caaaggccatatatgacaagcccacagctagtatcatactcaacagtgaaaagtcaaaagcttttctgctaagattaggaataagacaaagatgcccactctcatcatttccattcaacgtagtactgtaagtc

SEQ ID NO: 23336 - DNA, 222 bp, Homo sapiens
  MAP TO AC011599.8; EXPRESSED IN LUNG, SIGNAL = 7.1; EXPRESSED IN ADULT LIVER, SIGNAL = 7.3; EXPRESSED IN HEART, SIGNAL = 6.3; EXPRESSED IN BRAIN, SIGNAL = 6.2; EXPRESSED IN HELA, SIGNAL = 8.4; EXPRESSED IN BONE MARROW, SIGNAL =   7; EXPRESSED IN FETAL LIVER, SIGNAL = 6.3; EXPRESSED IN PLACENTA, SIGNAL = 6.2; SWISSPROT HIT: P25162, EVALUE 2.20e+00; NT HIT: X87344.1, EVALUE 8.00e-37; EST_HUMAN HIT: AI678721.1, EVALUE 2.00e-32
atggatggaactggaggtcatgatgttaagtgaaataagccaggtacagaaaaacaaaatatcacatgttctcacttatttgtgggatctaaaaatcaaaacaattaaacttatggacatagagactaggacagttatcagaattgggaagggtagtcgggggacagagggggaggtaggtatggttaatgaatacaaaaaatagaaggaatgagtaagtga

SEQ ID NO: 23337 - DNA, 82 bp, Homo sapiens
  MAP TO AC013629.3; EXPRESSED IN PLACENTA, SIGNAL = 1.6; EXPRESSED IN FETAL LIVER, SIGNAL = 1.4; EXPRESSED IN HEART, SIGNAL = 2.3; EXPRESSED IN BONE MARROW, SIGNAL = 1.2; EXPRESSED IN ADULT LIVER, SIGNAL = 2.3; EXPRESSED IN BRAIN, SIGNAL = 1.7; EXPRESSED IN LUNG, SIGNAL = 1.6; EST_HUMAN HIT: AI381040.1, EVALUE 2.00e-05; NT HIT: AJ400877.1, EVALUE 4.20e-02
cttcagactggtaatacctgtatgaattgggtgaatttctctcttcttgaggtctctaaaacttctcttgagtttcctcagc

SEQ ID NO: 23338 - DNA, 169 bp, Homo sapiens
  MAP TO AC022714.2; EXPRESSED IN LUNG, SIGNAL = 2.4; EXPRESSED IN FETAL LIVER, SIGNAL = 2.6; EXPRESSED IN HEART, SIGNAL = 2.6; EXPRESSED IN PLACENTA, SIGNAL = 2.9; EXPRESSED IN ADULT LIVER, SIGNAL = 2.7; EXPRESSED IN BRAIN, SIGNAL = 2.6; EXPRESSED IN BONE MARROW, SIGNAL = 2.6; SWISSPROT HIT: P11837, EVALUE 6.70e+00; NT HIT: AF219920.1, EVALUE 1.50e+00; EST_HUMAN HIT: H41571.1, EVALUE 5.80e-01
cttcaggcacagcattgaagtaattcatgacctgtttatctatgccttgatgctggtgtactataatccatataccccagccccctactgccaccctgttaacacaaagaccaaaaatgttctcaggatgactctgggagatatgaaaatcaatgatcctataactaac

SEQ ID NO: 23339 - DNA, 136 bp, Homo sapiens
  MAP TO AC013764.3; EXPRESSED IN HEART, SIGNAL = 3.8; EXPRESSED IN BONE MARROW, SIGNAL = 3.8; EXPRESSED IN LUNG, SIGNAL = 3.9; EXPRESSED IN HELA, SIGNAL = 4.3; EXPRESSED IN PLACENTA, SIGNAL = 4.1; EXPRESSED IN ADULT LIVER, SIGNAL = 4.6; EXPRESSED IN FETAL LIVER, SIGNAL = 3.5; EXPRESSED IN BRAIN, SIGNAL =   5; NT HIT: AL163281.2, EVALUE 1.00e-37; EST_HUMAN HIT: AI568523.1, EVALUE 5.00e-44
catccaatatggtttggctgtgtcgccacccaaatctcatcttgaattgtagctcccataattcccatgtgttgtaggaggtgacccggtgggagataattgagtcatgggggtggttcccccatactgttctcat

SEQ ID NO: 23340 - DNA, 208 bp, Homo sapiens
  MAP TO AC013490.3; EXPRESSED IN PLACENTA, SIGNAL = 1.9; EXPRESSED IN FETAL LIVER, SIGNAL = 1.9; EXPRESSED IN BONE MARROW, SIGNAL = 1.9; EXPRESSED IN HEART, SIGNAL = 1.9; EXPRESSED IN ADULT LIVER, SIGNAL = 2.1; EXPRESSED IN LUNG, SIGNAL = 2.1; EXPRESSED IN HELA, SIGNAL = 2.6; EXPRESSED IN BRAIN, SIGNAL = 2.6; SWISSPROT HIT: P47869, EVALUE 2.00e-11; EST_HUMAN HIT: AL134748.1, EVALUE 4.00e-30; NT HIT: gi4557600, EVALUE 1.00e-114
aaaaaagaaaaggcttccgttatgatacagaacaacgcttatgcagtggctgttgccaattatgccccgaatctttcaaaagatccagttctctccaccatctccaagagtgcaaccacgccagaacccaacaagaagccagaaaacaagccagctgaagcaaagaaaactttcaacagtgttagcaaaattgacagaatgtccagaa

SEQ ID NO: 23341 - DNA, 141 bp, Homo sapiens
  MAP TO AC026414.2; EXPRESSED IN ADULT LIVER, SIGNAL = 1.6; EXPRESSED IN HEART, SIGNAL = 1.2; EXPRESSED IN BRAIN, SIGNAL = 1.4; EXPRESSED IN LUNG, SIGNAL = 1.5; EXPRESSED IN PLACENTA, SIGNAL = 1.1; EXPRESSED IN FETAL LIVER, SIGNAL = 1.3; EXPRESSED IN BONE MARROW, SIGNAL = 1.2; NT HIT: AB021490.2, EVALUE 4.90e+00; SWISSPROT HIT: Q99107, EVALUE 9.10e+00; EST_HUMAN HIT: BE007072.1, EVALUE 1.20e-01
atgttgaaaactcagcactgggcaccagctggtgctgctgaaagaatacagaataaaattagtgtttctaatattggcaaaaactgccagctgcactcagctgttgctacaggaagaaattttcactgccagagtgaaaaa

SEQ ID NO: 23342 - DNA, 218 bp, Homo sapiens
  MAP TO AC021000.3; EXPRESSED IN LUNG, SIGNAL = 1.5; EXPRESSED IN PLACENTA, SIGNAL = 1.4; EXPRESSED IN HEART, SIGNAL = 1.7; EXPRESSED IN BRAIN, SIGNAL = 5.2; EXPRESSED IN FETAL LIVER, SIGNAL = 1.8; EXPRESSED IN ADULT LIVER, SIGNAL = 1.8; EXPRESSED IN HELA, SIGNAL = 2.6; EXPRESSED IN BONE MARROW, SIGNAL = 1.8; SWISSPROT HIT: P07197, EVALUE 2.00e-18; EST_HUMAN HIT: AL134326.1, EVALUE 4.00e-64; NT HIT: Y00067.1, EVALUE 1.00e-120
cctgcctgctttaacttaagtggtggaagctctgccggaacagcctctgcactgcggttagtgttccggccacgcacgtagtaagcatcgtacctgtacgcagcgatttctatatccagagccatcttgacgttgaggaggtcctggtattcgcgcaaatgacgagccatttcccactttgtgccccgaagctcattttccagctgctggatggtgtc

SEQ ID NO: 23343 - DNA, 184 bp, Homo sapiens
  MAP TO AC007321.2; EXPRESSED IN PLACENTA, SIGNAL = 3.4; EXPRESSED IN FETAL LIVER, SIGNAL = 3.3; EXPRESSED IN BRAIN, SIGNAL = 3.7; EXPRESSED IN BONE MARROW, SIGNAL = 3.8; EXPRESSED IN LUNG, SIGNAL = 3.3; EXPRESSED IN ADULT LIVER, SIGNAL = 3.5; EXPRESSED IN HEART, SIGNAL = 3.8; NT HIT: U45983.1, EVALUE 8.00e-12; SWISSPROT HIT: P34315, EVALUE 2.30e+00; EST_HUMAN HIT: AA046502.1, EVALUE 8.00e-22
gatttattgttctgttatgaatgcatgatgctctactccttcaacaagcccatcatacattttcaccatgtcatctatagccacttttcctgcagtatcgacatcatcttggtcatcaatactatcatgcttaccttgatttggaaccattttgactcttcacaatcagtcaatgagtgaagaa

SEQ ID NO: 23344 - DNA, 75 bp, Homo sapiens
  MAP TO AC016549.4; EXPRESSED IN LUNG, SIGNAL = 4.4; EXPRESSED IN HELA, SIGNAL = 5.2; EXPRESSED IN PLACENTA, SIGNAL =   4; EXPRESSED IN FETAL LIVER, SIGNAL = 3.4; EXPRESSED IN ADULT LIVER, SIGNAL = 4.6; EXPRESSED IN HEART, SIGNAL = 3.6; EXPRESSED IN BRAIN, SIGNAL = 3.8; EXPRESSED IN BONE MARROW, SIGNAL = 3.7; SWISSPROT HIT: O75962, EVALUE 3.00e-03; EST_HUMAN HIT: BF057364.1, EVALUE 8.00e-35; NT HIT: gi6005921, EVALUE 6.00e-35
ggtttcgaaaaaacgatgaaatgaaagctatggatgttttaccaattttgaaggaaaaagttgcatacctttcag

SEQ ID NO: 23345 - DNA, 126 bp, Homo sapiens
  MAP TO AL139008.3; EXPRESSED IN PLACENTA, SIGNAL = 2.3; EXPRESSED IN ADULT LIVER, SIGNAL = 2.4; EXPRESSED IN HEART, SIGNAL = 2.2; EXPRESSED IN FETAL LIVER, SIGNAL = 1.9; EXPRESSED IN BRAIN, SIGNAL = 2.3; EXPRESSED IN BONE MARROW, SIGNAL = 2.5; EXPRESSED IN LUNG, SIGNAL = 2.3; NT HIT: M95828.1, EVALUE 7.00e-05; EST_HUMAN HIT: BE733157.1, EVALUE 3.00e-05
gctgaaaacaacagcatcaacaacaacagcaacaactataataataataataataataataataataataataatgataatggtaatagtagtagttgtaaactgaaagttaaagtctacacttca

SEQ ID NO: 23346 - DNA, 95 bp, Homo sapiens
  MAP TO AC019253.3; EXPRESSED IN LUNG, SIGNAL = 1.3; EXPRESSED IN ADULT LIVER, SIGNAL = 1.3; EXPRESSED IN BRAIN, SIGNAL = 1.5; EXPRESSED IN PLACENTA, SIGNAL = 1.1; EXPRESSED IN HEART, SIGNAL = 1.4; EXPRESSED IN FETAL LIVER, SIGNAL = 1.2; EXPRESSED IN BONE MARROW, SIGNAL = 1.2; EST_HUMAN HIT: BE880112.1, EVALUE 7.40e-02
agagtggcagcagcagctgtcagtgcagagaaaggctgtggcccagcagccagagctcctgcttcctgctaaaggcagcaatgagcttagatcag

SEQ ID NO: 23347 - DNA, 144 bp, Homo sapiens
  MAP TO AC025324.2; EXPRESSED IN ADULT LIVER, SIGNAL = 1.2; EXPRESSED IN HEART, SIGNAL = 1.2; EXPRESSED IN FETAL LIVER, SIGNAL = 1.4; EXPRESSED IN LUNG, SIGNAL = 1.1; EXPRESSED IN PLACENTA, SIGNAL = 1.8; EXPRESSED IN BRAIN, SIGNAL = 1.2; EXPRESSED IN BONE MARROW, SIGNAL = 0.98; NT HIT: gi6680841, EVALUE 1.30e+00; EST_HUMAN HIT: AI820744.1, EVALUE 4.80e-01; SWISSPROT HIT: P49379, EVALUE 1.40e+00
agatcccactcaagtcagacagaagagaccaggcaaagagcagacgctcctcaatgtacttggaggggacctcacctgttacattgcaaagtacactcagggcccttggacttggctgcagccaatcaggactgcagaggagag

SEQ ID NO: 23348 - DNA, 131 bp, Homo sapiens
  MAP TO AL133334.14; EXPRESSED IN ADULT LIVER, SIGNAL = 1.6; EXPRESSED IN PLACENTA, SIGNAL = 1.6; EXPRESSED IN HEART, SIGNAL = 1.4; EXPRESSED IN FETAL LIVER, SIGNAL = 1.4; EXPRESSED IN BONE MARROW, SIGNAL = 1.3; EXPRESSED IN LUNG, SIGNAL = 1.5; EXPRESSED IN BRAIN, SIGNAL = 1.5; EST_HUMAN HIT: W03412.1, EVALUE 6.80e+00; SWISSPROT HIT: P35336, EVALUE 9.20e+00
ctggcaactgtgggctgcctcatgcagcgtgtcctctgggccagtggtggagatacacaaacagctttctctggagaggccaaggacattgagtggtgagtgagcatgttatcctgcacatccaatctatt

SEQ ID NO: 23349 - DNA, 98 bp, Homo sapiens
  MAP TO AC021641.4; EXPRESSED IN PLACENTA, SIGNAL = 5.4; EXPRESSED IN BONE MARROW, SIGNAL = 7.3; EXPRESSED IN ADULT LIVER, SIGNAL =   5; EXPRESSED IN FETAL LIVER, SIGNAL = 5.6; EXPRESSED IN BRAIN, SIGNAL = 5.4; EXPRESSED IN LUNG, SIGNAL = 4.8; EXPRESSED IN HELA, SIGNAL = 3.9; EXPRESSED IN HEART, SIGNAL = 4.4; NT HIT: AJ250726.2, EVALUE 2.10e-01; EST_HUMAN HIT: AA402949.1, EVALUE 7.70e-02
ggccaggtgaaagtgatgaagacacaccctgccctgaagcagatcacactgtagttgtagaggctgacactgtagtcttcattacaccaaataaacaa

SEQ ID NO: 23350 - DNA, 126 bp, Homo sapiens
  MAP TO AC025747.3; EXPRESSED IN HELA, SIGNAL = 5.5; EXPRESSED IN LUNG, SIGNAL = 4.1; EXPRESSED IN PLACENTA, SIGNAL = 3.6; EXPRESSED IN ADULT LIVER, SIGNAL =   6; EXPRESSED IN FETAL LIVER, SIGNAL = 4.3; EXPRESSED IN BRAIN, SIGNAL =   4; EXPRESSED IN BONE MARROW, SIGNAL = 4.4; EXPRESSED IN HEART, SIGNAL = 3.1; EST_HUMAN HIT: AA709079.1, EVALUE 1.00e-25; NT HIT: AL163249.2, EVALUE 3.00e-16
cgctaatgtttgtggcttcactcctgaagtcagcgagaccacgaacccaccaggaggagcgagcaactcccgttgcgccacctttaagagctgtaacactcactgcaaaggtctgctgcttcactc

SEQ ID NO: 23351 - DNA, 119 bp, Homo sapiens
  MAP TO AL139250.2; EXPRESSED IN PLACENTA, SIGNAL = 2.9; EXPRESSED IN ADULT LIVER, SIGNAL = 1.1; EXPRESSED IN FETAL LIVER, SIGNAL = 2.8; EXPRESSED IN HELA, SIGNAL = 4.6; EXPRESSED IN BRAIN, SIGNAL = 2.5; EXPRESSED IN BONE MARROW, SIGNAL = 2.5; EXPRESSED IN LUNG, SIGNAL = 2.2; EXPRESSED IN HEART, SIGNAL =   3; NT HIT: U57503.1, EVALUE 4.10e+00
ccaaagccccccaggaggatgaggcaggccgggaaagggaggtccatgtgcgtccctgcaacccagcaggtgtacagacggaagaatggcaggaaagagctggagctcacggaggggca

SEQ ID NO: 23352 - DNA, 139 bp, Homo sapiens
  MAP TO AL121917.12; EXPRESSED IN ADULT LIVER, SIGNAL = 4.4; EXPRESSED IN HELA, SIGNAL = 4.9; EXPRESSED IN LUNG, SIGNAL = 5.6; EXPRESSED IN PLACENTA, SIGNAL = 2.8; EXPRESSED IN FETAL LIVER, SIGNAL = 6.4; EXPRESSED IN BRAIN, SIGNAL =   9; EXPRESSED IN BONE MARROW, SIGNAL = 5.4; EXPRESSED IN HEART, SIGNAL = 7.7; NT HIT: M21741.1, EVALUE 2.00e-70; EST_HUMAN HIT: AA188858.1, EVALUE 6.00e-62; SWISSPROT HIT: P04895, EVALUE 6.00e-18
aagtcggggtgtagcttacgggagggaagtcaaagtcaggcacgttcatcacactcaggatgtagtccactctgaactggttctcggggttggccagctccacggggggcaccaggttgctcatggcggccacaatggt

SEQ ID NO: 23353 - DNA, 317 bp, Homo sapiens
  MAP TO AC022429.2; EXPRESSED IN LUNG, SIGNAL = 1.7; EXPRESSED IN PLACENTA, SIGNAL = 1.6; EXPRESSED IN ADULT LIVER, SIGNAL = 1.8; EXPRESSED IN HEART, SIGNAL = 1.8; EXPRESSED IN FETAL LIVER, SIGNAL = 1.9; EXPRESSED IN BRAIN, SIGNAL = 1.7; EXPRESSED IN BONE MARROW, SIGNAL = 1.7; SWISSPROT HIT: P75789, EVALUE 3.50e+00; EST_HUMAN HIT: BE540422.1, EVALUE 2.90e-01
atggcattccaaaggctccaagcacattatcttactgattctgactgtaactcaacaaaggaggctgataggatcatccccattcagctgatgaaaaacataaaccaaaaaagaaatcagcctgaagtgacccagctggcccaggaaaagctgatactaaaccccagcctcctggtggcccctttctgcaaatcaatggctcctgtttccagacagatggaacagagacaaaggctacagccatgggcctggaaatctggctgtgtgcttggagccagccgacctcagcttaagactgactctgattctggacatga

SEQ ID NO: 23354 - DNA, 165 bp, Homo sapiens
  MAP TO AL121586.28; EXPRESSED IN ADULT LIVER, SIGNAL =  10; EXPRESSED IN HELA, SIGNAL =  15; EXPRESSED IN HEART, SIGNAL = 8.5; EXPRESSED IN FETAL LIVER, SIGNAL = 9.3; EXPRESSED IN BONE MARROW, SIGNAL =  11; EXPRESSED IN LUNG, SIGNAL = 8.6; EXPRESSED IN PLACENTA, SIGNAL = 9.3; EXPRESSED IN BRAIN, SIGNAL = 9.6; EST_HUMAN HIT: BF688219.1, EVALUE 7.00e-56; NT HIT: gi11421726, EVALUE 3.00e-88; SWISSPROT HIT: P43027, EVALUE 2.00e-26
gagagcccaaggagccgtttcgcccaccccccatcacaccccacgagtacatgctctcgctgtacaggacgctgtccgatgctgacagaaagggaggcaacagcagcgtgaagttggaggctggcctggccaacaccatcaccagctttattgacaaagggcaag

SEQ ID NO: 23355 - DNA, 89 bp, Homo sapiens
  MAP TO AC015873.2; EXPRESSED IN BONE MARROW, SIGNAL = 1.6; EXPRESSED IN PLACENTA, SIGNAL = 1.6; EXPRESSED IN ADULT LIVER, SIGNAL = 1.8; EXPRESSED IN HELA, SIGNAL = 2.4; EXPRESSED IN HEART, SIGNAL = 1.7; EXPRESSED IN LUNG, SIGNAL = 1.5; EXPRESSED IN FETAL LIVER, SIGNAL = 1.7; EXPRESSED IN BRAIN, SIGNAL = 1.6; NT HIT: AL163203.2, EVALUE 8.00e-41; EST_HUMAN HIT: AA001994.1, EVALUE 1.00e-18; SWISSPROT HIT: Q92543, EVALUE 2.00e-05
agtaaacagtgagccagagattcctgcaggcccctcctcagaggttgaaggtggccaggaagctgtagagggagatttgggtggaatgt

SEQ ID NO: 23356 - DNA, 280 bp, Homo sapiens
  MAP TO AC015525.3; EXPRESSED IN LUNG, SIGNAL = 1.7; EXPRESSED IN PLACENTA, SIGNAL = 1.4; EXPRESSED IN ADULT LIVER, SIGNAL = 1.5; EXPRESSED IN FETAL LIVER, SIGNAL = 1.2; EXPRESSED IN BONE MARROW, SIGNAL = 1.1; EXPRESSED IN HEART, SIGNAL = 1.3; EXPRESSED IN BRAIN, SIGNAL = 1.1; EST_HUMAN HIT: AA149791.1, EVALUE 0.00e+00; NT HIT: AE000004.2, EVALUE 1.70e-01; SWISSPROT HIT: P54316, EVALUE 7.00e-10
caacatctggtcaataaattccttcaagaccatggctacttttctggtcttactagaggcatgggtatatattaaagttgtagctcctcgattccaatcaacaacaactacgttcatgtcttcaacagagagcaaaccctttactaagtcatccatccaaacaggaggggagcctgttggcctgaatccatggacaatgaaggtggttttcttggtcacattcaagttcccaaaagctgaggagttgatggtttgtgcgcaggtcaggtttttccttgtg

SEQ ID NO: 23357 - DNA, 181 bp, Homo sapiens
  MAP TO AC012629.4; EXPRESSED IN PLACENTA, SIGNAL = 5.6; EXPRESSED IN ADULT LIVER, SIGNAL = 7.2; EXPRESSED IN HEART, SIGNAL = 4.7; EXPRESSED IN FETAL LIVER, SIGNAL = 7.3; EXPRESSED IN BRAIN, SIGNAL = 4.8; EXPRESSED IN LUNG, SIGNAL = 6.2; EXPRESSED IN HELA, SIGNAL =  11; EXPRESSED IN BONE MARROW, SIGNAL = 5.5; SWISSPROT HIT: Q02836, EVALUE 7.70e-01; NT HIT: gi4758119, EVALUE 9.00e-98; EST_HUMAN HIT: BF131342.1, EVALUE 1.00e-97
atggaacaccccagcaagcacctcccagcctgcctttcggagcagcacccaggaggggatgccgcgctccagcaacaccaggtcaggcctgtgcagacccctgccctgccgctgcagaaatccagaagcatccttaatgcttctcagtcttcagccagagggagggctgttatttccagag

SEQ ID NO: 23358 - DNA, 140 bp, Homo sapiens
  MAP TO AL109614.27; EXPRESSED IN PLACENTA, SIGNAL = 5.6; EXPRESSED IN ADULT LIVER, SIGNAL = 4.8; EXPRESSED IN HEART, SIGNAL =   6; EXPRESSED IN FETAL LIVER, SIGNAL = 5.6; EXPRESSED IN BRAIN, SIGNAL = 5.1; EXPRESSED IN LUNG, SIGNAL = 5.8; EXPRESSED IN HELA, SIGNAL = 6.6; EXPRESSED IN BONE MARROW, SIGNAL = 5.3; NT HIT: AB042279.1, EVALUE 3.10e-01; EST_HUMAN HIT: AI874352.1, EVALUE 4.00e-20
accaacatttggagattagaaaagagaagaagaatcctctgagagcactgaaaagaaagagccgggaggtgtctcagcagaaagacagggtggtcagcagtgggtgtgtgcagagaggtcaggaggaccagggcaatccc

SEQ ID NO: 23359 - DNA, 136 bp, Homo sapiens
  MAP TO AC018530.4; EXPRESSED IN LUNG, SIGNAL = 1.3; EXPRESSED IN ADULT LIVER, SIGNAL = 1.2; EXPRESSED IN FETAL LIVER, SIGNAL = 1.1; EXPRESSED IN BRAIN, SIGNAL = 1.3; EXPRESSED IN HEART, SIGNAL = 1.2; EXPRESSED IN PLACENTA, SIGNAL = 1.3; EXPRESSED IN BONE MARROW, SIGNAL = 1.3; SWISSPROT HIT: O27656, EVALUE 7.00e+00; EST_HUMAN HIT: BE547605.1, EVALUE 4.50e-01; NT HIT: AE001755.1, EVALUE 3.00e-01
gaatctttctgtcttcacagaacctttgcctgggtgtgccccctgccatgcaatgaaccaggcagtaaaggtcctggccgtgccagagagacctgaggacatccatgattgctgtgaccaagtgggcacatctgac

SEQ ID NO: 23360 - DNA, 102 bp, Homo sapiens
  MAP TO AL137228.2; EXPRESSED IN LUNG, SIGNAL = 1.9; EXPRESSED IN ADULT LIVER, SIGNAL = 1.4; EXPRESSED IN BRAIN, SIGNAL = 1.1; EXPRESSED IN BONE MARROW, SIGNAL = 1.3; EXPRESSED IN PLACENTA, SIGNAL = 1.8; EXPRESSED IN HEART, SIGNAL = 1.5; EXPRESSED IN FETAL LIVER, SIGNAL = 1.3; NT HIT: AP001518.1, EVALUE 8.60e-01
gaatggatagggactacatttgacttccatcagcagaaaataaaaattctgacattcttggcaaatgaacctgtgtaggtctcttaggtgactaggagtgat

SEQ ID NO: 23361 - DNA, 299 bp, Homo sapiens
  MAP TO AL157381.7; EXPRESSED IN LUNG, SIGNAL = 1.9; EXPRESSED IN HEART, SIGNAL = 1.8; EXPRESSED IN FETAL LIVER, SIGNAL = 1.7; EXPRESSED IN BRAIN, SIGNAL = 1.8; EXPRESSED IN PLACENTA, SIGNAL = 2.7; EXPRESSED IN ADULT LIVER, SIGNAL = 2.4; EXPRESSED IN BONE MARROW, SIGNAL = 2.4; SWISSPROT HIT: O02754, EVALUE 3.70e-01; EST_HUMAN HIT: AW340174.1, EVALUE 5.00e-80; NT HIT: AL163284.2, EVALUE 5.00e-88
ctccattgtggagtagtagactgatttcatcctgatagtctgggtcaatcaccctagccaacactgtaactgccttcttagcctgttgacttaaaggtaggaggagcccaaagtgtccaggtggcaatattaacttccagttcaatgggattgttgtgtctcctggtggcagcattcctccagctggaactaagacctctaggccaggagaatgtaatgttgtgggaacggaaagcaaaaattttgctagtggatcactaggggtgatggtgagtgatgccacttctacttccacccct

SEQ ID NO: 23362 - DNA, 150 bp, Homo sapiens
  MAP TO AC011111.3; EXPRESSED IN LUNG, SIGNAL = 1.2; EXPRESSED IN PLACENTA, SIGNAL = 1.1; EXPRESSED IN HEART, SIGNAL = 1.3; EXPRESSED IN FETAL LIVER, SIGNAL = 1.2; EXPRESSED IN BRAIN, SIGNAL = 1.2; EXPRESSED IN BONE MARROW, SIGNAL = 1.3; EXPRESSED IN ADULT LIVER, SIGNAL = 1.2; EST_HUMAN HIT: AU140541.1, EVALUE 1.30e-01; NT HIT: gi5730066, EVALUE 8.60e-02
cacttcccagttaccagcttcaactggtctgcaacaccctctggaactttgatgtgctagaacctttaatactttccccttccccctcagcagagttggctgagaaggagggtgccgaagaaggggttgaagaaggtgctgaagaaggag

SEQ ID NO: 23363 - DNA, 116 bp, Homo sapiens
  MAP TO AL161777.1; EXPRESSED IN ADULT LIVER, SIGNAL = 1.3; EXPRESSED IN PLACENTA, SIGNAL = 1.1; EXPRESSED IN HEART, SIGNAL = 1.2; EXPRESSED IN FETAL LIVER, SIGNAL = 1.3; EXPRESSED IN BRAIN, SIGNAL = 1.2; EXPRESSED IN LUNG, SIGNAL = 1.3; EXPRESSED IN BONE MARROW, SIGNAL = 1.5; NT HIT: X12556.1, EVALUE 3.00e-59; SWISSPROT HIT: P10911, EVALUE 2.00e-17; EST_HUMAN HIT: AL046410.1, EVALUE 5.00e-59
tcgttatggaattcatatatttctgccatgtttccaaagagaatgtcctttttatttctcaggagaggtggcataagatcaaacatctctggattatccatctccgctctataacc

SEQ ID NO: 23364 - DNA, 167 bp, Homo sapiens
  MAP TO AL158206.3; EXPRESSED IN LUNG, SIGNAL = 2.6; EXPRESSED IN PLACENTA, SIGNAL = 3.1; EXPRESSED IN HEART, SIGNAL = 3.7; EXPRESSED IN FETAL LIVER, SIGNAL = 3.2; EXPRESSED IN BONE MARROW, SIGNAL = 2.9; EXPRESSED IN ADULT LIVER, SIGNAL = 2.6; EXPRESSED IN HELA, SIGNAL = 2.4; EXPRESSED IN BRAIN, SIGNAL = 3.1; NT HIT: gi11428801, EVALUE 2.00e-89; SWISSPROT HIT: P45394, EVALUE 3.00e-08; EST_HUMAN HIT: R21117.1, EVALUE 6.00e-04
gttggagagacaattggcatcagtgaagagattatgggcctgaccatcttggctgctgggacctccatccctgatcttatcaccagtgtcatagtggcccggaaggggttaggggacatggctgtgtccagctctgttggaagcaacatttttgacatcactgtagg

SEQ ID NO: 23365 - DNA, 201 bp, Homo sapiens
  MAP TO AC011472.3; EXPRESSED IN PLACENTA, SIGNAL = 1.8; EXPRESSED IN FETAL LIVER, SIGNAL = 1.6; EXPRESSED IN BONE MARROW, SIGNAL = 1.4; EXPRESSED IN LUNG, SIGNAL = 1.7; EXPRESSED IN ADULT LIVER, SIGNAL = 1.9; EXPRESSED IN HEART, SIGNAL = 1.4; EXPRESSED IN BRAIN, SIGNAL = 1.3; EST_HUMAN HIT: BE871338.1, EVALUE 1.00e-51; SWISSPROT HIT: P55118, EVALUE 5.00e+00; NT HIT: AB037816.1, EVALUE 2.00e-74
gtgaagagtatggcgctgcacctgctgcttggccagcgactagacacaccccgcaagctgcgcttccccggacgcttcctggacgacatcactgccttggtgggctctgtgggcctggaggtcatcacccgtgtccacaaggtgagagatgcagggtctcaatgtgggaagaaacctgagggaggacatagagccagccag

SEQ ID NO: 23366 - DNA, 224 bp, Homo sapiens
  MAP TO AL118525.17; EXPRESSED IN HELA, SIGNAL = 2.3; EXPRESSED IN PLACENTA, SIGNAL = 2.5; EXPRESSED IN ADULT LIVER, SIGNAL = 2.4; EXPRESSED IN FETAL LIVER, SIGNAL = 2.2; EXPRESSED IN BONE MARROW, SIGNAL = 2.2; EXPRESSED IN LUNG, SIGNAL = 2.3; EXPRESSED IN HEART, SIGNAL = 2.6; EXPRESSED IN BRAIN, SIGNAL = 2.5; SWISSPROT HIT: Q16647, EVALUE 1.00e-29; NT HIT: D84122.1, EVALUE 1.00e-121; EST_HUMAN HIT: AW161111.1, EVALUE 5.10e-02
ctctgggtctgtgtagatttctgggtctctctgggggctcaggaaggggaagaggaggaggcggtcaccacgtcgcaggttgaattctcgcccgtctgccatgggcatggccaggtccaccacaacctcgcgggtgatgaagggggcagctgtaagcctgaggctctcactcagcacgctatctgcatggggcaggtgcaaggaagagtcagcgggctatccct

SEQ ID NO: 23367 - DNA, 90 bp, Homo sapiens
  MAP TO AC013818.3; EXPRESSED IN PLACENTA, SIGNAL = 2.3; EXPRESSED IN ADULT LIVER, SIGNAL =   3; EXPRESSED IN BRAIN, SIGNAL = 2.1; EXPRESSED IN BONE MARROW, SIGNAL = 1.8; EXPRESSED IN LUNG, SIGNAL =   2; EXPRESSED IN HELA, SIGNAL = 3.2; EXPRESSED IN HEART, SIGNAL =   2; EXPRESSED IN FETAL LIVER, SIGNAL = 1.4; EST_HUMAN HIT: AW901164.1, EVALUE 1.00e-24; NT HIT: AL163281.2, EVALUE 2.00e-19
atcttcctgtcttcttctgaacccttcaaactgttccaacttctgcccattacccagttccaaagttgcttccacattttcaggtgtcat

SEQ ID NO: 23368 - DNA, 167 bp, Homo sapiens
  MAP TO AC009695.4; EXPRESSED IN LUNG, SIGNAL = 5.2; EXPRESSED IN PLACENTA, SIGNAL =   7; EXPRESSED IN ADULT LIVER, SIGNAL = 5.8; EXPRESSED IN HEART, SIGNAL = 4.7; EXPRESSED IN FETAL LIVER, SIGNAL = 4.8; EXPRESSED IN BRAIN, SIGNAL = 5.3; EXPRESSED IN BONE MARROW, SIGNAL =   5; EXPRESSED IN HELA, SIGNAL = 5.8; NT HIT: AL163278.2, EVALUE 6.00e-06; EST_HUMAN HIT: W90525.1, EVALUE 5.00e-20; SWISSPROT HIT: P39310, EVALUE 1.30e+00
ctcttgctgttctcgtgacagtgagttctcacgagatctggctgtttgaaagtgtgtggcacttctccttcatgctctccctgtctcctgctccaccgtggtaaagacgtgcttgtttccttttcgcctctgccatgattctgagtttctttaggccttccaaccat

SEQ ID NO: 23369 - DNA, 118 bp, Homo sapiens
  MAP TO AC024193.2; EXPRESSED IN HELA, SIGNAL = 2.3; EXPRESSED IN LUNG, SIGNAL = 1.8; EXPRESSED IN ADULT LIVER, SIGNAL = 2.1; EXPRESSED IN HEART, SIGNAL = 1.5; EXPRESSED IN BRAIN, SIGNAL = 1.8; EXPRESSED IN PLACENTA, SIGNAL = 1.5; EXPRESSED IN FETAL LIVER, SIGNAL = 1.6; EXPRESSED IN BONE MARROW, SIGNAL = 1.6; SWISSPROT HIT: O31151, EVALUE 4.10e+00; NT HIT: AF052572.1, EVALUE 6.60e-02; EST_HUMAN HIT: AI791398.1, EVALUE 3.80e-01
atttagagaacagcatctggctcagagttaaggctccctgtaagttagcaatgattgttctggtagctttctgagcttgaacgagttgcttaccttctctgaatctcagttctctctt

SEQ ID NO: 23370 - DNA, 154 bp, Homo sapiens
  MAP TO AL121895.18; EXPRESSED IN HELA, SIGNAL =   8; EXPRESSED IN LUNG, SIGNAL = 4.6; EXPRESSED IN FETAL LIVER, SIGNAL = 5.8; EXPRESSED IN BONE MARROW, SIGNAL = 5.3; EXPRESSED IN PLACENTA, SIGNAL =   5; EXPRESSED IN ADULT LIVER, SIGNAL = 5.6; EXPRESSED IN HEART, SIGNAL = 5.4; EXPRESSED IN BRAIN, SIGNAL = 5.2; EST_HUMAN HIT: AA336488.1, EVALUE 2.00e-03; SWISSPROT HIT: P06131, EVALUE 7.90e-01; NT HIT: AJ251973.1, EVALUE 1.00e-03
cctcagtttcctcatttgtaaaatgaatgagcaggtaacagtacttgtgttgagtgcacagcctggtgcctggcacagggtaagctttccataaattatagcgattgttattactgtgatgatcattgccatttggctgacgaggaatcatagg

SEQ ID NO: 23371 - DNA, 96 bp, Homo sapiens
  MAP TO AC022882.3; EXPRESSED IN ADULT LIVER, SIGNAL = 7.2; EXPRESSED IN HELA, SIGNAL = 8.5; EXPRESSED IN HEART, SIGNAL = 6.9; EXPRESSED IN BONE MARROW, SIGNAL = 6.2; EXPRESSED IN LUNG, SIGNAL = 5.5; EXPRESSED IN PLACENTA, SIGNAL = 6.2; EXPRESSED IN BRAIN, SIGNAL = 5.8; EXPRESSED IN FETAL LIVER, SIGNAL = 6.4; EST_HUMAN HIT: AW848113.1, EVALUE 4.70e+00; SWISSPROT HIT: P94702, EVALUE 1.90e+00; NT HIT: AF028026.1, EVALUE 2.00e-01
cagcctcaacagtcaccaggattccagccccaagatgcactgaccacagcagtcttgggtttagggtaccacctagcactgcaacagctgccgtgg

SEQ ID NO: 23372 - DNA, 85 bp, Homo sapiens
  MAP TO AC015750.4; EXPRESSED IN BONE MARROW, SIGNAL = 2.1; EXPRESSED IN PLACENTA, SIGNAL =   1; EXPRESSED IN ADULT LIVER, SIGNAL = 0.96; EXPRESSED IN HEART, SIGNAL = 1.3; EXPRESSED IN BRAIN, SIGNAL = 1.1; EXPRESSED IN LUNG, SIGNAL =   1; EXPRESSED IN FETAL LIVER, SIGNAL = 2.7; EST_HUMAN HIT: AW263073.1, EVALUE 1.00e+00; NT HIT: U32444.2, EVALUE 2.00e-04
ttctccaacagcatctggattatgagtgtgtctacgcattttagaacagtcagcagcctcatctgcagagaatcttccagtttcc

SEQ ID NO: 23373 - DNA, 151 bp, Homo sapiens
  MAP TO AL158175.6; EXPRESSED IN LUNG, SIGNAL =   6; EXPRESSED IN BONE MARROW, SIGNAL = 4.9; EXPRESSED IN BRAIN, SIGNAL = 5.2; EXPRESSED IN FETAL LIVER, SIGNAL =   5; EXPRESSED IN HEART, SIGNAL = 5.6; EXPRESSED IN HELA, SIGNAL =   6; EXPRESSED IN ADULT LIVER, SIGNAL = 5.9; EXPRESSED IN PLACENTA, SIGNAL = 5.6; NT HIT: U39944.1, EVALUE 3.40e-01; EST_HUMAN HIT: AI188382.1, EVALUE 5.00e-04
atggagaaggatggcgacatatttctgatacctactgtgggcgcctatgagcaaaagtctttcctggatgtagttatgcagcaccacacactaacaatattcatcatcatcatcatagctaccactgaattgggggctttctctgtcccag

SEQ ID NO: 23374 - DNA, 78 bp, Homo sapiens
  MAP TO AC025747.3; EXPRESSED IN ADULT LIVER, SIGNAL = 3.9; EXPRESSED IN HELA, SIGNAL = 4.7; EXPRESSED IN BONE MARROW, SIGNAL = 2.8; EXPRESSED IN LUNG, SIGNAL = 3.4; EXPRESSED IN BRAIN, SIGNAL = 5.1; EXPRESSED IN PLACENTA, SIGNAL = 4.1; EXPRESSED IN HEART, SIGNAL =   2; EXPRESSED IN FETAL LIVER, SIGNAL = 3.2; EST_HUMAN HIT: AA148034.1, EVALUE 1.00e-36; NT HIT: gi11416392, EVALUE 1.00e-36; SWISSPROT HIT: P44360, EVALUE 5.60e+00
atacgaggaatgtctattgaccaggctttggctcagttggaattcaatgacaaaaaaggggccaaaataattaaagag

SEQ ID NO: 23375 - DNA, 85 bp, Homo sapiens
  MAP TO AC025746.2; EXPRESSED IN ADULT LIVER, SIGNAL = 1.2; EXPRESSED IN HEART, SIGNAL = 1.7; EXPRESSED IN PLACENTA, SIGNAL = 1.6; EXPRESSED IN FETAL LIVER, SIGNAL = 1.5; EXPRESSED IN BRAIN, SIGNAL = 1.4; EXPRESSED IN BONE MARROW, SIGNAL = 1.5; EXPRESSED IN LUNG, SIGNAL = 1.8; EST_HUMAN HIT: BE868267.1, EVALUE 1.00e+00; NT HIT: X03833.1, EVALUE 2.70e+00
tcatatcatcaggaatgctctgattctgctctccactgataagtagtggaggattaagcaccatattggggccttcagagtccat

SEQ ID NO: 23376 - DNA, 143 bp, Homo sapiens
  MAP TO AC018389.3; EXPRESSED IN HELA, SIGNAL = 4.8; EXPRESSED IN LUNG, SIGNAL = 3.2; EXPRESSED IN ADULT LIVER, SIGNAL = 3.4; EXPRESSED IN HEART, SIGNAL = 2.5; EXPRESSED IN BRAIN, SIGNAL = 4.4; EXPRESSED IN BONE MARROW, SIGNAL = 3.1; EXPRESSED IN PLACENTA, SIGNAL = 2.4; EXPRESSED IN FETAL LIVER, SIGNAL = 3.6; EST_HUMAN HIT: AI913753.1, EVALUE 1.20e-01; SWISSPROT HIT: P19524, EVALUE 3.10e+00; NT HIT: gi8923715, EVALUE 3.20e-01
catcaacttttgtatttaatcttgtactggaggttttaaccaatacaatagaaggaagttgaagagtatagatgggatatgataaaacaaaatagtcattattcacagttgatatgatgtctacgtagtctttcgcagagaat

SEQ ID NO: 23377 - DNA, 96 bp, Homo sapiens
  MAP TO AP001441.1; EXPRESSED IN PLACENTA, SIGNAL =   2; EXPRESSED IN FETAL LIVER, SIGNAL = 1.7; EXPRESSED IN ADULT LIVER, SIGNAL = 0.95; EXPRESSED IN HELA, SIGNAL =   3; EXPRESSED IN BONE MARROW, SIGNAL = 1.8; EXPRESSED IN HEART, SIGNAL = 2.1; EXPRESSED IN BRAIN, SIGNAL = 1.9; NT HIT: D87675.1, EVALUE 2.00e-47; EST_HUMAN HIT: AW118263.1, EVALUE 7.50e-02
taatcttaaggtgatttatagataaaagtcccatcctataaatgtctggattcttgagcccagagatattctgggtctgtctgtactggtattctg

SEQ ID NO: 23378 - DNA, 117 bp, Homo sapiens
  MAP TO AC008773.3; EXPRESSED IN PLACENTA, SIGNAL =   3; EXPRESSED IN LUNG, SIGNAL = 2.7; EXPRESSED IN ADULT LIVER, SIGNAL =   4; EXPRESSED IN HELA, SIGNAL = 4.1; EXPRESSED IN HEART, SIGNAL = 2.6; EXPRESSED IN FETAL LIVER, SIGNAL = 2.7; EXPRESSED IN BRAIN, SIGNAL = 2.3; EXPRESSED IN BONE MARROW, SIGNAL = 2.4; NT HIT: X17033.1, EVALUE 8.00e-60; EST_HUMAN HIT: BE006077.1, EVALUE 4.00e-50; SWISSPROT HIT: P17301, EVALUE 8.00e-03
attcccctgatgataatgaaacctgatgagaaagccgaagtaccaacaggagttataataggaagtataattgctggaatccttttgctgttagctctggttgcaattttatggaag

SEQ ID NO: 23379 - DNA, 271 bp, Homo sapiens
  MAP TO AC007009.2; EXPRESSED IN HELA, SIGNAL = 3.8; EXPRESSED IN LUNG, SIGNAL = 2.1; EXPRESSED IN ADULT LIVER, SIGNAL = 2.5; EXPRESSED IN FETAL LIVER, SIGNAL = 2.3; EXPRESSED IN BRAIN, SIGNAL = 2.3; EXPRESSED IN BONE MARROW, SIGNAL = 2.3; EXPRESSED IN PLACENTA, SIGNAL = 2.1; EXPRESSED IN HEART, SIGNAL = 3.7; SWISSPROT HIT: Q05084, EVALUE 2.00e-47; NT HIT: L21181.1, EVALUE 0.00e+00; EST_HUMAN HIT: BE736046.1, EVALUE 0.00e+00
cttgtagcgaggcctgtaagtctttcatattttggtctaaaagctgcgaaggaaggaaacctgagcctgtctgggccttggggtctggctctcccagggccatagtgggcactggctccttcacttggccgtctccaaacacagcggcccactctttgctgaactcgccctcttccaaggaggaagcattgaagatctcactcaacagcagcaggtcatctttgtcagcaccttcaggttccggggtccctgccactggtcccaggcaagc

SEQ ID NO: 23380 - DNA, 161 bp, Homo sapiens
  MAP TO AC009924.4; EXPRESSED IN ADULT LIVER, SIGNAL = 2.1; EXPRESSED IN HELA, SIGNAL = 2.2; EXPRESSED IN LUNG, SIGNAL = 1.9; EXPRESSED IN PLACENTA, SIGNAL = 1.7; EXPRESSED IN FETAL LIVER, SIGNAL = 1.8; EXPRESSED IN BONE MARROW, SIGNAL = 1.9; EXPRESSED IN HEART, SIGNAL = 1.6; EXPRESSED IN BRAIN, SIGNAL = 2.1; EST_HUMAN HIT: AI732837.1, EVALUE 2.00e-16; NT HIT: AF009660.1, EVALUE 6.00e-06; SWISSPROT HIT: P11260, EVALUE 1.00e+00
gccttagcaatctgtgggacaacatcaaatgtgccaacttatgtgttgtggtagttacagaagaagagatggtgggggaggaaaggatattggaaaacaaaataatggctgaaaacttcccaaatctgatgaaagacataaatataaacatccaagaattt

SEQ ID NO: 23381 - DNA, 114 bp, Homo sapiens
  MAP TO AC009155.3; EXPRESSED IN ADULT LIVER, SIGNAL = 8.3; EXPRESSED IN HELA, SIGNAL =  11; EXPRESSED IN HEART, SIGNAL = 6.8; EXPRESSED IN FETAL LIVER, SIGNAL = 9.7; EXPRESSED IN BRAIN, SIGNAL = 7.7; EXPRESSED IN BONE MARROW, SIGNAL = 7.5; EXPRESSED IN LUNG, SIGNAL = 7.5; EXPRESSED IN PLACENTA, SIGNAL = 9.1; EST_HUMAN HIT: AU134133.1, EVALUE 7.00e-58; NT HIT: gi8922693, EVALUE 5.00e-58
catgagattttgtatgattggatcaaccctacttatctggacatggattaccaagttcaaattcaagaagagtttgaagaaagttctgaaattctcctgaaggagtttcttaag

SEQ ID NO: 23382 - DNA, 231 bp, Homo sapiens
  MAP TO AL133174.9; EXPRESSED IN PLACENTA, SIGNAL = 1.9; EXPRESSED IN HEART, SIGNAL = 2.2; EXPRESSED IN FETAL LIVER, SIGNAL = 2.7; EXPRESSED IN BRAIN, SIGNAL = 2.2; EXPRESSED IN LUNG, SIGNAL = 2.2; EXPRESSED IN ADULT LIVER, SIGNAL =   2; EXPRESSED IN BONE MARROW, SIGNAL = 2.4; NT HIT: AJ132258.1, EVALUE 1.00e-118; SWISSPROT HIT: Q9Z108, EVALUE 4.00e-05; EST_HUMAN HIT: BE781223.1, EVALUE 1.00e-118
cttgactatgggttttgttttctttttgattctaggctttactcgttcaactgcaggcaggggcggtaacttcttcagctcctcaagaacagctatggcggcatttttctttgaaatcttcttgcttttcccttcaccttcccccacaaactccccaaccgaaaccttggtcacaaagttcttcatgtggggtgggccactctcccgggccacctgtttcagagggaaaga

SEQ ID NO: 23383 - DNA, 217 bp, Homo sapiens
  MAP TO AL117336.16; EXPRESSED IN PLACENTA, SIGNAL = 1.7; EXPRESSED IN ADULT LIVER, SIGNAL = 1.7; EXPRESSED IN HEART, SIGNAL = 1.3; EXPRESSED IN FETAL LIVER, SIGNAL = 1.6; EXPRESSED IN BRAIN, SIGNAL = 1.3; EXPRESSED IN LUNG, SIGNAL = 1.5; EXPRESSED IN HELA, SIGNAL = 2.2; EXPRESSED IN BONE MARROW, SIGNAL = 1.6; SWISSPROT HIT: Q93084, EVALUE 9.30e-01; NT HIT: gi11423294, EVALUE 1.30e-01
ttggtgtgaaattcaaggacactttaaagcaggaattgataaggaagctatagcagggtttctccctcccagcactgttgacattagggggggctgccctatccattgcaggatgtttagcggcctcccacctctgtccaccagatgccatgccagctgcagcaacagcaccctccataacaacaacaaaaaaatgtttccagatgtggccaaatga

SEQ ID NO: 23384 - DNA, 112 bp, Homo sapiens
  MAP TO AC021186.2; EXPRESSED IN PLACENTA, SIGNAL = 2.8; EXPRESSED IN ADULT LIVER, SIGNAL = 2.8; EXPRESSED IN HEART, SIGNAL = 2.4; EXPRESSED IN FETAL LIVER, SIGNAL = 2.4; EXPRESSED IN BRAIN, SIGNAL = 2.2; EXPRESSED IN BONE MARROW, SIGNAL = 2.5; EXPRESSED IN LUNG, SIGNAL = 2.9; EXPRESSED IN HELA, SIGNAL = 3.3; EST_HUMAN HIT: AW799337.1, EVALUE 6.00e-03
aagtcacactataaaaattatgctcacactcctactcctatgaaaaccaggaggaggacaatgatgaaggcagtgaagatgactaatgaaaattttctggaacattttaaag

SEQ ID NO: 23385 - DNA, 225 bp, Homo sapiens
  MAP TO AL138796.2; EXPRESSED IN HELA, SIGNAL = 6.3; EXPRESSED IN HEART, SIGNAL = 5.9; EXPRESSED IN BRAIN, SIGNAL = 3.4; EXPRESSED IN BONE MARROW, SIGNAL = 3.8; EXPRESSED IN PLACENTA, SIGNAL = 2.6; EXPRESSED IN ADULT LIVER, SIGNAL = 1.2; EXPRESSED IN FETAL LIVER, SIGNAL = 3.8; EST_HUMAN HIT: AI950145.1, EVALUE 1.00e-117; SWISSPROT HIT: P25691, EVALUE 1.00e+00; NT HIT: gi11036643, EVALUE 1.00e-117
ttaatgatttacctggttatgtttccaagaagcctctttctgctgttcactctcgtgtgctgcagcctctacaaattgcacacattgtttggcatcagccagttggcgctctttctgtcgtaccaccctctggagcttctgtatttcaagttggctgcagaataaagcactctgaagatcaagcagagctacctgttgctgagctggagaagtaccctctgagct

SEQ ID NO: 23386 - DNA, 85 bp, Homo sapiens
  MAP TO AL121917.12; EXPRESSED IN ADULT LIVER, SIGNAL = 2.8; EXPRESSED IN LUNG, SIGNAL = 3.1; EXPRESSED IN BONE MARROW, SIGNAL = 3.4; EXPRESSED IN BRAIN, SIGNAL =   3; EXPRESSED IN FETAL LIVER, SIGNAL = 3.4; EXPRESSED IN HEART, SIGNAL = 2.7; EXPRESSED IN HELA, SIGNAL = 3.9; EXPRESSED IN PLACENTA, SIGNAL = 2.9; SWISSPROT HIT: O83790, EVALUE 9.60e+00; NT HIT: AL161573.2, EVALUE 6.90e-01
atgcctgtgccacaggtcgttgaaccgcgtcccagaaacgatgtgtgggaggggattcctgtggggcccatcgaaaccctgcctg

SEQ ID NO: 23387 - DNA, 146 bp, Homo sapiens
  MAP TO AC011111.3; EXPRESSED IN HELA, SIGNAL = 3.8; EXPRESSED IN HEART, SIGNAL = 3.4; EXPRESSED IN BRAIN, SIGNAL =   3; EXPRESSED IN BONE MARROW, SIGNAL = 3.6; EXPRESSED IN PLACENTA, SIGNAL = 3.1; EXPRESSED IN ADULT LIVER, SIGNAL =   3; EXPRESSED IN FETAL LIVER, SIGNAL = 3.6; EXPRESSED IN LUNG, SIGNAL = 3.5; NT HIT: AF195787.1, EVALUE 8.30e-02; SWISSPROT HIT: O14647, EVALUE 4.00e+00
ggtggaagcagcagggacactcagaagatgagagagagcaaggacagtttgcaggatctaagcggcctgagaaaaccgtgaggctgagtttctactgggtcctcattaaagtcaagcaaatggagctgagcctggtggaagtcaag

SEQ ID NO: 23388 - DNA, 260 bp, Homo sapiens
  MAP TO AP001440.1; EXPRESSED IN LUNG, SIGNAL = 7.2; EXPRESSED IN PLACENTA, SIGNAL = 3.2; EXPRESSED IN FETAL LIVER, SIGNAL = 3.3; EXPRESSED IN BRAIN, SIGNAL =  10; EXPRESSED IN HEART, SIGNAL =   4; EXPRESSED IN HELA, SIGNAL = 3.9; EXPRESSED IN ADULT LIVER, SIGNAL = 7.1; EXPRESSED IN BONE MARROW, SIGNAL = 2.4; EST_HUMAN HIT: AW582310.1, EVALUE 4.00e-86; SWISSPROT HIT: P08592, EVALUE 2.00e-24; NT HIT: M34872.1, EVALUE 0.00e+00
tcattctttttgtatggcttccagttcccagtgccccacccttactgtctgtgctgtgacctgaagtgtgaactcggctgcagcgagacctacccgaggaggaacagcctgcagagcggtgatgtagttctccagggccaggcggcggcggtcattgagcatggcttccactctggccatgtgtgtctccaccagctgctgtctctcgttggctgcttcctgttccaaagattccactttctcctggaaatgctgccatc

SEQ ID NO: 23389 - DNA, 118 bp, Homo sapiens
  MAP TO AC015897.3; EXPRESSED IN LUNG, SIGNAL = 1.3; EXPRESSED IN ADULT LIVER, SIGNAL = 1.6; EXPRESSED IN HEART, SIGNAL = 1.6; EXPRESSED IN FETAL LIVER, SIGNAL = 1.3; EXPRESSED IN BRAIN, SIGNAL = 1.3; EXPRESSED IN PLACENTA, SIGNAL = 1.5; EXPRESSED IN BONE MARROW, SIGNAL = 1.1; EST_HUMAN HIT: N22798.1, EVALUE 9.70e-02; NT HIT: gi11526162, EVALUE 2.60e-01
ctctggaggtcagaagacagaaacgactcaaattaaggtggcattccttctgcaggatctaaaggagaatccagttatttttcccttcaatattctggaggctgcctacatgccttgg

SEQ ID NO: 23390 - DNA, 90 bp, Homo sapiens
  MAP TO AC015638.4; EXPRESSED IN PLACENTA, SIGNAL = 1.3; EXPRESSED IN ADULT LIVER, SIGNAL = 1.4; EXPRESSED IN HEART, SIGNAL = 1.2; EXPRESSED IN FETAL LIVER, SIGNAL = 1.2; EXPRESSED IN BRAIN, SIGNAL = 1.5; EXPRESSED IN LUNG, SIGNAL = 1.2; EXPRESSED IN BONE MARROW, SIGNAL = 1.2; NT HIT: AF078779.1, EVALUE 4.00e-27
acacagcagcaagagaaacatgcctactatgataaagaagctcttgtacatgctgacgaccactgtcaagaggagcatctttagcgttac

SEQ ID NO: 23391 - DNA, 239 bp, Homo sapiens
  MAP TO AC022860.3; EXPRESSED IN LUNG, SIGNAL = 3.7; EXPRESSED IN PLACENTA, SIGNAL = 3.6; EXPRESSED IN ADULT LIVER, SIGNAL = 4.7; EXPRESSED IN HEART, SIGNAL = 5.3; EXPRESSED IN FETAL LIVER, SIGNAL =   6; EXPRESSED IN BRAIN, SIGNAL = 6.4; EXPRESSED IN HELA, SIGNAL = 6.4; EXPRESSED IN BONE MARROW, SIGNAL = 5.1; SWISSPROT HIT: P52491, EVALUE 8.00e-15; NT HIT: AB012191.1, EVALUE 1.00e-106; EST_HUMAN HIT: BE741408.1, EVALUE 1.00e-106
aaatcgagggcaacgtctgcctcaacatcctcagagagaactggaagccagtccttacgataaactccataatttatggcctgcagtatctctacttggagcccaaccccgaggacccactgaacaagaaggccgcagaggtcctgcagaacaaccggcagctgttggagcagaacgtgcagccatccatgcgggatggctacataggctccacctacttcgagcgctgcctgaaatag

SEQ ID NO: 23392 - DNA, 91 bp, Homo sapiens
  MAP TO AC023296.2; EXPRESSED IN LUNG, SIGNAL = 1.7; EXPRESSED IN PLACENTA, SIGNAL = 1.8; EXPRESSED IN ADULT LIVER, SIGNAL = 1.7; EXPRESSED IN FETAL LIVER, SIGNAL = 1.7; EXPRESSED IN BRAIN, SIGNAL = 1.5; EXPRESSED IN HEART, SIGNAL = 1.6; EXPRESSED IN BONE MARROW, SIGNAL = 1.4; NT HIT: AL161557.2, EVALUE 1.90e-01; EST_HUMAN HIT: BE894098.1, EVALUE 1.10e+00
caccaacgaaggcctttcctgcatcctgtattggtaatgaccaaaaggatgagattacggatgtttgtaagcagtagagcagcaatcaact

SEQ ID NO: 23393 - DNA, 201 bp, Homo sapiens
  MAP TO AC025738.1; EXPRESSED IN LUNG, SIGNAL = 1.6; EXPRESSED IN PLACENTA, SIGNAL = 1.5; EXPRESSED IN FETAL LIVER, SIGNAL = 1.5; EXPRESSED IN BONE MARROW, SIGNAL = 1.5; EXPRESSED IN ADULT LIVER, SIGNAL = 1.7; EXPRESSED IN HEART, SIGNAL = 1.5; EXPRESSED IN BRAIN, SIGNAL = 1.8; NT HIT: U66707.1, EVALUE 2.00e-83; EST_HUMAN HIT: AW204480.1, EVALUE 3.00e-80; SWISSPROT HIT: P56145, EVALUE 7.50e-01
ctccactgtaatctcctttggggctaccggccacttgtgttcatatttttctttcacagtttgctccgtgttagcagttggatttgaattctcaacacgcactccatggcttggcttacccaccaaattttgaacagattttaccatattctttaaatcctctgggtaaggagttggatatcgttttaggtttatttcaac

SEQ ID NO: 23394 - DNA, 229 bp, Homo sapiens
  MAP TO AC015649.5; EXPRESSED IN PLACENTA, SIGNAL = 2.4; EXPRESSED IN ADULT LIVER, SIGNAL = 2.5; EXPRESSED IN HELA, SIGNAL = 3.1; EXPRESSED IN BRAIN, SIGNAL = 2.6; EXPRESSED IN BONE MARROW, SIGNAL = 4.9; EXPRESSED IN LUNG, SIGNAL = 2.6; EXPRESSED IN HEART, SIGNAL = 2.8; EXPRESSED IN FETAL LIVER, SIGNAL = 5.8; SWISSPROT HIT: P16157, EVALUE 1.00e-40; NT HIT: X16609.1, EVALUE 1.00e-126; EST_HUMAN HIT: BE766551.1, EVALUE 2.00e-04
gttttggctgtcggactgtcctcggactgctgaggctgtgaactttgccaccctgctgtacaaagagctcactgcagtgccctacatggccaaattcgtcatctttgccaagatgaatgacccccgagaggggcgcctgcgctgctactgcatgacagatgataaagtggacaagaccctggagcagcatgagaacttcgtggaggtggcccggagcagggacatagag

SEQ ID NO: 23395 - DNA, 225 bp, Homo sapiens
  MAP TO AL157405.2; EXPRESSED IN LUNG, SIGNAL = 2.6; EXPRESSED IN ADULT LIVER, SIGNAL =   2; EXPRESSED IN HEART, SIGNAL = 2.8; EXPRESSED IN BRAIN, SIGNAL = 2.3; EXPRESSED IN PLACENTA, SIGNAL = 2.7; EXPRESSED IN FETAL LIVER, SIGNAL = 2.3; EXPRESSED IN BONE MARROW, SIGNAL = 2.3; EST_HUMAN HIT: AW901489.1, EVALUE 8.00e-01; NT HIT: AF030001.1, EVALUE 2.10e+00
cgcagcacgttgacatggcagtgatgacaatggtagtgatggtgcaaaaggtagtggatgtgatagtggtggtagcaatggagatgggggaggtggtgaaagtggcagcgacggtgggaataagtgaagatcaaagtggcagtccttgtgattgtgatggcgatggcgatactggtgaaggtgatgaagttggtgcagctggtggaggtggtggtggtgatggtg

SEQ ID NO: 23396 - DNA, 84 bp, Homo sapiens
  MAP TO AL162261.1; EXPRESSED IN LUNG, SIGNAL = 3.3; EXPRESSED IN PLACENTA, SIGNAL =   7; EXPRESSED IN ADULT LIVER, SIGNAL = 4.6; EXPRESSED IN HEART, SIGNAL = 3.8; EXPRESSED IN FETAL LIVER, SIGNAL = 4.4; EXPRESSED IN BRAIN, SIGNAL = 6.2; EXPRESSED IN BONE MARROW, SIGNAL = 4.8; EXPRESSED IN HELA, SIGNAL = 4.4; SWISSPROT HIT: P31152, EVALUE 3.80e-01; NT HIT: AF040249.1, EVALUE 1.70e-01; EST_HUMAN HIT: AA742809.1, EVALUE 4.00e-40
agcctccacgtgggtcagggagtcaaggacggcagccacctcctcagtgtggacacaggccccgcccccacgccctgcagccag

SEQ ID NO: 23397 - DNA, 128 bp, Homo sapiens
  MAP TO AC024193.2; EXPRESSED IN BONE MARROW, SIGNAL = 2.6; EXPRESSED IN PLACENTA, SIGNAL =   4; EXPRESSED IN ADULT LIVER, SIGNAL = 3.9; EXPRESSED IN HELA, SIGNAL = 5.5; EXPRESSED IN HEART, SIGNAL = 2.1; EXPRESSED IN LUNG, SIGNAL = 4.4; EXPRESSED IN FETAL LIVER, SIGNAL = 2.6; EXPRESSED IN BRAIN, SIGNAL = 2.2; SWISSPROT HIT: P08009, EVALUE 5.40e+00; EST_HUMAN HIT: AW957448.1, EVALUE 4.20e-01
cttacacttctcctggatggtgtctgcctcagggatgttggcaaggaattctatgtaaactggatagaggcccacaatctgggacaaaaacccttcaaaggttggagaataggcataaaggaatgtag

SEQ ID NO: 23398 - DNA, 105 bp, Homo sapiens
  MAP TO AC015954.3; EXPRESSED IN PLACENTA, SIGNAL = 1.7; EXPRESSED IN ADULT LIVER, SIGNAL = 1.9; EXPRESSED IN FETAL LIVER, SIGNAL = 1.9; EXPRESSED IN BRAIN, SIGNAL = 2.2; EXPRESSED IN BONE MARROW, SIGNAL =   2; EXPRESSED IN LUNG, SIGNAL = 1.8; EXPRESSED IN HELA, SIGNAL = 2.5; EXPRESSED IN HEART, SIGNAL = 2.3; SWISSPROT HIT: P09081, EVALUE 7.20e+00; NT HIT: M68931.1, EVALUE 2.30e-01
ggcagctacacacagatagccacacctccggacttcataggagatgagagagaaatacaagtcaattacaactacgttaaaacggctctgtccattgaacattga

SEQ ID NO: 23399 - DNA, 238 bp, Homo sapiens
  MAP TO AL121586.28; EXPRESSED IN HELA, SIGNAL = 3.8; EXPRESSED IN FETAL LIVER, SIGNAL = 2.3; EXPRESSED IN BONE MARROW, SIGNAL = 2.3; EXPRESSED IN LUNG, SIGNAL = 2.2; EXPRESSED IN PLACENTA, SIGNAL = 2.3; EXPRESSED IN ADULT LIVER, SIGNAL = 2.6; EXPRESSED IN HEART, SIGNAL = 2.1; EXPRESSED IN BRAIN, SIGNAL = 2.2; NT HIT: AF192554.1, EVALUE 2.20e+00; SWISSPROT HIT: Q11205, EVALUE 1.20e-02
atcacctccttcctacaccagcactccagccagaaggacctccgtaatatggccaagatacacccaggaatctgccaccatcccagcaacttttccagaaaatgcaactgctcatctgaggtccacacatgctctgcctgcctccacgtgcctggcgagtctgactggtttgacagacgcttcgacagtaccgttgaacccctacagaggccacaagatcccacgtccaatgatgctc

SEQ ID NO: 23400 - DNA, 143 bp, Homo sapiens
  MAP TO AC021880.2; EXPRESSED IN ADULT LIVER, SIGNAL = 2.6; EXPRESSED IN HELA, SIGNAL = 3.5; EXPRESSED IN HEART, SIGNAL = 2.7; EXPRESSED IN BRAIN, SIGNAL = 2.6; EXPRESSED IN BONE MARROW, SIGNAL =   3; EXPRESSED IN LUNG, SIGNAL = 2.7; EXPRESSED IN PLACENTA, SIGNAL = 2.5; EXPRESSED IN FETAL LIVER, SIGNAL = 2.9; SWISSPROT HIT: P23622, EVALUE 2.30e+00; NT HIT: AL163283.2, EVALUE 1.00e-06; EST_HUMAN HIT: AW900159.1, EVALUE 8.00e-09
agtccgtaatcacatctgcaaagccctttttgccacgtcaggtgacatattcactggttctaggagtagggtatttggggaggagtagatgtatttgtgggggcaggtggcaaagatcaggaatctcaaggtctttttcctgc

SEQ ID NO: 23401 - DNA, 89 bp, Homo sapiens
  MAP TO AC021782.2; EXPRESSED IN BONE MARROW, SIGNAL =  11; EXPRESSED IN PLACENTA, SIGNAL = 8.4; EXPRESSED IN ADULT LIVER, SIGNAL =  12; EXPRESSED IN HEART, SIGNAL = 7.9; EXPRESSED IN BRAIN, SIGNAL = 9.7; EXPRESSED IN LUNG, SIGNAL =   9; EXPRESSED IN HELA, SIGNAL =  15; EXPRESSED IN FETAL LIVER, SIGNAL = 9.5; EST_HUMAN HIT: F06752.1, EVALUE 2.00e-05; NT HIT: AF135416.1, EVALUE 8.00e-07
ttatgagattgtaacaattgctattgctatttccactatatctgcagtgatttcctccactgaaatctttaattcctgaaagtcatcca

SEQ ID NO: 23402 - DNA, 150 bp, Homo sapiens
  MAP TO AF241727.1; EXPRESSED IN FETAL LIVER, SIGNAL = 0.99; EXPRESSED IN PLACENTA, SIGNAL = 1.3; EXPRESSED IN ADULT LIVER, SIGNAL = 1.3; EXPRESSED IN HEART, SIGNAL = 1.3; EXPRESSED IN BONE MARROW, SIGNAL = 1.2; EXPRESSED IN LUNG, SIGNAL = 1.3; EXPRESSED IN BRAIN, SIGNAL = 1.2; EST_HUMAN HIT: BF690522.1, EVALUE 1.30e-01; SWISSPROT HIT: Q9Y487, EVALUE 1.80e+00
accccactaaggggaaagacaaccagggctccattcaaaatcatccaagggagctatggggcatgtgcaagggttcctctgctgccagctatcctaattcttgatggctttgcaggagaagtgactctctttggggaagaagaaaagaag

SEQ ID NO: 23403 - DNA, 79 bp, Homo sapiens
  MAP TO AC006038.2; EXPRESSED IN ADULT LIVER, SIGNAL = 1.8; EXPRESSED IN HELA, SIGNAL = 2.2; EXPRESSED IN BONE MARROW, SIGNAL = 1.8; EXPRESSED IN LUNG, SIGNAL = 1.8; EXPRESSED IN BRAIN, SIGNAL = 1.7; EXPRESSED IN PLACENTA, SIGNAL = 1.5; EXPRESSED IN HEART, SIGNAL = 1.5; EXPRESSED IN FETAL LIVER, SIGNAL = 1.6; NT HIT: U32716.1, EVALUE 9.80e+00
tggccacaactctgtgccacatcctcttcattttagaatccaggatgaaggatatgcccttatctggtatgttgccatt

SEQ ID NO: 23404 - DNA, 113 bp, Homo sapiens
  MAP TO AC021804.3; EXPRESSED IN PLACENTA, SIGNAL = 1.8; EXPRESSED IN FETAL LIVER, SIGNAL = 1.7; EXPRESSED IN LUNG, SIGNAL = 2.1; EXPRESSED IN BRAIN, SIGNAL =   2; EXPRESSED IN BONE MARROW, SIGNAL = 1.9; EXPRESSED IN ADULT LIVER, SIGNAL =   2; EXPRESSED IN HEART, SIGNAL = 1.9; SWISSPROT HIT: Q00106, EVALUE 1.80e+00; EST_HUMAN HIT: T49920.1, EVALUE 9.20e-02
caaacctgattgccaggatgagtggtaggagctgccaaaaacctcacgggaccttccaccagccccagagagagagcctgcccttcatccagcactgccagtgggacaaagag

SEQ ID NO: 23405 - DNA, 104 bp, Homo sapiens
  MAP TO AC020919.3; EXPRESSED IN PLACENTA, SIGNAL = 1.1; EXPRESSED IN ADULT LIVER, SIGNAL = 1.3; EXPRESSED IN HEART, SIGNAL = 1.5; EXPRESSED IN FETAL LIVER, SIGNAL = 1.3; EXPRESSED IN BRAIN, SIGNAL = 1.5; EXPRESSED IN BONE MARROW, SIGNAL = 1.2; EXPRESSED IN LUNG, SIGNAL = 1.6; EST_HUMAN HIT: AA865285.1, EVALUE 8.30e-02; NT HIT: M19480.1, EVALUE 8.80e-01
atgtacccacaaaaattaaaaatgaaaatgaaaataatcaagaaaaagatgggagcaatagactggagactactagacaggggagagatggaggggagaaggac

SEQ ID NO: 23406 - DNA, 180 bp, Homo sapiens
  MAP TO AC008103.27; EXPRESSED IN ADULT LIVER, SIGNAL = 1.8; EXPRESSED IN HELA, SIGNAL = 2.4; EXPRESSED IN HEART, SIGNAL = 1.8; EXPRESSED IN BRAIN, SIGNAL = 1.9; EXPRESSED IN PLACENTA, SIGNAL = 1.7; EXPRESSED IN BONE MARROW, SIGNAL = 2.3; EXPRESSED IN LUNG, SIGNAL = 1.7; EXPRESSED IN FETAL LIVER, SIGNAL = 2.5; EST_HUMAN HIT: AL043314.2, EVALUE 5.00e-97; SWISSPROT HIT: P11274, EVALUE 3.00e-25; NT HIT: U07000.1, EVALUE 7.00e-83
ctgggacatgacctccaaggaccagctgtcagtcatggtgatgggctggctggggttggcagggagcttgctctccttctcggagggccggagcagcgtggggccaaacaccgtgccaaggttgtgcagggacatcttattgactgcctccttctctgccatcctgtagaggaccgaagc

SEQ ID NO: 23407 - DNA, 137 bp, Homo sapiens
  MAP TO AL161668.1; EXPRESSED IN PLACENTA, SIGNAL = 1.2; EXPRESSED IN ADULT LIVER, SIGNAL = 1.3; EXPRESSED IN HEART, SIGNAL = 1.5; EXPRESSED IN FETAL LIVER, SIGNAL = 1.4; EXPRESSED IN BRAIN, SIGNAL = 1.1; EXPRESSED IN BONE MARROW, SIGNAL = 1.2; EXPRESSED IN LUNG, SIGNAL = 1.5; EST_HUMAN HIT: BE903559.1, EVALUE 9.00e-15; NT HIT: M14174.1, EVALUE 7.80e-02; SWISSPROT HIT: P46688, EVALUE 3.10e+00
gtcacacactcaaaaagggggtccagcggggccaccagattgtccaggtgctgctctgcctggatcagctgttgctccaactgcaatgggtgcttcttgcctgactcctcttggagaactgcagcttcatctttccc

SEQ ID NO: 23408 - DNA, 330 bp, Homo sapiens
  MAP TO AC012571.3; EXPRESSED IN ADULT LIVER, SIGNAL =   3; EXPRESSED IN HEART, SIGNAL = 1.7; EXPRESSED IN FETAL LIVER, SIGNAL =   3; EXPRESSED IN BRAIN, SIGNAL = 3.9; EXPRESSED IN LUNG, SIGNAL = 2.3; EXPRESSED IN HELA, SIGNAL = 2.9; EXPRESSED IN PLACENTA, SIGNAL = 2.1; EXPRESSED IN BONE MARROW, SIGNAL = 2.5; SWISSPROT HIT: P10272, EVALUE 7.00e-12; EST_HUMAN HIT: AA397551.1, EVALUE 0.00e+00; NT HIT: gi9635487, EVALUE 0.00e+00
ctatattcactctttgttgagtctcccacaattaccattgttcctggcctggacttcaatccagcctcccacattattccggataccacacctgacccccatgactatatctctctgatccacctgacattcacttcacttctccatatttccttctttcctgttcctcaccctgatcacacttggtttattgatggcagttccaccaggcctaattgccactcaccagcaaaggcaggctatgctatagtatcttccacatctatcattgaggctactgctctgcccccctccactacctgtcagcaagccgaactcattgccttaact

SEQ ID NO: 23409 - DNA, 166 bp, Homo sapiens
  MAP TO AL161788.2; EXPRESSED IN ADULT LIVER, SIGNAL = 3.6; EXPRESSED IN HELA, SIGNAL = 3.2; EXPRESSED IN HEART, SIGNAL =   3; EXPRESSED IN BRAIN, SIGNAL = 3.3; EXPRESSED IN LUNG, SIGNAL = 2.9; EXPRESSED IN PLACENTA, SIGNAL =   3; EXPRESSED IN FETAL LIVER, SIGNAL = 3.2; EXPRESSED IN BONE MARROW, SIGNAL = 3.4; EST_HUMAN HIT: BE748142.1, EVALUE 2.00e-28; NT HIT: gi8922793, EVALUE 1.00e-28; SWISSPROT HIT: Q01688, EVALUE 8.00e-05
atggtgcggaagcttaaattccatgtgcagaacctgctgaagcaggtggacttcctgaattgggaggtcactgatcacaacctgcatgagctgtgcatacagtggcattaccagttgaagcagtgggaggacaacaggtgctacaatcagctgagccataccgtgt

SEQ ID NO: 23410 - DNA, 103 bp, Homo sapiens
  MAP TO AC020719.3; EXPRESSED IN LUNG, SIGNAL = 2.6; EXPRESSED IN PLACENTA, SIGNAL = 2.4; EXPRESSED IN HEART, SIGNAL = 2.2; EXPRESSED IN FETAL LIVER, SIGNAL = 3.1; EXPRESSED IN BONE MARROW, SIGNAL = 2.5; EXPRESSED IN ADULT LIVER, SIGNAL = 2.4; EXPRESSED IN HELA, SIGNAL = 2.6; EXPRESSED IN BRAIN, SIGNAL =   2; EST_HUMAN HIT: AA974740.1, EVALUE 3.30e-01; NT HIT: AF155143.1, EVALUE 2.20e-01
tttgtttttaatgaaatgggctggtgggtgaattggactctttcaaggagctctcccaggacaaagacatggtcatgcatattcaccagaccatatccagcat

SEQ ID NO: 23411 - DNA, 288 bp, Homo sapiens
  MAP TO AP001429.1; EXPRESSED IN HELA, SIGNAL = 6.8; EXPRESSED IN BONE MARROW, SIGNAL =   8; EXPRESSED IN LUNG, SIGNAL = 4.3; EXPRESSED IN HEART, SIGNAL = 7.5; EXPRESSED IN PLACENTA, SIGNAL = 6.2; EXPRESSED IN ADULT LIVER, SIGNAL = 2.6; EXPRESSED IN FETAL LIVER, SIGNAL = 7.2; EXPRESSED IN BRAIN, SIGNAL =   7; SWISSPROT HIT: P53804, EVALUE 1.00e-49; EST_HUMAN HIT: AU142402.1, EVALUE 0.00e+00; NT HIT: D83077.1, EVALUE 0.00e+00
acagaattctacagtgtataaagcagtatgctgacaagattaaatccggcatacagaatacagccatgcttctcaaagaattgctttcttggaaagttttgagcacagaagactatacaacctgtttttctagcagaaattttctaaatgaagcagtggactatgttattcgccacttgattcaagaaaataacagagtaaagacaagaatatttctgcatgttttgagtgagcttaaagaagtggagcccaaattagccgcctggatccaaaaacttaatagctttg

SEQ ID NO: 23412 - DNA, 218 bp, Homo sapiens
  MAP TO AL157773.3; EXPRESSED IN LUNG, SIGNAL = 4.1; EXPRESSED IN ADULT LIVER, SIGNAL = 4.4; EXPRESSED IN HEART, SIGNAL = 3.8; EXPRESSED IN FETAL LIVER, SIGNAL = 3.6; EXPRESSED IN BRAIN, SIGNAL = 3.2; EXPRESSED IN BONE MARROW, SIGNAL = 3.8; EXPRESSED IN PLACENTA, SIGNAL =   4; EXPRESSED IN HELA, SIGNAL = 6.4; SWISSPROT HIT: P23934, EVALUE 2.70e+00; NT HIT: AB008676.1, EVALUE 2.00e+00
attggtgaggtatagacccgtcaaagttgttggtaataacagcaaggtccatctggcaagattggtcacctgtggtggaagtggtggtgacagcagggatgcaactgcagcaatcaatgatgatgatctcactagggtggggaggtgttaaaggcatcttcacagcagcacagtgcccagaatgccaaagagcagcaggatggatccagcatcctctc

SEQ ID NO: 23413 - DNA, 259 bp, Homo sapiens
  MAP TO AP001429.1; EXPRESSED IN HELA, SIGNAL = 8.4; EXPRESSED IN ADULT LIVER, SIGNAL = 7.4; EXPRESSED IN BONE MARROW, SIGNAL = 6.1; EXPRESSED IN LUNG, SIGNAL = 7.1; EXPRESSED IN PLACENTA, SIGNAL =  11; EXPRESSED IN HEART, SIGNAL = 6.4; EXPRESSED IN FETAL LIVER, SIGNAL = 5.9; EXPRESSED IN BRAIN, SIGNAL = 6.6; NT HIT: D83077.1, EVALUE 5.00e-88; EST_HUMAN HIT: T05087.1, EVALUE 1.00e-105; SWISSPROT HIT: P53804, EVALUE 9.00e-28
ggtcattatcgttattgtgatgctctttctatgctgggggaatatgactgggccctgcaagcaaacataaaagctcaaaaactctgtaaaaatgaccctgagggaatcaaggatctaattcagcagcatgtaaagttacaaaaacaaatagaagacctacaaggtatttcacctaagattcttttggttacagtcttaattccctttcaaactttggagggtgggtttcttggattaacagaggaccacaaatcaatcc

SEQ ID NO: 23414 - DNA, 105 bp, Homo sapiens
  MAP TO AC015861.5; EXPRESSED IN LUNG, SIGNAL = 7.2; EXPRESSED IN PLACENTA, SIGNAL = 6.9; EXPRESSED IN HELA, SIGNAL = 2.9; EXPRESSED IN FETAL LIVER, SIGNAL = 7.3; EXPRESSED IN BONE MARROW, SIGNAL = 7.8; EXPRESSED IN ADULT LIVER, SIGNAL = 5.6; EXPRESSED IN HEART, SIGNAL = 8.1; EXPRESSED IN BRAIN, SIGNAL = 7.2; EST_HUMAN HIT: BE095074.1, EVALUE 8.40e-02; SWISSPROT HIT: P04930, EVALUE 1.90e+00; NT HIT: AF057177.1, EVALUE 2.30e-01
gatgaattaccctgggatgaattacactgggatggattacactgggatggattacactgggatgaattacactgggatgaattcatgggcaggaaaaaattctct

SEQ ID NO: 23415 - DNA, 215 bp, Homo sapiens
  MAP TO AL136442.10; EXPRESSED IN LUNG, SIGNAL = 1.5; EXPRESSED IN PLACENTA, SIGNAL = 1.3; EXPRESSED IN ADULT LIVER, SIGNAL = 1.8; EXPRESSED IN HEART, SIGNAL = 1.2; EXPRESSED IN FETAL LIVER, SIGNAL = 1.1; EXPRESSED IN BRAIN, SIGNAL = 1.2; EXPRESSED IN BONE MARROW, SIGNAL = 1.1; SWISSPROT HIT: Q46378, EVALUE 1.60e+00
tgctggaaatcactattgctgatgcagtaacattcatcaaagctgcaactgatgaattaaaaccagaaactgtagatgtctccctgaagaatgtttggagtaaagttatgaatgattttaaaggcttcttggggatcagcagagaagccaggaaaatcacacagcaagacaagttggtggagaaggatttgccaatatgcttgatgaagaagtag

SEQ ID NO: 23416 - DNA, 139 bp, Homo sapiens
  MAP TO AL122008.9; EXPRESSED IN LUNG, SIGNAL = 3.3; EXPRESSED IN ADULT LIVER, SIGNAL = 3.7; EXPRESSED IN HELA, SIGNAL = 4.7; EXPRESSED IN BRAIN, SIGNAL = 2.8; EXPRESSED IN BONE MARROW, SIGNAL = 3.3; EXPRESSED IN PLACENTA, SIGNAL = 3.1; EXPRESSED IN HEART, SIGNAL = 3.2; EXPRESSED IN FETAL LIVER, SIGNAL = 3.3; SWISSPROT HIT: P26371, EVALUE 8.00e-01; NT HIT: U27832.1, EVALUE 7.90e-02
ctggcttactcactactctgccctcatcccaaccagaatgctgaagttctgtgtgcaccagctggggctcccatatgaagggctgcggatcctgcacagcagcttgggttccatgctgcatgccttcctaaaggcggga

SEQ ID NO: 23417 - DNA, 124 bp, Homo sapiens
  MAP TO AC022459.3; EXPRESSED IN LUNG, SIGNAL = 1.6; EXPRESSED IN PLACENTA, SIGNAL = 1.4; EXPRESSED IN ADULT LIVER, SIGNAL = 1.7; EXPRESSED IN BRAIN, SIGNAL = 1.4; EXPRESSED IN HEART, SIGNAL = 1.3; EXPRESSED IN FETAL LIVER, SIGNAL = 1.3; EXPRESSED IN BONE MARROW, SIGNAL = 1.2; EST_HUMAN HIT: BF574604.1, EVALUE 4.10e-01; NT HIT: gi7019554, EVALUE 4.30e+00; SWISSPROT HIT: P14720, EVALUE 5.40e+00
aacctacataacctaccgcaggcttgctcagtgggtggtagttgttatcaaggaggatggtgcacagtcaggctttcagagagggggagtcaggatggcacaagcattctgctgcaagtggcat

SEQ ID NO: 23418 - DNA, 141 bp, Homo sapiens
  MAP TO AL133377.4; EXPRESSED IN HELA, SIGNAL = 3.8; EXPRESSED IN HEART, SIGNAL = 2.7; EXPRESSED IN BONE MARROW, SIGNAL =   3; EXPRESSED IN BRAIN, SIGNAL = 2.8; EXPRESSED IN FETAL LIVER, SIGNAL = 3.2; EXPRESSED IN ADULT LIVER, SIGNAL = 1.8; EXPRESSED IN PLACENTA, SIGNAL = 2.3; EXPRESSED IN LUNG, SIGNAL = 1.9; NT HIT: gi11345483, EVALUE 5.00e-74; EST_HUMAN HIT: AW303359.1, EVALUE 7.00e-74; SWISSPROT HIT: P15923, EVALUE 3.60e-01
ccctccccgatgcgctggcaggagcgccccactttccggtccagcttcaccattttcatgatggcttcctcccggccacggcccatgtggtcgaatgtgcagtcgtgctgctcggggaggcgatgtaacatacagaacaca

SEQ ID NO: 23419 - DNA, 172 bp, Homo sapiens
  MAP TO AC010329.3; EXPRESSED IN HELA, SIGNAL = 3.8; EXPRESSED IN FETAL LIVER, SIGNAL = 2.7; EXPRESSED IN BONE MARROW, SIGNAL = 3.3; EXPRESSED IN LUNG, SIGNAL =   3; EXPRESSED IN PLACENTA, SIGNAL = 2.3; EXPRESSED IN ADULT LIVER, SIGNAL = 2.9; EXPRESSED IN HEART, SIGNAL = 3.2; EXPRESSED IN BRAIN, SIGNAL = 2.9; SWISSPROT HIT: P26640, EVALUE 3.00e+00; EST_HUMAN HIT: BF204032.1, EVALUE 2.00e-37; NT HIT: gi4508038, EVALUE 9.00e-30
aacaggacggcttccggatttggcggggtctttgtctctccctgcagctggagctccaggtcgtctgttcactgctctctgtcttcttctcctagaggcccagcctctgtggccctgtgtcctgcaggtattgggagatccacagctaagacgccaggaccccctggaagcc

SEQ ID NO: 23420 - DNA, 209 bp, Homo sapiens
  MAP TO AC016113.4; EXPRESSED IN PLACENTA, SIGNAL = 1.2; EXPRESSED IN ADULT LIVER, SIGNAL = 2.2; EXPRESSED IN FETAL LIVER, SIGNAL = 1.6; EXPRESSED IN BRAIN, SIGNAL = 1.7; EXPRESSED IN BONE MARROW, SIGNAL = 2.3; EXPRESSED IN LUNG, SIGNAL = 1.9; EXPRESSED IN HEART, SIGNAL = 1.2; NT HIT: AF223391.1, EVALUE 6.00e-50; EST_HUMAN HIT: BE622032.1, EVALUE 4.00e-52; SWISSPROT HIT: P03384, EVALUE 1.90e-01
ctttggaccttgtatttttaaactccttgtcaaatttgtttcctccaggatcaaggccatcaagctacagatggccttacaaatggaactccaaatgagctcaactaacaacttctgctgaggacccctggatcgacccactggctctttgactggcctagaaagttcccctctggaggacactacactgcagagccccttcttcaccc

SEQ ID NO: 23421 - DNA, 170 bp, Homo sapiens
  MAP TO AL158138.1; EXPRESSED IN PLACENTA, SIGNAL = 2.5; EXPRESSED IN HELA, SIGNAL = 2.8; EXPRESSED IN FETAL LIVER, SIGNAL = 1.7; EXPRESSED IN BONE MARROW, SIGNAL = 2.5; EXPRESSED IN LUNG, SIGNAL = 3.3; EXPRESSED IN ADULT LIVER, SIGNAL = 2.9; EXPRESSED IN HEART, SIGNAL = 2.7; EXPRESSED IN BRAIN, SIGNAL = 2.3; EST_HUMAN HIT: AV714177.1, EVALUE 2.00e-78; SWISSPROT HIT: O28438, EVALUE 1.30e+00
caaaaatagatcctccagtcatgaatataacccaagtcaatggctctttgttggtaattctccatgctccaaatttaccatatagataccaaaaggaaaaaaatgtatctatagaagattactatgaactactataccgagtttttataattaacaattcactagaaaag

SEQ ID NO: 23422 - DNA, 402 bp, Homo sapiens
  MAP TO AL161662.1; EXPRESSED IN BONE MARROW, SIGNAL =  18; EXPRESSED IN LUNG, SIGNAL = 7.1; EXPRESSED IN ADULT LIVER, SIGNAL = 6.2; EXPRESSED IN HELA, SIGNAL = 7.1; EXPRESSED IN HEART, SIGNAL = 8.7; EXPRESSED IN BRAIN, SIGNAL = 6.9; EXPRESSED IN PLACENTA, SIGNAL = 4.1; EXPRESSED IN FETAL LIVER, SIGNAL =  17; NT HIT: gi11435457, EVALUE 0.00e+00; EST_HUMAN HIT: BF673096.1, EVALUE 0.00e+00; SWISSPROT HIT: P46778, EVALUE 1.00e-70
ttatgccatgaattcacagggaataggttccagcagctcaggctccttcccactggttctcacaaagtgtgcttctctgggtggagcaggctggcgctttagttgaacccaggtacctttctctttggcttctttctttttctgatcattttccttcacgcgtttcaggaagctatcttggctcttagagtgcttaatgtgcttaatacgcacattaattctcttggcaagaatcttgcccttaacttgtttgtttacaacaatgccaacagcatgctgggtaacactgtagactcttccagttttgccatggtaacacttgtggggcattcctttttgaacagtacccattcccttgacgtctacaatatcaactttcttatagattcgcatatatgtggc

SEQ ID NO: 23423 - DNA, 115 bp, Homo sapiens
  MAP TO AL158091.7; EXPRESSED IN BONE MARROW, SIGNAL = 1.5; EXPRESSED IN LUNG, SIGNAL = 1.2; EXPRESSED IN PLACENTA, SIGNAL = 1.6; EXPRESSED IN ADULT LIVER, SIGNAL = 1.7; EXPRESSED IN HEART, SIGNAL = 1.4; EXPRESSED IN FETAL LIVER, SIGNAL = 1.6; EXPRESSED IN BRAIN, SIGNAL = 1.6; EST_HUMAN HIT: BF038198.1, EVALUE 6.00e-03
ggaaacagtctttaaaccacaaccaaaacaaagacaagctgcaactgttctctgcaaaacgcctcctgacgcccgggcccagccgctccgccatctccacggccaccttctccag

SEQ ID NO: 23424 - DNA, 350 bp, Homo sapiens
  MAP TO AC019159.3; EXPRESSED IN HELA, SIGNAL = 5.7; EXPRESSED IN BONE MARROW, SIGNAL = 5.1; EXPRESSED IN LUNG, SIGNAL = 5.3; EXPRESSED IN PLACENTA, SIGNAL = 4.5; EXPRESSED IN ADULT LIVER, SIGNAL = 4.6; EXPRESSED IN HEART, SIGNAL = 3.6; EXPRESSED IN FETAL LIVER, SIGNAL = 4.2; EXPRESSED IN BRAIN, SIGNAL = 5.4; NT HIT: AF111944.1, EVALUE 4.00e-03; EST_HUMAN HIT: AA484400.1, EVALUE 3.20e-01
aaatgacaatggtgatggcagcagtgatggtggtggtggtagtgctgtggtagtggtggtattgatggtggtggtgggcataatgttaatgctgatggtgatggtggtgctgatgggggtggtggtgatggaggtgatgatgatggtgatggtggtggtggtgatgatgatggtggtggtcgtggcaatggtggtgataatggttgtggtgatagtggtggtggtgaggggggtaatggtgatagtgatagtggcagtgctgatggtggtaatggtgatggtagtgatggcactggcagtggtggtgttgatagtggtggtggcagtggtggtgatggcgatggtgatgg

SEQ ID NO: 23425 - DNA, 166 bp, Homo sapiens
  MAP TO AC016851.3; EXPRESSED IN HELA, SIGNAL = 5.2; EXPRESSED IN LUNG, SIGNAL = 2.8; EXPRESSED IN PLACENTA, SIGNAL =   3; EXPRESSED IN ADULT LIVER, SIGNAL = 2.8; EXPRESSED IN HEART, SIGNAL = 2.1; EXPRESSED IN BRAIN, SIGNAL =   2; EXPRESSED IN FETAL LIVER, SIGNAL = 2.5; EXPRESSED IN BONE MARROW, SIGNAL =   2; EST_HUMAN HIT: AW592004.1, EVALUE 2.00e-03; SWISSPROT HIT: P42735, EVALUE 3.00e+00; NT HIT: AL163247.2, EVALUE 2.00e-03
atttgtggtgacaaagcatcggctgattatgaagcagtggagaagttctttgatgagtttgccaaggtcatcgctaatgaaaatcggatgccaggacaaatctataatttcaatgcatgaaatgtcactgttttggcattgttgtcccagcaagacactcatgaga

SEQ ID NO: 23426 - DNA, 143 bp, Homo sapiens
  MAP TO AL161422.3; EXPRESSED IN HELA, SIGNAL = 5.8; EXPRESSED IN LUNG, SIGNAL = 3.9; EXPRESSED IN FETAL LIVER, SIGNAL = 6.1; EXPRESSED IN BONE MARROW, SIGNAL = 6.8; EXPRESSED IN PLACENTA, SIGNAL = 2.7; EXPRESSED IN ADULT LIVER, SIGNAL = 3.5; EXPRESSED IN HEART, SIGNAL =   4; EXPRESSED IN BRAIN, SIGNAL = 5.7; SWISSPROT HIT: P35612, EVALUE 2.30e+00; NT HIT: L78833.1, EVALUE 3.00e-38; EST_HUMAN HIT: BE167244.1, EVALUE 8.00e-46
gagtgaagctgctgaccttcacggtgttacagctcttaaggcggcactctggagttgttcgttcctcctgtctggagttgttcattcctcccggtgggttcgtggtctcactggcctcaggagtgaagctgcagaccttccca

SEQ ID NO: 23427 - DNA, 225 bp, Homo sapiens
  MAP TO AC021037.4; EXPRESSED IN PLACENTA, SIGNAL = 1.6; EXPRESSED IN HELA, SIGNAL = 4.9; EXPRESSED IN FETAL LIVER, SIGNAL = 6.7; EXPRESSED IN LUNG, SIGNAL = 3.6; EXPRESSED IN ADULT LIVER, SIGNAL =   3; EXPRESSED IN BRAIN, SIGNAL = 2.9; EXPRESSED IN BONE MARROW, SIGNAL = 5.1; EXPRESSED IN HEART, SIGNAL = 2.7; SWISSPROT HIT: P06748, EVALUE 1.00e-29; EST_HUMAN HIT: BF029174.1, EVALUE 1.00e-101; NT HIT: D45915.1, EVALUE 7.00e-99
tgtgtgccgccacctgatggaagattcgatggacatggacgtgagccccctgaggcccagaactatcttttcagttgtgaactaaaggccgacaaagatgatcactttaaggtggataatgatgaaaatgagcaccagttatccttaagaacggtcagtttaggggctggtgcaaaggatgaactgcacattgttgaagcagaggcaatgaattatgaaggcagt

SEQ ID NO: 23428 - DNA, 319 bp, Homo sapiens
  MAP TO AL135844.8; EXPRESSED IN LUNG, SIGNAL = 1.4; EXPRESSED IN PLACENTA, SIGNAL = 1.3; EXPRESSED IN ADULT LIVER, SIGNAL = 1.3; EXPRESSED IN FETAL LIVER, SIGNAL = 0.74; EXPRESSED IN BRAIN, SIGNAL = 1.1; EXPRESSED IN BONE MARROW, SIGNAL = 1.1; EXPRESSED IN HEART, SIGNAL = 1.8; SWISSPROT HIT: P14075, EVALUE 5.30e-01; NT HIT: gi9790044, EVALUE 1.00e-48; EST_HUMAN HIT: BE549105.1, EVALUE 1.00e-74
gtctgtcaggcctggtcctgtccttggagccaccagcatcctcagacaagaatctagacagtgttgccagttccatccccaggatgcttgctcaaagccaatgcatggtctgagctccatgccaggccctggtgggggcagccacgttgacaccttcaccctgtccctcctcacccagcacatcctttactgcattgtggacagcgagtgtaagtcaagggatgtgctccagagttactttgacctcctgggggagctgatgaagttcaacgttgatgcattcaagagattcaataaatatatcaacaccgatgcaaag

SEQ ID NO: 23429 - DNA, 159 bp, Homo sapiens
  MAP TO AC013785.4; EXPRESSED IN ADULT LIVER, SIGNAL = 1.5; EXPRESSED IN HEART, SIGNAL = 1.7; EXPRESSED IN BONE MARROW, SIGNAL = 1.6; EXPRESSED IN LUNG, SIGNAL = 1.6; EXPRESSED IN PLACENTA, SIGNAL = 1.5; EXPRESSED IN FETAL LIVER, SIGNAL = 1.5; EXPRESSED IN BRAIN, SIGNAL = 1.4; NT HIT: X64053.1, EVALUE 3.60e-01; EST_HUMAN HIT: AI298674.1, EVALUE 2.00e-84
cctctcccatgtttctcccgtctcctcggttctcctcggagacccgcagggctgcccgaggtagctccgagttgccctgggtcgctggggcttggtccgcatcctcctccgctagtccgctcccgcgttccacagcgccccgccgctcggtgtgcacgc

SEQ ID NO: 23430 - DNA, 82 bp, Homo sapiens
  MAP TO AC018684.2; EXPRESSED IN PLACENTA, SIGNAL = 1.2; EXPRESSED IN ADULT LIVER, SIGNAL = 1.3; EXPRESSED IN FETAL LIVER, SIGNAL = 1.1; EXPRESSED IN BRAIN, SIGNAL = 1.1; EXPRESSED IN BONE MARROW, SIGNAL = 1.1; EXPRESSED IN HEART, SIGNAL = 1.2; EXPRESSED IN LUNG, SIGNAL = 1.2; NT HIT: AJ132180.1, EVALUE 2.60e+00
ctggtatcctgtgacttaatgatgagttctaggtgctttcttggacgttctctgggactgtccacatagacaatcctatctt

SEQ ID NO: 23431 - DNA, 150 bp, Homo sapiens
  MAP TO AL096863.10; EXPRESSED IN LUNG, SIGNAL = 1.6; EXPRESSED IN ADULT LIVER, SIGNAL = 1.5; EXPRESSED IN HELA, SIGNAL = 2.2; EXPRESSED IN FETAL LIVER, SIGNAL = 1.6; EXPRESSED IN BRAIN, SIGNAL = 1.4; EXPRESSED IN PLACENTA, SIGNAL = 1.4; EXPRESSED IN HEART, SIGNAL = 1.3; EXPRESSED IN BONE MARROW, SIGNAL = 1.6
tgaaccaagcattaacagtgagctacagcctagcgcaggggaagacttagaaggaggaggaggagtaagaggaggaaggagaaagaaggagataaaagaaggaaaaagaaggaggaggaaggggagtgaggagaataaggaagaagaaaa

SEQ ID NO: 23432 - DNA, 199 bp, Homo sapiens
  MAP TO AL139352.8; EXPRESSED IN LUNG, SIGNAL =   2; EXPRESSED IN PLACENTA, SIGNAL = 1.7; EXPRESSED IN HEART, SIGNAL = 1.9; EXPRESSED IN FETAL LIVER, SIGNAL = 1.8; EXPRESSED IN BONE MARROW, SIGNAL = 1.8; EXPRESSED IN ADULT LIVER, SIGNAL = 1.7; EXPRESSED IN HELA, SIGNAL = 2.7; EXPRESSED IN BRAIN, SIGNAL = 1.7; NT HIT: AF083500.1, EVALUE 1.00e-108; SWISSPROT HIT: O19113, EVALUE 9.00e-19
tggcagaggacgacagcagctgtgaggtgaacggccgcctgtatcgggaaggggagaccttccagccccactgcagcatccgctgccgctgcgaggacggcggcttcacctgcgtgccgctgtgcagcgaggatgtgcggctgcccagctgggactgcccccaccccaggagggtcgaggtcctgggcaagtgctgccc

SEQ ID NO: 23433 - DNA, 92 bp, Homo sapiens
  MAP TO AF241729.1; EXPRESSED IN LUNG, SIGNAL = 1.5; EXPRESSED IN BONE MARROW, SIGNAL = 1.3; EXPRESSED IN HEART, SIGNAL = 1.4; EXPRESSED IN PLACENTA, SIGNAL = 1.5; EXPRESSED IN ADULT LIVER, SIGNAL = 1.4; EXPRESSED IN FETAL LIVER, SIGNAL = 1.3; EXPRESSED IN BRAIN, SIGNAL = 1.4; EST_HUMAN HIT: AA258915.1, EVALUE 1.10e+00; NT HIT: AF146793.2, EVALUE 7.60e-01
tgctgtttgagtattctctgttcattaaagacatcatcatattccttgtttcttggctcttttgaccctccatatttagtttgacaccgatt

SEQ ID NO: 23434 - DNA, 118 bp, Homo sapiens
  MAP TO AC016105.3; EXPRESSED IN LUNG, SIGNAL = 3.9; EXPRESSED IN BONE MARROW, SIGNAL = 3.1; EXPRESSED IN HEART, SIGNAL = 1.6; EXPRESSED IN PLACENTA, SIGNAL = 2.2; EXPRESSED IN ADULT LIVER, SIGNAL =   3; EXPRESSED IN HELA, SIGNAL = 2.9; EXPRESSED IN FETAL LIVER, SIGNAL = 2.8; EXPRESSED IN BRAIN, SIGNAL =   4; EST_HUMAN HIT: AI936748.1, EVALUE 5.00e-25; NT HIT: AF198490.1, EVALUE 1.00e-43
ctggcagccactcccagagcccctggaactctggcccaaggctctctgactgactccttttgggcttagcggctgaagactgacgctgcctgatcacctcggaagccccatagaccat

SEQ ID NO: 23435 - DNA, 107 bp, Homo sapiens
  MAP TO AL157777.3; EXPRESSED IN LUNG, SIGNAL = 2.2; EXPRESSED IN PLACENTA, SIGNAL =   2; EXPRESSED IN ADULT LIVER, SIGNAL = 2.2; EXPRESSED IN HEART, SIGNAL = 1.9; EXPRESSED IN FETAL LIVER, SIGNAL = 1.6; EXPRESSED IN BRAIN, SIGNAL = 1.6; EXPRESSED IN BONE MARROW, SIGNAL = 1.7; NT HIT: AL161554.2, EVALUE 3.10e+00; EST_HUMAN HIT: AA847040.1, EVALUE 9.30e-01
aaacacgtcaaatgaaaaactggacactttaataggtttattgttagcactctctcatgctgatcaattctcaacacatgcagttgtaggattaggaagacaaaatc

SEQ ID NO: 23436 - DNA, 86 bp, Homo sapiens
  MAP TO AL161781.2; EXPRESSED IN ADULT LIVER, SIGNAL = 1.7; EXPRESSED IN HELA, SIGNAL = 2.3; EXPRESSED IN HEART, SIGNAL = 1.3; EXPRESSED IN FETAL LIVER, SIGNAL = 1.4; EXPRESSED IN BRAIN, SIGNAL = 1.5; EXPRESSED IN PLACENTA, SIGNAL = 1.4; EXPRESSED IN BONE MARROW, SIGNAL = 1.6; EXPRESSED IN LUNG, SIGNAL = 1.6; EST_HUMAN HIT: AW406299.1, EVALUE 3.00e-41; SWISSPROT HIT: Q02548, EVALUE 3.00e-10; NT HIT: M96944.1, EVALUE 2.00e-41
atgtttgcctgggagatcagggaccggctgctggcagagcgggtgtgtgacaatgacaccgtgcctagcgtcagttccatcaacag

SEQ ID NO: 23437 - DNA, 161 bp, Homo sapiens
  MAP TO AP001254.2; EXPRESSED IN BONE MARROW, SIGNAL = 1.2; EXPRESSED IN ADULT LIVER, SIGNAL = 1.6; EXPRESSED IN HELA, SIGNAL = 4.3; EXPRESSED IN LUNG, SIGNAL = 1.9; EXPRESSED IN PLACENTA, SIGNAL = 1.3; EXPRESSED IN HEART, SIGNAL = 1.2; EXPRESSED IN FETAL LIVER, SIGNAL = 1.8; EXPRESSED IN BRAIN, SIGNAL = 1.5; SWISSPROT HIT: P14324, EVALUE 1.00e-18; EST_HUMAN HIT: BE869151.1, EVALUE 2.00e-46; NT HIT: J05262.1, EVALUE 2.00e-46
gatttcattcggcacttctcccagatctttagagtgctgactgaggatgagatggggcacccacagacaggagatgctattgcccagctcaaggaggtcctggagtacaacgccagtggaggcaagtatcagcaggctttgagagtgctagtagcattcag

SEQ ID NO: 23438 - DNA, 153 bp, Homo sapiens
  MAP TO AC015805.3; EXPRESSED IN PLACENTA, SIGNAL = 2.1; EXPRESSED IN BONE MARROW, SIGNAL = 2.2; EXPRESSED IN LUNG, SIGNAL = 2.1; EXPRESSED IN ADULT LIVER, SIGNAL = 2.7; EXPRESSED IN HELA, SIGNAL = 3.3; EXPRESSED IN HEART, SIGNAL = 1.9; EXPRESSED IN FETAL LIVER, SIGNAL =   2; EXPRESSED IN BRAIN, SIGNAL = 2.2; EST_HUMAN HIT: BE550377.1, EVALUE 5.20e-01; NT HIT: gi11448042, EVALUE 3.50e-01; SWISSPROT HIT: P15918, EVALUE 1.80e+00
tgaggagtttcttgtgaatgtgcacttggctgcctctctgggccgaggacatgacatcctcaggcttcagtgactctcgcaaataaagtgcttgtttcttagctgcagcttgcctttgtgattccatcaacgtgtgcatttcattagggtacc

SEQ ID NO: 23439 - DNA, 113 bp, Homo sapiens
  MAP TO AC018773.2; EXPRESSED IN LUNG, SIGNAL = 1.2; EXPRESSED IN PLACENTA, SIGNAL = 1.2; EXPRESSED IN FETAL LIVER, SIGNAL = 1.2; EXPRESSED IN ADULT LIVER, SIGNAL = 1.3; EXPRESSED IN HEART, SIGNAL = 1.2; EXPRESSED IN BRAIN, SIGNAL = 1.2; EXPRESSED IN BONE MARROW, SIGNAL =   1; NT HIT: gi7305030, EVALUE 2.10e-01; EST_HUMAN HIT: AA457354.1, EVALUE 2.50e-01
ctccttgaaatgctgaggattgagccaaccatgcagccagtggtgcccacgcttctgaggcagggagccagtgctcaggaagggcaggctgctgcttctctccttctccttgt

SEQ ID NO: 23440 - DNA, 158 bp, Homo sapiens
  MAP TO AC016498.4; EXPRESSED IN LUNG, SIGNAL = 2.4; EXPRESSED IN ADULT LIVER, SIGNAL = 2.7; EXPRESSED IN HEART, SIGNAL = 1.9; EXPRESSED IN BONE MARROW, SIGNAL = 2.1; EXPRESSED IN BRAIN, SIGNAL = 2.4; EXPRESSED IN PLACENTA, SIGNAL =   2; EXPRESSED IN HELA, SIGNAL = 2.4; EXPRESSED IN FETAL LIVER, SIGNAL = 1.9; EST_HUMAN HIT: BE770199.1, EVALUE 6.00e-84; SWISSPROT HIT: P14708, EVALUE 2.70e-01; NT HIT: AL021957.1, EVALUE 1.40e+00
atgtcaagaatatgaacacgtggctgctgttcctccccctgttcccggtgcaggtgcagaccctgatagtcgtgatcatcgggatgctcgtgctcctgctggactttcttggcttggtgcacctgggccagctgctcatcttccacatctacctgagt

SEQ ID NO: 23441 - DNA, 174 bp, Homo sapiens
  MAP TO AC016326.4; EXPRESSED IN LUNG, SIGNAL = 0.93; EXPRESSED IN PLACENTA, SIGNAL =   1; EXPRESSED IN ADULT LIVER, SIGNAL = 0.68; EXPRESSED IN HEART, SIGNAL = 1.5; EXPRESSED IN FETAL LIVER, SIGNAL = 0.95; EXPRESSED IN BRAIN, SIGNAL = 1.3; EXPRESSED IN BONE MARROW, SIGNAL = 1.1; SWISSPROT HIT: P52934, EVALUE 5.10e+00; NT HIT: AL163218.2, EVALUE 6.00e-34; EST_HUMAN HIT: AA682949.1, EVALUE 4.00e-39
ggcagcaggagacagaatgagggcaagcaggggaaatgccagatgcttatgaaaccatcagatctcataagactcactcactatcatgagaacagcatggaggaaactgtccccatgattcaattatctccacctggtcctgtccttgacatgtggagattattacaattcaag

SEQ ID NO: 23442 - DNA, 182 bp, Homo sapiens
  MAP TO AL118505.13; EXPRESSED IN HELA, SIGNAL =  10; EXPRESSED IN HEART, SIGNAL = 6.4; EXPRESSED IN BONE MARROW, SIGNAL = 6.5; EXPRESSED IN LUNG, SIGNAL = 6.4; EXPRESSED IN ADULT LIVER, SIGNAL = 7.3; EXPRESSED IN FETAL LIVER, SIGNAL = 6.4; EXPRESSED IN BRAIN, SIGNAL = 5.6; EXPRESSED IN PLACENTA, SIGNAL = 6.1; EST_HUMAN HIT: BF509616.1, EVALUE 6.00e-66; NT HIT: gi11421638, EVALUE 4.00e-66; SWISSPROT HIT: Q9Y490, EVALUE 9.00e-04
ggtgatcacagagcagccggtgcatgtgaagagaggttgatgtctgtttctgttcagctggccgcccggatcctggaggcgcaccagaacgtggcccagatgcccctggtcgaagccaagctgcggttcatccaggcgtggcagtcactgcctgagtttggcctcacctactaccttgtcag

SEQ ID NO: 23443 - DNA, 104 bp, Homo sapiens
  MAP TO AC019281.4; EXPRESSED IN ADULT LIVER, SIGNAL = 1.1; EXPRESSED IN BONE MARROW, SIGNAL = 0.69; EXPRESSED IN HEART, SIGNAL = 1.3; EXPRESSED IN FETAL LIVER, SIGNAL = 1.2; EXPRESSED IN BRAIN, SIGNAL = 0.69; NT HIT: gi11321580, EVALUE 1.00e-49; EST_HUMAN HIT: AV724407.1, EVALUE 2.00e-49; SWISSPROT HIT: P53597, EVALUE 5.00e-14
ctgtttgccagtgaaaccctggcaaataatctttgtatttttatcaacatagagatgttgccgagaagctgtgtaggaacaatgccgaattccattttgcggca

SEQ ID NO: 23444 - DNA, 145 bp, Homo sapiens
  MAP TO AL162471.1; EXPRESSED IN PLACENTA, SIGNAL = 3.4; EXPRESSED IN ADULT LIVER, SIGNAL = 3.8; EXPRESSED IN HELA, SIGNAL = 3.7; EXPRESSED IN BRAIN, SIGNAL = 3.2; EXPRESSED IN BONE MARROW, SIGNAL = 3.9; EXPRESSED IN LUNG, SIGNAL = 3.1; EXPRESSED IN HEART, SIGNAL =   4; EXPRESSED IN FETAL LIVER, SIGNAL = 3.7; SWISSPROT HIT: P54098, EVALUE 5.30e+00
ttgagaatagggatgaagggaggtggttgggtctgagggaggtggagcctttgaagaggatggaagagaaggctgccaagggcatcccatgggacagctctagggcaaggggaggggagaagtccgagaacgtgaactttaagtg

SEQ ID NO: 23445 - DNA, 291 bp, Homo sapiens
  MAP TO AC022882.3; EXPRESSED IN LUNG, SIGNAL = 1.4; EXPRESSED IN ADULT LIVER, SIGNAL = 1.4; EXPRESSED IN HEART, SIGNAL = 1.4; EXPRESSED IN FETAL LIVER, SIGNAL = 1.6; EXPRESSED IN BRAIN, SIGNAL = 1.1; EXPRESSED IN BONE MARROW, SIGNAL = 1.5; EXPRESSED IN PLACENTA, SIGNAL = 1.2; EST_HUMAN HIT: AW993639.1, EVALUE 1.00e+00; SWISSPROT HIT: Q95156, EVALUE 2.00e-17; NT HIT: U53680.1, EVALUE 1.10e-02
aaagcagcccatgaaggaaatatagttggaagtcagtaagttcgctaaggttttaggtgtgatgacagttgagtaactgaggtcaataaatgacaagtgagtaaggaaaaaatacatgggagtgtgaagctggaggtccaggcggattatcaatatcatccccacattgcccagcatagtaattaggtatatcaggagaaatagtataaagagggccatctggacctcttcagaatctgacagtcccgtaaggatgaagtcaggcacatttgtgttatttcttctacccat

SEQ ID NO: 23446 - DNA, 102 bp, Homo sapiens
  MAP TO AC021371.3; EXPRESSED IN PLACENTA, SIGNAL = 1.2; EXPRESSED IN FETAL LIVER, SIGNAL = 1.2; EXPRESSED IN ADULT LIVER, SIGNAL = 0.94; EXPRESSED IN BRAIN, SIGNAL = 1.7; EXPRESSED IN BONE MARROW, SIGNAL = 1.4; EXPRESSED IN LUNG, SIGNAL = 1.1; EXPRESSED IN HEART, SIGNAL = 1.5; SWISSPROT HIT: O60908, EVALUE 7.20e+00; EST_HUMAN HIT: AI866347.1, EVALUE 2.00e-27; NT HIT: AF195953.1, EVALUE 3.00e-16
ttctcacagttctggaggctgggaagtccaagatcaaggtactggcagatttggtgtctggtgagggctctcttcctggcttgcagactgttgccttcttgc

SEQ ID NO: 23447 - DNA, 305 bp, Homo sapiens
  MAP TO AL136308.4; EXPRESSED IN LUNG, SIGNAL = 1.5; EXPRESSED IN PLACENTA, SIGNAL = 1.3; EXPRESSED IN FETAL LIVER, SIGNAL = 1.1; EXPRESSED IN BONE MARROW, SIGNAL = 1.1; EXPRESSED IN ADULT LIVER, SIGNAL = 1.5; EXPRESSED IN HEART, SIGNAL = 1.2; EXPRESSED IN BRAIN, SIGNAL = 1.3; EST_HUMAN HIT: AI346126.1, EVALUE 2.80e-01; SWISSPROT HIT: Q99435, EVALUE 3.80e-01
aggaaaagcctcaagctgcagcaggacagtttttctccagggtccaattataacagagccaattatgttttgggatgcattcacgacccttgcaattcttctacatgcatacataaaactctgcacatgtatgtgtcagaatttactaatatggattccaaatattgcttcatccatcaacagaactgtacacccaaaaacgaagtggaaactaaaatgtgcttcattagcttttcaaataatgttaaatttacagacatgctaaagagcaggctgctgactcagattgagccacactcttcaag

SEQ ID NO: 23448 - DNA, 260 bp, Homo sapiens
  MAP TO AC021468.2; EXPRESSED IN ADULT LIVER, SIGNAL = 1.6; EXPRESSED IN BRAIN, SIGNAL = 1.6; EXPRESSED IN HEART, SIGNAL =   2; EXPRESSED IN BONE MARROW, SIGNAL = 1.7; EXPRESSED IN LUNG, SIGNAL = 1.6; EXPRESSED IN PLACENTA, SIGNAL = 1.4; EXPRESSED IN FETAL LIVER, SIGNAL = 1.9; NT HIT: AB011538.1, EVALUE 0.00e+00; EST_HUMAN HIT: AL120124.1, EVALUE 0.00e+00; SWISSPROT HIT: P24014, EVALUE 2.00e-11
tggacccttctgtgaacaccccccacccatggtcctactgcagaccagcccatgcgaccagtacgagtgccagaacggggcccagtgcatcgtggtgcagcaggagcccacctgccgctgcccaccaggcttcgccggccccagatgcgagaagctcatcactgtcaacttcgtgggcaaagactcctacgtggaactggcctccgccaaggtccgaccccaggccaacatctccctgcaggtgtgtcccgccctgccct

SEQ ID NO: 23449 - DNA, 139 bp, Homo sapiens
  MAP TO AC011022.4; EXPRESSED IN LUNG, SIGNAL =   2; EXPRESSED IN PLACENTA, SIGNAL = 2.1; EXPRESSED IN ADULT LIVER, SIGNAL = 2.1; EXPRESSED IN HELA, SIGNAL = 3.2; EXPRESSED IN BRAIN, SIGNAL = 2.9; EXPRESSED IN FETAL LIVER, SIGNAL = 2.6; EXPRESSED IN HEART, SIGNAL =   2; EXPRESSED IN BONE MARROW, SIGNAL = 2.3; EST_HUMAN HIT: AI792229.1, EVALUE 1.00e-72; NT HIT: AF113129.1, EVALUE 8.00e-73; SWISSPROT HIT: P38606, EVALUE 2.00e-21
ggtttttgcaaggtgtaaagtcccatttgatatctctgctaagagcagacacgtttactcctctggggatgtagatgctttgggtctgactgctgatatccgacaaaggtctttgaataccatcaaaaatggctcccat

SEQ ID NO: 23450 - DNA, 191 bp, Homo sapiens
  MAP TO AL161644.1; EXPRESSED IN LUNG, SIGNAL = 1.5; EXPRESSED IN PLACENTA, SIGNAL = 1.4; EXPRESSED IN ADULT LIVER, SIGNAL = 1.4; EXPRESSED IN HEART, SIGNAL = 1.4; EXPRESSED IN FETAL LIVER, SIGNAL = 1.6; EXPRESSED IN BRAIN, SIGNAL = 1.1; EXPRESSED IN BONE MARROW, SIGNAL = 1.5; SWISSPROT HIT: Q62267, EVALUE 3.80e+00; EST_HUMAN HIT: AA328265.1, EVALUE 2.00e-41; NT HIT: D85340.1, EVALUE 1.10e-01
ctcaggagattgttgggaggattaagtgagatcagcctcctttggtgcctacatagagtcttaggatgtgggggcttattattgttcctgggacagagagccaggaggctttgggggcagggatggcaaggctctgggagtctggtctgccggagagtgatacccagctggtccccaggggacaggccacc

SEQ ID NO: 23451 - DNA, 149 bp, Homo sapiens
  MAP TO AC011831.4; EXPRESSED IN LUNG, SIGNAL = 1.9; EXPRESSED IN PLACENTA, SIGNAL = 1.9; EXPRESSED IN HEART, SIGNAL =   2; EXPRESSED IN FETAL LIVER, SIGNAL = 1.7; EXPRESSED IN BRAIN, SIGNAL = 1.7; EXPRESSED IN BONE MARROW, SIGNAL = 1.6; EXPRESSED IN ADULT LIVER, SIGNAL = 3.3; EXPRESSED IN HELA, SIGNAL = 2.8; NT HIT: D13697.1, EVALUE 3.40e-01; SWISSPROT HIT: Q57394, EVALUE 4.00e+00; EST_HUMAN HIT: M86033.1, EVALUE 2.00e-49
gaataaaaacgaataaggcagagaagaaaagtgccagagggaataatgcgagcaaaacacagaggactgcacctctagtggctcgtaatgagaaagaagatggtctcaaacctgagaaagataatgtggagtggacctctgttgtctca

SEQ ID NO: 23452 - DNA, 183 bp, Homo sapiens
  MAP TO AL161756.1; EXPRESSED IN LUNG, SIGNAL = 1.5; EXPRESSED IN PLACENTA, SIGNAL = 1.8; EXPRESSED IN ADULT LIVER, SIGNAL = 1.3; EXPRESSED IN HEART, SIGNAL = 1.2; EXPRESSED IN FETAL LIVER, SIGNAL = 1.1; EXPRESSED IN BRAIN, SIGNAL = 1.2; EXPRESSED IN BONE MARROW, SIGNAL = 1.1; NT HIT: X99101.1, EVALUE 6.00e-99; EST_HUMAN HIT: AI174706.1, EVALUE 2.50e+00; SWISSPROT HIT: Q92731, EVALUE 4.00e-30
taacaagggcatggaacatctgctcaacatgaagtgcaaaaatgtggtcccagtgtatgacctgctgctggagatgctgaatgcccacgtgcttcgcgggtgcaagtcctccatcacggggtccgagtgcagcccggcagaggacagtaaaagcaaagagggctcccagaacccacagtctca

SEQ ID NO: 23453 - DNA, 178 bp, Homo sapiens
  MAP TO AL162458.1; EXPRESSED IN ADULT LIVER, SIGNAL =   2; EXPRESSED IN HELA, SIGNAL = 2.7; EXPRESSED IN HEART, SIGNAL = 1.8; EXPRESSED IN BRAIN, SIGNAL = 1.4; EXPRESSED IN PLACENTA, SIGNAL = 1.9; EXPRESSED IN FETAL LIVER, SIGNAL = 1.6; EXPRESSED IN BONE MARROW, SIGNAL = 6.1; EXPRESSED IN LUNG, SIGNAL =   2; EST_HUMAN HIT: T64837.1, EVALUE 5.00e-94; NT HIT: M68347.1, EVALUE 5.00e-96; SWISSPROT HIT: P14780, EVALUE 9.00e-32
tggttccaactcggtttggaaacgcagatggcgcggcctgccacttccccttcatcttcgagggccgctcctactctgcctgcaccaccgacggtcgctccgacggcttgccctggtgcagtaccacggccaactacgacaccgacgaccggtttggcttctgccccagcgagagtga

SEQ ID NO: 23454 - DNA, 92 bp, Homo sapiens
  MAP TO AL121911.10; EXPRESSED IN HELA, SIGNAL = 3.2; EXPRESSED IN LUNG, SIGNAL = 3.2; EXPRESSED IN BONE MARROW, SIGNAL = 5.5; EXPRESSED IN PLACENTA, SIGNAL = 3.6; EXPRESSED IN ADULT LIVER, SIGNAL = 3.7; EXPRESSED IN HEART, SIGNAL = 4.9; EXPRESSED IN FETAL LIVER, SIGNAL = 4.6; EXPRESSED IN BRAIN, SIGNAL = 4.8; NT HIT: U66059.1, EVALUE 2.00e-16; EST_HUMAN HIT: AW150257.1, EVALUE 9.00e-17
attgttatatcttcaagatgaattacccttgtatcattgtaatgtgtctgtattagtctgttttcatgctgctgataaagacatacccaaga

SEQ ID NO: 23455 - DNA, 95 bp, Homo sapiens
  MAP TO AC012241.4; EXPRESSED IN PLACENTA, SIGNAL = 2.7; EXPRESSED IN FETAL LIVER, SIGNAL = 2.5; EXPRESSED IN BONE MARROW, SIGNAL = 3.4; EXPRESSED IN LUNG, SIGNAL = 2.7; EXPRESSED IN ADULT LIVER, SIGNAL = 5.9; EXPRESSED IN HELA, SIGNAL = 4.4; EXPRESSED IN HEART, SIGNAL = 2.4; EXPRESSED IN BRAIN, SIGNAL = 2.8; NT HIT: X90996.1, EVALUE 7.90e-01; EST_HUMAN HIT: AA808508.1, EVALUE 1.20e+00
aggaatgggggagctggacaatgaagtggaatatgtgatggcaatgggcaaatgctacctgagagagaaggccggtagaccaaggctcttgcaag

SEQ ID NO: 23456 - DNA, 111 bp, Homo sapiens
  MAP TO AC013584.3; EXPRESSED IN ADULT LIVER, SIGNAL = 1.6; EXPRESSED IN HEART, SIGNAL = 1.3; EXPRESSED IN BONE MARROW, SIGNAL = 1.5; EXPRESSED IN LUNG, SIGNAL = 1.5; EXPRESSED IN PLACENTA, SIGNAL = 1.5; EXPRESSED IN FETAL LIVER, SIGNAL = 1.2; EXPRESSED IN BRAIN, SIGNAL = 1.3; SWISSPROT HIT: Q07371, EVALUE 9.30e+00; NT HIT: Z77881.1, EVALUE 6.10e-02; EST_HUMAN HIT: AA490121.1, EVALUE 2.00e-08
cattctggaagcacaaagtccaagatcaaggtgctggatttggttccctccgagcctctctccttggcttgcagatggtcacccttttgctgcctcttcacattgtcattc

SEQ ID NO: 23457 - DNA, 135 bp, Homo sapiens
  MAP TO AC013823.3; EXPRESSED IN HELA, SIGNAL = 4.1; EXPRESSED IN LUNG, SIGNAL = 2.7; EXPRESSED IN PLACENTA, SIGNAL = 2.5; EXPRESSED IN ADULT LIVER, SIGNAL =   3; EXPRESSED IN FETAL LIVER, SIGNAL = 2.4; EXPRESSED IN HEART, SIGNAL = 2.3; EXPRESSED IN BRAIN, SIGNAL = 2.5; EXPRESSED IN BONE MARROW, SIGNAL = 2.5; EST_HUMAN HIT: BE175667.1, EVALUE 7.00e-03; SWISSPROT HIT: P55322, EVALUE 1.80e+00; NT HIT: Z49619.1, EVALUE 7.60e-02
aattatcaaccctaaaatccttaccattgaggaaaacaccaaaaaagtaaatgaccttgcaggaatgagaaaaagtatatcttctacagcaggagtgcctgaaccccaggtcatagaccagaagtggtctgcagt

SEQ ID NO: 23458 - DNA, 164 bp, Homo sapiens
  MAP TO AL121901.10; EXPRESSED IN HELA, SIGNAL =  12; EXPRESSED IN HEART, SIGNAL =  13; EXPRESSED IN BONE MARROW, SIGNAL =  11; EXPRESSED IN LUNG, SIGNAL =  11; EXPRESSED IN PLACENTA, SIGNAL = 9.9; EXPRESSED IN ADULT LIVER, SIGNAL =   9; EXPRESSED IN FETAL LIVER, SIGNAL =  11; EXPRESSED IN BRAIN, SIGNAL =  13; SWISSPROT HIT: P02747, EVALUE 7.80e-01; NT HIT: AF214562.1, EVALUE 1.00e-87; EST_HUMAN HIT: BF358888.1, EVALUE 4.00e-85
ccctcagcaatggcctgctgtctgggggcctgttgggcattctggaaaaccttccgctcctggacatcctgaagcctggaggaggtacttctggtggcctccttgggggactgcttggaaaagtgacgtcagtgattcctggcctgaacaacatcattgagtga

SEQ ID NO: 23459 - DNA, 149 bp, Homo sapiens
  MAP TO AL133395.14; EXPRESSED IN ADULT LIVER, SIGNAL = 4.4; EXPRESSED IN HELA, SIGNAL = 5.1; EXPRESSED IN LUNG, SIGNAL = 5.4; EXPRESSED IN PLACENTA, SIGNAL = 4.1; EXPRESSED IN HEART, SIGNAL = 4.2; EXPRESSED IN BRAIN, SIGNAL = 4.4; EXPRESSED IN BONE MARROW, SIGNAL = 4.5; EXPRESSED IN FETAL LIVER, SIGNAL = 4.7; NT HIT: AJ277662.1, EVALUE 5.30e+00; EST_HUMAN HIT: AI363468.1, EVALUE 2.00e+00; SWISSPROT HIT: P02835, EVALUE 6.00e-01
agtaccatgctggtgctccatggagtacaaacaccagtgcaaagtggtcttcatcttcacaaaacttataacctggttgtggtgtggggaagttcggtgtagcaatggcagtggtactgtgggatgggaagaattggcagtggagagta

SEQ ID NO: 23460 - DNA, 92 bp, Homo sapiens
  MAP TO AL161752.1; EXPRESSED IN HELA, SIGNAL = 2.5; EXPRESSED IN LUNG, SIGNAL = 2.6; EXPRESSED IN PLACENTA, SIGNAL = 2.4; EXPRESSED IN FETAL LIVER, SIGNAL = 1.8; EXPRESSED IN BONE MARROW, SIGNAL = 1.9; EXPRESSED IN ADULT LIVER, SIGNAL = 2.4; EXPRESSED IN HEART, SIGNAL =   2; EXPRESSED IN BRAIN, SIGNAL = 1.9; NT HIT: gi6857752, EVALUE 7.60e-01
ctgatttaccctttgttccgagttggatggagaaagataaggaaaatcttcaaaggaaagctgatcagtcgagtctggaaggacagtagttc

SEQ ID NO: 23461 - DNA, 141 bp, Homo sapiens
  MAP TO AC013641.4; EXPRESSED IN ADULT LIVER, SIGNAL = 2.5; EXPRESSED IN BRAIN, SIGNAL = 3.8; EXPRESSED IN LUNG, SIGNAL = 3.6; EXPRESSED IN HELA, SIGNAL = 3.3; EXPRESSED IN BONE MARROW, SIGNAL = 3.7; EXPRESSED IN PLACENTA, SIGNAL = 2.4; EXPRESSED IN HEART, SIGNAL = 3.6; EXPRESSED IN FETAL LIVER, SIGNAL = 3.7; SWISSPROT HIT: Q28943, EVALUE 4.00e+00; EST_HUMAN HIT: AW082010.1, EVALUE 1.90e+00; NT HIT: AL114993.1, EVALUE 8.00e-02
ctaaaactggatggtaggctgctttcccagggttctaataacaggtggtgcacgggttagactccaggcaagcacaaccccagtttcctcattctcattcttccgtcctagagtcataggagtggcttctgttctgctcat

SEQ ID NO: 23462 - DNA, 87 bp, Homo sapiens
  MAP TO AC011831.4; EXPRESSED IN LUNG, SIGNAL = 3.3; EXPRESSED IN PLACENTA, SIGNAL = 3.2; EXPRESSED IN HEART, SIGNAL = 3.2; EXPRESSED IN FETAL LIVER, SIGNAL = 2.8; EXPRESSED IN BRAIN, SIGNAL =   3; EXPRESSED IN ADULT LIVER, SIGNAL = 3.7; EXPRESSED IN HELA, SIGNAL =   5; EXPRESSED IN BONE MARROW, SIGNAL =   3; EST_HUMAN HIT: BF693996.1, EVALUE 1.10e+00
atggaaaagtccaaatgtgttgaatcaaaatttatgaggatggaaaatgtcatgggtaagaaagaaaaacaaagtgatgctccaaag

SEQ ID NO: 23463 - DNA, 120 bp, Homo sapiens
  MAP TO AL136172.12; EXPRESSED IN LUNG, SIGNAL = 3.3; EXPRESSED IN HEART, SIGNAL = 3.4; EXPRESSED IN FETAL LIVER, SIGNAL = 6.3; EXPRESSED IN BONE MARROW, SIGNAL = 4.2; EXPRESSED IN PLACENTA, SIGNAL = 2.7; EXPRESSED IN ADULT LIVER, SIGNAL =   3; EXPRESSED IN HELA, SIGNAL = 4.5; EXPRESSED IN BRAIN, SIGNAL =   3; NT HIT: gi11034840, EVALUE 1.00e-61; EST_HUMAN HIT: BE219117.1, EVALUE 2.00e-61; SWISSPROT HIT: P01286, EVALUE 8.00e-16
ctgtgcttctgcagcagggccaccaggatgctctccaattccatttgcttttgttctgcccacatgctgtctacctgacgaccaagccgtgcccttgctcctcgctcttggttgctctct

SEQ ID NO: 23464 - DNA, 360 bp, Homo sapiens
  MAP TO AC022423.2; EXPRESSED IN HEART, SIGNAL = 1.3; EXPRESSED IN BRAIN, SIGNAL = 1.3; EXPRESSED IN BONE MARROW, SIGNAL = 1.2; EXPRESSED IN LUNG, SIGNAL = 1.3; EXPRESSED IN PLACENTA, SIGNAL = 1.2; EXPRESSED IN ADULT LIVER, SIGNAL = 1.2; EXPRESSED IN FETAL LIVER, SIGNAL = 1.8; EST_HUMAN HIT: BE877693.1, EVALUE 0.00e+00; SWISSPROT HIT: Q28640, EVALUE 2.20e-01; NT HIT: gi11545858, EVALUE 0.00e+00
agaacctcattggtgttggccttcagacattccacttcagggtctaagtcgagaagctgccgcactctcttggtagccaaatcatactgctcgtccagaagaggagcaaaagcattctccaggacgtccgaggcatgagccaggtaaatgagggccagcaagcgcctgtccatgcggtgagggtcattcacccatttgtcaagaacggcttcctgtactttcttgatgaggcgctgcttaatgttgttattggtgaggggatgtgttgtcatgtcaaaaagtaggaagttctgtttctctgttgtcaatacacccttttccaccaggtttttagctaatcgttcccgtacatttcttaac

SEQ ID NO: 23465 - DNA, 214 bp, Homo sapiens
  MAP TO AC015785.3; EXPRESSED IN PLACENTA, SIGNAL = 1.4; EXPRESSED IN HEART, SIGNAL = 1.3; EXPRESSED IN FETAL LIVER, SIGNAL = 1.4; EXPRESSED IN BONE MARROW, SIGNAL = 1.6; EXPRESSED IN LUNG, SIGNAL = 1.4; EXPRESSED IN ADULT LIVER, SIGNAL = 1.3; EXPRESSED IN BRAIN, SIGNAL = 1.3; NT HIT: AF208967.1, EVALUE 1.30e-01; EST_HUMAN HIT: AW388497.1, EVALUE 4.80e-02; SWISSPROT HIT: Q06453, EVALUE 2.60e+00
ctgtctggctttggacaggagcaaccgaattgggcagctgggttccagcctttcacgggggctggtggttggttggctgcctggcaggtccgtttgccctggggttttccaaaagcaggagtagatgcggctgacatctgaaggggaaagggaggacagccatccatattcctgagacccgccttttcttcgaatgaccaaattggtggcagcc

SEQ ID NO: 23466 - DNA, 101 bp, Homo sapiens
  MAP TO AL135923.11; EXPRESSED IN PLACENTA, SIGNAL = 1.6; EXPRESSED IN LUNG, SIGNAL = 1.5; EXPRESSED IN HEART, SIGNAL = 1.8; EXPRESSED IN FETAL LIVER, SIGNAL =   2; EXPRESSED IN BONE MARROW, SIGNAL = 1.6; EXPRESSED IN ADULT LIVER, SIGNAL = 1.6; EXPRESSED IN BRAIN, SIGNAL = 1.9; EST_HUMAN HIT: AA116029.1, EVALUE 1.30e+00; SWISSPROT HIT: P05458, EVALUE 5.50e+00; NT HIT: AL022073.1, EVALUE 1.40e-02
tttagaatccaagatcagtctgggaggtctaatggtggcgctgatctgtgccttgcttcctaattgaatgttgaagaggcagccagccttggctttctcct

SEQ ID NO: 23467 - DNA, 120 bp, Homo sapiens
  MAP TO AC016517.4; EXPRESSED IN LUNG, SIGNAL = 2.4; EXPRESSED IN FETAL LIVER, SIGNAL =   2; EXPRESSED IN BONE MARROW, SIGNAL = 2.1; EXPRESSED IN PLACENTA, SIGNAL = 2.1; EXPRESSED IN ADULT LIVER, SIGNAL = 2.3; EXPRESSED IN HEART, SIGNAL = 2.1; EXPRESSED IN BRAIN, SIGNAL = 2.4; EST_HUMAN HIT: BF680550.1, EVALUE 6.10e+00; SWISSPROT HIT: P26842, EVALUE 2.40e+00
cttcgtgttattcacaagctaatgagcatttatttgcttcttcatccaagtcactggtgaacatattcaataaacttgagaacagagctttccggcataccagtaaaaacttctcatcag

SEQ ID NO: 23468 - DNA, 188 bp, Homo sapiens
  MAP TO AC007000.2; EXPRESSED IN ADULT LIVER, SIGNAL =  10; EXPRESSED IN BRAIN, SIGNAL =  12; EXPRESSED IN BONE MARROW, SIGNAL =  14; EXPRESSED IN LUNG, SIGNAL =  12; EXPRESSED IN PLACENTA, SIGNAL =  11; EXPRESSED IN HELA, SIGNAL =  13; EXPRESSED IN HEART, SIGNAL =  11; EXPRESSED IN FETAL LIVER, SIGNAL =  13; SWISSPROT HIT: P54278, EVALUE 5.00e-27; NT HIT: AB017006.1, EVALUE 1.00e-96; EST_HUMAN HIT: AA418026.1, EVALUE 5.00e-97
tcaccatttctacctgccacgtatcggcgaaggttgggactcgactggtgtttgatcacgatgggaaaatcatccagaaaaccccctacccccaccccagagggaccacagtcagcgtgaagcagttattttctacgctacctgtgcgccataaggaatttcaaaggaatattaagaaggtacagtaa

SEQ ID NO: 23469 - DNA, 129 bp, Homo sapiens
  MAP TO AL161747.1; EXPRESSED IN HELA, SIGNAL = 3.3; EXPRESSED IN HEART, SIGNAL = 3.9; EXPRESSED IN BONE MARROW, SIGNAL = 2.6; EXPRESSED IN LUNG, SIGNAL = 3.9; EXPRESSED IN PLACENTA, SIGNAL = 3.9; EXPRESSED IN ADULT LIVER, SIGNAL = 3.4; EXPRESSED IN FETAL LIVER, SIGNAL = 3.1; EXPRESSED IN BRAIN, SIGNAL = 3.8; EST_HUMAN HIT: W28130.1, EVALUE 3.00e-57; SWISSPROT HIT: P53994, EVALUE 3.00e-13; NT HIT: X72689.1, EVALUE 5.00e-09
tgttttccaaatagtacctcttcaacattgcaggctgttttggctgaagtttccatgaatataagtccatgctccctagcaaaggcctctccttcttctctcttcacatccctgcgggactctaggtca

SEQ ID NO: 23470 - DNA, 145 bp, Homo sapiens
  MAP TO AC021237.3; EXPRESSED IN PLACENTA, SIGNAL = 1.3; EXPRESSED IN LUNG, SIGNAL = 1.2; EXPRESSED IN ADULT LIVER, SIGNAL =   1; EXPRESSED IN HEART, SIGNAL = 1.9; EXPRESSED IN FETAL LIVER, SIGNAL =   1; EXPRESSED IN BRAIN, SIGNAL = 0.88; EXPRESSED IN BONE MARROW, SIGNAL = 0.83; EST_HUMAN HIT: N42671.1, EVALUE 3.00e-76; SWISSPROT HIT: P55166, EVALUE 9.00e+00; NT HIT: AF200958.1, EVALUE 3.30e-01
cagttcttcagaggtcaaatgcatcaaacgttcagctattgcagcacactgggctgaatctcttataagttccccttgtttatctccaattactagctctggccaggtcagtccttcattcttcttaatcaaggaaatctccaag

SEQ ID NO: 23471 - DNA, 176 bp, Homo sapiens
  MAP TO AC016057.3; EXPRESSED IN ADULT LIVER, SIGNAL = 2.9; EXPRESSED IN BONE MARROW, SIGNAL = 2.7; EXPRESSED IN HELA, SIGNAL = 2.7; EXPRESSED IN HEART, SIGNAL = 2.8; EXPRESSED IN LUNG, SIGNAL = 2.7; EXPRESSED IN PLACENTA, SIGNAL = 2.7; EXPRESSED IN FETAL LIVER, SIGNAL = 2.5; EXPRESSED IN BRAIN, SIGNAL = 3.1; NT HIT: gi11425206, EVALUE 3.00e-82; SWISSPROT HIT: Q02357, EVALUE 1.00e-05; EST_HUMAN HIT: AW855189.1, EVALUE 6.10e-01
tgctgcatgaaatggatgattatggaaatacccctctgcattgtgctgtagaaaaaaaccaaattgaaagcgttaagtttcttctcagcagaggagcaaacccaaatctccgaaacttcaacatgatggctcctctccacatagctgtgcagggcatgaataatgaggtgatgaag

SEQ ID NO: 23472 - DNA, 179 bp, Homo sapiens
  MAP TO AL133395.14; EXPRESSED IN PLACENTA, SIGNAL = 1.4; EXPRESSED IN LUNG, SIGNAL = 4.5; EXPRESSED IN BONE MARROW, SIGNAL = 7.6; EXPRESSED IN BRAIN, SIGNAL = 4.4; EXPRESSED IN FETAL LIVER, SIGNAL =   7; EXPRESSED IN HEART, SIGNAL = 3.7; EXPRESSED IN HELA, SIGNAL = 6.1; EXPRESSED IN ADULT LIVER, SIGNAL = 3.3; EST_HUMAN HIT: AI624853.1, EVALUE 9.00e-31; SWISSPROT HIT: Q14738, EVALUE 1.00e+00; NT HIT: AF055066.1, EVALUE 6.00e-31
acttggggggcttcgggagtcatagtgtcttgggccgccggaaggtgggtgacttgcagatctttttttttcttgtggctgtggacatcttttagcactgccttcttggccttcaaagccttcactttggctttggctttaggaggggcaggagcttccttctttgccttcagcaccac

SEQ ID NO: 23473 - DNA, 105 bp, Homo sapiens
  MAP TO AC016890.4; EXPRESSED IN BRAIN, SIGNAL = 1.4; EXPRESSED IN LUNG, SIGNAL = 1.7; EXPRESSED IN PLACENTA, SIGNAL = 1.4; EXPRESSED IN ADULT LIVER, SIGNAL = 1.6; EXPRESSED IN FETAL LIVER, SIGNAL = 1.5; EXPRESSED IN BONE MARROW, SIGNAL = 1.7; EXPRESSED IN HEART, SIGNAL = 1.4; NT HIT: AJ296090.1, EVALUE 5.70e-02
gcagagtcctgcagtcagcttcccagctgtaattctccccgacaccggggatattaagaatgtgaagaaaatgcttgagtagattataaataatagtgtgagaca

SEQ ID NO: 23474 - DNA, 208 bp, Homo sapiens
  MAP TO AL133229.19; EXPRESSED IN PLACENTA, SIGNAL = 1.4; EXPRESSED IN FETAL LIVER, SIGNAL = 4.7; EXPRESSED IN LUNG, SIGNAL = 1.6; EXPRESSED IN ADULT LIVER, SIGNAL = 1.7; EXPRESSED IN HEART, SIGNAL =   2; EXPRESSED IN BONE MARROW, SIGNAL = 1.3; EXPRESSED IN BRAIN, SIGNAL = 1.5; NT HIT: U43137.1, EVALUE 4.90e-01; EST_HUMAN HIT: N92580.1, EVALUE 3.00e-03; SWISSPROT HIT: P16960, EVALUE 1.30e+00
atgggagccacagcacctgcagttgctttgggtgtgatcaggggtggggtgggacctgccattcaaagcagccttgaggccgaatctcacaggttgatactgttgaatagttcaactgaaaaccgagggaacagaagcctggctgtgctcagatggactctggtcagaacatggcgagggggctttattattctgaaccccagaatag

SEQ ID NO: 23475 - DNA, 274 bp, Homo sapiens
  MAP TO AC019221.3; EXPRESSED IN ADULT LIVER, SIGNAL = 1.4; EXPRESSED IN PLACENTA, SIGNAL = 1.3; EXPRESSED IN HELA, SIGNAL = 3.9; EXPRESSED IN FETAL LIVER, SIGNAL = 2.1; EXPRESSED IN BRAIN, SIGNAL = 2.5; EXPRESSED IN BONE MARROW, SIGNAL = 1.9; EXPRESSED IN LUNG, SIGNAL = 1.5; EXPRESSED IN HEART, SIGNAL = 1.4; SWISSPROT HIT: Q16760, EVALUE 6.00e-47; EST_HUMAN HIT: AW500549.1, EVALUE 0.00e+00; NT HIT: gi11429256, EVALUE 0.00e+00
ctttttctgtgtgttctatgatctgacgaattgctttcttcaggctgttggctctcagcatgagctgttctcgaggccggaatatctgcggccgggccgggcaagctgatgccaccaagcggtctccggtggaaccgcagatgctgcccgacccatctccatcttcagcctcctcggcaatggtggggggcgggttgggcagagaggacgaggcctgggactcatcgtccaaggtcttgagaagggaatccagcttctctttcaggacagagca

SEQ ID NO: 23476 - DNA, 180 bp, Homo sapiens
  MAP TO AP001421.1; EXPRESSED IN LUNG, SIGNAL = 2.9; EXPRESSED IN PLACENTA, SIGNAL = 1.8; EXPRESSED IN ADULT LIVER, SIGNAL =   2; EXPRESSED IN FETAL LIVER, SIGNAL = 2.2; EXPRESSED IN HEART, SIGNAL = 1.7; EXPRESSED IN BRAIN, SIGNAL = 3.3; EXPRESSED IN BONE MARROW, SIGNAL = 2.9; EST_HUMAN HIT: AW605865.1, EVALUE 2.00e-78; NT HIT: U52373.1, EVALUE 1.00e-78; SWISSPROT HIT: Q63470, EVALUE 3.00e-11
atcaccaccaccaccaccatcaccaccaccatggacaacaagccttgggtaaccggaccaggccaagggtctacaattctccaacgaatagctcctctacccaagattctatggaggttggccacagtcaccactccatgacatccctgtcttcctcaacgacttcttcctcgacatctt

SEQ ID NO: 23477 - DNA, 210 bp, Homo sapiens
  MAP TO AL133259.21; EXPRESSED IN LUNG, SIGNAL =  11; EXPRESSED IN ADULT LIVER, SIGNAL =  11; EXPRESSED IN FETAL LIVER, SIGNAL =  13; EXPRESSED IN BRAIN, SIGNAL =  14; EXPRESSED IN HELA, SIGNAL =   7; EXPRESSED IN PLACENTA, SIGNAL =  12; EXPRESSED IN HEART, SIGNAL =  13; EXPRESSED IN BONE MARROW, SIGNAL =  12; SWISSPROT HIT: Q01151, EVALUE 2.00e-38; NT HIT: S53354.1, EVALUE 1.00e-115; EST_HUMAN HIT: BE830187.1, EVALUE 1.00e-115
cttgccacttaggtttctctgcccatccgggtcctgcagagtgcacctgtatgtccccgagttgcagctggtagtgtttcggatcttcagggaatagggcctttcattgggggcgtcgaaagaaccattttgccccttctgatgatagtgctgtcccctgaggtggtcttcctggggtgtctccatcctctcttcaccaccctccaataa

SEQ ID NO: 23478 - DNA, 311 bp, Homo sapiens
  MAP TO AC010781.3; EXPRESSED IN LUNG, SIGNAL =   2; EXPRESSED IN ADULT LIVER, SIGNAL =   2; EXPRESSED IN HEART, SIGNAL =   2; EXPRESSED IN FETAL LIVER, SIGNAL = 2.2; EXPRESSED IN BRAIN, SIGNAL =   2; EXPRESSED IN BONE MARROW, SIGNAL = 2.4; EXPRESSED IN PLACENTA, SIGNAL = 1.5; EXPRESSED IN HELA, SIGNAL = 2.9; NT HIT: AL163206.2, EVALUE 3.00e-31; SWISSPROT HIT: P11260, EVALUE 4.50e-02; EST_HUMAN HIT: AA167678.1, EVALUE 3.00e-29
tagaattgatcaagcaaaagaatcttgaagaaaggcttgaagaaaggctatttgaaaatacacagtcagaagagatatttaaaaaaacaataaaaaacaaggaagcacgcattcaggatctagaaaatagcctccaaagggcaaatctaagaggtattggccttaaagaagaggtagagaaagagatgggagtagaaagtttcttaaaagggataataacagagtactttccaaacctcgagaaagaagactacttcaagaaagaagactacttcaaggcatttgttaatcaaaatcccaaaggtcaagca

SEQ ID NO: 23479 - DNA, 224 bp, Homo sapiens
  MAP TO AC018469.3; EXPRESSED IN LUNG, SIGNAL = 5.4; EXPRESSED IN PLACENTA, SIGNAL = 4.4; EXPRESSED IN HEART, SIGNAL = 6.7; EXPRESSED IN BONE MARROW, SIGNAL = 8.7; EXPRESSED IN ADULT LIVER, SIGNAL = 5.7; EXPRESSED IN BRAIN, SIGNAL = 8.4; EXPRESSED IN HELA, SIGNAL = 8.2; EXPRESSED IN FETAL LIVER, SIGNAL =   8; SWISSPROT HIT: Q10487, EVALUE 3.90e+00; NT HIT: AL163246.2, EVALUE 8.00e-37; EST_HUMAN HIT: AA458824.1, EVALUE 3.00e-43
atatctatggaactttcaacttgagagagatggtctgaaattggaacttatgtttcaaagggaagcaggtcataaaagtttggaaattttgcagcctgaccatgtgatagaaaagaaaaacccattttctggggagaaattcaagccaggtgcagaaatttgcataagtaatgaggatccaaatgttaatcaccaggacaattgggaaaatagctccaaggcat

SEQ ID NO: 23480 - DNA, 255 bp, Homo sapiens
  MAP TO AL161744.1; EXPRESSED IN LUNG, SIGNAL =  14; EXPRESSED IN ADULT LIVER, SIGNAL =  13; EXPRESSED IN HEART, SIGNAL =  14; EXPRESSED IN FETAL LIVER, SIGNAL =  11; EXPRESSED IN BRAIN, SIGNAL =  16; EXPRESSED IN BONE MARROW, SIGNAL =  10; EXPRESSED IN HELA, SIGNAL =  12; EXPRESSED IN PLACENTA, SIGNAL =  14; NT HIT: AJ007973.1, EVALUE 6.10e-01; EST_HUMAN HIT: AW157233.1, EVALUE 0.00e+00; SWISSPROT HIT: Q10022, EVALUE 1.00e-05
gaatttatacatttggactgtttgctacagatatctttgtaaatgctggacaagtagtcacaggaaatctggccccacatttccttgccctgtgtaagcccaattatacagcacttggatgtcagcagtatacacaattcatcagtggggaagaggcctgtactggcaacccagatctcatcatgagagcccgaaaaacctttccatccaaagaagcagctctcagtgtctatgcagctatgtatctgaccgtaa

SEQ ID NO: 23481 - DNA, 209 bp, Homo sapiens
  MAP TO AL121747.19; EXPRESSED IN LUNG, SIGNAL = 1.7; EXPRESSED IN PLACENTA, SIGNAL = 1.8; EXPRESSED IN ADULT LIVER, SIGNAL = 1.5; EXPRESSED IN BRAIN, SIGNAL = 1.9; EXPRESSED IN FETAL LIVER, SIGNAL = 1.8; EXPRESSED IN HEART, SIGNAL = 1.7; EXPRESSED IN BONE MARROW, SIGNAL = 1.6; EST_HUMAN HIT: AI363139.1, EVALUE 1.00e-114; NT HIT: AF044265.1, EVALUE 2.00e-03; SWISSPROT HIT: Q01080, EVALUE 2.20e+00
gacggcagcctctactttcaaagactttgagctggcatcagcccagcagaggcctgatatggtgctgcggcagcggtttcggggacttctgcggcctgaagatcgaacaaaagatgtcctgaccaagccaaggaccaaccgctttgtgaaattggcagtgatggggctgacagtggcacttggagcggctgcactggctgtggtgaaaa

SEQ ID NO: 23482 - DNA, 130 bp, Homo sapiens
  MAP TO AF241728.1; EXPRESSED IN ADULT LIVER, SIGNAL = 1.5; EXPRESSED IN HEART, SIGNAL = 1.3; EXPRESSED IN BONE MARROW, SIGNAL = 1.2; EXPRESSED IN LUNG, SIGNAL = 1.4; EXPRESSED IN PLACENTA, SIGNAL = 1.4; EXPRESSED IN FETAL LIVER, SIGNAL = 1.1; EXPRESSED IN BRAIN, SIGNAL = 1.2; EST_HUMAN HIT: AI217776.1, EVALUE 1.70e+00; NT HIT: gi7662107, EVALUE 7.30e-02; SWISSPROT HIT: P16382, EVALUE 3.60e-01
caaagcaatcattcctgaactaggccctgcaggaattgggaaggaggctaaaggaactggactggctcccatccccctcccctccccactgcgattctgggaggcagagtaaacaggaagtggggtatga

SEQ ID NO: 23483 - DNA, 137 bp, Homo sapiens
  MAP TO AC013550.4; EXPRESSED IN PLACENTA, SIGNAL = 2.2; EXPRESSED IN HEART, SIGNAL =   7; EXPRESSED IN FETAL LIVER, SIGNAL = 2.1; EXPRESSED IN BONE MARROW, SIGNAL = 2.1; EXPRESSED IN LUNG, SIGNAL = 2.2; EXPRESSED IN ADULT LIVER, SIGNAL = 2.1; EXPRESSED IN BRAIN, SIGNAL = 2.3; SWISSPROT HIT: P54296, EVALUE 2.00e-20; EST_HUMAN HIT: C03894.1, EVALUE 2.00e-52; NT HIT: gi11425430, EVALUE 1.00e-71
caattcctctgaaatcggaattagcttatgagatttttgataaggggcgggttcgcttctggctccaggctgagcacttatcaccagatgccagctaccgatttattattaacgacagagaagtctctgacagcgag

SEQ ID NO: 23484 - DNA, 165 bp, Homo sapiens
  MAP TO AL133227.7; EXPRESSED IN PLACENTA, SIGNAL =   2; EXPRESSED IN ADULT LIVER, SIGNAL = 1.8; EXPRESSED IN HELA, SIGNAL = 2.3; EXPRESSED IN HEART, SIGNAL = 1.9; EXPRESSED IN BRAIN, SIGNAL = 2.2; EXPRESSED IN LUNG, SIGNAL =   2; EXPRESSED IN FETAL LIVER, SIGNAL = 2.3; EXPRESSED IN BONE MARROW, SIGNAL = 1.9; SWISSPROT HIT: Q92556, EVALUE 1.00e-10; NT HIT: gi11545798, EVALUE 3.00e-57; EST_HUMAN HIT: AU130706.1, EVALUE 5.00e-57
cttgccttcggcggttcccaatctttcggaagctgctgccctcacagagccggttcaggcgctgctgcttgatcagctcaaggatctcgggctggatcttctccctcagctccctggggtggacacacactggagtgagcggaaggtcatggggacagtggagct

SEQ ID NO: 23485 - DNA, 143 bp, Homo sapiens
  MAP TO AC009416.2; EXPRESSED IN ADULT LIVER, SIGNAL = 1.7; EXPRESSED IN HELA, SIGNAL = 2.4; EXPRESSED IN HEART, SIGNAL = 1.4; EXPRESSED IN FETAL LIVER, SIGNAL = 1.3; EXPRESSED IN LUNG, SIGNAL = 1.4; EXPRESSED IN PLACENTA, SIGNAL = 1.5; EXPRESSED IN BRAIN, SIGNAL = 1.5; EXPRESSED IN BONE MARROW, SIGNAL = 1.4; NT HIT: M60266.1, EVALUE 3.20e-01; EST_HUMAN HIT: AA043272.1, EVALUE 7.50e+00; SWISSPROT HIT: P27302, EVALUE 6.90e+00
aaccctgtcaccaatatgagaactacctcaggctagcctgctggaagataagaaacaacatggaccagagccaagtcatcctagccaaggctatcctagaccaaccaacacagccacattctcagctgatcacagatgcatga

SEQ ID NO: 23486 - DNA, 200 bp, Homo sapiens
  MAP TO AL137143.6; EXPRESSED IN LUNG, SIGNAL = 1.4; EXPRESSED IN PLACENTA, SIGNAL = 1.4; EXPRESSED IN ADULT LIVER, SIGNAL = 1.4; EXPRESSED IN HEART, SIGNAL = 1.4; EXPRESSED IN FETAL LIVER, SIGNAL = 1.2; EXPRESSED IN BRAIN, SIGNAL = 1.5; EXPRESSED IN BONE MARROW, SIGNAL = 1.4; SWISSPROT HIT: P25172, EVALUE 2.20e+00; NT HIT: AL049784.1, EVALUE 1.00e-109; EST_HUMAN HIT: H06666.1, EVALUE 2.80e+00
cttctcccgttggcaacggttacatcaagcctccggttccacctgcttctggcacgcacagggagaaagggccgccaaccatgctacccatcaatgtggacccagacagtaaaccaggagaatatgtcctcaaaagtttatttgtcaacttcaccactcaggctgaacgcaagattcgtatcattatggcagagcccctg

SEQ ID NO: 23487 - DNA, 195 bp, Homo sapiens
  MAP TO AC011666.18; EXPRESSED IN HELA, SIGNAL = 2.2; EXPRESSED IN HEART, SIGNAL = 1.5; EXPRESSED IN BRAIN, SIGNAL = 1.4; EXPRESSED IN BONE MARROW, SIGNAL = 1.1e+02; EXPRESSED IN FETAL LIVER, SIGNAL =  14; EXPRESSED IN ADULT LIVER, SIGNAL = 1.8; EXPRESSED IN PLACENTA, SIGNAL = 2.2; EXPRESSED IN LUNG, SIGNAL = 5.2; EST_HUMAN HIT: AI523066.1, EVALUE 1.00e-106; NT HIT: gi9845520, EVALUE 1.00e-106; SWISSPROT HIT: P06702, EVALUE 2.00e-34
ttagggggtgccctccccgaggcctggcttatggtggtggccagggccctcgtcaccctcgtgcatcttctcgtgggaggcccaggttagcctcgccatcagcatgatgaactcctcgaagctcagctgcttgtctgcatttgtgtccaggtcctccatgatgtgttctatgaccttttcattcttattctcctt

SEQ ID NO: 23488 - DNA, 428 bp, Homo sapiens
  MAP TO AC022470.3; EXPRESSED IN BONE MARROW, SIGNAL = 1.1; EXPRESSED IN ADULT LIVER, SIGNAL = 1.4; EXPRESSED IN HEART, SIGNAL = 1.3; EXPRESSED IN LUNG, SIGNAL = 1.5; EXPRESSED IN PLACENTA, SIGNAL = 5.4; EXPRESSED IN FETAL LIVER, SIGNAL = 1.5; EXPRESSED IN BRAIN, SIGNAL = 0.96; EST_HUMAN HIT: BE617295.1, EVALUE 4.00e-72; NT HIT: gi5031892, EVALUE 3.00e-72; SWISSPROT HIT: Q62685, EVALUE 2.00e-18
ctgctttggcaaagtcttcccggttataactgaaatccttgaggaaggtgatactctcactcccagggttgtacctccgagatgtctccagaagcatcacctgcacacaagcagcaaacctcaaacggggactaggagggctggtcttggagcatggcctcttccagggaggccgattctcctcatccctgcttcccagcagatttggctctcccagctcgatgtctggaggcccctcccacagataatcccactctgcttctcccttcatcccttgcccttctccagccacctcgatcgcagaggtcttcagcagggcaatctggtcctcccggctgagctgcaggaagccgggtagctgtttagcaaagtcaactatctcctgcacagagacgatggccagctcagtgaagtgggcaaagcgctgc

SEQ ID NO: 23489 - DNA, 159 bp, Homo sapiens
  MAP TO AL136984.7; EXPRESSED IN HELA, SIGNAL = 2.6; EXPRESSED IN LUNG, SIGNAL = 2.2; EXPRESSED IN PLACENTA, SIGNAL = 2.2; EXPRESSED IN HEART, SIGNAL = 2.1; EXPRESSED IN BONE MARROW, SIGNAL = 2.2; EXPRESSED IN ADULT LIVER, SIGNAL =   2; EXPRESSED IN FETAL LIVER, SIGNAL = 2.1; EXPRESSED IN BRAIN, SIGNAL = 2.2; NT HIT: X95256.1, EVALUE 9.20e-02; EST_HUMAN HIT: AA165304.1, EVALUE 5.40e-01; SWISSPROT HIT: gi10720301, EVALUE 4.00e+00
taccatggatatttctgctgcccttattggcattctttctgctaggatggttgacaatattaccactatgtttggatttctgtttctgagacagaagaggtttactattcctatccttaaactcagctctatgtctccagttctgtttgtttataagtt

SEQ ID NO: 23490 - DNA, 282 bp, Homo sapiens
  MAP TO AC017086.3; EXPRESSED IN PLACENTA, SIGNAL = 5.2; EXPRESSED IN FETAL LIVER, SIGNAL = 4.5; EXPRESSED IN BONE MARROW, SIGNAL = 5.7; EXPRESSED IN LUNG, SIGNAL = 5.7; EXPRESSED IN ADULT LIVER, SIGNAL = 6.4; EXPRESSED IN HELA, SIGNAL = 4.9; EXPRESSED IN HEART, SIGNAL = 4.5; EXPRESSED IN BRAIN, SIGNAL = 5.2; SWISSPROT HIT: O86490, EVALUE 4.80e+00; NT HIT: U82671.2, EVALUE 6.00e-29; EST_HUMAN HIT: AI244341.1, EVALUE 4.00e-43
ctgataaagcttgaatgtgtttccatccaaatctcatgttgaaatgtaatccccaatgttggaggtggggcctggtgggaggtgactggatcatgggggaggatttctcttgaataatttagcacgatcctcttggtgctgtcctcacaatagtgagttttcatgagatctggtcttttaaaagtgtgtggcacctcctcgcctctctcttgctcctgcttttgccatgtgatgcgcaagttccctcttcgccttccaccatcattggaagcttccagaggc

SEQ ID NO: 23491 - DNA, 117 bp, Homo sapiens
  MAP TO AC011957.2; EXPRESSED IN PLACENTA, SIGNAL = 3.4; EXPRESSED IN LUNG, SIGNAL = 2.8; EXPRESSED IN ADULT LIVER, SIGNAL = 2.1; EXPRESSED IN HEART, SIGNAL =   4; EXPRESSED IN FETAL LIVER, SIGNAL = 1.6; EXPRESSED IN BRAIN, SIGNAL = 1.9; EXPRESSED IN BONE MARROW, SIGNAL = 1.5; EXPRESSED IN HELA, SIGNAL = 2.8; NT HIT: X05151.1, EVALUE 1.60e-02
ctagaggaagatgattgtgacggtgaggagggcctcaggaccagcgggggaaatgacatcaaggatggtgagggtgatgtcagggacagaaagggcaatgacggcgataaacttcat

SEQ ID NO: 23492 - DNA, 174 bp, Homo sapiens
  MAP TO AL161642.2; EXPRESSED IN ADULT LIVER, SIGNAL = 2.9; EXPRESSED IN HELA, SIGNAL = 2.3; EXPRESSED IN LUNG, SIGNAL = 2.4; EXPRESSED IN PLACENTA, SIGNAL = 1.5; EXPRESSED IN FETAL LIVER, SIGNAL = 2.1; EXPRESSED IN BRAIN, SIGNAL = 2.5; EXPRESSED IN BONE MARROW, SIGNAL = 3.7; EXPRESSED IN HEART, SIGNAL = 1.2; EST_HUMAN HIT: AI761963.1, EVALUE 8.00e-59; SWISSPROT HIT: P08089, EVALUE 1.30e-02
atgtacaagagtgagattatcacgtacaagagtgagattatcatgtacaagagtgagattatcatgtacaagagtgagattatcatgtacaagagtgagattatcatgtacaagagtgagattatcatgtacaagagtgagattatcatgtacaagagatcccaggaatactga

SEQ ID NO: 23493 - DNA, 151 bp, Homo sapiens
  MAP TO AC008521.5; EXPRESSED IN PLACENTA, SIGNAL = 1.4; EXPRESSED IN ADULT LIVER, SIGNAL = 2.8; EXPRESSED IN HEART, SIGNAL = 1.2; EXPRESSED IN FETAL LIVER, SIGNAL = 1.2; EXPRESSED IN BRAIN, SIGNAL = 1.5; EXPRESSED IN BONE MARROW, SIGNAL = 1.1; EXPRESSED IN HELA, SIGNAL = 2.3; SWISSPROT HIT: Q61085, EVALUE 2.00e-06; EST_HUMAN HIT: BF196068.1, EVALUE 3.00e-67; NT HIT: gi6680084, EVALUE 4.00e-04
ttactctgtgttctgatagacgcccaccgagatgttcagcccctccagctcttccttgagcatctgcaggtctgagttgacgaagctcagctccagccgcacttgctcccgcacctttgagtttgtggccactctgttcaaagagaagagg

SEQ ID NO: 23494 - DNA, 145 bp, Homo sapiens
  MAP TO AC008510.4; EXPRESSED IN PLACENTA, SIGNAL = 4.3; EXPRESSED IN ADULT LIVER, SIGNAL = 5.3; EXPRESSED IN FETAL LIVER, SIGNAL = 3.5; EXPRESSED IN BRAIN, SIGNAL =   4; EXPRESSED IN BONE MARROW, SIGNAL = 4.7; EXPRESSED IN LUNG, SIGNAL = 3.9; EXPRESSED IN HELA, SIGNAL = 3.9; EXPRESSED IN HEART, SIGNAL = 3.1; SWISSPROT HIT: P14629, EVALUE 6.90e+00; NT HIT: AL163249.2, EVALUE 3.00e-23; EST_HUMAN HIT: BE890992.1, EVALUE 5.00e-35
tctctttgtgtccacactgcctttatgagctgcaacactcaaggtgaagctctgcagcttcactcctgaagtgaccgagaccacgagtccactgggaggaatggaaaactccagatgcactgccttaagagctgtaacactcact

SEQ ID NO: 23495 - DNA, 192 bp, Homo sapiens
  MAP TO AL133173.13; EXPRESSED IN LUNG, SIGNAL = 4.4; EXPRESSED IN ADULT LIVER, SIGNAL = 3.7; EXPRESSED IN FETAL LIVER, SIGNAL = 6.4; EXPRESSED IN BRAIN, SIGNAL = 2.3; EXPRESSED IN BONE MARROW, SIGNAL = 5.9; EXPRESSED IN HELA, SIGNAL = 4.6; EXPRESSED IN PLACENTA, SIGNAL = 2.4; EXPRESSED IN HEART, SIGNAL = 2.1; NT HIT: gi11424064, EVALUE 1.00e-41; SWISSPROT HIT: P29341, EVALUE 6.00e-13; EST_HUMAN HIT: AU159839.1, EVALUE 7.00e-44
ccacgccctagtcgtgctggtaaaatcattggcatgttggtggagattggtaatttagaactccttcatatgcttgaatctccagatcctctctatactaaggttgacaaaggtatagctgtactacaagagcaccaagctaaagaggctgcccagaaagcagttaatggtgccactggtgttccaattgtt

SEQ ID NO: 23496 - DNA, 163 bp, Homo sapiens
  MAP TO AC022262.3; EXPRESSED IN HEART, SIGNAL = 2.7; EXPRESSED IN BRAIN, SIGNAL = 3.4; EXPRESSED IN LUNG, SIGNAL =   3; EXPRESSED IN PLACENTA, SIGNAL =   3; EXPRESSED IN ADULT LIVER, SIGNAL = 3.2; EXPRESSED IN FETAL LIVER, SIGNAL = 2.9; EXPRESSED IN BONE MARROW, SIGNAL = 2.6; SWISSPROT HIT: P27119, EVALUE 5.00e-13; EST_HUMAN HIT: BF352776.1, EVALUE 7.00e-87; NT HIT: AF091492.1, EVALUE 9.50e-02
attgcttccgtgatcaactcagccttggacctgtacttcccagagggctgtggcgtggacatctttgctgagctggggcgctactacgtgacctcggccttcactgtggcagtcagcatcattgccaagaaggaggttctgctagaccagcctggcagggagg

SEQ ID NO: 23497 - DNA, 512 bp, Homo sapiens
  MAP TO AC015897.3; EXPRESSED IN PLACENTA, SIGNAL = 2.7; EXPRESSED IN FETAL LIVER, SIGNAL = 2.3; EXPRESSED IN HEART, SIGNAL = 2.2; EXPRESSED IN BONE MARROW, SIGNAL = 2.6; EXPRESSED IN LUNG, SIGNAL = 3.1; EXPRESSED IN ADULT LIVER, SIGNAL = 2.7; EXPRESSED IN BRAIN, SIGNAL = 3.4; EXPRESSED IN HELA, SIGNAL = 2.9; SWISSPROT HIT: P14328, EVALUE 5.80e-01
ccttcctcttgctcctgtcctagccctgaggtcttccgctccagggctcctggagtgcccaccccagcctctgttgtatatgtcactgtcatctcctctgctgctggcacttcctccccactccgtgctaattcctctaccaccaccttccctgcagctgctgtttttcctactaactcatcctgttggtgccaggtttcttcctcagcaacatctgaaaaggaggaggctttatttgctattgttttctcctcggctgtctccgaacctgccaacacctccctctcctctgcggctgtttctgccgtttcaccacctccgtgtagaacttccacagccacaacccttcctcctcccatgccctcattcttttgtgtgtttccttctccttccatgtccccgtccccttccgagttcctgtcctgcatcgcttctgtctccagagtgcactctttgtcctcttcctcctctgggtcctcatccaccgcttcctccctgaacttttctgccat

SEQ ID NO: 23498 - DNA, 92 bp, Homo sapiens
  MAP TO AL139352.8; EXPRESSED IN ADULT LIVER, SIGNAL = 1.4; EXPRESSED IN PLACENTA, SIGNAL = 1.2; EXPRESSED IN FETAL LIVER, SIGNAL = 1.2; EXPRESSED IN BONE MARROW, SIGNAL = 1.3; EXPRESSED IN LUNG, SIGNAL = 1.4; EXPRESSED IN HEART, SIGNAL = 1.2; EXPRESSED IN BRAIN, SIGNAL = 1.3; EST_HUMAN HIT: BE697302.1, EVALUE 1.80e-02; SWISSPROT HIT: P36130, EVALUE 9.50e+00; NT HIT: AF193612.1, EVALUE 1.20e-02
ctgctgggcaaatcccccagctggagggtgtgctccagatcctccaggggtccccagggggttgagaagatgaggggcacacccagcagccc

SEQ ID NO: 23499 - DNA, 206 bp, Homo sapiens
  MAP TO AC007956.5; EXPRESSED IN LUNG, SIGNAL = 1.1; EXPRESSED IN PLACENTA, SIGNAL = 1.8; EXPRESSED IN ADULT LIVER, SIGNAL = 3.6; EXPRESSED IN FETAL LIVER, SIGNAL = 1.9; EXPRESSED IN BRAIN, SIGNAL = 1.7; EXPRESSED IN HELA, SIGNAL = 3.4; EXPRESSED IN HEART, SIGNAL = 1.6; EXPRESSED IN BONE MARROW, SIGNAL = 1.9; NT HIT: gi7662051, EVALUE 1.00e-112; EST_HUMAN HIT: AU118051.1, EVALUE 1.00e-112; SWISSPROT HIT: Q04674, EVALUE 1.30e+00
cttctcaggggtgtggcactcagagggcgagtcttcatcttcctcgtcaacagcagtggatggccggcgctgggaagaggtcatgtgcatgggtggcaggtgccatggagtgctgctacagttggtagcattataaagataagcctcaaagtaaatgctcacgcctgaagtggacacattgcgttcgacgatattcttctcatcct

SEQ ID NO: 23500 - DNA, 202 bp, Homo sapiens
  MAP TO AL158176.5; EXPRESSED IN ADULT LIVER, SIGNAL = 1.8; EXPRESSED IN HELA, SIGNAL = 2.6; EXPRESSED IN FETAL LIVER, SIGNAL = 1.5; EXPRESSED IN LUNG, SIGNAL = 1.6; EXPRESSED IN PLACENTA, SIGNAL = 1.6; EXPRESSED IN HEART, SIGNAL = 1.7; EXPRESSED IN BRAIN, SIGNAL = 1.5; EXPRESSED IN BONE MARROW, SIGNAL = 1.6; EST_HUMAN HIT: BE897259.1, EVALUE 9.00e-96; NT HIT: gi5730004, EVALUE 2.00e-65; SWISSPROT HIT: Q58548, EVALUE 3.80e+00
tttacaacagtaatcagttcatgaaactctgtgttctgaaagtggccacagtcagtgaatttgtgcaatttggtttccaacctatcggccacttcttgttgttccttccagggaaggaacgggtcgtcagtagagccaaactgcacaatgtaagggcagttggccttgatcttctcccactgccaggggcgggtgaagtatc

SEQ ID NO: 23501 - DNA, 97 bp, Homo sapiens
  MAP TO AC022209.3; EXPRESSED IN LUNG, SIGNAL = 3.2; EXPRESSED IN PLACENTA, SIGNAL = 2.4; EXPRESSED IN ADULT LIVER, SIGNAL = 2.6; EXPRESSED IN FETAL LIVER, SIGNAL =   2; EXPRESSED IN BRAIN, SIGNAL = 2.2; EXPRESSED IN HEART, SIGNAL = 2.2; EXPRESSED IN BONE MARROW, SIGNAL = 2.1; NT HIT: AL163204.2, EVALUE 5.20e-02; EST_HUMAN HIT: BE085649.1, EVALUE 7.60e-02
ataagtatctgcccatcactttgctcttcccttgtgctatgctgcctacatgaacatgtttgctgttggtgattctgggtttgttgtcgttgttttt

SEQ ID NO: 23502 - DNA, 165 bp, Homo sapiens
  MAP TO AL136089.8; EXPRESSED IN PLACENTA, SIGNAL = 1.6; EXPRESSED IN HEART, SIGNAL = 1.4; EXPRESSED IN LUNG, SIGNAL = 1.5; EXPRESSED IN ADULT LIVER, SIGNAL = 1.8; EXPRESSED IN FETAL LIVER, SIGNAL = 1.6; EXPRESSED IN BRAIN, SIGNAL = 1.3; EXPRESSED IN BONE MARROW, SIGNAL = 1.3; SWISSPROT HIT: Q39055, EVALUE 1.00e-14; NT HIT: AF034374.1, EVALUE 3.00e-88; EST_HUMAN HIT: BE898369.1, EVALUE 4.00e-88
ctttcctgcggacaatgaactcaaacttggcaggcaccagggtgtccaggctgatgttgatggcactgagaccagccttctgaagctggggcagtagccgggccaggttgatgccattggtggtaacacctatggttctcagcccttccagccgctggagctggg

SEQ ID NO: 23503 - DNA, 176 bp, Homo sapiens
  MAP TO AC010876.2; EXPRESSED IN BONE MARROW, SIGNAL =   2; EXPRESSED IN ADULT LIVER, SIGNAL = 2.1; EXPRESSED IN HELA, SIGNAL = 2.7; EXPRESSED IN BRAIN, SIGNAL =   2; EXPRESSED IN LUNG, SIGNAL = 1.8; EXPRESSED IN HEART, SIGNAL =   2; EXPRESSED IN PLACENTA, SIGNAL = 2.1; EXPRESSED IN FETAL LIVER, SIGNAL = 1.9; NT HIT: AF032897.1, EVALUE 8.00e-95; SWISSPROT HIT: Q46843, EVALUE 5.10e+00
gaggaagggctgaaacttcggtcagttttgatggatgcttccggttgactggttctcatcagctggatgatgggtctctgatattctgatcctgctgttaccatactgtaggctggggggaccacagtggtttgtttctgcagcaactgtaagatggtctggatgtcagtggtcat

SEQ ID NO: 23504 - DNA, 175 bp, Homo sapiens
  MAP TO AC008468.4; EXPRESSED IN PLACENTA, SIGNAL = 0.96; EXPRESSED IN FETAL LIVER, SIGNAL = 0.89; EXPRESSED IN ADULT LIVER, SIGNAL =   1; EXPRESSED IN BONE MARROW, SIGNAL =   1; EXPRESSED IN HEART, SIGNAL = 1.2; EXPRESSED IN BRAIN, SIGNAL = 1.2; EXPRESSED IN LUNG, SIGNAL = 1.1; EST_HUMAN HIT: AW134813.1, EVALUE 5.00e-88; SWISSPROT HIT: P07106, EVALUE 1.00e+00; NT HIT: AF152309.1, EVALUE 3.00e-94
gaagcaaaacacggcaccttcgtgggccgcatcgctcaggacctggggctggagctggcggagctggtgccgcgcctgttccgggtggcgtccaaaagacacggggaccttctggaggtaaatctgcagaatggcattttgtttgtgaattctcggatcgaccgcgaggagctgt

SEQ ID NO: 23505 - DNA, 95 bp, Homo sapiens
  MAP TO AC015807.3; EXPRESSED IN PLACENTA, SIGNAL = 3.1; EXPRESSED IN ADULT LIVER, SIGNAL = 3.5; EXPRESSED IN HEART, SIGNAL = 4.2; EXPRESSED IN FETAL LIVER, SIGNAL = 2.9; EXPRESSED IN BRAIN, SIGNAL = 2.9; EXPRESSED IN BONE MARROW, SIGNAL = 3.1; EXPRESSED IN LUNG, SIGNAL = 3.2; EXPRESSED IN HELA, SIGNAL = 4.3; NT HIT: X91151.1, EVALUE 2.00e-01
ctcctaatctcatctcttccaaatctgcttttgccataatctttgacaccacagtacatggcaattccacccttccatttctcaggaaaaaatct

SEQ ID NO: 23506 - DNA, 78 bp, Homo sapiens
  MAP TO AC015873.2; EXPRESSED IN LUNG, SIGNAL = 3.3; EXPRESSED IN ADULT LIVER, SIGNAL =   3; EXPRESSED IN FETAL LIVER, SIGNAL = 3.2; EXPRESSED IN BRAIN, SIGNAL = 3.1; EXPRESSED IN BONE MARROW, SIGNAL = 3.4; EXPRESSED IN PLACENTA, SIGNAL = 2.7; EXPRESSED IN HEART, SIGNAL = 3.2; NT HIT: gi4885546, EVALUE 1.00e-11; EST_HUMAN HIT: BE613041.1, EVALUE 2.30e-01
atgaagaaactgttctgggtggaatggccagatgcattgctggccaagcccaaggtgaccaagtcctgcctgatctgc

SEQ ID NO: 23507 - DNA, 112 bp, Homo sapiens
  MAP TO AC016224.6; EXPRESSED IN PLACENTA, SIGNAL =   2; EXPRESSED IN HELA, SIGNAL = 2.3; EXPRESSED IN HEART, SIGNAL =   2; EXPRESSED IN FETAL LIVER, SIGNAL = 1.9; EXPRESSED IN BRAIN, SIGNAL = 2.1; EXPRESSED IN BONE MARROW, SIGNAL = 1.9; EXPRESSED IN LUNG, SIGNAL = 1.2; NT HIT: gi7662067, EVALUE 4.00e-03; SWISSPROT HIT: P35689, EVALUE 4.20e+00
tgatatctgctggcccacccctaccagagatggtaaaattcaaaaagtcacatgacatcaaacagaagtgggaagggaagatcacctttagaggagctctagatgaagacat

SEQ ID NO: 23508 - DNA, 464 bp, Homo sapiens
  MAP TO AL121883.13; EXPRESSED IN ADULT LIVER, SIGNAL = 1.3; EXPRESSED IN HEART, SIGNAL = 1.2; EXPRESSED IN FETAL LIVER, SIGNAL = 1.5; EXPRESSED IN BONE MARROW, SIGNAL = 1.3; EXPRESSED IN LUNG, SIGNAL = 1.2; EXPRESSED IN PLACENTA, SIGNAL = 1.3; EXPRESSED IN BRAIN, SIGNAL = 1.2; NT HIT: L20773.1, EVALUE 0.00e+00; SWISSPROT HIT: Q02926, EVALUE 1.30e+00; EST_HUMAN HIT: BE745597.1, EVALUE 0.00e+00
ggggaatggccgctgttttattgggtgtgctcggttggccttgcctccccctgagggcctgtcctcagtgccacctggggccccaggttcagtccaatccccatcctcagtccagggccgagccatagtttcaaaatcaaaccaaatatcaggctcctcctcatccagctcctggtcatcgtcccactcctcttccccctcctcctccagcttctcactgtcatctcttcctatggtcagtttgtaaacgcagtagcaggcaccagccccaatcatcagtcctgccgccatccaacccacttcccgagcccggcccatgctcaagtctgtgccagccttggggcaggacaggagagggccttgctccacctgattgaagaggtctctcaggtccagggtgagtaaggatggagggtagcagtcttcagcttcttccaggctcttgtagctctcttgtgatgaat

SEQ ID NO: 23509 - DNA, 180 bp, Homo sapiens
  MAP TO AL158046.1; EXPRESSED IN PLACENTA, SIGNAL = 0.72; EXPRESSED IN HEART, SIGNAL = 1.2; EXPRESSED IN BONE MARROW, SIGNAL = 0.49; EXPRESSED IN ADULT LIVER, SIGNAL = 0.58; EXPRESSED IN FETAL LIVER, SIGNAL = 0.55; EXPRESSED IN BRAIN, SIGNAL = 0.61; EST_HUMAN HIT: C02738.1, EVALUE 6.20e-01; NT HIT: gi4758039, EVALUE 4.20e-01; SWISSPROT HIT: P01860, EVALUE 3.00e+00
ctattatttgttggccagttgttggaggtgttgggtgtgtggttttggacacagtgggcatgggtggtcccagtctcctggagtggacagccagacgaataccgtagacacaggaacacaaacatgttggagcgttcgtcgtatttctgggggttgcagctttgtctcagtttgctgtgg

SEQ ID NO: 23510 - DNA, 133 bp, Homo sapiens
  MAP TO AL138914.5; EXPRESSED IN LUNG, SIGNAL = 1.8; EXPRESSED IN PLACENTA, SIGNAL = 1.6; EXPRESSED IN HEART, SIGNAL = 1.6; EXPRESSED IN FETAL LIVER, SIGNAL = 1.6; EXPRESSED IN BRAIN, SIGNAL = 1.7; EXPRESSED IN BONE MARROW, SIGNAL = 1.6; EXPRESSED IN ADULT LIVER, SIGNAL = 1.6; SWISSPROT HIT: P49918, EVALUE 2.10e-01; EST_HUMAN HIT: AA493574.1, EVALUE 1.10e-01
tccacactgtgtaccttccctccatcccatctccacgcccatgcaccttccaacctccagtcccatccctggatcctgccacatcacatgtgacctcagttccctcgatgaatgctgttggctgcgtggccat

SEQ ID NO: 23511 - DNA, 128 bp, Homo sapiens
  MAP TO AL158049.2; EXPRESSED IN PLACENTA, SIGNAL = 2.3; EXPRESSED IN ADULT LIVER, SIGNAL = 2.5; EXPRESSED IN HELA, SIGNAL = 3.9; EXPRESSED IN HEART, SIGNAL = 2.4; EXPRESSED IN BONE MARROW, SIGNAL = 2.3; EXPRESSED IN LUNG, SIGNAL = 2.3; EXPRESSED IN BRAIN, SIGNAL = 1.9; EXPRESSED IN FETAL LIVER, SIGNAL = 2.2; SWISSPROT HIT: P45988, EVALUE 5.40e+00; NT HIT: U51688.1, EVALUE 2.80e-01
gaaagaagaaacaagatcctaggacgactgaaacagaccacaaacaaggtaaagacaggaagcaaactcagcagtgtggcaggcaatgacatgtgctatggagggaaacagagccgcaaggagacgcg

SEQ ID NO: 23512 - DNA, 154 bp, Homo sapiens
  MAP TO AL132654.12; EXPRESSED IN LUNG, SIGNAL = 2.5; EXPRESSED IN HEART, SIGNAL = 2.2; EXPRESSED IN BONE MARROW, SIGNAL = 2.2; EXPRESSED IN ADULT LIVER, SIGNAL = 2.8; EXPRESSED IN BRAIN, SIGNAL = 2.3; EXPRESSED IN PLACENTA, SIGNAL = 2.2; EXPRESSED IN FETAL LIVER, SIGNAL = 2.3; NT HIT: gi11425602, EVALUE 6.00e-06; EST_HUMAN HIT: AI208765.1, EVALUE 5.00e-35; SWISSPROT HIT: Q14693, EVALUE 5.00e-20
aaatgggtacaagttcctgtactgctcggcgcgggccattggcatggcggacctcaccaaggggtacctgcagtgggtgagcgaggggggctgtagcctccccaagggccccatccttctgtctcccagcagcctcttctctgccctccacagg

SEQ ID NO: 23513 - DNA, 78 bp, Homo sapiens
  MAP TO AC019184.2; EXPRESSED IN HEART, SIGNAL = 2.6; EXPRESSED IN BRAIN, SIGNAL = 2.6; EXPRESSED IN BONE MARROW, SIGNAL = 2.9; EXPRESSED IN LUNG, SIGNAL = 2.9; EXPRESSED IN HELA, SIGNAL = 2.7; EXPRESSED IN PLACENTA, SIGNAL = 2.8; EXPRESSED IN ADULT LIVER, SIGNAL = 3.3; EXPRESSED IN FETAL LIVER, SIGNAL = 2.3; NT HIT: AE001486.1, EVALUE 2.40e+00; EST_HUMAN HIT: BF034538.1, EVALUE 3.60e+00
gggcatccaccagaagaaaggcctaacccgacagcacaagatgataagcctaaaaccccagtatctcaacaatagaat

SEQ ID NO: 23514 - DNA, 149 bp, Homo sapiens
  MAP TO AC022997.3; EXPRESSED IN PLACENTA, SIGNAL = 3.3; EXPRESSED IN HEART, SIGNAL = 4.5; EXPRESSED IN FETAL LIVER, SIGNAL = 6.9; EXPRESSED IN BONE MARROW, SIGNAL = 6.7; EXPRESSED IN LUNG, SIGNAL = 4.8; EXPRESSED IN ADULT LIVER, SIGNAL = 6.1; EXPRESSED IN HELA, SIGNAL =   4; EXPRESSED IN BRAIN, SIGNAL = 5.7; SWISSPROT HIT: Q9ZCN6, EVALUE 3.50e-01; NT HIT: U93163.1, EVALUE 9.00e-45; EST_HUMAN HIT: BE044076.1, EVALUE 6.00e-50
cctcagacaggtccttcaggaggtattccagaagaaagcattgttatcataggagatgtcagctccatgcatgttattgcccctgaagaccttccagtgggacaagatgtggaggtggaagacagtgatattgatgatcctgaccctgt

SEQ ID NO: 23515 - DNA, 203 bp, Homo sapiens
  MAP TO AC013800.3; EXPRESSED IN LUNG, SIGNAL = 3.4; EXPRESSED IN PLACENTA, SIGNAL = 2.8; EXPRESSED IN ADULT LIVER, SIGNAL = 2.1; EXPRESSED IN HEART, SIGNAL = 2.8; EXPRESSED IN BRAIN, SIGNAL = 2.7; EXPRESSED IN FETAL LIVER, SIGNAL = 2.5; EXPRESSED IN BONE MARROW, SIGNAL = 2.3; SWISSPROT HIT: P97435, EVALUE 1.00e-07; NT HIT: AB005651.1, EVALUE 1.20e-01; EST_HUMAN HIT: AA034203.1, EVALUE 1.80e-01
ctgaaaattgaatggcaaagccctgcttgctggtgaagaagtcagtgctgaactgcaggacgaccgagttgaaggtgctatgcaggtccttgggcagggccgggccactcagctccttcagcagaaccccgctctccacaggcccatcccagatgcgcagcacgtcgtgaacctcctctgtgtcaaacaccaggaagtgtagc

SEQ ID NO: 23516 - DNA, 286 bp, Homo sapiens
  MAP TO AC025226.2; EXPRESSED IN ADULT LIVER, SIGNAL = 1.6; EXPRESSED IN BONE MARROW, SIGNAL = 1.2; EXPRESSED IN LUNG, SIGNAL = 1.2; EXPRESSED IN PLACENTA, SIGNAL = 1.1; EXPRESSED IN HEART, SIGNAL = 2.7; EXPRESSED IN FETAL LIVER, SIGNAL = 1.3; EXPRESSED IN BRAIN, SIGNAL = 1.5; EST_HUMAN HIT: X97511.1, EVALUE 1.00e-100; NT HIT: AJ271735.1, EVALUE 0.00e+00; SWISSPROT HIT: Q28983, EVALUE 1.00e-02
aagggagaagctgagcaatctgcagggcaccctagtgagcacctcttcatctgtgaggaatgtgggcgctgcaagtgcgtcccctgcacagcagctcgccctctcccctcctgctggctgtgcaaccagcgctgcctttgctctgctgagagcctcctcgattatggcacttgtctctgctgtgtcaagggcctcttctaccactgctccactgatgatgaagacaactgtgctgatgagccctgctcttgtgggcctagttcttgctttgtccgctgggcagcca

SEQ ID NO: 23517 - DNA, 149 bp, Homo sapiens
  MAP TO AL121908.7; EXPRESSED IN ADULT LIVER, SIGNAL = 6.1; EXPRESSED IN HELA, SIGNAL = 7.7; EXPRESSED IN FETAL LIVER, SIGNAL =   6; EXPRESSED IN BRAIN, SIGNAL = 6.1; EXPRESSED IN LUNG, SIGNAL = 5.4; EXPRESSED IN PLACENTA, SIGNAL = 5.5; EXPRESSED IN HEART, SIGNAL = 5.2; EXPRESSED IN BONE MARROW, SIGNAL =   6; SWISSPROT HIT: P08045, EVALUE 1.80e+00; EST_HUMAN HIT: N20287.1, EVALUE 2.00e-03; NT HIT: AJ132772.1, EVALUE 2.20e-02
gggggtcgttcgtgtgtttccgagtggtttgtgagcgccgtcgatctgatctggaacccgatcctccgctggctgcaaatattcgtgtcctgtctgttgtgtgtcttttcactttgtttatggtgtccttggttgatagaagcttttag

SEQ ID NO: 23518 - DNA, 148 bp, Homo sapiens
  MAP TO AL133544.5; EXPRESSED IN LUNG, SIGNAL = 5.3; EXPRESSED IN HEART, SIGNAL = 3.7; EXPRESSED IN BONE MARROW, SIGNAL = 6.6; EXPRESSED IN BRAIN, SIGNAL = 6.6; EXPRESSED IN FETAL LIVER, SIGNAL = 5.1; EXPRESSED IN HELA, SIGNAL = 4.4; EXPRESSED IN ADULT LIVER, SIGNAL = 7.3; EXPRESSED IN PLACENTA, SIGNAL = 3.7; EST_HUMAN HIT: AA468646.1, EVALUE 7.00e-25; SWISSPROT HIT: P35672, EVALUE 5.30e+00; NT HIT: U60822.1, EVALUE 4.00e-16
atggggccctgtgtcccagctgctctggctccagctgtggctaaaaggggccaagatacagctcaggctattaattcagagggtgaaagcctcaagtcttggcagcttccatgtggtattgagcctgtgggtgtgcagaaggcaagag

SEQ ID NO: 23519 - DNA, 168 bp, Homo sapiens
  MAP TO AL133319.21; EXPRESSED IN PLACENTA, SIGNAL = 1.1; EXPRESSED IN ADULT LIVER, SIGNAL = 1.2; EXPRESSED IN FETAL LIVER, SIGNAL = 0.95; EXPRESSED IN LUNG, SIGNAL = 0.99; EXPRESSED IN HEART, SIGNAL = 1.2; EXPRESSED IN BRAIN, SIGNAL = 1.1; EXPRESSED IN BONE MARROW, SIGNAL = 0.97; NT HIT: AL161512.2, EVALUE 3.90e-01; EST_HUMAN HIT: AA970317.1, EVALUE 1.50e-01; SWISSPROT HIT: P43372, EVALUE 3.90e+00
cttcctggtggaactgatacttgaaataagtccgaatttttagtttaagagtaggtatagagtattctaaattactggagaagcaaataagtacaatgcaaaaagaagtatgagaatctgaaacgtagttgaagtttatggtaatggtggaacttaggaggagggtcc

SEQ ID NO: 23520 - DNA, 296 bp, Homo sapiens
  MAP TO AC020906.3; EXPRESSED IN PLACENTA, SIGNAL = 3.8; EXPRESSED IN FETAL LIVER, SIGNAL = 3.4; EXPRESSED IN ADULT LIVER, SIGNAL = 4.4; EXPRESSED IN BONE MARROW, SIGNAL = 3.6; EXPRESSED IN HEART, SIGNAL = 4.2; EXPRESSED IN BRAIN, SIGNAL = 3.9; EXPRESSED IN LUNG, SIGNAL = 4.3; SWISSPROT HIT: P35580, EVALUE 4.00e-16; EST_HUMAN HIT: BE763051.1, EVALUE 1.00e-102; NT HIT: M26510.1, EVALUE 5.00e-05
cctcttctcgtggttggggacaatgcagcggacaaaactggggttggtgttgctgagtgtggccatgaggcggctcagggactccttgtagagctgtcccactgtccggaacataccccgacgggggcggccacctggtgggccgtcgcccaggctgctcacctgttccagccccacgatgccctccactgtcagatggagatgcagagagagagagaaggaggtcagggtcagttttagggacctgggccaaaggtcaagggtcttatcatttatcacaactggcactttacata

SEQ ID NO: 23521 - DNA, 82 bp, Homo sapiens
  MAP TO AL158059.2; EXPRESSED IN ADULT LIVER, SIGNAL = 2.2; EXPRESSED IN HELA, SIGNAL = 3.2; EXPRESSED IN HEART, SIGNAL = 2.3; EXPRESSED IN FETAL LIVER, SIGNAL = 2.2; EXPRESSED IN BRAIN, SIGNAL = 1.9; EXPRESSED IN LUNG, SIGNAL = 1.9; EXPRESSED IN PLACENTA, SIGNAL = 1.9; EXPRESSED IN BONE MARROW, SIGNAL =   2; EST_HUMAN HIT: BF038595.1, EVALUE 2.50e-01
ccttcctttcctccctctcgttctgtttcacttgctgctcaaactcatcatgcacacatagctccacagggagggaattggg

SEQ ID NO: 23522 - DNA, 317 bp, Homo sapiens
  MAP TO AC008164.3; EXPRESSED IN BONE MARROW, SIGNAL = 1.8; EXPRESSED IN ADULT LIVER, SIGNAL = 1.4; EXPRESSED IN BRAIN, SIGNAL = 1.6; EXPRESSED IN LUNG, SIGNAL = 1.3; EXPRESSED IN PLACENTA, SIGNAL = 1.1; EXPRESSED IN HEART, SIGNAL = 1.2; EXPRESSED IN FETAL LIVER, SIGNAL = 1.6; NT HIT: AL163246.2, EVALUE 9.00e-90; EST_HUMAN HIT: AW340174.1, EVALUE 1.00e-77; SWISSPROT HIT: P19028, EVALUE 2.00e-07
gatttccaggaatcaagaagtggaagtggaagtagcacccctcaccctcacccctagcaatccactagcaaaatttttccttcctgttcctgtgacattgcattctgctggcctagaggtattagttccagagggaggaacactgccaccaggagacacaacaacaattccattaaactggaagttaagattgccacctggacactttgggctcctccaatctttaagtcaacaggctaagaagggagttacagtgttggctggggtgattaacctgaactatcaagatgaaatcagtctactacaccacaaaggag

SEQ ID NO: 23523 - DNA, 215 bp, Homo sapiens
  MAP TO AC024196.2; EXPRESSED IN LUNG, SIGNAL = 2.5; EXPRESSED IN PLACENTA, SIGNAL = 2.7; EXPRESSED IN ADULT LIVER, SIGNAL =   2; EXPRESSED IN HEART, SIGNAL = 2.3; EXPRESSED IN FETAL LIVER, SIGNAL = 1.9; EXPRESSED IN BONE MARROW, SIGNAL = 1.7; EXPRESSED IN BRAIN, SIGNAL = 1.7; NT HIT: gi9910293, EVALUE 9.00e-46; EST_HUMAN HIT: AU134525.1, EVALUE 5.00e-05; SWISSPROT HIT: P13647, EVALUE 4.00e-21
gtgcggttcctggagcagcagaatcaggtgctagagaccaagtggaacctcctacagcagctggacttgaacaactgcaggaagaacctggagcccatttatgagggctacatcagcaacctgcagaagcagctggagatgctgtctggggacggggtgaggctggattcggagctgaggaacatgcaggatttggtggaggactacaagaagag

SEQ ID NO: 23524 - DNA, 111 bp, Homo sapiens
  MAP TO AL136363.4; EXPRESSED IN ADULT LIVER, SIGNAL = 0.86; EXPRESSED IN HEART, SIGNAL = 1.3; EXPRESSED IN BONE MARROW, SIGNAL =   1; EXPRESSED IN LUNG, SIGNAL = 1.1; EXPRESSED IN BRAIN, SIGNAL = 0.86; EXPRESSED IN PLACENTA, SIGNAL = 0.99; EXPRESSED IN FETAL LIVER, SIGNAL = 0.89; SWISSPROT HIT: P34604, EVALUE 4.20e+00; NT HIT: AL163280.2, EVALUE 1.00e-15; EST_HUMAN HIT: AV715912.1, EVALUE 1.00e-10
tcttcaggtctcccaactgtggataccagcacctgctttcatggaggtgacaggggagtgaagtagattctgtgagaatccgtgattgtagatattcttagtgtgctggct

SEQ ID NO: 23525 - DNA, 252 bp, Homo sapiens
  MAP TO AC015599.3; EXPRESSED IN LUNG, SIGNAL = 3.6; EXPRESSED IN PLACENTA, SIGNAL = 3.5; EXPRESSED IN HELA, SIGNAL =   5; EXPRESSED IN FETAL LIVER, SIGNAL = 3.6; EXPRESSED IN BONE MARROW, SIGNAL = 3.7; EXPRESSED IN HEART, SIGNAL = 3.7; EXPRESSED IN ADULT LIVER, SIGNAL = 3.7; EXPRESSED IN BRAIN, SIGNAL = 3.3; NT HIT: AF033535.1, EVALUE 6.10e-01; SWISSPROT HIT: P41969, EVALUE 1.00e+00
tcagacctgaattccctttttgtggacttgcacattcacacaccaaattttgacatgctttccataaaccaggaaaagctcttggtgcacttggagcttcacagaggaatgagccaaagggcaaacttcctccagtgctggggccttgtggcatgtcctgtgcgatgcaaaaaatgggtgagaggtagtgatgaggaaagaatggtggggcaagggcagggcaaggcccttctgcaggagaatcacactttt

SEQ ID NO: 23526 - DNA, 83 bp, Homo sapiens
  MAP TO AC020704.3; EXPRESSED IN LUNG, SIGNAL = 2.6; EXPRESSED IN PLACENTA, SIGNAL = 1.9; EXPRESSED IN FETAL LIVER, SIGNAL = 2.6; EXPRESSED IN ADULT LIVER, SIGNAL = 2.3; EXPRESSED IN HEART, SIGNAL = 2.7; EXPRESSED IN BRAIN, SIGNAL = 2.5; EXPRESSED IN BONE MARROW, SIGNAL = 3.4; NT HIT: AL163248.2, EVALUE 8.00e-19; EST_HUMAN HIT: BE089841.1, EVALUE 3.00e-22
ctactgtttagtgtagccaccttcatcgatgatcttagctggatcttctggataacttgctgcagcatctccatcagcacttg

SEQ ID NO: 23527 - DNA, 189 bp, Homo sapiens
  MAP TO AC013591.3; EXPRESSED IN HEART, SIGNAL =   2; EXPRESSED IN LUNG, SIGNAL = 2.6; EXPRESSED IN PLACENTA, SIGNAL =   2; EXPRESSED IN ADULT LIVER, SIGNAL = 1.9; EXPRESSED IN BRAIN, SIGNAL = 3.3; EXPRESSED IN FETAL LIVER, SIGNAL = 2.3; EXPRESSED IN BONE MARROW, SIGNAL = 2.1; NT HIT: U78028.1, EVALUE 2.80e-02; EST_HUMAN HIT: BE870998.1, EVALUE 6.60e-01; SWISSPROT HIT: P48982, EVALUE 5.00e-03
aagccccagcaccgcccatgctggagaggctactacaccagcgacacttgccatagctggtgacaatgcccgagtgcttcccgaaatatgtggccccgttcatgaaaccaaagttggttccaccatggaacatatatacattgaaggagatctcatatttgatgaattcagacacagcatgttcaacct

SEQ ID NO: 23528 - DNA, 203 bp, Homo sapiens
  MAP TO AC019214.2; EXPRESSED IN LUNG, SIGNAL = 3.7; EXPRESSED IN BONE MARROW, SIGNAL = 3.2; EXPRESSED IN BRAIN, SIGNAL = 3.3; EXPRESSED IN FETAL LIVER, SIGNAL = 5.9; EXPRESSED IN HEART, SIGNAL = 3.1; EXPRESSED IN HELA, SIGNAL = 3.4; EXPRESSED IN ADULT LIVER, SIGNAL = 3.9; EXPRESSED IN PLACENTA, SIGNAL = 3.6; EST_HUMAN HIT: BE276250.1, EVALUE 1.20e-02; NT HIT: U66533.1, EVALUE 1.00e-111; SWISSPROT HIT: P16144, EVALUE 2.00e-40
cattgcagaggaacccggaagtgcggggacactggaagttgtcatactcgcagaactgaccctcgtagcggccttcgccgtagcacacacagtgcccgcactggcactccccacggccggagcacggcttgtcctcgccctcccgcaggcagggctgaatgtcactcagagagccggtggagcagttgcaggtctggccactc

SEQ ID NO: 23529 - DNA, 129 bp, Homo sapiens
  MAP TO AC022997.3; EXPRESSED IN LUNG, SIGNAL = 2.2; EXPRESSED IN PLACENTA, SIGNAL = 1.2; EXPRESSED IN HEART, SIGNAL = 1.8; EXPRESSED IN FETAL LIVER, SIGNAL = 2.7; EXPRESSED IN BONE MARROW, SIGNAL = 1.9; EXPRESSED IN ADULT LIVER, SIGNAL = 2.2; EXPRESSED IN HELA, SIGNAL = 2.7; EXPRESSED IN BRAIN, SIGNAL = 1.3; EST_HUMAN HIT: AW029123.1, EVALUE 6.00e-22; NT HIT: AF217490.1, EVALUE 2.00e-08; SWISSPROT HIT: Q07596, EVALUE 7.00e+00
tcattgtcatggtaattgtcaactgtcttggcactggtgggagtgtcattcagtatggaaattggattataatgaagctagaggttcttcagaggttgagtaagctgcctaagaaggaacttctgacca

SEQ ID NO: 23530 - DNA, 104 bp, Homo sapiens
  MAP TO AC016201.5; EXPRESSED IN ADULT LIVER, SIGNAL = 3.7; EXPRESSED IN HELA, SIGNAL = 2.4; EXPRESSED IN BRAIN, SIGNAL = 3.2; EXPRESSED IN BONE MARROW, SIGNAL = 2.9; EXPRESSED IN LUNG, SIGNAL = 3.7; EXPRESSED IN PLACENTA, SIGNAL = 4.8; EXPRESSED IN HEART, SIGNAL = 2.9; EXPRESSED IN FETAL LIVER, SIGNAL = 2.2; SWISSPROT HIT: P17606, EVALUE 9.40e+00; EST_HUMAN HIT: AI084482.1, EVALUE 6.00e-12; NT HIT: AF109907.1, EVALUE 4.00e-12
atgaggaacgctgactcagccttgaaatacagtggtaactactggcaggaatgtcagaggcgtttgagtaagagcaactctatcttgaataggggctgggtaaa

SEQ ID NO: 23531 - DNA, 136 bp, Homo sapiens
  MAP TO AL136320.7; EXPRESSED IN PLACENTA, SIGNAL = 2.4; EXPRESSED IN FETAL LIVER, SIGNAL =   2; EXPRESSED IN HELA, SIGNAL = 2.9; EXPRESSED IN HEART, SIGNAL = 2.4; EXPRESSED IN BONE MARROW, SIGNAL = 2.4; EXPRESSED IN LUNG, SIGNAL = 1.5; EXPRESSED IN BRAIN, SIGNAL = 1.9; EST_HUMAN HIT: AW590573.1, EVALUE 1.80e+00; SWISSPROT HIT: Q09606, EVALUE 7.00e+00; NT HIT: AF153980.1, EVALUE 1.00e-03
atgagggaagtttttttgagcacgtgctatgtatctcagaccctgtgtcaggagctttacatgtgtcctcattttgtccttaccaaaatccagaaggtaggtggtggtagtcacattttacagatgaggaaactga

SEQ ID NO: 23532 - DNA, 132 bp, Homo sapiens
  MAP TO AC016535.3; EXPRESSED IN HELA, SIGNAL = 3.5; EXPRESSED IN LUNG, SIGNAL = 2.8; EXPRESSED IN PLACENTA, SIGNAL = 3.5; EXPRESSED IN HEART, SIGNAL = 2.7; EXPRESSED IN FETAL LIVER, SIGNAL = 2.8; EXPRESSED IN ADULT LIVER, SIGNAL = 2.3; EXPRESSED IN BRAIN, SIGNAL = 2.8; EXPRESSED IN BONE MARROW, SIGNAL = 2.6; NT HIT: gi11428155, EVALUE 6.00e-18; SWISSPROT HIT: P36194, EVALUE 9.00e-09; EST_HUMAN HIT: BE870314.1, EVALUE 9.00e-18
ttagcgggactgtccctctgtagcatcaaactttcctttagacttatagtcagcaacatccttcttatacttcagcttcactgccttagtgatgtcaggctgcttttcacggtcacctaagttattctgcat

SEQ ID NO: 23533 - DNA, 90 bp, Homo sapiens
  MAP TO AC019221.3; EXPRESSED IN ADULT LIVER, SIGNAL =  10; EXPRESSED IN HELA, SIGNAL =  14; EXPRESSED IN BRAIN, SIGNAL = 8.2; EXPRESSED IN BONE MARROW, SIGNAL = 8.6; EXPRESSED IN LUNG, SIGNAL = 9.7; EXPRESSED IN PLACENTA, SIGNAL = 9.4; EXPRESSED IN HEART, SIGNAL = 9.7; EXPRESSED IN FETAL LIVER, SIGNAL = 8.6; EST_HUMAN HIT: AA278728.1, EVALUE 2.80e-01; NT HIT: X15543.1, EVALUE 4.70e-02
cccttccttggcaagccccgctgaagaggtgctcactattgtggacccctctgtgggccaggctcccccttttacaatttcccagctcat

SEQ ID NO: 23534 - DNA, 196 bp, Homo sapiens
  MAP TO AC026437.1; EXPRESSED IN ADULT LIVER, SIGNAL = 1.7; EXPRESSED IN HELA, SIGNAL = 2.7; EXPRESSED IN HEART, SIGNAL = 1.9; EXPRESSED IN BRAIN, SIGNAL = 1.8; EXPRESSED IN BONE MARROW, SIGNAL = 1.6; EXPRESSED IN LUNG, SIGNAL = 1.7; EXPRESSED IN PLACENTA, SIGNAL = 1.6; EXPRESSED IN FETAL LIVER, SIGNAL = 1.9; EST_HUMAN HIT: BE793798.1, EVALUE 1.00e-94; SWISSPROT HIT: Q61292, EVALUE 8.00e-03; NT HIT: AF274753.1, EVALUE 9.00e-95
ctgttcccgttctcccttctctcaggttgtttttgtagccattttgcttcacagtcacctggaatgccgggagcccctgctcatcccgatcctctccttgtacatgggcgcacttgtgcgctgcaccaccctgtgcctgggctactacaagaacattcacgacatcatccctgacagaagtggcccggagctgggg

SEQ ID NO: 23535 - DNA, 127 bp, Homo sapiens
  MAP TO AL117381.9; EXPRESSED IN ADULT LIVER, SIGNAL = 1.9; EXPRESSED IN HEART, SIGNAL = 1.6; EXPRESSED IN LUNG, SIGNAL = 2.2; EXPRESSED IN PLACENTA, SIGNAL = 1.5; EXPRESSED IN FETAL LIVER, SIGNAL = 4.1; EXPRESSED IN BRAIN, SIGNAL =   2; EXPRESSED IN BONE MARROW, SIGNAL = 5.5; SWISSPROT HIT: Q07817, EVALUE 2.00e-18; EST_HUMAN HIT: AW820481.1, EVALUE 1.00e-65; NT HIT: Z23115.1, EVALUE 1.00e-65
tgaagagtgagcccagcagaaccacgccggccacagtcatgcccgtcaggaaccagcggttgaagcgttcctggccctttcggctctcggctgctgcattgttcccatagagttccacaaaagtatc

SEQ ID NO: 23536 - DNA, 181 bp, Homo sapiens
  MAP TO AL133419.11; EXPRESSED IN LUNG, SIGNAL = 1.1; EXPRESSED IN ADULT LIVER, SIGNAL = 1.4; EXPRESSED IN FETAL LIVER, SIGNAL = 1.2; EXPRESSED IN BRAIN, SIGNAL = 1.2; EXPRESSED IN PLACENTA, SIGNAL = 1.3; EXPRESSED IN HEART, SIGNAL = 1.2; EXPRESSED IN BONE MARROW, SIGNAL = 1.1; NT HIT: X91233.1, EVALUE 1.10e-01; EST_HUMAN HIT: AA256643.1, EVALUE 1.60e-01
ctccagcctgcagtttcaagacaggtgcacaaagttccttaacagtttcctctcattcagacacaacttcaatgaagtgaagttagggaacaaaatccactctatctactgcctcctatctttggtccactcatctcttattgtctcaagtagggattccctattctcattcttagctctg

SEQ ID NO: 23537 - DNA, 179 bp, Homo sapiens
  MAP TO AC022392.3; EXPRESSED IN PLACENTA, SIGNAL = 1.5; EXPRESSED IN FETAL LIVER, SIGNAL = 1.3; EXPRESSED IN ADULT LIVER, SIGNAL = 1.8; EXPRESSED IN BRAIN, SIGNAL = 1.4; EXPRESSED IN BONE MARROW, SIGNAL = 1.4; EXPRESSED IN LUNG, SIGNAL = 1.7; EXPRESSED IN HEART, SIGNAL = 1.4; SWISSPROT HIT: P15885, EVALUE 1.30e+00; NT HIT: gi11431139, EVALUE 6.00e-62; EST_HUMAN HIT: BE543503.1, EVALUE 8.00e-62
ttttgaggatgcttttaggtacctcttgattgaaacaaagaagcattccagaaatatacctgttggagccatctttcatatggactttggcgtaaagaacatccaccatgccaggatcatcattcatgtattctatccctgccatctccacttctaggggtttacccccagaaatatca

SEQ ID NO: 23538 - DNA, 286 bp, Homo sapiens
  MAP TO AC022882.3; EXPRESSED IN HELA, SIGNAL =  12; EXPRESSED IN LUNG, SIGNAL = 9.7; EXPRESSED IN PLACENTA, SIGNAL = 2.7; EXPRESSED IN ADULT LIVER, SIGNAL = 9.5; EXPRESSED IN FETAL LIVER, SIGNAL =  19; EXPRESSED IN BRAIN, SIGNAL = 8.1; EXPRESSED IN BONE MARROW, SIGNAL =  13; EXPRESSED IN HEART, SIGNAL = 5.7; SWISSPROT HIT: P46777, EVALUE 1.00e-42; NT HIT: gi4506654, EVALUE 1.00e-124; EST_HUMAN HIT: BE292970.1, EVALUE 1.00e-123
ctaagctgcaacattctggcccatgatgtccttccggtgtacttctgcattaaatcccttgctttcagaatcataatcagggaattgtttggtactgtgagggatagacaagcctccaaccgcagcttccttcagggtgccaaaaactttattgccagtggtagttctggcaaggcctgcacccaaatagcaggtaaaggcacctggctgaccatcaatgctttccacattgtattcatcactagtcgcctccacttggccttcatagatcttgtccatgccaaac

SEQ ID NO: 23539 - DNA, 160 bp, Homo sapiens
  MAP TO AC022860.3; EXPRESSED IN BONE MARROW, SIGNAL = 5.2; EXPRESSED IN ADULT LIVER, SIGNAL = 4.9; EXPRESSED IN HELA, SIGNAL = 6.9; EXPRESSED IN BRAIN, SIGNAL = 3.2; EXPRESSED IN LUNG, SIGNAL = 5.3; EXPRESSED IN PLACENTA, SIGNAL = 2.2; EXPRESSED IN HEART, SIGNAL = 3.5; EXPRESSED IN FETAL LIVER, SIGNAL = 6.8; SWISSPROT HIT: P22607, EVALUE 3.00e-04; EST_HUMAN HIT: BF131620.1, EVALUE 5.50e-01; NT HIT: AE001341.1, EVALUE 3.70e-01
tgtctgagtcaagattggctcagggcttgtgttgtggaccacatcctggttgggctccagcatttgcaggtgctgaaaatcttccccaaagatgctggggccaacagctgctgcaatcagctcacacagcacatgctgtgccccttgagtgtgtaagcag

SEQ ID NO: 23540 - DNA, 174 bp, Homo sapiens
  MAP TO AL078591.18; EXPRESSED IN LUNG, SIGNAL = 1.9; EXPRESSED IN PLACENTA, SIGNAL = 2.3; EXPRESSED IN FETAL LIVER, SIGNAL = 2.4; EXPRESSED IN BRAIN, SIGNAL = 2.5; EXPRESSED IN BONE MARROW, SIGNAL =   2; EXPRESSED IN ADULT LIVER, SIGNAL =   2; EXPRESSED IN HELA, SIGNAL = 2.5; EXPRESSED IN HEART, SIGNAL =   2; EST_HUMAN HIT: BE727809.1, EVALUE 1.00e-02; SWISSPROT HIT: P24834, EVALUE 6.70e+00; NT HIT: AB037832.1, EVALUE 1.00e-93
ggcagatgatctgaatgccttgcaactaataagtagccgaacattgaagctgcactttagcccccatagaggccttcatcatcatgttaatgttatgtttgattacttccacctttctgttgtgtctgttacagttcatgcatcattggttgcactacaccagccactaataag

SEQ ID NO: 23541 - DNA, 155 bp, Homo sapiens
  MAP TO AC017086.3; EXPRESSED IN LUNG, SIGNAL = 3.3; EXPRESSED IN PLACENTA, SIGNAL = 3.1; EXPRESSED IN ADULT LIVER, SIGNAL = 3.4; EXPRESSED IN FETAL LIVER, SIGNAL = 3.8; EXPRESSED IN BRAIN, SIGNAL = 3.3; EXPRESSED IN HEART, SIGNAL = 4.8; EXPRESSED IN HELA, SIGNAL = 4.7; EXPRESSED IN BONE MARROW, SIGNAL = 3.1; EST_HUMAN HIT: AI869629.1, EVALUE 3.40e-02; SWISSPROT HIT: P46063, EVALUE 7.90e-01; NT HIT: L01652.1, EVALUE 3.50e-01
ctacgtctatcacactgagctgctcattcttctgggaacatggcatgatgacaaaacacatccccttccctctacctggaatatctttccagcttacctccatgaagtcttccacattggcaaggtgtttcatcacttctcctactttgttctca

SEQ ID NO: 23542 - DNA, 386 bp, Homo sapiens
  MAP TO AL121673.27; EXPRESSED IN PLACENTA, SIGNAL = 3.7; EXPRESSED IN ADULT LIVER, SIGNAL = 4.3; EXPRESSED IN FETAL LIVER, SIGNAL = 3.3; EXPRESSED IN BRAIN, SIGNAL = 3.7; EXPRESSED IN LUNG, SIGNAL = 3.6; EXPRESSED IN HEART, SIGNAL = 3.5; EXPRESSED IN BONE MARROW, SIGNAL = 3.5; EXPRESSED IN HELA, SIGNAL = 4.3; NT HIT: X99268.1, EVALUE 6.10e-02; EST_HUMAN HIT: AI924665.1, EVALUE 3.60e-01; SWISSPROT HIT: Q02388, EVALUE 5.60e-01
agccgcagctcctgagaacgcatccggaggcaaggccaaagtcagccatggcacaaacatttgtgcatcaaggtcctgttgctctgcaacaactcaccacaaacagaggggtggaaacctccatgtcatcggacggcccagcggtcagaagtccaacgccatctccctgggctgatgtctgtgcaagcagggctgatgccgtagcttttccggcttctggaagctgccacagcccctggctcatggcaccatcctcacatcctctgaatccacattctcctctgaatctcccgcctccctctttccactgtaaggaccctgtgatgacactgcaccctcagaccctggtaacccagggtcatctttccacctcagggcgtctgact

SEQ ID NO: 23543 - DNA, 320 bp, Homo sapiens
  MAP TO AL133174.9; EXPRESSED IN LUNG, SIGNAL = 2.2; EXPRESSED IN PLACENTA, SIGNAL = 2.2; EXPRESSED IN HEART, SIGNAL = 2.2; EXPRESSED IN BONE MARROW, SIGNAL = 2.6; EXPRESSED IN ADULT LIVER, SIGNAL = 2.9; EXPRESSED IN FETAL LIVER, SIGNAL = 3.1; EXPRESSED IN BRAIN, SIGNAL = 2.6; NT HIT: gi11422078, EVALUE 0.00e+00; SWISSPROT HIT: Q9Z108, EVALUE 7.00e-54; EST_HUMAN HIT: BE674157.1, EVALUE 0.00e+00
ctggaatccctggactctggaaagatagtccagttgctcagagggtctcgtgagaggtccatggggtacgtggcctgaagagatgttattctttaaaatggtctcggctgtgggcgaggtgcccccatacaacaactctcgggctatcatggcagttaccgtggccttggcaggattcggagctgccctggtaaaatctttggtgtgatgtccttgactaactcctacagcctgggcgacctcgggcaccatgggaagaattccagcaggcagctgctgatgacttagataaggcatcctgaactcatcctctttattac

SEQ ID NO: 23544 - DNA, 239 bp, Homo sapiens
  MAP TO AL135998.2; EXPRESSED IN ADULT LIVER, SIGNAL = 1.3; EXPRESSED IN BRAIN, SIGNAL = 1.2; EXPRESSED IN LUNG, SIGNAL = 1.7; EXPRESSED IN PLACENTA, SIGNAL =   2; EXPRESSED IN HEART, SIGNAL = 1.4; EXPRESSED IN FETAL LIVER, SIGNAL = 1.3; EXPRESSED IN BONE MARROW, SIGNAL = 1.2; SWISSPROT HIT: P50281, EVALUE 1.00e-43; NT HIT: U41078.1, EVALUE 0.00e+00; EST_HUMAN HIT: AI885671.1, EVALUE 0.00e+00
gcctgggaagtaggcatgggccaggaagccgccctcaccatcgaagggcgtgctgtcgccatggaagccctcggcaaagaagatcatgatgtcggcctgcttctcatggccctcacggatgtaggcatagggcacctcgcggaagcgcagtggtgtggcactctcccacacgcggaacgccttgcgaatggcctcgtatgtggcatactcgcccaccttgggggtgtaattctggatgc

SEQ ID NO: 23545 - DNA, 105 bp, Homo sapiens
  MAP TO AC019042.3; EXPRESSED IN HELA, SIGNAL = 3.9; EXPRESSED IN BONE MARROW, SIGNAL = 3.2; EXPRESSED IN BRAIN, SIGNAL = 3.7; EXPRESSED IN FETAL LIVER, SIGNAL = 2.6; EXPRESSED IN HEART, SIGNAL = 3.4; EXPRESSED IN ADULT LIVER, SIGNAL = 1.4; EXPRESSED IN PLACENTA, SIGNAL = 2.3; EXPRESSED IN LUNG, SIGNAL = 2.3; NT HIT: AL163210.2, EVALUE 2.00e-23; SWISSPROT HIT: P52746, EVALUE 9.50e-02; EST_HUMAN HIT: AA383873.1, EVALUE 8.00e-30
agacttgtagctttgaccaaaacgctgacagtgatatggacaatgaagtccaggctgcggtggtctcagatggagatgagaaacttgttgggaacgggagcaaag

SEQ ID NO: 23546 - DNA, 109 bp, Homo sapiens
  MAP TO AC009503.3; EXPRESSED IN LUNG, SIGNAL = 1.3; EXPRESSED IN PLACENTA, SIGNAL = 1.1; EXPRESSED IN FETAL LIVER, SIGNAL = 1.2; EXPRESSED IN BONE MARROW, SIGNAL = 1.1; EXPRESSED IN ADULT LIVER, SIGNAL =   1; EXPRESSED IN HEART, SIGNAL = 1.2; EXPRESSED IN BRAIN, SIGNAL = 1.2; EST_HUMAN HIT: AI347010.1, EVALUE 1.00e-06; NT HIT: AF167341.1, EVALUE 1.00e-06
tagagctgtgccatccaatgtagttgccaatagccattaagcatttgaaatgtggctagtttgaattgagatttgctataagtatggaatacacactcaatttcaaaaa

SEQ ID NO: 23547 - DNA, 84 bp, Homo sapiens
  MAP TO AC024196.2; EXPRESSED IN HELA, SIGNAL = 5.6; EXPRESSED IN LUNG, SIGNAL = 6.7; EXPRESSED IN ADULT LIVER, SIGNAL =   6; EXPRESSED IN BRAIN, SIGNAL = 6.2; EXPRESSED IN BONE MARROW, SIGNAL = 7.4; EXPRESSED IN PLACENTA, SIGNAL = 7.3; EXPRESSED IN HEART, SIGNAL =   7; EXPRESSED IN FETAL LIVER, SIGNAL = 6.6; NT HIT: gi7706426, EVALUE 1.70e-01; SWISSPROT HIT: P23805, EVALUE 3.30e+00; EST_HUMAN HIT: BE298617.1, EVALUE 2.60e-01
accagcagccaggagatcaagctcagctgggtcccaggagccctccgcatcttccgaacccttgctcttgcaggagctttctag

SEQ ID NO: 23548 - DNA, 84 bp, Homo sapiens
  MAP TO AL139423.2; EXPRESSED IN LUNG, SIGNAL = 2.5; EXPRESSED IN ADULT LIVER, SIGNAL = 4.5; EXPRESSED IN HEART, SIGNAL = 3.4; EXPRESSED IN FETAL LIVER, SIGNAL = 2.1; EXPRESSED IN BRAIN, SIGNAL = 2.3; EXPRESSED IN PLACENTA, SIGNAL = 3.3; EXPRESSED IN BONE MARROW, SIGNAL = 2.2; NT HIT: Y14157.1, EVALUE 2.70e+00; SWISSPROT HIT: P16380, EVALUE 9.60e+00; EST_HUMAN HIT: AA114294.1, EVALUE 2.00e-32
atgcaaggtgacgtgggatggtcttccctgtctttctccaagcaatggagggcttccctctacgatgaacagcagctcctgaag

SEQ ID NO: 23549 - DNA, 158 bp, Homo sapiens
  MAP TO AC021677.3; EXPRESSED IN LUNG, SIGNAL =  11; EXPRESSED IN PLACENTA, SIGNAL =  16; EXPRESSED IN ADULT LIVER, SIGNAL = 8.1; EXPRESSED IN HEART, SIGNAL =  13; EXPRESSED IN FETAL LIVER, SIGNAL =  14; EXPRESSED IN BRAIN, SIGNAL =  11; EXPRESSED IN BONE MARROW, SIGNAL =  14; EXPRESSED IN HELA, SIGNAL =  21; SWISSPROT HIT: Q42870, EVALUE 5.20e+00; NT HIT: AL161583.2, EVALUE 3.60e-01; EST_HUMAN HIT: AW391502.1, EVALUE 2.10e+00
atgcatcaggtttacatggtggattcaaacctggtctgtgattcagagggagatggctgtgcacagggaagtcatataccacattgtgataagtacccatatgccctgggcttcctggaatttcagaatcctgatcatacctatgtctgtcgagataa

SEQ ID NO: 23550 - DNA, 299 bp, Homo sapiens
  MAP TO AC024196.2; EXPRESSED IN LUNG, SIGNAL = 1.5; EXPRESSED IN PLACENTA, SIGNAL = 1.5; EXPRESSED IN ADULT LIVER, SIGNAL = 1.4; EXPRESSED IN HEART, SIGNAL = 1.3; EXPRESSED IN FETAL LIVER, SIGNAL = 1.4; EXPRESSED IN BRAIN, SIGNAL = 1.1; EXPRESSED IN BONE MARROW, SIGNAL = 1.3; NT HIT: AF274874.1, EVALUE 0.00e+00; EST_HUMAN HIT: BE563650.1, EVALUE 0.00e+00
ctgttgtcacaagcagtgtttcctctggatatggcagtggcagtggctatggcggtggcctcggtggaggtcttggcggcggcctcggtggaggtcttgccggaggtagcagtggaagctactactccagcagcagtgggggtgtcggcctaggtggtgggctcagtgtggggggctctggcttcagtgcaagcagtggccgagggctgggggtgggctttggcagtggcgggggtagcagctccagcgtcaaatttgtctccaccacctcctcctcccggaagagcttcaagagctaa

SEQ ID NO: 23551 - DNA, 141 bp, Homo sapiens
  MAP TO AC013746.4; EXPRESSED IN LUNG, SIGNAL = 3.5; EXPRESSED IN PLACENTA, SIGNAL = 3.2; EXPRESSED IN ADULT LIVER, SIGNAL = 2.1; EXPRESSED IN FETAL LIVER, SIGNAL = 4.1; EXPRESSED IN BRAIN, SIGNAL = 1.9; EXPRESSED IN HELA, SIGNAL = 5.3; EXPRESSED IN HEART, SIGNAL = 2.7; EXPRESSED IN BONE MARROW, SIGNAL = 3.9; EST_HUMAN HIT: BE741984.1, EVALUE 7.40e+00; SWISSPROT HIT: P35679, EVALUE 6.90e+00
ctccatatctctaaattccatgattttcttgctgtttctgactttgagctgaggtattccatctgcctctgcagatgtgagagactgaattctatttcctcctattgtcaccataaccgtgcactctttccatgtcttcat

SEQ ID NO: 23552 - DNA, 104 bp, Homo sapiens
  MAP TO AP001254.2; EXPRESSED IN LUNG, SIGNAL = 1.3; EXPRESSED IN ADULT LIVER, SIGNAL = 1.3; EXPRESSED IN FETAL LIVER, SIGNAL = 0.97; EXPRESSED IN BRAIN, SIGNAL = 1.2; EXPRESSED IN PLACENTA, SIGNAL = 1.2; EXPRESSED IN HEART, SIGNAL = 1.2; EXPRESSED IN BONE MARROW, SIGNAL = 1.2; EST_HUMAN HIT: T60216.1, EVALUE 5.00e-03; NT HIT: AB026898.1, EVALUE 2.00e-04
acagatcatcataaaggtcttcatcttcgtgtcttcaccttgaggaggctgaggactaggaggaagaagaaaggtttctcttgctgtctcacaggtggcagatg

SEQ ID NO: 23553 - DNA, 200 bp, Homo sapiens
  MAP TO AC025119.2; EXPRESSED IN LUNG, SIGNAL = 1.3; EXPRESSED IN ADULT LIVER, SIGNAL = 1.1; EXPRESSED IN HEART, SIGNAL = 1.2; EXPRESSED IN BRAIN, SIGNAL = 0.99; EXPRESSED IN BONE MARROW, SIGNAL = 1.1; EXPRESSED IN PLACENTA, SIGNAL = 1.4; EXPRESSED IN FETAL LIVER, SIGNAL = 1.3; EST_HUMAN HIT: AW749130.1, EVALUE 1.00e-109; SWISSPROT HIT: P14983, EVALUE 9.80e-01; NT HIT: M23958.1, EVALUE 3.00e-02
ttaaagggggctgttggcacagcaggcatcaaggagaaagatattctcttccgtatccccccagcctactccctggctttggcacagagcaggtgttgacagaccattgttgacagtgtccatggaggagacaaatggggaaatggcagaagtgttgaggcccagtgcacctgtgatggaagcagtgctcagcagggtaa

SEQ ID NO: 23554 - DNA, 153 bp, Homo sapiens
  MAP TO AP001441.1; EXPRESSED IN LUNG, SIGNAL = 2.7; EXPRESSED IN PLACENTA, SIGNAL = 2.4; EXPRESSED IN ADULT LIVER, SIGNAL = 2.8; EXPRESSED IN HEART, SIGNAL = 2.2; EXPRESSED IN BRAIN, SIGNAL = 3.6; EXPRESSED IN HELA, SIGNAL = 2.4; EXPRESSED IN FETAL LIVER, SIGNAL = 1.7; EXPRESSED IN BONE MARROW, SIGNAL =   2; EST_HUMAN HIT: AW452795.1, EVALUE 6.00e-81; SWISSPROT HIT: Q95241, EVALUE 2.00e-15; NT HIT: X06989.1, EVALUE 4.00e-81
atccgagtcatcctcctccgcatcagcagaatccacattgtcactttcttcagccagtgggcaacacacaaactctacccctcggaacttgtcaattccgcagggcagcaacatgccgtagtcatgcaagttggtactcttctcactgcatgt

SEQ ID NO: 23555 - DNA, 122 bp, Homo sapiens
  MAP TO AC015638.4; EXPRESSED IN ADULT LIVER, SIGNAL = 5.7; EXPRESSED IN HELA, SIGNAL = 7.2; EXPRESSED IN BRAIN, SIGNAL =   5; EXPRESSED IN LUNG, SIGNAL = 6.6; EXPRESSED IN PLACENTA, SIGNAL =   6; EXPRESSED IN FETAL LIVER, SIGNAL = 5.4; EXPRESSED IN HEART, SIGNAL = 6.1; EXPRESSED IN BONE MARROW, SIGNAL = 5.4; EST_HUMAN HIT: BE810768.1, EVALUE 1.00e-01; NT HIT: AJ248287.1, EVALUE 6.80e-02
ttctccacctgagccacagatctctttatttccatcaaagctttctcagcatcttctatatactgtgctgtgccttgtgaagaagccagagccgagcataccaacatgatcttttgcttgaa

SEQ ID NO: 23556 - DNA, 190 bp, Homo sapiens
  MAP TO AL138796.2; EXPRESSED IN BRAIN, SIGNAL = 0.77; EXPRESSED IN BONE MARROW, SIGNAL = 0.43; EXPRESSED IN PLACENTA, SIGNAL = 0.59; EXPRESSED IN HEART, SIGNAL =   3; EST_HUMAN HIT: T31080.1, EVALUE 1.00e-103; NT HIT: AB007923.1, EVALUE 1.00e-103; SWISSPROT HIT: P42763, EVALUE 2.90e+00
agcactcccaggaaacagaaagcctgagggaggctctgctgtcctctcgatcccaccttcaagagctggaaaaggagctggagcaccagaaggtggaaaggcagcagcttttggaagacttgagggagaagcagcaagaggtcttgcatttcagggaggaacgtctttccctccaggaaaacgactccag

SEQ ID NO: 23557 - DNA, 245 bp, Homo sapiens
  MAP TO AC009334.3; EXPRESSED IN PLACENTA, SIGNAL = 1.7; EXPRESSED IN ADULT LIVER, SIGNAL = 1.9; EXPRESSED IN HELA, SIGNAL = 2.4; EXPRESSED IN FETAL LIVER, SIGNAL = 1.6; EXPRESSED IN BRAIN, SIGNAL = 1.6; EXPRESSED IN LUNG, SIGNAL = 1.9; EXPRESSED IN HEART, SIGNAL = 1.4; EXPRESSED IN BONE MARROW, SIGNAL = 1.9; SWISSPROT HIT: Q99698, EVALUE 5.00e-44; NT HIT: gi11427235, EVALUE 0.00e+00; EST_HUMAN HIT: BE816345.1, EVALUE 4.00e-12
gttcgtgatgatgtataccacaatatactcacaaataacctccctaatcttctggaatatggtaacatcaccgctctgacaaatttatggtatactgggcaaattactaattttgaatatttgactcacttaaacaaacatgctggccgatccttcaatgatctcatgcagtatcctgtgttcccatttatacttgctgactacgttagtgagacacttgacctcaatgatctgttgatatacag

SEQ ID NO: 23558 - DNA, 168 bp, Homo sapiens
  MAP TO AL133377.4; EXPRESSED IN LUNG, SIGNAL = 5.4; EXPRESSED IN ADULT LIVER, SIGNAL = 5.2; EXPRESSED IN HELA, SIGNAL = 4.8; EXPRESSED IN HEART, SIGNAL = 4.7; EXPRESSED IN FETAL LIVER, SIGNAL = 4.6; EXPRESSED IN BRAIN, SIGNAL = 5.1; EXPRESSED IN BONE MARROW, SIGNAL =   5; EXPRESSED IN PLACENTA, SIGNAL = 4.9; SWISSPROT HIT: P32480, EVALUE 8.80e+00; NT HIT: gi11345483, EVALUE 5.00e-90; EST_HUMAN HIT: AU127503.1, EVALUE 7.00e-90
cgcagcgacacgatcccaattcctgctgcaccagctccagtttggtttggcactggaagcaccgacgtcgactcttctgtttagatcgactggtttcctcggaccgttccgtattctcaagtagtcgtggccgttttactggtgaagcctcattctcagactgtgaat

SEQ ID NO: 23559 - DNA, 135 bp, Homo sapiens
  MAP TO AC027343.1; EXPRESSED IN LUNG, SIGNAL = 0.93; EXPRESSED IN PLACENTA, SIGNAL = 0.94; EXPRESSED IN ADULT LIVER, SIGNAL = 1.1; EXPRESSED IN FETAL LIVER, SIGNAL = 1.1; EXPRESSED IN BRAIN, SIGNAL = 1.1; EXPRESSED IN HEART, SIGNAL = 1.2; EXPRESSED IN BONE MARROW, SIGNAL = 1.1; NT HIT: U33629.1, EVALUE 3.00e-01; SWISSPROT HIT: P19456, EVALUE 1.80e+00; EST_HUMAN HIT: AW817918.1, EVALUE 1.10e-01
atgactttagagatcctgcttgcccatgagactgagcagaagtctctccccaagtcctttttgttcctaaaagtagtaaagagagataaaaatgccattccagagagcatagaaggctggttacatgtggagaga

SEQ ID NO: 23560 - DNA, 189 bp, Homo sapiens
  MAP TO AC018501.5; EXPRESSED IN LUNG, SIGNAL = 1.4; EXPRESSED IN ADULT LIVER, SIGNAL = 4.5; EXPRESSED IN HEART, SIGNAL = 3.2; EXPRESSED IN BRAIN, SIGNAL = 3.2; EXPRESSED IN HELA, SIGNAL = 5.2; EXPRESSED IN PLACENTA, SIGNAL = 3.1; EXPRESSED IN FETAL LIVER, SIGNAL = 3.2; EXPRESSED IN BONE MARROW, SIGNAL = 3.3; NT HIT: U23850.1, EVALUE 8.00e-49; SWISSPROT HIT: P29994, EVALUE 2.00e-12; EST_HUMAN HIT: BE164798.1, EVALUE 1.00e-48
tcaagaaagctccaggaagcagatcctctgctctgtcccaaatatcgtcgcaatgctccttggtgctaccatcagatccgtcacccgactcaccagttccttgggcctcatgttataaagtatcctctctgcgttttcactgtcgtgcctgctttccatgatggccaggagcaacttcgaggcattgtt

SEQ ID NO: 23561 - DNA, 150 bp, Homo sapiens
  MAP TO AC025752.2; EXPRESSED IN PLACENTA, SIGNAL = 1.8; EXPRESSED IN FETAL LIVER, SIGNAL = 2.1; EXPRESSED IN BONE MARROW, SIGNAL = 1.1; EXPRESSED IN HEART, SIGNAL = 1.2; EXPRESSED IN HELA, SIGNAL = 2.2; EXPRESSED IN LUNG, SIGNAL = 1.5; EXPRESSED IN ADULT LIVER, SIGNAL = 1.7; EXPRESSED IN BRAIN, SIGNAL = 1.3; EST_HUMAN HIT: R83190.1, EVALUE 7.90e+00; NT HIT: AJ009912.1, EVALUE 1.30e+00
acattggcaaaatggtggagaacttcaaactccagttcctgaagacatcaagctcagtcttcatagacaaaatggaaaatgtgacagcattgttactgtctggctcatgaacccaataagggtttctgtcatcataatagatgctattat

SEQ ID NO: 23562 - DNA, 357 bp, Homo sapiens
  MAP TO AL135936.10; EXPRESSED IN ADULT LIVER, SIGNAL = 1.6; EXPRESSED IN BRAIN, SIGNAL = 1.3; EXPRESSED IN BONE MARROW, SIGNAL = 1.5; EXPRESSED IN LUNG, SIGNAL = 1.6; EXPRESSED IN PLACENTA, SIGNAL = 1.3; EXPRESSED IN HEART, SIGNAL = 1.4; EXPRESSED IN FETAL LIVER, SIGNAL = 4.1; EST_HUMAN HIT: AA987873.1, EVALUE 8.30e-02; SWISSPROT HIT: P51278, EVALUE 6.40e-01; NT HIT: M68489.1, EVALUE 8.80e-01
cacatctcaactgggattagtccatttcaagtgtgcagctgtcccgcacttgaagtgtggcatccatattggatggcaagcactgggattttatggaagccggaagggggcatgcagccaagtccatgtgtcaggggacatcaagggcaaggtgccacctgagctggacctaggaacacaaatgccacaccaccaggtgcaaacaccagggggcacccatctctatccagtagtgccaggggcagccctaggggttagccaggcagaggagggaggtgagctagtgcaggaagacagactccttcagcactatcacctgttgagagaactgcaagcatttgccatgaggatgacgtg

SEQ ID NO: 23563 - DNA, 214 bp, Homo sapiens
  MAP TO AC022429.2; EXPRESSED IN HELA, SIGNAL = 4.1; EXPRESSED IN LUNG, SIGNAL = 4.1; EXPRESSED IN PLACENTA, SIGNAL =   8; EXPRESSED IN ADULT LIVER, SIGNAL = 4.2; EXPRESSED IN FETAL LIVER, SIGNAL =  13; EXPRESSED IN BRAIN, SIGNAL = 4.6; EXPRESSED IN BONE MARROW, SIGNAL = 2.8; EXPRESSED IN HEART, SIGNAL = 3.5; SWISSPROT HIT: Q48303, EVALUE 4.00e-01; NT HIT: gi6680565, EVALUE 3.20e-02
ggggtggctgcaggatgccagtgagaagtacgatccacagaagaaaaggagaccagaagaggctcttggcaaaggcccagctggagaagaagctgtggccctccttgacccccacggggcttctctctgctctgttagtacagctctccgtgctgtcggcaatggcactgacattgttgtgcagtggagaatagtatgacttggtgccctgcga

SEQ ID NO: 23564 - DNA, 180 bp, Homo sapiens
  MAP TO AC007923.2; EXPRESSED IN ADULT LIVER, SIGNAL = 5.6; EXPRESSED IN BRAIN, SIGNAL = 4.5; EXPRESSED IN PLACENTA, SIGNAL = 4.7; EXPRESSED IN HELA, SIGNAL = 6.4; EXPRESSED IN FETAL LIVER, SIGNAL = 5.6; EXPRESSED IN BONE MARROW, SIGNAL = 5.4; EXPRESSED IN LUNG, SIGNAL = 5.7; EXPRESSED IN HEART, SIGNAL = 5.4; SWISSPROT HIT: P03756, EVALUE 1.00e+00; NT HIT: AE001490.1, EVALUE 1.70e+00; EST_HUMAN HIT: H72255.1, EVALUE 6.20e-01
cttcatggtaaccttgggaacgaacaggctataatcatggtgaaagtgagcagtcttccagctactgaaggggttacaacagggaatggcactctatcaaagccccattcccagaaaattgtcctacttgaactgtctctcagtgccctggaaaaccccacttgcaaggctctctttatt

SEQ ID NO: 23565 - DNA, 189 bp, Homo sapiens
  MAP TO AC019281.4; EXPRESSED IN ADULT LIVER, SIGNAL = 1.1; EXPRESSED IN FETAL LIVER, SIGNAL = 1.5; EXPRESSED IN BRAIN, SIGNAL = 1.3; EXPRESSED IN HEART, SIGNAL = 2.5; EXPRESSED IN BONE MARROW, SIGNAL = 0.91; NT HIT: gi11321580, EVALUE 1.00e-102; EST_HUMAN HIT: BE910555.1, EVALUE 1.00e-102; SWISSPROT HIT: O19069, EVALUE 6.00e-18
ggtccaaattccaagcctgtagtgtccttcattgctggtttaactgctcctcctgggagaagaatgggtcatgccggggcaattattgctggaggaaaaggtggagctaaagagaagatctctgcccttcagagtgcaggagttgtggtcagtatgtctcctgcacagctgggaaccacgatctacaag

SEQ ID NO: 23566 - DNA, 106 bp, Homo sapiens
  MAP TO AC009155.3; EXPRESSED IN LUNG, SIGNAL =  12; EXPRESSED IN PLACENTA, SIGNAL =  11; EXPRESSED IN HELA, SIGNAL = 5.2; EXPRESSED IN HEART, SIGNAL = 9.9; EXPRESSED IN FETAL LIVER, SIGNAL =  10; EXPRESSED IN ADULT LIVER, SIGNAL =  12; EXPRESSED IN BRAIN, SIGNAL =  13; EXPRESSED IN BONE MARROW, SIGNAL =  13; NT HIT: S72043.1, EVALUE 3.00e-53; SWISSPROT HIT: P25713, EVALUE 1.90e+00; EST_HUMAN HIT: BF337587.1, EVALUE 4.00e-53
gctgctgctcctgctgccctgcggagtgtgagaagtgtgccaaggactgtgtgtgcaaaggcggagaggcagctgaggcagaagcagagaagtgcagctgctgcca

SEQ ID NO: 23567 - DNA, 155 bp, Homo sapiens
  MAP TO AC021468.2; EXPRESSED IN PLACENTA, SIGNAL = 1.8; EXPRESSED IN FETAL LIVER, SIGNAL = 1.8; EXPRESSED IN ADULT LIVER, SIGNAL = 0.72; EXPRESSED IN BRAIN, SIGNAL = 2.2; EXPRESSED IN BONE MARROW, SIGNAL = 1.9; EXPRESSED IN HEART, SIGNAL = 2.2; EXPRESSED IN LUNG, SIGNAL = 1.8; NT HIT: gi11321570, EVALUE 2.00e-82; EST_HUMAN HIT: W60309.1, EVALUE 4.00e-82; SWISSPROT HIT: P12539, EVALUE 6.00e-01
tgtggagacagtgaatgatgggcagtttcacagtgtggagctggtgacgctaaaccagaccctgaacctagtagtggacaaaggaactccaaagagcctggggaagctccagaagcagccagcagtgggcatcaacagccccctctaccttggag

SEQ ID NO: 23568 - DNA, 375 bp, Homo sapiens
  MAP TO AL133227.7; EXPRESSED IN ADULT LIVER, SIGNAL = 1.6; EXPRESSED IN BRAIN, SIGNAL = 1.8; EXPRESSED IN LUNG, SIGNAL = 1.8; EXPRESSED IN PLACENTA, SIGNAL = 1.1; EXPRESSED IN FETAL LIVER, SIGNAL = 2.7; EXPRESSED IN BONE MARROW, SIGNAL = 4.4; EXPRESSED IN HEART, SIGNAL = 2.1; EST_HUMAN HIT: BE887571.1, EVALUE 1.00e-74; NT HIT: gi11419234, EVALUE 7.00e-91; SWISSPROT HIT: P47132, EVALUE 4.10e-01
gggactgctgctgtctgaggtcagcaggccagttcacacgccacgcaaggtggctactgagccaagtcataaaaatcttccagatcatcatggaacaagtcccactcattttcaaagtctgtcagttcatcgtccccatctgccaaaagcataagcaacatctcacccagctcaaaggtgacaacctcttcttcattgttgtcaaaggggtcattgttctctctttcctcaatgagctccgagaagtggttccttcactgggcccagtatctgtttgcctgtctctgtgtatcctttctatggccatcagggaatacctgcttgtaaaaacacatcccccaagatgggcagctcccctgtccttcatcaaaatcc

SEQ ID NO: 23569 - DNA, 228 bp, Homo sapiens
  MAP TO AC012200.5; EXPRESSED IN PLACENTA, SIGNAL = 3.2; EXPRESSED IN HELA, SIGNAL =   7; EXPRESSED IN LUNG, SIGNAL =   6; EXPRESSED IN ADULT LIVER, SIGNAL = 7.7; EXPRESSED IN HEART, SIGNAL = 7.5; EXPRESSED IN FETAL LIVER, SIGNAL = 9.6; EXPRESSED IN BRAIN, SIGNAL = 5.6; EXPRESSED IN BONE MARROW, SIGNAL = 9.3; NT HIT: U43701.1, EVALUE 2.00e-43; EST_HUMAN HIT: AI680943.1, EVALUE 3.00e-43; SWISSPROT HIT: P29316, EVALUE 1.00e-17
atgaagaagaaagaagacaacaacacacttgtgttcattgtagatgttaaagccagtgagcaccaggtcaaacagggtatgaagaaggtgtatgacattgatgtggccaaggtcaacaccctgatcagcctcatggagagaagaaagtatattttcaactgtcaactggttcctgattatgatgcttttgatgtcaccataagatataaaacagacattaacaaatgt

SEQ ID NO: 23570 - DNA, 213 bp, Homo sapiens
  MAP TO AC009466.2; EXPRESSED IN PLACENTA, SIGNAL = 1.3; EXPRESSED IN FETAL LIVER, SIGNAL = 1.1; EXPRESSED IN BONE MARROW, SIGNAL =   1; EXPRESSED IN HEART, SIGNAL = 1.7; EXPRESSED IN ADULT LIVER, SIGNAL = 0.87; EXPRESSED IN BRAIN, SIGNAL = 2.3; EST_HUMAN HIT: AU117490.1, EVALUE 1.00e-116; SWISSPROT HIT: P13592, EVALUE 3.00e-36; NT HIT: gi10834989, EVALUE 1.00e-117
gaaagatcttcacgttgacggtggcctctgactcactgccatcctcgcctgtaaccacacacttgtaaatgccggcgtcgtcgatgttggcgttatagatggtgagggtggaggaggaatcatcattccacaccactgagatccgctgctggtttggggtgagcttttctccattgggggagaaccaggagatgtctttatctttggcatctc

SEQ ID NO: 23571 - DNA, 319 bp, Homo sapiens
  MAP TO AC010905.3; EXPRESSED IN PLACENTA, SIGNAL = 3.3; EXPRESSED IN ADULT LIVER, SIGNAL = 3.5; EXPRESSED IN HELA, SIGNAL = 3.4; EXPRESSED IN FETAL LIVER, SIGNAL = 3.2; EXPRESSED IN BRAIN, SIGNAL = 3.1; EXPRESSED IN LUNG, SIGNAL = 3.7; EXPRESSED IN HEART, SIGNAL = 3.6; EXPRESSED IN BONE MARROW, SIGNAL = 3.4; EST_HUMAN HIT: AW340174.1, EVALUE 1.00e-55; SWISSPROT HIT: P19028, EVALUE 2.00e-05; NT HIT: AF224669.1, EVALUE 1.00e-61
gttgcagagtagtagactgatagaatcttgatagtctgagtcaatcatcccagccaacactgtacctcccttcttaggctgttggtgtaaaggtaggagaagtgcaaagtgtccaggtggcaatcttaatttccagtttaattgaatcattgctatgtttcctggtggcagcattcctccctctgaaactaagacctctaggccagcagaacataatgtcacagaaacaggaagcaaatatgttgttagtgggtcactaggggtgatggtgagtgttgccacttccaattccaccccttgattcctggacccatgattc

SEQ ID NO: 23572 - DNA, 157 bp, Homo sapiens
  MAP TO AL121747.19; EXPRESSED IN BONE MARROW, SIGNAL = 2.5; EXPRESSED IN FETAL LIVER, SIGNAL = 2.2; EXPRESSED IN LUNG, SIGNAL =   2; EXPRESSED IN PLACENTA, SIGNAL = 2.5; EXPRESSED IN ADULT LIVER, SIGNAL = 2.5; EXPRESSED IN HELA, SIGNAL = 3.5; EXPRESSED IN HEART, SIGNAL = 2.6; EXPRESSED IN BRAIN, SIGNAL = 2.1; EST_HUMAN HIT: AU132198.1, EVALUE 1.00e-60; SWISSPROT HIT: P15699, EVALUE 8.90e+00; NT HIT: AF011920.1, EVALUE 2.00e-83
ggagggggtttccgcttccggcagcagcggctgcagcctcgctctggtccctgcggctggcggccgagccgtgtgtctcctcctccatcgccgccatattgtctgtgtgagcagaggggagagcggccgccgccgctgccgcttccaccacaggtac

SEQ ID NO: 23573 - DNA, 114 bp, Homo sapiens
  MAP TO AC026882.2; EXPRESSED IN PLACENTA, SIGNAL = 2.4; EXPRESSED IN HELA, SIGNAL = 2.3; EXPRESSED IN LUNG, SIGNAL = 2.2; EXPRESSED IN HEART, SIGNAL = 2.3; EXPRESSED IN FETAL LIVER, SIGNAL = 2.2; EXPRESSED IN BONE MARROW, SIGNAL = 2.3; EXPRESSED IN ADULT LIVER, SIGNAL = 2.7; EXPRESSED IN BRAIN, SIGNAL = 1.9; NT HIT: X65865.1, EVALUE 3.90e+00; EST_HUMAN HIT: AA369027.1, EVALUE 5.70e+00
aatcacactgagaattgcaagatattcacacaaaagaggcagatggcaacttggagaagggaatctcacatctcatctcagcctcactttggcaagaagcatcaccagcagaac

SEQ ID NO: 23574 - DNA, 234 bp, Homo sapiens
  MAP TO AC007940.2; EXPRESSED IN HELA, SIGNAL = 6.3; EXPRESSED IN BONE MARROW, SIGNAL = 4.4; EXPRESSED IN LUNG, SIGNAL = 3.8; EXPRESSED IN ADULT LIVER, SIGNAL = 4.4; EXPRESSED IN FETAL LIVER, SIGNAL = 3.9; EXPRESSED IN BRAIN, SIGNAL = 3.9; EXPRESSED IN PLACENTA, SIGNAL = 3.6; EXPRESSED IN HEART, SIGNAL = 3.7; NT HIT: AB014534.1, EVALUE 1.00e-129; EST_HUMAN HIT: AW409774.1, EVALUE 1.00e-119; SWISSPROT HIT: Q61137, EVALUE 5.00e-10
gaaggcccacctgattctacggcgactggagagggtgagtagccactgctccagcctcctgcggagtgcctacatccagagccgcgtggaaacagtgccctatcttttctgccgcagcgaggaggtccggcctgcaggcatggtgtggtatagcatcctcaaggacaccaaaatcacgtgtgaggagaagatggtgtcaatggcccgaaacacgtacggggagtccaagggccg

SEQ ID NO: 23575 - DNA, 127 bp, Homo sapiens
  MAP TO AL136089.8; EXPRESSED IN PLACENTA, SIGNAL =   2; EXPRESSED IN FETAL LIVER, SIGNAL =   2; EXPRESSED IN HEART, SIGNAL = 2.4; EXPRESSED IN LUNG, SIGNAL = 2.6; EXPRESSED IN ADULT LIVER, SIGNAL = 2.4; EXPRESSED IN BRAIN, SIGNAL =   2; EXPRESSED IN BONE MARROW, SIGNAL = 2.1; NT HIT: AJ224328.1, EVALUE 1.00e-65; EST_HUMAN HIT: AU141295.1, EVALUE 1.00e-65; SWISSPROT HIT: Q39055, EVALUE 2.00e-05
atctgaggttgcacttctctgtgagggagatccgcaggtagctgtgctgccggccgaagctgtctgtgaggaaggcggagaagggggccgcatgctcccgcaggaactgcctccgcctggacacctc

SEQ ID NO: 23576 - DNA, 137 bp, Homo sapiens
  MAP TO AC012480.3; EXPRESSED IN LUNG, SIGNAL =  11; EXPRESSED IN ADULT LIVER, SIGNAL =  19; EXPRESSED IN FETAL LIVER, SIGNAL =  13; EXPRESSED IN BRAIN, SIGNAL =  10; EXPRESSED IN BONE MARROW, SIGNAL =  13; EXPRESSED IN PLACENTA, SIGNAL =  15; EXPRESSED IN HELA, SIGNAL =  22; EXPRESSED IN HEART, SIGNAL =  13; SWISSPROT HIT: Q59746, EVALUE 6.90e+00; EST_HUMAN HIT: BF697399.1, EVALUE 4.60e-01; NT HIT: X68793.1, EVALUE 4.80e+00
tggagctgataacatctgttatggccatctttataatgaatgtcaatgaccagcctaattggtcagtcatcattattaaggtgagcaaaaaaattatagaggtgaatacttccatctcattcacttctgatgaatga

SEQ ID NO: 23577 - DNA, 306 bp, Homo sapiens
  MAP TO AL161450.2; EXPRESSED IN LUNG, SIGNAL =   5; EXPRESSED IN ADULT LIVER, SIGNAL = 5.8; EXPRESSED IN HEART, SIGNAL = 5.4; EXPRESSED IN FETAL LIVER, SIGNAL = 5.5; EXPRESSED IN BRAIN, SIGNAL = 4.9; EXPRESSED IN PLACENTA, SIGNAL =   5; EXPRESSED IN HELA, SIGNAL = 8.7; EXPRESSED IN BONE MARROW, SIGNAL = 5.7; EST_HUMAN HIT: AA504583.1, EVALUE 2.00e-94; NT HIT: M95586.1, EVALUE 3.00e-99; SWISSPROT HIT: P15923, EVALUE 3.00e-41
atgaaccagccgcagaggatggcatccgtggacacggacaaggagctcagtaacctggacttcagcatgatgttcccgctgcccgttgccaacgggaagggccggcccgcctccctggccggggcgcaattcagaggttcaggtcttgagaactggcccagctcaggctcctggggcagcggcgaccagaacagctcctcctttgaccccagctggacgttcagcgaaggcgctcaacttgctgagtcgcacggcagccactctccattcacattcctgggaccgggactcggaggcaagagcagc

SEQ ID NO: 23578 - DNA, 122 bp, Homo sapiens
  MAP TO AL133354.8; EXPRESSED IN ADULT LIVER, SIGNAL = 1.6; EXPRESSED IN BRAIN, SIGNAL = 1.4; EXPRESSED IN BONE MARROW, SIGNAL = 1.6; EXPRESSED IN LUNG, SIGNAL = 1.7; EXPRESSED IN PLACENTA, SIGNAL = 1.2; EXPRESSED IN HEART, SIGNAL = 1.4; EXPRESSED IN FETAL LIVER, SIGNAL = 1.1; EST_HUMAN HIT: AU127582.1, EVALUE 1.00e-62; NT HIT: gi11421160, EVALUE 9.00e-63; SWISSPROT HIT: P50749, EVALUE 4.00e-17
agaaacagaagctgaaggccaccgattacccgctgattgcccgaatcctccagggcccatgtgagcagatctccaaagtgttcctaatggagaaggaccaggtggaggaagtcacctacgac

SEQ ID NO: 23579 - DNA, 199 bp, Homo sapiens
  MAP TO AL158049.2; EXPRESSED IN HELA, SIGNAL = 6.8; EXPRESSED IN BONE MARROW, SIGNAL = 3.2; EXPRESSED IN LUNG, SIGNAL = 3.6; EXPRESSED IN FETAL LIVER, SIGNAL = 3.2; EXPRESSED IN PLACENTA, SIGNAL =   4; EXPRESSED IN ADULT LIVER, SIGNAL = 3.5; EXPRESSED IN HEART, SIGNAL = 3.2; EXPRESSED IN BRAIN, SIGNAL = 2.8; NT HIT: gi4504794, EVALUE 6.00e-90; EST_HUMAN HIT: AW993432.1, EVALUE 8.00e-90; SWISSPROT HIT: Q14571, EVALUE 2.00e-11
gagtctctcttcccagcccgagtggtctatgacctcctgttcttcttcatcgtcatcatcattgtgctgaacctcatctttggggtaatcatcgacaccttcgctgacctgcgtagtgagaagcagaagaaggaggagattcttaagacgacatgcttcatctgtggtgagggctgcttcctgctctgtggaggccgca

SEQ ID NO: 23580 - DNA, 189 bp, Homo sapiens
  MAP TO AL136059.2; EXPRESSED IN LUNG, SIGNAL = 2.2; EXPRESSED IN PLACENTA, SIGNAL = 1.7; EXPRESSED IN FETAL LIVER, SIGNAL = 1.6; EXPRESSED IN HEART, SIGNAL = 1.3; EXPRESSED IN ADULT LIVER, SIGNAL = 1.6; EXPRESSED IN BRAIN, SIGNAL = 1.6; EXPRESSED IN BONE MARROW, SIGNAL = 2.2; SWISSPROT HIT: Q9ZAQ6, EVALUE 1.50e-01; NT HIT: AJ005820.1, EVALUE 2.80e-02
ctttatctgagaggtgttttccagaagctgaaggttgatgctgaactgctgaagctggaggagccagatgacaaagagcatggtgaggaggagtatcaggctatgacacacgttattttggaaaaacttttcatatgattatttatttttctaatccaccatttttggaatgagctgagattagcccaa

SEQ ID NO: 23581 - DNA, 162 bp, Homo sapiens
  MAP TO AL132874.14; EXPRESSED IN LUNG, SIGNAL = 1.8; EXPRESSED IN ADULT LIVER, SIGNAL = 2.3; EXPRESSED IN HEART, SIGNAL = 2.3; EXPRESSED IN FETAL LIVER, SIGNAL = 1.9; EXPRESSED IN BRAIN, SIGNAL = 2.1; EXPRESSED IN PLACENTA, SIGNAL =   2; EXPRESSED IN HELA, SIGNAL = 3.3; EXPRESSED IN BONE MARROW, SIGNAL = 1.9; SWISSPROT HIT: P10339, EVALUE 1.00e+00; NT HIT: gi11436739, EVALUE 3.70e-01; EST_HUMAN HIT: BF229972.1, EVALUE 5.50e-01
ggggcaggaagtatctgataaaggaactaaaaaggctggaaacgcgtgcattgacaagcaaaagccggaggcttgcctgcttgcaattcttatgatgaaaacatttcttcagaaatcagcctcatttgagcacttctggcagacgcagaggccagctgagga

SEQ ID NO: 23582 - DNA, 206 bp, Homo sapiens
  MAP TO AC021824.2; EXPRESSED IN LUNG, SIGNAL =  11; EXPRESSED IN PLACENTA, SIGNAL =  10; EXPRESSED IN ADULT LIVER, SIGNAL =  10; EXPRESSED IN HELA, SIGNAL = 5.5; EXPRESSED IN BRAIN, SIGNAL = 8.1; EXPRESSED IN BONE MARROW, SIGNAL = 9.4; EXPRESSED IN FETAL LIVER, SIGNAL = 8.4; EXPRESSED IN HEART, SIGNAL =   9; NT HIT: AL163303.2, EVALUE 5.00e-07; EST_HUMAN HIT: AA012854.1, EVALUE 2.00e-19; SWISSPROT HIT: Q90125, EVALUE 9.80e-01
atgccgttaagaacatttgcaattcatgggaggaggccaaaatatcaacattaacaggagtctgcaagacgttcattccaaccattatggatgattttgaggagtttaagagctcagtgagggaagtaactgcagatgtggtagaaaaagcaagagaattagaatcaaaagtggtgcctgaaaatacaattgagttgctgcaatct

SEQ ID NO: 23583 - DNA, 219 bp, Homo sapiens
  MAP TO AL121845.12; EXPRESSED IN ADULT LIVER, SIGNAL =   4; EXPRESSED IN HELA, SIGNAL = 2.8; EXPRESSED IN BRAIN, SIGNAL = 2.4; EXPRESSED IN LUNG, SIGNAL = 3.1; EXPRESSED IN BONE MARROW, SIGNAL = 2.8; EXPRESSED IN PLACENTA, SIGNAL = 2.3; EXPRESSED IN FETAL LIVER, SIGNAL = 2.9; EXPRESSED IN HEART, SIGNAL = 2.4; EST_HUMAN HIT: BF337599.1, EVALUE 1.00e-120; SWISSPROT HIT: P08252, EVALUE 4.10e-01; NT HIT: gi8659560, EVALUE 1.30e-01
gtttgggccgacacgcggaaggccgggtggagcccatccatgctgtggtgttgcctcgagggaagtcgctggaccagtgtgtggagaccctgcagaagcagaccagggttggcaaggctggcaccaacaagccccccaggtgccggggaagaggggccaggcctgggggccgcccagctcctcggaatgtgtttgacttcctcaatgaaaagctgcaag

SEQ ID NO: 23584 - DNA, 426 bp, Homo sapiens
  MAP TO AL139819.2; EXPRESSED IN BONE MARROW, SIGNAL = 3.7; EXPRESSED IN PLACENTA, SIGNAL = 3.6; EXPRESSED IN HELA, SIGNAL = 5.1; EXPRESSED IN FETAL LIVER, SIGNAL = 4.4; EXPRESSED IN LUNG, SIGNAL = 3.9; EXPRESSED IN ADULT LIVER, SIGNAL = 6.1; EXPRESSED IN HEART, SIGNAL = 3.9; EXPRESSED IN BRAIN, SIGNAL = 4.5; NT HIT: gi11434431, EVALUE 0.00e+00; EST_HUMAN HIT: AA398511.1, EVALUE 0.00e+00; SWISSPROT HIT: P35232, EVALUE 5.00e-44
agaatcatcagggctgtggcccagttggcctgcggaggtgcaggcagggtggcccctcaggggcagctggaggagcatggactgccccgctggcagggagctgatgttcccagagtataagagctggaatgtgatgtcctccacagcttccagcttgcgcagctctatcaggctgttccctgcggtggccagtgagttggcgatcagctctgctgccttggaatcgccctcagcagagatgatggctgcctttttctgctgctcagccttttctgccacaaatctggtgctctctgcttcccgctgagccacctgtttggcttccactgcttctgtgaactccttcccgaaggtcagatgtgtcaaggacacgtcatccaggatgagcccaaaggtggctgcttgctctgtaaggtcgttgctcat

SEQ ID NO: 23585 - DNA, 85 bp, Homo sapiens
  MAP TO AC007981.43; EXPRESSED IN ADULT LIVER, SIGNAL = 3.2; EXPRESSED IN HELA, SIGNAL = 2.7; EXPRESSED IN LUNG, SIGNAL =   3; EXPRESSED IN PLACENTA, SIGNAL =   3; EXPRESSED IN FETAL LIVER, SIGNAL =   3; EXPRESSED IN BRAIN, SIGNAL =   3; EXPRESSED IN HEART, SIGNAL =   3; EXPRESSED IN BONE MARROW, SIGNAL = 2.9; EST_HUMAN HIT: BF343588.1, EVALUE 2.60e-01; NT HIT: K03394.1, EVALUE 6.90e-01
ctttcttggcatccagattgttttctcggtaagtgattccagaatacttactagattcacgcctcagaggggccacctgcaccac

SEQ ID NO: 23586 - DNA, 115 bp, Homo sapiens
  MAP TO AL157376.1; EXPRESSED IN ADULT LIVER, SIGNAL = 3.2; EXPRESSED IN HELA, SIGNAL = 2.7; EXPRESSED IN BRAIN, SIGNAL = 2.9; EXPRESSED IN LUNG, SIGNAL = 2.7; EXPRESSED IN BONE MARROW, SIGNAL = 2.8; EXPRESSED IN PLACENTA, SIGNAL = 2.5; EXPRESSED IN HEART, SIGNAL = 2.6; EXPRESSED IN FETAL LIVER, SIGNAL = 2.7; NT HIT: gi6753323, EVALUE 6.40e-02; EST_HUMAN HIT: BE072508.1, EVALUE 9.40e-02
aagggaaaagaaacatgaagcaaaaattgatagagctgaaaaagaaagtagacaaatccaaaattatagttatcaagtatatagaagacctgaacaatatgatccaccaacagat

SEQ ID NO: 23587 - DNA, 97 bp, Homo sapiens
  MAP TO AC011815.2; EXPRESSED IN PLACENTA, SIGNAL = 5.4; EXPRESSED IN ADULT LIVER, SIGNAL = 4.1; EXPRESSED IN HEART, SIGNAL = 2.5; EXPRESSED IN BRAIN, SIGNAL = 4.9; EXPRESSED IN BONE MARROW, SIGNAL = 4.1; EXPRESSED IN LUNG, SIGNAL = 4.2; EXPRESSED IN HELA, SIGNAL = 4.4; EXPRESSED IN FETAL LIVER, SIGNAL = 3.8; SWISSPROT HIT: P03383, EVALUE 9.50e+00; NT HIT: AL163210.2, EVALUE 3.00e-25; EST_HUMAN HIT: AV732230.1, EVALUE 1.00e-22
atcttctcggctcagcagatgaagactgacacttcccgattgcctcggaagcctacaggaccatcacagatgctctgggtaattatcacagtggagg

SEQ ID NO: 23588 - DNA, 96 bp, Homo sapiens
  MAP TO AC019083.5; EXPRESSED IN PLACENTA, SIGNAL = 1.3; EXPRESSED IN ADULT LIVER, SIGNAL = 1.5; EXPRESSED IN BRAIN, SIGNAL =   1; EXPRESSED IN BONE MARROW, SIGNAL =   1; EXPRESSED IN LUNG, SIGNAL = 1.6; EXPRESSED IN HEART, SIGNAL = 1.2; EXPRESSED IN FETAL LIVER, SIGNAL = 1.1; EST_HUMAN HIT: AI864367.1, EVALUE 7.50e-02
aagcaagaggcttgttcatggtcagaaccggcatctgaacccagctctcatgacaagtctgctgctctttttggtacacaaaacccgtttctttct

SEQ ID NO: 23589 - DNA, 277 bp, Homo sapiens
  MAP TO AL161756.1; EXPRESSED IN LUNG, SIGNAL = 1.7; EXPRESSED IN PLACENTA, SIGNAL = 1.3; EXPRESSED IN FETAL LIVER, SIGNAL = 1.2; EXPRESSED IN HEART, SIGNAL = 1.5; EXPRESSED IN ADULT LIVER, SIGNAL = 2.2; EXPRESSED IN BRAIN, SIGNAL = 1.2; EXPRESSED IN BONE MARROW, SIGNAL = 1.3; SWISSPROT HIT: P53781, EVALUE 1.20e+00; NT HIT: AB023228.1, EVALUE 0.00e+00; EST_HUMAN HIT: AW364874.1, EVALUE 0.00e+00
ctgacagtgcgctgtagtatgggccctcctcgtcctcttcgtgagaggaggagccccccacgtcgcctgtgtggtcccactccagggggatggagtccacgctgacaggggtctcgcagccagaccgctcgtgccctggggccactagatgacacagggactgaggagatgacggttcctcgctctctccccgtttacgccaagaatcagtctggatttctctggggtcttccatgtctgtttcattctcagaggcctccttttcatcttccaagcc

SEQ ID NO: 23590 - DNA, 337 bp, Homo sapiens
  MAP TO AC013627.3; EXPRESSED IN LUNG, SIGNAL = 7.6; EXPRESSED IN PLACENTA, SIGNAL = 9.8; EXPRESSED IN HELA, SIGNAL = 5.6; EXPRESSED IN HEART, SIGNAL = 6.4; EXPRESSED IN FETAL LIVER, SIGNAL = 7.6; EXPRESSED IN BRAIN, SIGNAL = 8.4; EXPRESSED IN BONE MARROW, SIGNAL =  11; EXPRESSED IN ADULT LIVER, SIGNAL =  11; NT HIT: AL163210.2, EVALUE 4.00e-55; SWISSPROT HIT: P14164, EVALUE 6.60e+00; EST_HUMAN HIT: BE156318.1, EVALUE 6.00e-55
taatatgggcaatgaagtccaggctgagatgatctcagatggagatgaggaacttgttgggaactggagcaaagatgactcttgttatgctatagcaaagagactggtggctttttgcccctgccctagagatctgtggaactttgaacctaagagagatgatttggggtatcaggcagaagaaatttctaagtggcaaagcattccacaggaagcagaggacaaaagtttgtcaaatttgcaccctgatgatgtgacagaaaagaaaaatctattttctgaggaaaaaattcaagccagctgcagaaatctgcataagaaacaaggagtgaaatgt

SEQ ID NO: 23591 - DNA, 218 bp, Homo sapiens
  MAP TO AC022206.2; EXPRESSED IN LUNG, SIGNAL = 4.6; EXPRESSED IN HEART, SIGNAL = 4.5; EXPRESSED IN BRAIN, SIGNAL = 4.5; EXPRESSED IN BONE MARROW, SIGNAL = 4.7; EXPRESSED IN PLACENTA, SIGNAL = 4.2; EXPRESSED IN ADULT LIVER, SIGNAL = 4.3; EXPRESSED IN HELA, SIGNAL = 4.6; EXPRESSED IN FETAL LIVER, SIGNAL = 4.6; SWISSPROT HIT: Q9WTN3, EVALUE 2.50e-01; NT HIT: Z74102.1, EVALUE 1.30e-01
atgagcaaatccagacactttaggcggccagccacagtggcgaaaacaaaaactgatgatactagcaatattcataatactagcgatggtgttgatcatcaacagacaggcactacaccatttcctgatggcgggtgggagattcacggaagccccactggtggaatttacaggaaggcggccgatcctcttgaggcaagcccatctgcacagagccg

SEQ ID NO: 23592 - DNA, 96 bp, Homo sapiens
  MAP TO AC007492.2; EXPRESSED IN LUNG, SIGNAL = 1.6; EXPRESSED IN ADULT LIVER, SIGNAL = 1.7; EXPRESSED IN BRAIN, SIGNAL = 1.5; EXPRESSED IN BONE MARROW, SIGNAL = 1.3; EXPRESSED IN PLACENTA, SIGNAL = 1.4; EXPRESSED IN FETAL LIVER, SIGNAL = 1.5; EXPRESSED IN HEART, SIGNAL = 1.4; NT HIT: AJ131966.1, EVALUE 5.10e-02; EST_HUMAN HIT: AI537889.1, EVALUE 1.20e+00
ttgccacccctagaggccttactaaaggtttatcgtgagctgctgattcgtagtgatgagggagtgatcaagaaaccacccaccatctatctggtt

SEQ ID NO: 23593 - DNA, 112 bp, Homo sapiens
  MAP TO AL161752.1; EXPRESSED IN ADULT LIVER, SIGNAL = 1.8; EXPRESSED IN BRAIN, SIGNAL = 1.6; EXPRESSED IN LUNG, SIGNAL = 1.7; EXPRESSED IN HEART, SIGNAL = 1.6; EXPRESSED IN BONE MARROW, SIGNAL = 1.5; EXPRESSED IN PLACENTA, SIGNAL = 1.3; EXPRESSED IN FETAL LIVER, SIGNAL = 1.7; NT HIT: AJ012585.1, EVALUE 2.40e-01
ctgggttaatatactaacatcaatcaagctgatgttcaggaggcaataaatagctataaactgtcctacatgtttaatcctttctgcagcatggaaaatgtgaacttgattc

SEQ ID NO: 23594 - DNA, 163 bp, Homo sapiens
  MAP TO AL117333.23; EXPRESSED IN BONE MARROW, SIGNAL = 2.3; EXPRESSED IN PLACENTA, SIGNAL = 2.6; EXPRESSED IN HELA, SIGNAL = 3.4; EXPRESSED IN HEART, SIGNAL = 2.7; EXPRESSED IN FETAL LIVER, SIGNAL = 2.1; EXPRESSED IN LUNG, SIGNAL = 2.6; EXPRESSED IN ADULT LIVER, SIGNAL = 2.7; EXPRESSED IN BRAIN, SIGNAL =   2; SWISSPROT HIT: Q02207, EVALUE 1.00e+00; EST_HUMAN HIT: AA426327.1, EVALUE 2.20e+00
agcctacctactttttgccaaagcagctgacatgggaaacttgaaagctatggagaaaatggctgacgctttgctatttggaaattttggcgtgcaaaatataacagcagctatccaattatatgagtccttggctaaagaaggatcatgtaaagcccaaaac

SEQ ID NO: 23595 - DNA, 131 bp, Homo sapiens
  MAP TO AC021973.2; EXPRESSED IN ADULT LIVER, SIGNAL =   2; EXPRESSED IN HELA, SIGNAL =   3; EXPRESSED IN FETAL LIVER, SIGNAL = 1.5; EXPRESSED IN BONE MARROW, SIGNAL = 1.6; EXPRESSED IN LUNG, SIGNAL = 1.8; EXPRESSED IN PLACENTA, SIGNAL = 2.3; EXPRESSED IN HEART, SIGNAL = 1.8; EXPRESSED IN BRAIN, SIGNAL = 1.5; SWISSPROT HIT: P25491, EVALUE 1.40e+00; NT HIT: U12202.1, EVALUE 2.90e-01; EST_HUMAN HIT: AL134349.1, EVALUE 1.10e-01
catgtactttaccacctgccccttgtctccctttctctggccgcactcaccacagttgttttgtttgttccttttcagacctgccaagcctcccttcatctcagagtcctggtgcttgctccgccaggcgt

SEQ ID NO: 23596 - DNA, 138 bp, Homo sapiens
  MAP TO AC009234.3; EXPRESSED IN PLACENTA, SIGNAL = 1.5; EXPRESSED IN HEART, SIGNAL = 1.6; EXPRESSED IN FETAL LIVER, SIGNAL = 1.3; EXPRESSED IN BONE MARROW, SIGNAL = 1.7; EXPRESSED IN LUNG, SIGNAL = 1.1; EXPRESSED IN BRAIN, SIGNAL = 1.5; NT HIT: AJ251973.1, EVALUE 3.00e-04; SWISSPROT HIT: P52172, EVALUE 4.00e+00; EST_HUMAN HIT: AA284049.1, EVALUE 3.00e-05
gatgctgaagggtccaaggtcaaggtgccagcagatttcacatctggtgaaggcccacttccaggttcacaggtggcactctttttactgtgccattgcatggcagcagtgacaagggagacctctggggtctctttt

SEQ ID NO: 23597 - DNA, 98 bp, Homo sapiens
  MAP TO AL158049.2; EXPRESSED IN ADULT LIVER, SIGNAL = 1.4; EXPRESSED IN HEART, SIGNAL = 2.4; EXPRESSED IN BRAIN, SIGNAL = 1.3; EXPRESSED IN LUNG, SIGNAL = 1.1; EXPRESSED IN PLACENTA, SIGNAL = 1.1; EXPRESSED IN FETAL LIVER, SIGNAL = 1.5; EXPRESSED IN BONE MARROW, SIGNAL = 1.4; NT HIT: AF031814.1, EVALUE 3.20e+00; EST_HUMAN HIT: AV743451.1, EVALUE 2.00e-48
tcaggccttatgatcctcctcaggacccttgggggcaaacttctcctgcagtttcttccacatgcctttatctatttccttaagctcttccaaggtgt

SEQ ID NO: 23598 - DNA, 157 bp, Homo sapiens
  MAP TO AL132654.12; EXPRESSED IN LUNG, SIGNAL = 5.1; EXPRESSED IN HEART, SIGNAL = 4.5; EXPRESSED IN FETAL LIVER, SIGNAL = 4.5; EXPRESSED IN BONE MARROW, SIGNAL = 4.7; EXPRESSED IN ADULT LIVER, SIGNAL = 4.8; EXPRESSED IN PLACENTA, SIGNAL = 4.6; EXPRESSED IN HELA, SIGNAL = 2.4; EXPRESSED IN BRAIN, SIGNAL = 4.6; SWISSPROT HIT: P32063, EVALUE 8.90e+00; NT HIT: L23401.1, EVALUE 1.00e-13; EST_HUMAN HIT: AA448097.1, EVALUE 1.00e-23
gtccatgccatctttaagagctgtaacactcaccacaaaggtccgcagctcctttcttgaagtcagcaagaccacagacctaccagaaggaatgaactccggacacactatgaattttagtgaagtgcaagcaataaatgcacatgtgctgagatag

SEQ ID NO: 23599 - DNA, 447 bp, Homo sapiens
  MAP TO AC024196.2; EXPRESSED IN PLACENTA, SIGNAL = 1.3; EXPRESSED IN HEART, SIGNAL = 1.5; EXPRESSED IN LUNG, SIGNAL = 0.92; EXPRESSED IN BRAIN, SIGNAL =   1; EXPRESSED IN ADULT LIVER, SIGNAL = 1.1; EXPRESSED IN FETAL LIVER, SIGNAL =   1; EXPRESSED IN BONE MARROW, SIGNAL = 1.1; SWISSPROT HIT: P19013, EVALUE 6.00e-21; NT HIT: gi9910293, EVALUE 5.00e-80; EST_HUMAN HIT: BE746373.1, EVALUE 5.00e-10
cttgtcaatgaaggaggcgaacttgttgttcagcaccttgatctgctcccgctcctgggcacgcactttctggatttcagggtccagctccacgttcaggggtgccaggaggctcttgttgatggtgacctgatggatacccccgggcgggcacaacgacagacacacggaccccaaggccacactgccaaacatgctgccagcaaagccactggcccggccccggccaaatccatagcctcctgcccacccactgccactggccacattgaaagagatgctccgggcaccccccaggctgtaaaggctccgactgctgaagcctccactgagccctttgccccctgctcggtaggaggatgagctgccccctgagagcacagcggagcagccgctgaagccccccttggcagcagctcccgacttgtaggtgaattggcggctcat

SEQ ID NO: 23600 - DNA, 180 bp, Homo sapiens
  MAP TO AL133293.14; EXPRESSED IN HEART, SIGNAL = 1.4; EXPRESSED IN FETAL LIVER, SIGNAL = 1.6; EXPRESSED IN BONE MARROW, SIGNAL = 1.6; EXPRESSED IN LUNG, SIGNAL = 1.5; EXPRESSED IN PLACENTA, SIGNAL = 1.4; EXPRESSED IN ADULT LIVER, SIGNAL = 1.5; EXPRESSED IN BRAIN, SIGNAL = 2.6; NT HIT: gi11421793, EVALUE 4.00e-97; EST_HUMAN HIT: BE736740.1, EVALUE 7.00e-84; SWISSPROT HIT: P00525, EVALUE 3.00e-28
ggacctggaacggtaccaccagggtggccatcaaaaccctgaagcctggcacgatgtctccagaggccttcctgcaggaggcccaggtcatgaagaagctgaggcatgagaagctggtgcagttgtatgctgtggtttcagaggagcccatttacatcgtcacggagtacatgagcaagg

SEQ ID NO: 23601 - DNA, 309 bp, Homo sapiens
  MAP TO AC015525.3; EXPRESSED IN ADULT LIVER, SIGNAL = 1.6; EXPRESSED IN LUNG, SIGNAL = 1.9; EXPRESSED IN PLACENTA, SIGNAL = 1.4; EXPRESSED IN HEART, SIGNAL = 1.5; EXPRESSED IN FETAL LIVER, SIGNAL = 1.5; EXPRESSED IN BRAIN, SIGNAL = 1.6; EXPRESSED IN BONE MARROW, SIGNAL = 1.6; SWISSPROT HIT: P35441, EVALUE 7.50e+00
ctgctgaactgaatctttatgtcttcagttccgcttgtgctctctccgtccaccgtgttgctgttcccctgagacaccgccgtctctgattcatcgtgttcccttagctgaagaacgctgttctcaaactggtccctggaatcctcacttacgctcgtcaacactgttgtggtgacggggctgtgcacgctctcgattagctctgttcgtaccatccccttttcctgctggtcctcgagcagcttgggagaagggtggttccccatagctgtgagctcatcttgtagtccattgaaggttttgctttca

SEQ ID NO: 23602 - DNA, 416 bp, Homo sapiens
  MAP TO AL132716.4; EXPRESSED IN LUNG, SIGNAL = 1.5; EXPRESSED IN HEART, SIGNAL = 1.2; EXPRESSED IN PLACENTA, SIGNAL = 1.2; EXPRESSED IN FETAL LIVER, SIGNAL = 1.2; EXPRESSED IN ADULT LIVER, SIGNAL = 1.2; EXPRESSED IN BRAIN, SIGNAL = 1.9; EXPRESSED IN BONE MARROW, SIGNAL = 1.3; EST_HUMAN HIT: BE612586.1, EVALUE 0.00e+00; NT HIT: gi4505424, EVALUE 0.00e+00; SWISSPROT HIT: P51513, EVALUE 2.00e-32
gtttaggtctcagtcaagcagcagcaacaggggctttggctgcagcagctgccagtgccaacccagcagcagcagcagccaatttattggccacctatgccagtgaagcctcagccagtggcagcacagctggtggtacggcggggacatttgcattaggtagcctggctgctgctactgctgcaaccaatggatattttggagctgcttctcccctagctgccagtgccattctaggaacagaaaagtccacagatggatccaaggatgtagttgaaatagcagtgccagaaaacttagttggtgcaatacttggcaaaggagggaaaacattagtggaataccaggagttgactggtgcaaggatacagatctccaaaaaaggagaattcgtacctggcacaaggaatcggaag

SEQ ID NO: 23603 - DNA, 141 bp, Homo sapiens
  MAP TO AC021308.3; EXPRESSED IN ADULT LIVER, SIGNAL = 7.8; EXPRESSED IN HEART, SIGNAL = 4.7; EXPRESSED IN LUNG, SIGNAL = 5.3; EXPRESSED IN PLACENTA, SIGNAL = 8.1; EXPRESSED IN HELA, SIGNAL = 2.4; EXPRESSED IN FETAL LIVER, SIGNAL = 5.1; EXPRESSED IN BRAIN, SIGNAL = 6.2; EXPRESSED IN BONE MARROW, SIGNAL = 6.6; EST_HUMAN HIT: BE141785.1, EVALUE 2.00e-21; NT HIT: AL163227.2, EVALUE 3.00e-20; SWISSPROT HIT: P34216, EVALUE 1.80e+00
gtcacactgatgcaagagatgggctcctacagccttgggcagctccgcctatgtggatttgcagggtacagcccccttcctggctgctttctcaggctggcgttgagtgcctgtggcttctccaggcccatggtggaagct

SEQ ID NO: 23604 - DNA, 76 bp, Homo sapiens
  MAP TO AC027273.2; EXPRESSED IN HELA, SIGNAL = 9.1; EXPRESSED IN LUNG, SIGNAL = 8.9; EXPRESSED IN PLACENTA, SIGNAL =   7; EXPRESSED IN ADULT LIVER, SIGNAL =  12; EXPRESSED IN FETAL LIVER, SIGNAL = 3.2; EXPRESSED IN HEART, SIGNAL = 6.5; EXPRESSED IN BRAIN, SIGNAL = 7.8; EXPRESSED IN BONE MARROW, SIGNAL = 7.4; SWISSPROT HIT: P22313, EVALUE 9.70e+00; EST_HUMAN HIT: AV727859.1, EVALUE 6.00e-11; NT HIT: X75284.1, EVALUE 7.00e-10
tgctactttcactgttggtgttgattgtctgaagctttttcaggtgcacagtgcaagctgtcagcggatctaccat

SEQ ID NO: 23605 - DNA, 142 bp, Homo sapiens
  MAP TO AC018525.4; EXPRESSED IN PLACENTA, SIGNAL =  15; EXPRESSED IN HELA, SIGNAL =  14; EXPRESSED IN HEART, SIGNAL =  13; EXPRESSED IN FETAL LIVER, SIGNAL =  11; EXPRESSED IN BRAIN, SIGNAL =  14; EXPRESSED IN BONE MARROW, SIGNAL =  16; EXPRESSED IN LUNG, SIGNAL =  16; EXPRESSED IN ADULT LIVER, SIGNAL =  15; NT HIT: X02508.1, EVALUE 3.20e-01
ctttccttccttccttcctctcttcctccttttcttccttcctctcttccttccttccttcctcccttcctttcttccttctttcctcctttctcttcctcttcctctgtttttgtctgtcttcccaattaaaaggtaagtt

SEQ ID NO: 23606 - DNA, 146 bp, Homo sapiens
  MAP TO AC013698.3; EXPRESSED IN PLACENTA, SIGNAL = 1.2; EXPRESSED IN LUNG, SIGNAL = 2.4; EXPRESSED IN HEART, SIGNAL = 1.4; EXPRESSED IN FETAL LIVER, SIGNAL = 1.1; EXPRESSED IN BRAIN, SIGNAL = 1.3; EXPRESSED IN BONE MARROW, SIGNAL = 1.2; EXPRESSED IN ADULT LIVER, SIGNAL =   2; EST_HUMAN HIT: AU118232.1, EVALUE 8.00e-77; SWISSPROT HIT: P28817, EVALUE 6.00e-05; NT HIT: gi11428849, EVALUE 5.00e-77
cttttcagaatctacaaagtgtgtagcaattcctgctctgtacacatctcttccttttagtctgaatcctgttaatgcaaggaagtaaccaagttttccttggagtcgtggcaagaaataacctccacccacatcagggaacagtc

SEQ ID NO: 23607 - DNA, 221 bp, Homo sapiens
  MAP TO AC024196.2; EXPRESSED IN ADULT LIVER, SIGNAL = 2.3; EXPRESSED IN HELA, SIGNAL = 2.7; EXPRESSED IN HEART, SIGNAL =   2; EXPRESSED IN FETAL LIVER, SIGNAL = 1.4; EXPRESSED IN BONE MARROW, SIGNAL = 1.3; EXPRESSED IN LUNG, SIGNAL = 1.6; EXPRESSED IN PLACENTA, SIGNAL = 1.6; EXPRESSED IN BRAIN, SIGNAL = 1.4; NT HIT: gi9910293, EVALUE 7.00e-62; EST_HUMAN HIT: AA354256.1, EVALUE 1.00e-116; SWISSPROT HIT: P13647, EVALUE 5.00e-25
tgtgccgatctggagacggccatcgccgacgctgaacagcggggggactgcgccctgaaagatgcccgggccaagctggatgagctggagggcgccctgcaccaggccaaggaggagctggcacggatgctgcgtgagtaccaggagctcgtgagcctgaagctggccctggatatggagatcgccacctaccgcaagctgctggagagcgaggagtgcag

SEQ ID NO: 23608 - DNA, 101 bp, Homo sapiens
  MAP TO AL133260.7; EXPRESSED IN ADULT LIVER, SIGNAL =  15; EXPRESSED IN BRAIN, SIGNAL =  14; EXPRESSED IN LUNG, SIGNAL =  16; EXPRESSED IN PLACENTA, SIGNAL =  15; EXPRESSED IN HELA, SIGNAL =  22; EXPRESSED IN HEART, SIGNAL =  14; EXPRESSED IN FETAL LIVER, SIGNAL =  17; EXPRESSED IN BONE MARROW, SIGNAL =  17; SWISSPROT HIT: Q06332, EVALUE 7.20e+00; EST_HUMAN HIT: BF311635.1, EVALUE 3.20e-01; NT HIT: gi9627007, EVALUE 8.50e-01
atggacatccctacagaaggcagctttctgtatgggaaggttgtattttccaaagaaggtcttacctatagatgtatccccatctatgtgctcttcttagg

SEQ ID NO: 23609 - DNA, 149 bp, Homo sapiens
  MAP TO AL135784.4; EXPRESSED IN LUNG, SIGNAL = 2.1; EXPRESSED IN FETAL LIVER, SIGNAL = 2.6; EXPRESSED IN BONE MARROW, SIGNAL = 2.3; EXPRESSED IN HEART, SIGNAL = 2.3; EXPRESSED IN ADULT LIVER, SIGNAL = 1.9; EXPRESSED IN PLACENTA, SIGNAL = 1.4; EXPRESSED IN BRAIN, SIGNAL = 1.6; NT HIT: AL161515.2, EVALUE 2.20e-02
aggatgaggtgaataaccagagagaggactttacaaaggtcactcaggtagttgagaacagaagtgagactaaaaccatgggcatgtttatgagtctctgtgtcaaaacaaacatgtattcaaccaaaaactcaagaactaccaaatga

SEQ ID NO: 23610 - DNA, 135 bp, Homo sapiens
  MAP TO AL133405.9; EXPRESSED IN LUNG, SIGNAL = 4.3; EXPRESSED IN PLACENTA, SIGNAL = 3.1; EXPRESSED IN ADULT LIVER, SIGNAL = 3.8; EXPRESSED IN HELA, SIGNAL = 4.7; EXPRESSED IN FETAL LIVER, SIGNAL = 3.8; EXPRESSED IN BRAIN, SIGNAL =   3; EXPRESSED IN HEART, SIGNAL = 4.7; EXPRESSED IN BONE MARROW, SIGNAL = 4.1; EST_HUMAN HIT: AI368652.1, EVALUE 7.00e+00; NT HIT: gi9910161, EVALUE 3.00e-01; SWISSPROT HIT: Q63003, EVALUE 4.10e+00
ctctgcgttcagctagctcttcctgtgtgtcgatggctgaatacaacagccacttctgcgtcaccagctggttacccatcacttgaaggaccagagacttcagaaggagccagttatgaaacaaggggaagagca

SEQ ID NO: 23611 - DNA, 188 bp, Homo sapiens
  MAP TO AL133324.7; EXPRESSED IN PLACENTA, SIGNAL = 1.5; EXPRESSED IN ADULT LIVER, SIGNAL = 1.2; EXPRESSED IN FETAL LIVER, SIGNAL = 1.1; EXPRESSED IN BONE MARROW, SIGNAL = 1.7; EXPRESSED IN LUNG, SIGNAL = 1.9; EXPRESSED IN HEART, SIGNAL =  19; EXPRESSED IN BRAIN, SIGNAL = 0.92; EST_HUMAN HIT: AI819050.1, EVALUE 8.00e-87; SWISSPROT HIT: P13540, EVALUE 2.00e-26; NT HIT: AB040945.1, EVALUE 9.00e-92
ttcaacagcttcgaacagctgtgcatcaacttcaccaatgagaaattgcagcagttcttcaaccagcacatgtttgtgctggagcaggaggagtacaagcgggagggcatcgactgggtcttcatcgacttcggccttgacctgcagccttgcatcgacctcatcgagaaggtgggtgccgcggcaag

SEQ ID NO: 23612 - DNA, 551 bp, Homo sapiens
  MAP TO AC011930.3; EXPRESSED IN PLACENTA, SIGNAL = 1.2; EXPRESSED IN HEART, SIGNAL = 1.3; EXPRESSED IN BRAIN, SIGNAL = 1.5; EXPRESSED IN BONE MARROW, SIGNAL = 1.6; EXPRESSED IN LUNG, SIGNAL = 1.5; EXPRESSED IN ADULT LIVER, SIGNAL = 1.9; EXPRESSED IN FETAL LIVER, SIGNAL = 1.3; EST_HUMAN HIT: AW998611.1, EVALUE 9.00e-80; SWISSPROT HIT: P23074, EVALUE 3.00e-18; NT HIT: AL163209.2, EVALUE 0.00e+00
ggggagggctactatggtgggaaaggcccaatggaagccatttgactccctacctaggaaaacagtaaataaaaaacaatatcgcatccctggagggattgtggagattagtgccaccatcaaggacttgaaacatgcaggggtggtgattcccaccacatacccattcaactcttccatttggcctgtgcagaagaaagacggatcttggagaatgacagtgaattatcgtaaggttaaccaagtggggactccaattgcagctgctgtgctggatgtggtttcattgcttgagcaaattaacacatctcgtggtacctggtatgcagccattgacttggcaaatgcctttttctccattcctgtccaccagaagcaatttgccctcagctggcaaggccagcaatatacctttactgtcctacctcaggggtatgccaactctctggctttgtgtcataatctcattcagagagacgttgatcactttttgcttccacaagatatcacattggtccattacattgatgacattatgctgactggatcca

SEQ ID NO: 23613 - DNA, 86 bp, Homo sapiens
  MAP TO AL109824.21; EXPRESSED IN LUNG, SIGNAL = 6.5; EXPRESSED IN PLACENTA, SIGNAL = 6.5; EXPRESSED IN ADULT LIVER, SIGNAL =   7; EXPRESSED IN HELA, SIGNAL = 9.8; EXPRESSED IN BRAIN, SIGNAL =  12; EXPRESSED IN HEART, SIGNAL = 8.1; EXPRESSED IN FETAL LIVER, SIGNAL =  12; EXPRESSED IN BONE MARROW, SIGNAL = 8.5; NT HIT: AE000253.1, EVALUE 7.00e-01; SWISSPROT HIT: P25688, EVALUE 4.30e+00
gatctgggagtgaaggactggtcgtacctcaatgcactgctcaccctggcagaaatgacggccttctgctcctggcacaaagctct

SEQ ID NO: 23614 - DNA, 172 bp, Homo sapiens
  MAP TO AC007923.2; EXPRESSED IN ADULT LIVER, SIGNAL = 3.1; EXPRESSED IN BRAIN, SIGNAL = 3.3; EXPRESSED IN LUNG, SIGNAL = 3.5; EXPRESSED IN PLACENTA, SIGNAL = 3.3; EXPRESSED IN HELA, SIGNAL = 3.8; EXPRESSED IN FETAL LIVER, SIGNAL = 3.2; EXPRESSED IN HEART, SIGNAL = 3.6; EXPRESSED IN BONE MARROW, SIGNAL = 3.4; NT HIT: AJ297131.1, EVALUE 1.60e+00
taataatgatgatgatgatgatgatgatgatgatgatgatgatgatgatgataagagccaatattcattgagtgtgccggtctcacagtgttttacttgtttcaactcctttgatcctcctaactgcctggagaggcaagaattattatcgccctcattttaccaagattga

SEQ ID NO: 23615 - DNA, 84 bp, Homo sapiens
  MAP TO AL121747.19; EXPRESSED IN LUNG, SIGNAL =   4; EXPRESSED IN PLACENTA, SIGNAL = 3.9; EXPRESSED IN HEART, SIGNAL = 4.3; EXPRESSED IN FETAL LIVER, SIGNAL = 3.7; EXPRESSED IN ADULT LIVER, SIGNAL = 3.8; EXPRESSED IN BRAIN, SIGNAL = 3.6; EXPRESSED IN HELA, SIGNAL =   5; EXPRESSED IN BONE MARROW, SIGNAL = 3.9; NT HIT: gi5454167, EVALUE 3.00e-40; SWISSPROT HIT: Q90733, EVALUE 4.30e+00; EST_HUMAN HIT: AI909655.1, EVALUE 4.00e-40
cttcagcatctctgtcgtctgccgggcagccacatcgttctgagcccgcagggccaggtcctcctgatactccttgcagttcat

SEQ ID NO: 23616 - DNA, 183 bp, Homo sapiens
  MAP TO AL078646.29; EXPRESSED IN LUNG, SIGNAL = 1.5; EXPRESSED IN PLACENTA, SIGNAL = 1.5; EXPRESSED IN ADULT LIVER, SIGNAL = 1.4; EXPRESSED IN FETAL LIVER, SIGNAL = 1.3; EXPRESSED IN BRAIN, SIGNAL = 1.2; EXPRESSED IN HEART, SIGNAL = 1.2; EXPRESSED IN BONE MARROW, SIGNAL = 1.2; SWISSPROT HIT: P39730, EVALUE 3.40e-01; EST_HUMAN HIT: BF357321.1, EVALUE 4.00e-67; NT HIT: AL161590.2, EVALUE 2.70e-02
gctgtagtggacctgcttctggtgttccttgaggttctgctttcttgtgagggttcttttttctctctgcttcttattaatctgtagctgcttatgttttttggcttggctaaaaataagcacttttccttcttcctcctgggttaggagtgaaaaagacagtctttgtatttctgctgtttg

SEQ ID NO: 23617 - DNA, 281 bp, Homo sapiens
  MAP TO AL121829.12; EXPRESSED IN HELA, SIGNAL = 7.6; EXPRESSED IN HEART, SIGNAL = 7.8; EXPRESSED IN BONE MARROW, SIGNAL =   7; EXPRESSED IN LUNG, SIGNAL = 7.8; EXPRESSED IN PLACENTA, SIGNAL =   7; EXPRESSED IN ADULT LIVER, SIGNAL = 7.9; EXPRESSED IN FETAL LIVER, SIGNAL = 6.1; EXPRESSED IN BRAIN, SIGNAL = 6.6; NT HIT: AE004803.1, EVALUE 2.70e+00; SWISSPROT HIT: P42694, EVALUE 6.00e-11; EST_HUMAN HIT: BE062855.1, EVALUE 1.00e-118
ctgttggtgtgtgtgcagatgagcaccttggtttcaggcctccggatgacctccagggaggccatggccagcgtgtaggtcttgccggtgccaaaggggccatagatgagtagcggggggacacgcctcccatccccagggccccagcccgcgatgagcgccacggccagctcctgcttgcggttgccacgccgcaagggtgggacagaccaaggtctgggcagggcgcaggtgggcaagtcgggcaccaccagctgctcctcaggcagtgtgtccactgc

SEQ ID NO: 23618 - DNA, 250 bp, Homo sapiens
  MAP TO AC011930.3; EXPRESSED IN ADULT LIVER, SIGNAL = 5.7; EXPRESSED IN HEART, SIGNAL = 3.7; EXPRESSED IN BRAIN, SIGNAL = 4.1; EXPRESSED IN BONE MARROW, SIGNAL = 4.9; EXPRESSED IN LUNG, SIGNAL = 4.4; EXPRESSED IN PLACENTA, SIGNAL = 5.7; EXPRESSED IN HELA, SIGNAL =   3; EXPRESSED IN FETAL LIVER, SIGNAL = 4.3; SWISSPROT HIT: P10272, EVALUE 1.90e-01; EST_HUMAN HIT: AV730071.1, EVALUE 4.00e-52; NT HIT: AL163246.2, EVALUE 6.00e-72
gcccatgaacaaagtggccatggtgtcagggatggagattacacatgggatcagcaacatggacttccactcaccaagggtgacctggctatggccacttctgagtgcccagtttgccagcagcagagaccaacaccaaggccttgatatggcacaattccttggggtgatcggccagctacttggtggcagattgattatattggacctcttccatcatggaaaagccagaggttggtcctcactggaa

SEQ ID NO: 23619 - DNA, 213 bp, Homo sapiens
  MAP TO AL121890.13; EXPRESSED IN ADULT LIVER, SIGNAL = 5.2; EXPRESSED IN PLACENTA, SIGNAL =   5; EXPRESSED IN HEART, SIGNAL = 4.1; EXPRESSED IN FETAL LIVER, SIGNAL = 3.8; EXPRESSED IN BRAIN, SIGNAL = 4.4; EXPRESSED IN BONE MARROW, SIGNAL = 4.2; EXPRESSED IN LUNG, SIGNAL = 4.5; EXPRESSED IN HELA, SIGNAL = 3.4; EST_HUMAN HIT: AV708066.1, EVALUE 1.90e-01; NT HIT: gi8923919, EVALUE 1.30e-01; SWISSPROT HIT: P48810, EVALUE 1.40e-01
gcatttaccatttttctctatcctgaaaaaccttccatagtcccagtctgcccagccgtcctgcctgccttcctctgcccaacctcccctgccatcacccctcaggcactgtccctccctgttttatcagatgtcatctgtgaccttctaattgccaaaaccaattacaggtttacagtccttttcttctttgatggctctgtaacagtccac

SEQ ID NO: 23620 - DNA, 145 bp, Homo sapiens
  MAP TO AC022995.2; EXPRESSED IN PLACENTA, SIGNAL = 1.5; EXPRESSED IN LUNG, SIGNAL = 1.5; EXPRESSED IN HEART, SIGNAL = 1.4; EXPRESSED IN FETAL LIVER, SIGNAL = 1.5; EXPRESSED IN BRAIN, SIGNAL = 1.5; EXPRESSED IN BONE MARROW, SIGNAL = 1.4; EXPRESSED IN ADULT LIVER, SIGNAL = 1.7; EST_HUMAN HIT: BE144526.1, EVALUE 2.00e-18; NT HIT: AJ277557.1, EVALUE 7.00e-21; SWISSPROT HIT: P08548, EVALUE 2.00e-07
ctcaacataataaaagccatatacaacagatacacggctagtatcatactgaatgggggaaaaagtaaaggacttttctctaagatctgaaacacaacaagattgccaactttcaccactgttatccaacatagtactggaagtc

SEQ ID NO: 23621 - DNA, 215 bp, Homo sapiens
  MAP TO AC026443.1; EXPRESSED IN ADULT LIVER, SIGNAL = 1.3; EXPRESSED IN HELA, SIGNAL =   3; EXPRESSED IN HEART, SIGNAL = 1.3; EXPRESSED IN FETAL LIVER, SIGNAL = 1.4; EXPRESSED IN BRAIN, SIGNAL = 1.4; EXPRESSED IN BONE MARROW, SIGNAL = 1.4; EXPRESSED IN LUNG, SIGNAL = 1.2; EXPRESSED IN PLACENTA, SIGNAL = 1.1; EST_HUMAN HIT: AA443024.1, EVALUE 1.00e-118; SWISSPROT HIT: O14464, EVALUE 2.00e-09; NT HIT: AF151109.1, EVALUE 1.00e-118
atacaaccattctcccaagtgatgcgatgacgagtatgtgcgtgactctggagggaaagggtctacatctgtctctgcttgtgcctcggatgggttttacagtagacgtaccaccgaccccgcctcttcaccaggtaacagtccttgcagcgcttcttaaggacagtcttgtttttgaaccccagcgcaggcagcagatggggcaggaggccggg

SEQ ID NO: 23622 - DNA, 125 bp, Homo sapiens
  MAP TO AL117333.23; EXPRESSED IN PLACENTA, SIGNAL = 3.7; EXPRESSED IN HEART, SIGNAL = 2.9; EXPRESSED IN FETAL LIVER, SIGNAL =   3; EXPRESSED IN BRAIN, SIGNAL = 3.4; EXPRESSED IN LUNG, SIGNAL = 3.5; EXPRESSED IN ADULT LIVER, SIGNAL = 3.7; EXPRESSED IN BONE MARROW, SIGNAL = 4.1; EST_HUMAN HIT: AA659930.1, EVALUE 3.00e-48; NT HIT: AL163249.2, EVALUE 4.00e-37
cgcgaaggtctgcagctccactcctgaagccagcgagaccacgaacccaccaggaggaacaaacaactccacacgcaccgccttaagagctgtaacactcaccgcgaaagtctgcagcttcactc

SEQ ID NO: 23623 - DNA, 111 bp, Homo sapiens
  MAP TO AL139389.3; EXPRESSED IN LUNG, SIGNAL = 1.2; EXPRESSED IN ADULT LIVER, SIGNAL = 1.7; EXPRESSED IN HEART, SIGNAL = 1.4; EXPRESSED IN FETAL LIVER, SIGNAL = 1.2; EXPRESSED IN BRAIN, SIGNAL = 2.3; EXPRESSED IN BONE MARROW, SIGNAL = 1.2; EXPRESSED IN PLACENTA, SIGNAL = 1.5; EXPRESSED IN HELA, SIGNAL = 2.2; SWISSPROT HIT: Q38827, EVALUE 5.40e+00; NT HIT: X95275.1, EVALUE 9.60e-01
atgtcaactctggatgctatctctggagaaaagtggataataaatttaaaatataccaatgatgaatgggccattgtgggcgatgtgccaagtggagacgtagaatgcaca

SEQ ID NO: 23624 - DNA, 87 bp, Homo sapiens
  MAP TO AC011929.3; EXPRESSED IN LUNG, SIGNAL = 2.5; EXPRESSED IN ADULT LIVER, SIGNAL = 2.2; EXPRESSED IN HEART, SIGNAL = 2.3; EXPRESSED IN FETAL LIVER, SIGNAL = 1.8; EXPRESSED IN BONE MARROW, SIGNAL = 2.3; EXPRESSED IN PLACENTA, SIGNAL = 2.2; EXPRESSED IN HELA, SIGNAL = 2.5; EXPRESSED IN BRAIN, SIGNAL =   2; EST_HUMAN HIT: AW303927.1, EVALUE 1.10e+00; NT HIT: AF036684.1, EVALUE 4.50e-02
gacctgttagagaccttgataagacataaaaataaccatcttgctggtgagaaccatgtctcaaagcctaatgccaacaaagtgatg

SEQ ID NO: 23625 - DNA, 219 bp, Homo sapiens; identical to SEQ ID NO: 20417
  MAP TO AL109614.27; EXPRESSED IN LUNG, SIGNAL = 6.5; EXPRESSED IN PLACENTA, SIGNAL = 3.4; EXPRESSED IN HELA, SIGNAL =  15; EXPRESSED IN HEART, SIGNAL = 3.8; EXPRESSED IN FETAL LIVER, SIGNAL =  16; EXPRESSED IN ADULT LIVER, SIGNAL = 6.9; EXPRESSED IN BRAIN, SIGNAL =  17; EXPRESSED IN BONE MARROW, SIGNAL =  13; NT HIT: X52851.1, EVALUE 2.00e-87; EST_HUMAN HIT: BE796110.1, EVALUE 2.00e-84; SWISSPROT HIT: Q28462, EVALUE 6.90e+00

SEQ ID NO: 23626 - DNA, 141 bp, Homo sapiens
  MAP TO AL136171.3; EXPRESSED IN HEART, SIGNAL = 9.7; EXPRESSED IN FETAL LIVER, SIGNAL =   9; EXPRESSED IN LUNG, SIGNAL =  11; EXPRESSED IN HELA, SIGNAL =   5; EXPRESSED IN PLACENTA, SIGNAL =  11; EXPRESSED IN ADULT LIVER, SIGNAL =  11; EXPRESSED IN BRAIN, SIGNAL =  10; EXPRESSED IN BONE MARROW, SIGNAL =  11; SWISSPROT HIT: P12264, EVALUE 5.30e+00; EST_HUMAN HIT: AW083652.1, EVALUE 1.20e-01
gggtgagctgggtgaatttcattgtgaacacatcaagcaaccagtaccaaatcaacaagcagaacattattaaccccccaaaagtcacccttagcccttccaagtcctcagcatgttccaaaggcaaccctatcctgactg

SEQ ID NO: 23627 - DNA, 198 bp, Homo sapiens
  MAP TO AL080312.14; EXPRESSED IN ADULT LIVER, SIGNAL = 1.2; EXPRESSED IN BRAIN, SIGNAL = 1.4; EXPRESSED IN PLACENTA, SIGNAL = 1.6; EXPRESSED IN LUNG, SIGNAL = 1.4; EXPRESSED IN HEART, SIGNAL = 1.8; EXPRESSED IN FETAL LIVER, SIGNAL = 1.4; EXPRESSED IN BONE MARROW, SIGNAL = 1.5; NT HIT: gi11441226, EVALUE 1.20e-01; EST_HUMAN HIT: AW007194.1, EVALUE 1.00e-105; SWISSPROT HIT: Q01576, EVALUE 1.00e-17
tcattgatcctcccagccaaggactctgcactgaagccagcaaagatgactgtgtggacagctccgatcctggcacaggccagcattgctgccacagccaatggggacacgggcatgtagatggcaacacggtccccacggtggactccatgcctcttcagcgtgttggccaggcggcacgtggtctccagtagttcc

SEQ ID NO: 23628 - DNA, 174 bp, Homo sapiens
  MAP TO AL133412.4; EXPRESSED IN PLACENTA, SIGNAL =  14; EXPRESSED IN HELA, SIGNAL =  20; EXPRESSED IN HEART, SIGNAL =  12; EXPRESSED IN FETAL LIVER, SIGNAL =  12; EXPRESSED IN BONE MARROW, SIGNAL =  13; EXPRESSED IN LUNG, SIGNAL =  12; EXPRESSED IN ADULT LIVER, SIGNAL =  16; EXPRESSED IN BRAIN, SIGNAL =  12; EST_HUMAN HIT: C16800.1, EVALUE 1.50e-01; SWISSPROT HIT: Q04891, EVALUE 3.90e+00; NT HIT: U82828.1, EVALUE 4.00e-01
ttgtccagcctcatccagcaccacctgccctttgtccctatatgtaggtccctcctctgtatgttccttgaacatacaaagttctttccatcctggggggccttcatacatattctttctttcttctaaaacccacttcctcccattaatcatctggtccacaatttccgacat

SEQ ID NO: 23629 - DNA, 168 bp, Homo sapiens
  MAP TO AC007325.51; EXPRESSED IN ADULT LIVER, SIGNAL = 4.6; EXPRESSED IN FETAL LIVER, SIGNAL = 5.3; EXPRESSED IN LUNG, SIGNAL = 4.5; EXPRESSED IN BONE MARROW, SIGNAL = 5.2; EXPRESSED IN BRAIN, SIGNAL =   5; EXPRESSED IN HEART, SIGNAL = 5.4; EXPRESSED IN HELA, SIGNAL = 6.7; EXPRESSED IN PLACENTA, SIGNAL = 4.6; SWISSPROT HIT: O43272, EVALUE 2.00e-16; EST_HUMAN HIT: BF087215.1, EVALUE 5.00e-60; NT HIT: gi5174644, EVALUE 3.00e-60
ctgcagcaccgccacctccagcttggtgtccatggcagccaggcccgcctgcccttgctccacagccatttggtgaaagaagcacctccacttggccagcacctctgagaactgcagctgcaaacgcaggcctgaatgccatctgcacacgcccctgcccaccccagt

SEQ ID NO: 23630 - DNA, 136 bp, Homo sapiens
  MAP TO AL157756.2; EXPRESSED IN ADULT LIVER, SIGNAL =   3; EXPRESSED IN HELA, SIGNAL = 4.3; EXPRESSED IN BRAIN, SIGNAL = 3.5; EXPRESSED IN LUNG, SIGNAL = 3.1; EXPRESSED IN PLACENTA, SIGNAL = 2.9; EXPRESSED IN BONE MARROW, SIGNAL = 3.9; EXPRESSED IN HEART, SIGNAL = 3.1; EXPRESSED IN FETAL LIVER, SIGNAL =   4; SWISSPROT HIT: Q17295, EVALUE 9.10e+00; NT HIT: X81633.1, EVALUE 1.20e+00; EST_HUMAN HIT: AI648596.1, EVALUE 4.50e-01
attcaggttagcaccagaatctgaaaactccagctcctttgactgggaccaggctggtaatataaatgttagatcaggctgggtctgacacaatggggatcagtagagcatacttgtcacatttgaaggcattcag

SEQ ID NO: 23631 - DNA, 219 bp, Homo sapiens
  MAP TO AL136528.9; EXPRESSED IN PLACENTA, SIGNAL = 1.9; EXPRESSED IN ADULT LIVER, SIGNAL =   2; EXPRESSED IN FETAL LIVER, SIGNAL = 2.8; EXPRESSED IN BRAIN, SIGNAL = 2.3; EXPRESSED IN BONE MARROW, SIGNAL = 2.5; EXPRESSED IN LUNG, SIGNAL =   2; EXPRESSED IN HELA, SIGNAL = 2.7; EXPRESSED IN HEART, SIGNAL = 2.4; NT HIT: AB007964.1, EVALUE 1.00e-120; SWISSPROT HIT: O18531, EVALUE 1.20e+00; EST_HUMAN HIT: BE746404.1, EVALUE 1.00e-119
atgggcgggaaaaagaaggctttacacgactacgcggcggagttcaccgacctggtggtgaagcacctgattgagcacagtgactctggggacacgtctgtggtggagaccctttactgcagggcctgcgagctgcccgtgcgcgtgcggagggaccgcatcctggaacacctgtcctcgggcaggcagcacggcctgcggacgcccattctcatgtaa

SEQ ID NO: 23632 - DNA, 395 bp, Homo sapiens
  MAP TO AL133284.7; EXPRESSED IN PLACENTA, SIGNAL = 2.1; EXPRESSED IN HELA, SIGNAL = 3.3; EXPRESSED IN HEART, SIGNAL =   2; EXPRESSED IN LUNG, SIGNAL = 1.8; EXPRESSED IN ADULT LIVER, SIGNAL = 2.1; EXPRESSED IN FETAL LIVER, SIGNAL = 1.9; EXPRESSED IN BRAIN, SIGNAL = 1.8; EXPRESSED IN BONE MARROW, SIGNAL =   2; EST_HUMAN HIT: BE890797.1, EVALUE 0.00e+00; SWISSPROT HIT: Q13049, EVALUE 3.00e-75; NT HIT: gi11427565, EVALUE 0.00e+00
ctatggggtggaatatcttctcagatggtagctgtagatcttgatgcaatgatcccaacagtccaagaccagcagctgccccttaggagttagggctatgcccaccggacaggtaagtccctctcgaataaggacactatagcccccacccttaggaaaatggagaatttccttgcgactactgtcagccacgatgagatcaccacgagcatccacacacatgccagcaatgcagcggaaatcctcattctccgagaagaagtggctaatctggcgacccagctgcccatcagggcctacagagccaatggaaaagccaccctccaggtggtgctcattctgccgattctccagattgaggcctaagccctgggtgaagtagacggtgccctcag

SEQ ID NO: 23633 - DNA, 184 bp, Homo sapiens
  MAP TO AC015473.3; EXPRESSED IN PLACENTA, SIGNAL = 1.7; EXPRESSED IN ADULT LIVER, SIGNAL = 2.4; EXPRESSED IN HEART, SIGNAL =   2; EXPRESSED IN FETAL LIVER, SIGNAL = 1.9; EXPRESSED IN BRAIN, SIGNAL = 2.1; EXPRESSED IN LUNG, SIGNAL = 2.3; EXPRESSED IN BONE MARROW, SIGNAL = 1.9; SWISSPROT HIT: Q10199, EVALUE 2.60e-01
tttgccgggattttcaccaacaatcctacaggtggtttcccagaaagtttcaccagcaccacaaagggtggtttcctagtgagtttcagcagcgccttaggaggagcttccccaggagtctgacacataccccagaagacagtttcccacttgccagccccagcacacagcatctcagcaaact

SEQ ID NO: 23634 - DNA, 180 bp, Homo sapiens
  MAP TO AL162261.1; EXPRESSED IN LUNG, SIGNAL = 1.8; EXPRESSED IN PLACENTA, SIGNAL = 3.1; EXPRESSED IN ADULT LIVER, SIGNAL = 2.2; EXPRESSED IN BRAIN, SIGNAL = 1.8; EXPRESSED IN BONE MARROW, SIGNAL = 1.6; EXPRESSED IN HEART, SIGNAL = 3.5; EXPRESSED IN FETAL LIVER, SIGNAL = 1.4; NT HIT: AB007923.1, EVALUE 5.00e-81; EST_HUMAN HIT: T80284.1, EVALUE 4.00e-76; SWISSPROT HIT: Q03391, EVALUE 1.30e+00
cctacattgacttggtgggcatccactgtgaaggtagccccaaggtcaaggctctggggtctggggcaaggcctcacagtcacattcccctcctcttggtgttggtgcttcccaggagaaccaaccagttctgtgtttattctgtcgatggtgctggtcagatgcacaaggagctctgga

SEQ ID NO: 23635 - DNA, 144 bp, Homo sapiens
  MAP TO AC011272.3; EXPRESSED IN LUNG, SIGNAL = 4.9; EXPRESSED IN ADULT LIVER, SIGNAL = 6.9; EXPRESSED IN HEART, SIGNAL = 4.1; EXPRESSED IN BRAIN, SIGNAL = 4.3; EXPRESSED IN PLACENTA, SIGNAL = 3.1; EXPRESSED IN HELA, SIGNAL = 7.2; EXPRESSED IN FETAL LIVER, SIGNAL =  14; EXPRESSED IN BONE MARROW, SIGNAL =  12; SWISSPROT HIT: P08708, EVALUE 2.00e-08; EST_HUMAN HIT: AA399270.1, EVALUE 1.00e-75; NT HIT: gi11432070, EVALUE 4.00e-13
tgggcccctgtgaatctgcttcttcagatgcgtgactcagcctgctatcttgttgcagagcttcttgctggggataatgacagtcttcacccacttgcttgttcatgtggaaatcattaccggggtgcatgtaatacttttcta

SEQ ID NO: 23636 - DNA, 199 bp, Homo sapiens
  MAP TO AC021557.3; EXPRESSED IN PLACENTA, SIGNAL = 3.8; EXPRESSED IN FETAL LIVER, SIGNAL = 4.2; EXPRESSED IN LUNG, SIGNAL = 4.5; EXPRESSED IN BONE MARROW, SIGNAL =   4; EXPRESSED IN BRAIN, SIGNAL = 3.3; EXPRESSED IN HEART, SIGNAL = 3.9; EXPRESSED IN HELA, SIGNAL = 3.9; EXPRESSED IN ADULT LIVER, SIGNAL = 4.3; SWISSPROT HIT: P22609, EVALUE 1.70e+00; NT HIT: AF053772.1, EVALUE 1.20e-01
gatattcatggctgggaggacagcactggttctatttttagaaattttaacaagtgctactttcccagcactgatggtacaaatcacagagctgggggcgaggttgcaaaatctggatgactcagtttccaaaattacagtttttctacttatattgatagtacttacaccagaaggtgctagctctttgatcaaatac

SEQ ID NO: 23637 - DNA, 298 bp, Homo sapiens
  MAP TO AC013627.3; EXPRESSED IN LUNG, SIGNAL = 5.1; EXPRESSED IN ADULT LIVER, SIGNAL = 5.2; EXPRESSED IN HEART, SIGNAL = 4.6; EXPRESSED IN BRAIN, SIGNAL = 4.6; EXPRESSED IN BONE MARROW, SIGNAL = 4.5; EXPRESSED IN PLACENTA, SIGNAL = 4.9; EXPRESSED IN HELA, SIGNAL = 3.7; EXPRESSED IN FETAL LIVER, SIGNAL =   5; NT HIT: gi9507122, EVALUE 7.20e-01; SWISSPROT HIT: P15892, EVALUE 1.90e+00; EST_HUMAN HIT: AI200976.1, EVALUE 1.00e-15
aatctgtcttggtctaaccttctgtcgttctatcctacctggctcatcagaaagctgcaggattctgaagagaagggagtcctgcaggacttgccagagaaatgtgttttgtctcattctagacaccatgacaagtccaactcttaccggcatcgtgaagtctctttcttggcattggatgaacagaaagtttgctccgctcaggatgttgccagggattactccaatcccaaatgggatgaaacctcacttggcttcctcggtaggctccctattgtttgtaccccagatttgtcca

SEQ ID NO: 23638 - DNA, 147 bp, Homo sapiens
  MAP TO AL161788.2; EXPRESSED IN LUNG, SIGNAL = 2.9; EXPRESSED IN PLACENTA, SIGNAL = 2.9; EXPRESSED IN HEART, SIGNAL =   3; EXPRESSED IN FETAL LIVER, SIGNAL = 2.6; EXPRESSED IN BONE MARROW, SIGNAL = 2.9; EXPRESSED IN ADULT LIVER, SIGNAL =   3; EXPRESSED IN BRAIN, SIGNAL = 2.9; NT HIT: AF224669.1, EVALUE 6.00e-18; SWISSPROT HIT: P37753, EVALUE 4.00e+00; EST_HUMAN HIT: AW614871.1, EVALUE 3.00e-24
ctacaaagggtcaggatcatcagtatcactgtcttccacgtccacatcttgtcccactagaagctcttcaggtgcaaaaccatgcatggagctctcaccttctattataataatgccttctgctggaatgtctcctgaaggacctgc

SEQ ID NO: 23639 - DNA, 168 bp, Homo sapiens
  MAP TO AC007989.2; EXPRESSED IN PLACENTA, SIGNAL = 2.1; EXPRESSED IN ADULT LIVER, SIGNAL =   2; EXPRESSED IN FETAL LIVER, SIGNAL = 1.7; EXPRESSED IN BRAIN, SIGNAL = 2.1; EXPRESSED IN BONE MARROW, SIGNAL = 2.1; EXPRESSED IN LUNG, SIGNAL = 2.1; EXPRESSED IN HEART, SIGNAL = 1.9; EST_HUMAN HIT: AA782977.1, EVALUE 7.00e-90; SWISSPROT HIT: O46915, EVALUE 3.90e+00; NT HIT: S81221.1, EVALUE 1.50e+00
aaagggctctgaaaaacaagttgcaaatcattaggccagatggtgtaaggtctgtcttcaacaaaagttttgattctctgagtgaaagacatgctcttgacaatggacagtgggatgaagtggtctcagaggaggtggccatataccagggggagcttcttggaagaa

SEQ ID NO: 23640 - DNA, 175 bp, Homo sapiens
  MAP TO AC008750.4; EXPRESSED IN PLACENTA, SIGNAL =   5; EXPRESSED IN ADULT LIVER, SIGNAL =   4; EXPRESSED IN HELA, SIGNAL = 4.9; EXPRESSED IN HEART, SIGNAL = 3.6; EXPRESSED IN FETAL LIVER, SIGNAL =   5; EXPRESSED IN LUNG, SIGNAL = 3.6; EXPRESSED IN BRAIN, SIGNAL = 3.9; EXPRESSED IN BONE MARROW, SIGNAL = 3.5; EST_HUMAN HIT: AI745263.1, EVALUE 1.00e-57; SWISSPROT HIT: P55344, EVALUE 1.00e-31; NT HIT: L04193.1, EVALUE 8.00e-92
cgatgctgtctgtctgcaggtagcacttgttgcccaggcagtaccgccacaggccctggtgggcgaaggaccctgacagccggtactgcatccagtggtctgttgccatggccaccaccaggaggatggtccccacccaggcacagaacaggccaccacccatgaagctgtacat

SEQ ID NO: 23641 - DNA, 185 bp, Homo sapiens
  MAP TO AC022609.2; EXPRESSED IN PLACENTA, SIGNAL = 3.1; EXPRESSED IN ADULT LIVER, SIGNAL = 3.2; EXPRESSED IN HELA, SIGNAL = 3.1; EXPRESSED IN HEART, SIGNAL = 2.8; EXPRESSED IN FETAL LIVER, SIGNAL = 2.7; EXPRESSED IN BRAIN, SIGNAL = 2.7; EXPRESSED IN LUNG, SIGNAL =   3; EXPRESSED IN BONE MARROW, SIGNAL = 2.6; NT HIT: U97040.1, EVALUE 4.30e-01; SWISSPROT HIT: P35405, EVALUE 1.30e+00
atgttaagtaaagatggggaggagggacagattgaggaaattgtttataaaatttggattcattttggatatacaaatagagatagtgagatgtgcaggtataaaatatggagtcaggatcagaaccgatttgggagccactggcatatcaatgccatttataagcaaggactgcatgagatcat

SEQ ID NO: 23642 - DNA, 134 bp, Homo sapiens
  MAP TO AL157392.2; EXPRESSED IN ADULT LIVER, SIGNAL = 2.4; EXPRESSED IN BRAIN, SIGNAL = 2.2; EXPRESSED IN BONE MARROW, SIGNAL = 2.4; EXPRESSED IN LUNG, SIGNAL =   3; EXPRESSED IN PLACENTA, SIGNAL = 2.5; EXPRESSED IN HEART, SIGNAL = 2.4; EXPRESSED IN FETAL LIVER, SIGNAL = 2.7; SWISSPROT HIT: P56975, EVALUE 2.40e+00; NT HIT: AB037715.1, EVALUE 7.00e-70; EST_HUMAN HIT: W04141.1, EVALUE 1.00e-69
agcttctcggagacacagcttcttcagttcctccagcctctgacgcagggtttcctccagagcttcctgcctggacttcaaggcagccagcatgtccttcttggccgactgcgagctatctgattcctgagaac

SEQ ID NO: 23643 - DNA, 80 bp, Homo sapiens
  MAP TO AC011159.3; EXPRESSED IN PLACENTA, SIGNAL = 1.1; EXPRESSED IN ADULT LIVER, SIGNAL = 1.2; EXPRESSED IN HEART, SIGNAL = 1.2; EXPRESSED IN FETAL LIVER, SIGNAL = 1.1; EXPRESSED IN BRAIN, SIGNAL = 1.1; EXPRESSED IN BONE MARROW, SIGNAL =   1; EXPRESSED IN LUNG, SIGNAL = 1.3; EST_HUMAN HIT: D44725.1, EVALUE 3.80e+00
aaaagctacagtaaatacgatgatgatgatgatgatcatgatgatcatgatgacgacgatgatgattagaataataactc

SEQ ID NO: 23644 - DNA, 77 bp, Homo sapiens
  MAP TO AC018395.4; EXPRESSED IN BONE MARROW, SIGNAL = 1.7; EXPRESSED IN LUNG, SIGNAL =   2; EXPRESSED IN ADULT LIVER, SIGNAL = 1.6; EXPRESSED IN FETAL LIVER, SIGNAL = 1.8; EXPRESSED IN PLACENTA, SIGNAL = 1.9; EXPRESSED IN HEART, SIGNAL = 1.9; EXPRESSED IN BRAIN, SIGNAL = 1.6; NT HIT: L27835.1, EVALUE 1.50e-01; EST_HUMAN HIT: N92526.1, EVALUE 3.60e+00
ggaccaaagctgtctttgtaagattaatgtaagaccacagattatgattatgagaagggcctggactctgctaaaag

SEQ ID NO: 23645 - DNA, 298 bp, Homo sapiens
  MAP TO AC015525.3; EXPRESSED IN ADULT LIVER, SIGNAL = 2.1; EXPRESSED IN FETAL LIVER, SIGNAL = 2.3; EXPRESSED IN BRAIN, SIGNAL = 2.2; EXPRESSED IN PLACENTA, SIGNAL = 2.1; EXPRESSED IN HELA, SIGNAL = 3.2; EXPRESSED IN BONE MARROW, SIGNAL = 2.6; EXPRESSED IN LUNG, SIGNAL = 2.2; EXPRESSED IN HEART, SIGNAL = 2.4; NT HIT: gi4758695, EVALUE 0.00e+00; SWISSPROT HIT: P13784, EVALUE 2.70e-01; EST_HUMAN HIT: BE348588.1, EVALUE 3.00e-38
gccccatcgctgtatcagcagctgccagtcatattcaacctttagctctgagaatttctctgtgtctgatggagaagagggaaataccagtgaccactcaaacagtcctgatgagttagctgataaacttgaagaccgcttggcagagaagctagacgacctgctgtcccagacgccagagattcccattgacatatcctcacactcggatgggctctctgacaaggagtgtgccgtgcgccgtgtgaagactcagatgtctctgggcaagctgtgtgtggaggaacgtggctatgag

SEQ ID NO: 23646 - DNA, 198 bp, Homo sapiens
  MAP TO AC009467.3; EXPRESSED IN PLACENTA, SIGNAL =   8; EXPRESSED IN ADULT LIVER, SIGNAL =  12; EXPRESSED IN FETAL LIVER, SIGNAL = 7.6; EXPRESSED IN BRAIN, SIGNAL =  10; EXPRESSED IN BONE MARROW, SIGNAL = 8.3; EXPRESSED IN LUNG, SIGNAL = 7.6; EXPRESSED IN HELA, SIGNAL =  11; EXPRESSED IN HEART, SIGNAL = 7.1; NT HIT: AL163268.2, EVALUE 3.00e-51; SWISSPROT HIT: P93255, EVALUE 1.30e+00; EST_HUMAN HIT: H52456.1, EVALUE 6.00e-60
tctctttccctgctgccatccacgtaagatgtgacttgctcctccttgccttcagccatgactgtgaggcctccccagccatgtggaactgtaagtccaattaaacctctttcttttgtaaattgcccagtctcgggtatgtctttatcagcagcatgaaaacagacaaatacaagaatcactttatgttggttcaac

SEQ ID NO: 23647 - DNA, 112 bp, Homo sapiens
  MAP TO AC022997.3; EXPRESSED IN LUNG, SIGNAL = 0.9; EXPRESSED IN ADULT LIVER, SIGNAL = 0.57; EXPRESSED IN BRAIN, SIGNAL = 0.73; EXPRESSED IN HEART, SIGNAL = 1.2; EXPRESSED IN PLACENTA, SIGNAL = 1.3; EXPRESSED IN HELA, SIGNAL = 9.5; EXPRESSED IN FETAL LIVER, SIGNAL = 0.75; EXPRESSED IN BONE MARROW, SIGNAL = 1.5; NT HIT: AF181897.1, EVALUE 2.00e-26; EST_HUMAN HIT: BF056540.1, EVALUE 5.00e-31
cttcatcaatgatcttagctagatcttctggatcacttgctgcagcttcttcatcagcacctcctgcttcaccttgcacttttatgttatgggcatggcttctttccttcat

SEQ ID NO: 23648 - DNA, 137 bp, Homo sapiens
  MAP TO AL139819.2; EXPRESSED IN ADULT LIVER, SIGNAL = 5.1; EXPRESSED IN HELA, SIGNAL =   5; EXPRESSED IN BRAIN, SIGNAL = 4.1; EXPRESSED IN LUNG, SIGNAL = 5.1; EXPRESSED IN PLACENTA, SIGNAL = 4.2; EXPRESSED IN BONE MARROW, SIGNAL = 4.5; EXPRESSED IN FETAL LIVER, SIGNAL = 3.9; EXPRESSED IN HEART, SIGNAL = 4.2; NT HIT: gi8922811, EVALUE 1.00e-71; EST_HUMAN HIT: BE166526.1, EVALUE 2.00e-71
tgctaccttgccctggccaaaggaggcttatctgatgaccatgtcctcatcctgcctattggacactaccagtcagtggtggagctttcagcagaggtggtagaagaggtggagaagtataaggccactctgagacg

SEQ ID NO: 23649 - DNA, 104 bp, Homo sapiens
  MAP TO AC012619.3; EXPRESSED IN LUNG, SIGNAL = 1.8; EXPRESSED IN PLACENTA, SIGNAL = 2.3; EXPRESSED IN HEART, SIGNAL = 3.1; EXPRESSED IN ADULT LIVER, SIGNAL = 2.2; EXPRESSED IN FETAL LIVER, SIGNAL = 2.5; EXPRESSED IN BRAIN, SIGNAL = 2.8; EXPRESSED IN BONE MARROW, SIGNAL = 2.3; NT HIT: AF148532.1, EVALUE 3.50e+00; EST_HUMAN HIT: BE963379.2, EVALUE 1.30e+00
tcaggagcctttttgtgttgtcactgtctcccttgctttatcatcatcatcatcatcatcatcatcatcatggtgagtgtccagaaatgagccatccagtgtgc

SEQ ID NO: 23650 - DNA, 76 bp, Homo sapiens
  MAP TO AC025747.3; EXPRESSED IN FETAL LIVER, SIGNAL = 2.3; EXPRESSED IN HELA, SIGNAL = 3.8; EXPRESSED IN HEART, SIGNAL = 2.6; EXPRESSED IN BONE MARROW, SIGNAL = 2.4; EXPRESSED IN BRAIN, SIGNAL = 2.2; EXPRESSED IN ADULT LIVER, SIGNAL = 3.6; EXPRESSED IN PLACENTA, SIGNAL = 2.6; EXPRESSED IN LUNG, SIGNAL = 2.7; NT HIT: gi11430805, EVALUE 2.00e-04; EST_HUMAN HIT: AW896629.1, EVALUE 6.00e-05
taagcccgtgggcaaccagaaccgccagggaaatcaggaacacaagcatagagcacggcatcacttgtttaaatga

SEQ ID NO: 23651 - DNA, 157 bp, Homo sapiens
  MAP TO AL132857.3; EXPRESSED IN LUNG, SIGNAL =   2; EXPRESSED IN PLACENTA, SIGNAL = 1.9; EXPRESSED IN ADULT LIVER, SIGNAL = 1.8; EXPRESSED IN HEART, SIGNAL = 1.8; EXPRESSED IN FETAL LIVER, SIGNAL = 1.8; EXPRESSED IN BRAIN, SIGNAL = 1.8; EXPRESSED IN BONE MARROW, SIGNAL = 1.7; NT HIT: M64657.1, EVALUE 1.00e-19; SWISSPROT HIT: P12798, EVALUE 1.00e-09; EST_HUMAN HIT: AI902869.1, EVALUE 4.00e-14
atcgctgtggagttactaatggttatatccgttatactgaaaacaaaattcttagttggactttcaagacaaaaagtagatctagacaaactgatgaaagaagcatttcatgaatttcaaaaatatgagattcaactaaaggaagctgaaaaacaag

SEQ ID NO: 23652 - DNA, 492 bp, Homo sapiens
  MAP TO AL139340.3; EXPRESSED IN BONE MARROW, SIGNAL = 1.5; EXPRESSED IN PLACENTA, SIGNAL = 1.8; EXPRESSED IN ADULT LIVER, SIGNAL = 1.9; EXPRESSED IN BRAIN, SIGNAL = 1.4; EXPRESSED IN LUNG, SIGNAL = 1.6; EXPRESSED IN HEART, SIGNAL = 1.5; EXPRESSED IN FETAL LIVER, SIGNAL = 1.3; SWISSPROT HIT: O66834, EVALUE 3.00e-03; NT HIT: AJ006345.1, EVALUE 8.00e-36; EST_HUMAN HIT: AV723976.1, EVALUE 3.00e-45
atgaacattcataagctcaagactattcaggaaaacatgacctcacaaaacaaactaaatgaggcattagtgaccaatcctggagagacagagatatgtgacctttcagatagagaattaaaaagagctgttttgagaaaactcaatgaaattaaagatagcgcagaaaagaaattcaaacttctatcagatatatttaacaaagatattgaaatttttttaaatcaagcagaaattctagagctgaaaaatgcaattgacatactgaagaatgcaccagactctctttacagtacagttgatcaagcagaagaaatagttaatgagcttgaagacaggctatttgaaaattcagtcagagaagacaaaagaataagaaagaataaagcacatccacgagatgtagaaaatagccccaaaatggcaaatctaagagttattggctttaaagaggaggtagagagagagaaagattgggatggaaagtttatt

SEQ ID NO: 23653 - DNA, 207 bp, Homo sapiens
  MAP TO AC010503.3; EXPRESSED IN PLACENTA, SIGNAL = 1.7; EXPRESSED IN ADULT LIVER, SIGNAL = 2.2; EXPRESSED IN HELA, SIGNAL = 2.8; EXPRESSED IN HEART, SIGNAL = 1.8; EXPRESSED IN FETAL LIVER, SIGNAL = 1.8; EXPRESSED IN BONE MARROW, SIGNAL = 1.5; EXPRESSED IN LUNG, SIGNAL = 1.2; EXPRESSED IN BRAIN, SIGNAL = 1.4; EST_HUMAN HIT: AI557509.1, EVALUE 2.00e-78; SWISSPROT HIT: Q91062, EVALUE 5.70e-01; NT HIT: AJ271195.1, EVALUE 1.20e-01
cgtccagaagccatcactgctatcatcgtggtcttctccctcttggctgccttgctcctggctgtggggctggcactgttggtgcggaagcttcgggagaagcggcagacggagggcacctaccggcccagtagcgaggagcaggtgggtgcccgcgtgccaccgacccccaacctcaagttgccgccggaagagcggctcatctga

SEQ ID NO: 23654 - DNA, 219 bp, Homo sapiens
  MAP TO AL137853.3; EXPRESSED IN ADULT LIVER, SIGNAL = 1.2; EXPRESSED IN BRAIN, SIGNAL = 1.2; EXPRESSED IN LUNG, SIGNAL = 1.5; EXPRESSED IN PLACENTA, SIGNAL = 1.3; EXPRESSED IN BONE MARROW, SIGNAL = 1.1; EXPRESSED IN HEART, SIGNAL = 1.3; EXPRESSED IN FETAL LIVER, SIGNAL = 1.1; SWISSPROT HIT: Q13813, EVALUE 3.00e-03; EST_HUMAN HIT: BE930680.1, EVALUE 3.00e-62; NT HIT: AB007934.1, EVALUE 1.00e-120
gaaaagacagagtctctaatacagcaatatgaagccattagcctactcaattcagagcgttatgcccgcctagagcgggcccaggtcttagtaaaccagttttgggaaacttatgaagagctcagcccctggattgaggaaactcgggcactaatagcacagttaccctctccagccattgatcatgagcagctcaggcagcaacaagaggaaatgagg

SEQ ID NO: 23655 - DNA, 101 bp, Homo sapiens
  MAP TO AC022038.2; EXPRESSED IN BRAIN, SIGNAL = 1.1; EXPRESSED IN PLACENTA, SIGNAL = 1.3; EXPRESSED IN ADULT LIVER, SIGNAL = 1.4; EXPRESSED IN HEART, SIGNAL = 1.2; EXPRESSED IN FETAL LIVER, SIGNAL = 1.1; EXPRESSED IN BONE MARROW, SIGNAL = 1.2; EXPRESSED IN LUNG, SIGNAL = 1.3; NT HIT: AF236061.1, EVALUE 7.20e-01; EST_HUMAN HIT: AA372534.1, EVALUE 8.70e-01
ctgggaagttcagctgcataaactgcatgaaatgactctggtaatacttctggatttttgtgttttttaatctggatctggaagagtcatctatctgttgc

SEQ ID NO: 23656 - DNA, 322 bp, Homo sapiens
  MAP TO AC025011.2; EXPRESSED IN HELA, SIGNAL =  11; EXPRESSED IN BONE MARROW, SIGNAL = 6.8; EXPRESSED IN LUNG, SIGNAL = 4.9; EXPRESSED IN ADULT LIVER, SIGNAL = 5.3; EXPRESSED IN FETAL LIVER, SIGNAL = 9.3; EXPRESSED IN PLACENTA, SIGNAL = 7.2; EXPRESSED IN HEART, SIGNAL = 6.3; EXPRESSED IN BRAIN, SIGNAL =  10; NT HIT: X06956.1, EVALUE 2.00e-50; SWISSPROT HIT: P08537, EVALUE 1.00e-27; EST_HUMAN HIT: AL037704.3, EVALUE 3.00e-50
catcacactttgccatctggctggcaggctgaaagcaggcattggcgatccctgccaaaaacagctgttgtggtacaccttctctgcagatgactggcacatagatggccggggggatgtagatgcgagtgctggccaccaggttgatctgaaactctgtcagatccatgttgagggccttgtcaaagtgcagagaagctgtagtggaggagattactttgctaatgaggaagttgaggttggtgtaggttggggactcaatgtccaggttgtggcagcaattgtcatagatggctttgtcgtccaccatgaaggcacaagc

SEQ ID NO: 23657 - DNA, 282 bp, Homo sapiens
  MAP TO AC013626.3; EXPRESSED IN FETAL LIVER, SIGNAL = 1.1; EXPRESSED IN LUNG, SIGNAL =   1; EXPRESSED IN PLACENTA, SIGNAL =   1; EXPRESSED IN ADULT LIVER, SIGNAL = 1.1; EXPRESSED IN BRAIN, SIGNAL =   1; EXPRESSED IN BONE MARROW, SIGNAL = 1.3; EXPRESSED IN HEART, SIGNAL = 1.4; EST_HUMAN HIT: AA300640.1, EVALUE 2.00e-17; SWISSPROT HIT: Q09731, EVALUE 2.80e+00
ctggtaaccatggatgcatttatcagaaactgggcctatttgtttcctaagacagaaacaagagttaagtggtgtctttttaaatctgtgcatttgttcaatgcttgtgtactttgcgtgctcttccacagtttgctggcagctggcttgtctactgtggataacagggcagtgagttaattctggtttagacatgagccccagcatctcagccaaaggaatgttccccctataatagtgctcctcaaactgtggcccgggttccagcagcatgggcatcac

SEQ ID NO: 23658 - DNA, 153 bp, Homo sapiens
  MAP TO AC019276.3; EXPRESSED IN ADULT LIVER, SIGNAL = 0.87; EXPRESSED IN LUNG, SIGNAL = 1.1; EXPRESSED IN PLACENTA, SIGNAL = 1.2; EXPRESSED IN HEART, SIGNAL = 1.4; EXPRESSED IN FETAL LIVER, SIGNAL = 1.6; EXPRESSED IN BRAIN, SIGNAL = 1.2; EXPRESSED IN BONE MARROW, SIGNAL = 1.2; EST_HUMAN HIT: AA668858.1, EVALUE 1.00e-66; SWISSPROT HIT: P29376, EVALUE 2.30e+00; NT HIT: AJ271885.2, EVALUE 8.80e-02
tcactggttctcaagcctttccagtggttttaaagcagcagaacctcccaccccagcccaggggaatcctgcctgggaccccggaagagatgagagcttctctggctgaattaggggaggtccaggggccccaccttgatctccccagttccc

SEQ ID NO: 23659 - DNA, 103 bp, Homo sapiens
  MAP TO AC013691.3; EXPRESSED IN PLACENTA, SIGNAL = 2.2; EXPRESSED IN ADULT LIVER, SIGNAL = 2.4; EXPRESSED IN FETAL LIVER, SIGNAL = 2.2; EXPRESSED IN BRAIN, SIGNAL = 2.2; EXPRESSED IN BONE MARROW, SIGNAL = 1.7; EXPRESSED IN LUNG, SIGNAL = 2.3; EXPRESSED IN HELA, SIGNAL = 2.9; EXPRESSED IN HEART, SIGNAL = 2.6; SWISSPROT HIT: P02467, EVALUE 1.90e+00
atggcctggcagagggccctgctgcagctggcaggaccaagtttccatgcggtgctgctggtggctgggaggagtgatggccgcaagggttccttggacacag

SEQ ID NO: 23660 - DNA, 285 bp, Homo sapiens
  MAP TO AL137225.7; EXPRESSED IN LUNG, SIGNAL = 1.3; EXPRESSED IN FETAL LIVER, SIGNAL = 1.1; EXPRESSED IN HEART, SIGNAL = 1.3; EXPRESSED IN PLACENTA, SIGNAL = 1.3; EXPRESSED IN ADULT LIVER, SIGNAL = 1.2; EXPRESSED IN BRAIN, SIGNAL = 1.3; EXPRESSED IN BONE MARROW, SIGNAL = 1.2; EST_HUMAN HIT: AV714154.1, EVALUE 2.60e-01; SWISSPROT HIT: P51989, EVALUE 3.00e-03; NT HIT: AJ237852.1, EVALUE 2.70e+00
cctgctccagatcgacccaaagaaccagatgatccagacccagactgactatacgctcctaatgaccctgtcccaaactgaccatggctaccagatggtttagccccaggctgactgttcattgactctgctccaagttgacccataccattagatggtctagacccagattgaacatttattgaccctgcctcagactgaccataccttccaaatgaccctgtcccaaactgatcgtagccaccagattgcccagcctcagtttgaccataaccactaggaaac

SEQ ID NO: 23661 - DNA, 144 bp, Homo sapiens
  MAP TO AC021288.3; EXPRESSED IN ADULT LIVER, SIGNAL = 1.7; EXPRESSED IN HEART, SIGNAL = 1.3; EXPRESSED IN BONE MARROW, SIGNAL = 1.5; EXPRESSED IN LUNG, SIGNAL = 1.6; EXPRESSED IN PLACENTA, SIGNAL = 1.2; EXPRESSED IN FETAL LIVER, SIGNAL = 1.4; EXPRESSED IN BRAIN, SIGNAL = 1.4; SWISSPROT HIT: P10191, EVALUE 5.30e+00; NT HIT: AL161574.2, EVALUE 3.20e-01; EST_HUMAN HIT: AA715220.1, EVALUE 1.90e+00
ctaagctatattaacccccaaacaatctttgaagtgaattctgttatcatcaccattttccacattagaaaagttgggcttagaaatccaaggtttcatagcatatgtgtggtagaacaagacgttgaaccaggtcaaaaggtt

SEQ ID NO: 23662 - DNA, 230 bp, Homo sapiens
  MAP TO AL136419.2; EXPRESSED IN HEART, SIGNAL = 1.4; EXPRESSED IN BONE MARROW, SIGNAL = 1.3; EXPRESSED IN ADULT LIVER, SIGNAL = 2.2; EXPRESSED IN BRAIN, SIGNAL = 1.3; EXPRESSED IN LUNG, SIGNAL = 1.5; EXPRESSED IN PLACENTA, SIGNAL = 1.2; EXPRESSED IN FETAL LIVER, SIGNAL = 1.4; NT HIT: AB045131.1, EVALUE 2.00e-96; EST_HUMAN HIT: AW612106.1, EVALUE 1.00e-124; SWISSPROT HIT: Q13268, EVALUE 1.00e-22
gatcggcttcgccatcgcccggcgtttggcccaggacggggcccatgtggtcgtcagcagccggaagcagcagaatgtggaccaggcggtggccacgctgcagggggaggggctgagcgtgacgggcaccgtgtgccatgtggggaaggcggaggaccgggagcggctggtggccacggtgagctgcagggaaatgggcacagagccaggaggtggaaaacggagccagc

SEQ ID NO: 23663 - DNA, 217 bp, Homo sapiens
  MAP TO AC024193.2; EXPRESSED IN LUNG, SIGNAL = 1.2; EXPRESSED IN PLACENTA, SIGNAL = 1.2; EXPRESSED IN HEART, SIGNAL = 1.2; EXPRESSED IN BONE MARROW, SIGNAL = 1.2; EXPRESSED IN ADULT LIVER, SIGNAL = 1.7; EXPRESSED IN FETAL LIVER, SIGNAL = 1.2; EXPRESSED IN BRAIN, SIGNAL = 1.1; EST_HUMAN HIT: AV709334.1, EVALUE 1.20e-02; SWISSPROT HIT: P50039, EVALUE 9.30e-01; NT HIT: AL163209.2, EVALUE 9.00e-06
atgaaggagttttcctcaaagcctactgatttggatgttaatctcaccttaaaaaatacctttacagcagcatccaggctagtgtttgaccaaatatctgggtaccgtggcctagccaagttgaaatgtaaaattaaccatcacacctctcatcagccccatgaggtgaacattattattcctatgttgcagatgaggaagctgaggctcagagagg

SEQ ID NO: 23664 - DNA, 105 bp, Homo sapiens
  MAP TO AP000475.3; EXPRESSED IN LUNG, SIGNAL = 1.1; EXPRESSED IN PLACENTA, SIGNAL = 1.2; EXPRESSED IN FETAL LIVER, SIGNAL = 1.2; EXPRESSED IN BRAIN, SIGNAL = 1.2; EXPRESSED IN BONE MARROW, SIGNAL = 1.1; EXPRESSED IN ADULT LIVER, SIGNAL = 1.2; EXPRESSED IN HEART, SIGNAL = 1.6; NT HIT: AL163227.2, EVALUE 1.00e-52; EST_HUMAN HIT: AI831898.1, EVALUE 1.00e-13
tattcattaagtggaagtggatcatcataaagatcttcattctttttgtcttcaatttgaaggctaaagaggaggaaaaagaggagttgttcttactgtttcagg

SEQ ID NO: 23665 - DNA, 220 bp, Homo sapiens
  MAP TO AC013751.3; EXPRESSED IN HEART, SIGNAL = 1.8; EXPRESSED IN BRAIN, SIGNAL = 1.9; EXPRESSED IN BONE MARROW, SIGNAL = 1.8; EXPRESSED IN LUNG, SIGNAL = 2.2; EXPRESSED IN HELA, SIGNAL = 2.5; EXPRESSED IN PLACENTA, SIGNAL = 1.9; EXPRESSED IN ADULT LIVER, SIGNAL = 1.9; EXPRESSED IN FETAL LIVER, SIGNAL = 1.8; SWISSPROT HIT: Q08379, EVALUE 7.00e-29; NT HIT: AF248953.1, EVALUE 3.00e-64; EST_HUMAN HIT: BF528608.1, EVALUE 6.00e-60
ctggtggcctcagtccagaaggagccagaggcagcagccctagtcccagggactggaggcgattctgtgtgtggggaggcccacccggccctgcagggggccatggagaagctgcagagccactttatggagctcatgcaggagaaggtggacctgaaggagcagatggaaaaactggaacgtcgctgcatccagctgtctggagagacagacgtcatca

SEQ ID NO: 23666 - DNA, 225 bp, Homo sapiens
  MAP TO AL139115.2; EXPRESSED IN LUNG, SIGNAL =   4; EXPRESSED IN PLACENTA, SIGNAL = 3.9; EXPRESSED IN HEART, SIGNAL = 3.9; EXPRESSED IN FETAL LIVER, SIGNAL = 3.6; EXPRESSED IN ADULT LIVER, SIGNAL = 4.7; EXPRESSED IN BRAIN, SIGNAL = 4.1; EXPRESSED IN BONE MARROW, SIGNAL = 4.2; SWISSPROT HIT: O24467, EVALUE 2.20e+00; NT HIT: AF181897.1, EVALUE 3.40e-02; EST_HUMAN HIT: AV729390.1, EVALUE 2.00e-07
ttaaatttctgctctaaacttcacccttggtgtatccatgtccttgatttccttggctatgagaccaagaattctgagcgtcaccccagaaaacaaggccacttcaatacaatcaccctcataagcatttatctcagaggaatgtggaagacttatgttcacacaaaaacctgtgatcatagcagctttatttatgagtataaacccagaaccaaccccggtgtc

SEQ ID NO: 23667 - DNA, 249 bp, Homo sapiens
  MAP TO AC023032.2; EXPRESSED IN LUNG, SIGNAL = 2.9; EXPRESSED IN BRAIN, SIGNAL = 2.7; EXPRESSED IN PLACENTA, SIGNAL =   3; EXPRESSED IN ADULT LIVER, SIGNAL = 3.2; EXPRESSED IN HELA, SIGNAL = 2.9; EXPRESSED IN FETAL LIVER, SIGNAL = 2.2; EXPRESSED IN HEART, SIGNAL = 2.3; EXPRESSED IN BONE MARROW, SIGNAL = 2.9; EST_HUMAN HIT: AA601143.1, EVALUE 7.00e-60; NT HIT: AL163247.2, EVALUE 1.00e-63; SWISSPROT HIT: P30305, EVALUE 7.50e-01
atggggctagtggggctatttggatttcagaggcaacacactgctcatttgggtgtgttactctggtccaattatcgagtgacccaaaaggctgccagttttgagtggtgtccagaacaggagaaggctctgcaccaggtccaggctgctgtgcaagctgctctgacatttggggcatatgacccggcagattcactggtgcttaaggtgtcagtggcagatagggatgttgtttggatcctttggcag

SEQ ID NO: 23668 - DNA, 163 bp, Homo sapiens
  MAP TO AC022045.2; EXPRESSED IN ADULT LIVER, SIGNAL = 1.6; EXPRESSED IN FETAL LIVER, SIGNAL = 1.3; EXPRESSED IN BRAIN, SIGNAL = 1.2; EXPRESSED IN BONE MARROW, SIGNAL = 1.2; EXPRESSED IN LUNG, SIGNAL = 1.3; EXPRESSED IN PLACENTA, SIGNAL = 1.3; EXPRESSED IN HEART, SIGNAL = 1.3; NT HIT: AF081205.1, EVALUE 1.50e+00; EST_HUMAN HIT: AV659047.1, EVALUE 1.40e-01; SWISSPROT HIT: P57083, EVALUE 1.30e+00
cttgggcaggcagcagccatcctctccggcctggggcttctgtgggctgtggcttcccagggtgcacccttaatgccctcttcaccagtggagggtctgtaggcaaatccttcaggatgggggcacctcacctcttctcttcctcctctgttgaagcccaaat

SEQ ID NO: 23669 - DNA, 97 bp, Homo sapiens
  MAP TO AC015502.3; EXPRESSED IN PLACENTA, SIGNAL = 1.2; EXPRESSED IN FETAL LIVER, SIGNAL = 1.3; EXPRESSED IN ADULT LIVER, SIGNAL = 1.6; EXPRESSED IN BONE MARROW, SIGNAL = 1.3; EXPRESSED IN HEART, SIGNAL = 1.3; EXPRESSED IN BRAIN, SIGNAL = 1.3; EXPRESSED IN LUNG, SIGNAL = 2.6; EXPRESSED IN HELA, SIGNAL = 2.4; NT HIT: AL163280.2, EVALUE 8.10e-01; EST_HUMAN HIT: BE566083.1, EVALUE 3.00e-01
ctttcaggtgtcttattatccacatttgcacggaatatgacaagggataaaagagcagagacttgcaatgccttggaaaacaaactcctcctcttgc

SEQ ID NO: 23670 - DNA, 104 bp, Homo sapiens
  MAP TO AC011930.3; EXPRESSED IN LUNG, SIGNAL = 2.6; EXPRESSED IN BRAIN, SIGNAL = 2.4; EXPRESSED IN PLACENTA, SIGNAL = 2.2; EXPRESSED IN ADULT LIVER, SIGNAL = 2.1; EXPRESSED IN HEART, SIGNAL = 2.1; EXPRESSED IN FETAL LIVER, SIGNAL = 2.5; EXPRESSED IN BONE MARROW, SIGNAL = 2.5; NT HIT: AF092507.1, EVALUE 2.20e-01; EST_HUMAN HIT: BE616483.1, EVALUE 4.00e-47; SWISSPROT HIT: Q41266, EVALUE 9.40e+00
cttctgataattgtaaatcagagcccaaagggcagctgctccaatcctctgagcattttgattctcactttccagacaggcagcaagcacagtaatgacttttt

SEQ ID NO: 23671 - DNA, 94 bp, Homo sapiens
  MAP TO AC025119.2; EXPRESSED IN BONE MARROW, SIGNAL = 1.5; EXPRESSED IN ADULT LIVER, SIGNAL = 1.9; EXPRESSED IN HELA, SIGNAL = 2.4; EXPRESSED IN FETAL LIVER, SIGNAL = 1.6; EXPRESSED IN LUNG, SIGNAL = 1.6; EXPRESSED IN PLACENTA, SIGNAL = 1.7; EXPRESSED IN HEART, SIGNAL = 1.7; EXPRESSED IN BRAIN, SIGNAL = 1.6; NT HIT: AF156961.1, EVALUE 1.30e-02; EST_HUMAN HIT: AW901261.1, EVALUE 1.90e-02
aattacctggggctcctggatggtaatgatggtctggaccactggagccagggaaaggagacccaggacccatcagtcctgctgctggatcatg

SEQ ID NO: 23672 - DNA, 84 bp, Homo sapiens
  MAP TO AC023134.3; EXPRESSED IN FETAL LIVER, SIGNAL = 1.3; EXPRESSED IN LUNG, SIGNAL = 1.5; EXPRESSED IN PLACENTA, SIGNAL = 1.5; EXPRESSED IN ADULT LIVER, SIGNAL = 1.6; EXPRESSED IN BRAIN, SIGNAL = 1.5; EXPRESSED IN BONE MARROW, SIGNAL = 1.3; EXPRESSED IN HEART, SIGNAL = 1.6; EST_HUMAN HIT: AA335293.1, EVALUE 2.60e-01; NT HIT: AL163268.2, EVALUE 3.00e-03
ctaatggccttggaggcaatgcagccctgatgataccttgattttattctggtgttactgatttcagacttctggactccagaa

SEQ ID NO: 23673 - DNA, 177 bp, Homo sapiens
  MAP TO AC010767.3; EXPRESSED IN LUNG, SIGNAL = 4.8; EXPRESSED IN PLACENTA, SIGNAL = 4.5; EXPRESSED IN ADULT LIVER, SIGNAL = 4.8; EXPRESSED IN HELA, SIGNAL = 7.9; EXPRESSED IN HEART, SIGNAL = 4.7; EXPRESSED IN FETAL LIVER, SIGNAL = 5.5; EXPRESSED IN BONE MARROW, SIGNAL = 5.6; EXPRESSED IN BRAIN, SIGNAL = 4.4; SWISSPROT HIT: O51157, EVALUE 7.70e-01; NT HIT: AL163303.2, EVALUE 5.00e-16; EST_HUMAN HIT: BE165980.1, EVALUE 2.00e-38
atgtcaacattaacagaagtttggaagaagtttattccaaccctcatggatgactttgaggaattcaagacatcggtggaggaagtaacagcagatgtagcagaaatagtgagacaactagaattagaaggagagcctgaagatgtgactgaattgctgcaatctcacgataaacct

SEQ ID NO: 23674 - DNA, 85 bp, Homo sapiens
  MAP TO AL136976.3; EXPRESSED IN LUNG, SIGNAL = 1.5; EXPRESSED IN PLACENTA, SIGNAL = 1.1; EXPRESSED IN HEART, SIGNAL = 1.3; EXPRESSED IN FETAL LIVER, SIGNAL = 1.5; EXPRESSED IN ADULT LIVER, SIGNAL = 1.1; EXPRESSED IN BRAIN, SIGNAL = 1.5; EXPRESSED IN BONE MARROW, SIGNAL = 1.2
cagcagcagcagcaacaacaacaacaacaacaacaacaacaacaacaacaacaacaacagaaacaaaaaacaactaagatcctaa

SEQ ID NO: 23675 - DNA, 108 bp, Homo sapiens
  MAP TO AC022943.4; EXPRESSED IN ADULT LIVER, SIGNAL =   2; EXPRESSED IN HEART, SIGNAL = 1.8; EXPRESSED IN BONE MARROW, SIGNAL = 1.8; EXPRESSED IN LUNG, SIGNAL =   2; EXPRESSED IN PLACENTA, SIGNAL = 1.4; EXPRESSED IN FETAL LIVER, SIGNAL = 1.9; EXPRESSED IN BRAIN, SIGNAL = 1.5; EST_HUMAN HIT: AA337063.1, EVALUE 3.40e-01; SWISSPROT HIT: P14899, EVALUE 5.50e+00
ttaataagctttagctatgtctctttccttatccttttcgtctcctttgtcaactactaccactgctacaatgatgacttctttgaggtcaactgctattaccagacc

SEQ ID NO: 23676 - DNA, 346 bp, Homo sapiens
  MAP TO AC026442.1; EXPRESSED IN LUNG, SIGNAL = 1.2; EXPRESSED IN FETAL LIVER, SIGNAL = 1.2; EXPRESSED IN BRAIN, SIGNAL = 1.3; EXPRESSED IN PLACENTA, SIGNAL = 1.3; EXPRESSED IN HEART, SIGNAL = 1.5; EXPRESSED IN ADULT LIVER, SIGNAL = 1.5; EXPRESSED IN BONE MARROW, SIGNAL = 1.3; NT HIT: J00367.1, EVALUE 2.10e-01; EST_HUMAN HIT: AI287878.1, EVALUE 1.00e-06; SWISSPROT HIT: P41385, EVALUE 1.00e+00
tactcccaatagcgcagggggtgtacatcccccgtgatattcttcctaataaccagaaggaaagaagatgaaattgctctcaatattgcagggtgtgaacacctcttctttgatattgttcctagtatccagggagggacaggataatattactaccaatatcgaaggtggtgtgcacccccctgtgatattgtttggtacatccaggggaaagaggatgatattactcccaatatcgcagagggtgtacatcccctttgtgatattgttcctaataccacgggggtagaggatgatattactcccaatattgcaggaagtgtacacattccctctgatactgttc

SEQ ID NO: 23677 - DNA, 203 bp, Homo sapiens
  MAP TO AC007326.28; EXPRESSED IN PLACENTA, SIGNAL = 1.7; EXPRESSED IN FETAL LIVER, SIGNAL = 1.7; EXPRESSED IN BONE MARROW, SIGNAL = 1.2; EXPRESSED IN HEART, SIGNAL = 1.4; EXPRESSED IN BRAIN, SIGNAL = 2.2; NT HIT: gi11526309, EVALUE 1.00e-102; SWISSPROT HIT: O43272, EVALUE 3.00e-10; EST_HUMAN HIT: AV694817.1, EVALUE 1.00e-102
ctaggcagggcgatggaagaggttgccagttcggagccgcctcaagagctccagccacagcagctgccgctcccgatgggtgcccttcatgaggctgctgttctccagggcacggcgggacaagtagggcagcacctccatcacggggccatagggcacgtacttgtacacggggtagccggcctggcctgcatgggggcaga

SEQ ID NO: 23678 - DNA, 144 bp, Homo sapiens
  MAP TO AL136112.9; EXPRESSED IN HELA, SIGNAL = 2.3; EXPRESSED IN LUNG, SIGNAL = 3.6; EXPRESSED IN PLACENTA, SIGNAL = 1.5; EXPRESSED IN ADULT LIVER, SIGNAL = 2.8; EXPRESSED IN BRAIN, SIGNAL = 3.7; EXPRESSED IN BONE MARROW, SIGNAL = 2.7; EXPRESSED IN FETAL LIVER, SIGNAL = 4.5; EXPRESSED IN HEART, SIGNAL = 1.3; EST_HUMAN HIT: BE206521.1, EVALUE 3.00e-64; SWISSPROT HIT: P54102, EVALUE 2.00e-19; NT HIT: D13388.1, EVALUE 7.00e-64
ctcctctatcttcacatttgtcacaaattgcattcttttgcagagccagttttcttgttgcactattatataagtcttctagggttactgagagctgatgtacaacatttttacctctcctttctctgtgcatccttcctcctc

SEQ ID NO: 23679 - DNA, 78 bp, Homo sapiens
  MAP TO AC011859.4; EXPRESSED IN LUNG, SIGNAL =  10; EXPRESSED IN ADULT LIVER, SIGNAL = 9.3; EXPRESSED IN HEART, SIGNAL =  11; EXPRESSED IN BONE MARROW, SIGNAL = 9.1; EXPRESSED IN BRAIN, SIGNAL =  12; EXPRESSED IN FETAL LIVER, SIGNAL = 9.5; EXPRESSED IN HELA, SIGNAL =  11; EXPRESSED IN PLACENTA, SIGNAL = 8.8; NT HIT: AF224669.1, EVALUE 8.00e-19; EST_HUMAN HIT: AA557657.1, EVALUE 7.00e-20
tcaggaggtattccagaagaaggcattgttatcataggagatgacagctccatgcatggtatcattcttgaagacctt

SEQ ID NO: 23680 - DNA, 159 bp, Homo sapiens
  MAP TO AC016706.2; EXPRESSED IN BONE MARROW, SIGNAL = 1.8; EXPRESSED IN ADULT LIVER, SIGNAL = 2.3; EXPRESSED IN FETAL LIVER, SIGNAL = 2.3; EXPRESSED IN BRAIN, SIGNAL =   2; EXPRESSED IN LUNG, SIGNAL = 2.1; EXPRESSED IN PLACENTA, SIGNAL = 2.4; EXPRESSED IN HEART, SIGNAL =   2; EST_HUMAN HIT: AU123630.1, EVALUE 2.10e+00; SWISSPROT HIT: Q04538, EVALUE 5.20e+00; NT HIT: M34871.1, EVALUE 5.70e+00
tgcactgacaagaggcagaacgtcaaatacatggtttgcagacactcaatgatgatcaaaccttctaggatgagaagtaaaatttcatggaagtcgtaggataacccatcattgtggaatttcactgacttgggttcaacattcaccagcagtgtgatc

SEQ ID NO: 23681 - DNA, 118 bp, Homo sapiens
  MAP TO AC009943.4; EXPRESSED IN ADULT LIVER, SIGNAL = 2.3; EXPRESSED IN HEART, SIGNAL = 2.6; EXPRESSED IN BONE MARROW, SIGNAL = 2.8; EXPRESSED IN LUNG, SIGNAL = 2.5; EXPRESSED IN PLACENTA, SIGNAL = 2.6; EXPRESSED IN HELA, SIGNAL = 3.1; EXPRESSED IN FETAL LIVER, SIGNAL = 2.6; EXPRESSED IN BRAIN, SIGNAL = 2.1; SWISSPROT HIT: P18596, EVALUE 4.10e+00; NT HIT: AF163864.1, EVALUE 7.00e-11; EST_HUMAN HIT: AW800752.1, EVALUE 2.00e-09
ctattgttccaggcctctctccttggcttgtaggtggctgtcttcttcctgtgtcttcacatcgtcttccccctgcacctgtctttgtccagactttctcttcttataaggcaccaat

SEQ ID NO: 23682 - DNA, 132 bp, Homo sapiens
  MAP TO AL158206.3; EXPRESSED IN LUNG, SIGNAL = 1.1; EXPRESSED IN ADULT LIVER, SIGNAL = 0.83; EXPRESSED IN HEART, SIGNAL = 1.4; EXPRESSED IN BRAIN, SIGNAL =   1; EXPRESSED IN BONE MARROW, SIGNAL =   1; EXPRESSED IN PLACENTA, SIGNAL = 1.3; EXPRESSED IN FETAL LIVER, SIGNAL = 1.2; NT HIT: U56089.1, EVALUE 7.40e-02; EST_HUMAN HIT: AW499963.1, EVALUE 1.10e-01; SWISSPROT HIT: P48434, EVALUE 9.20e+00
ggggagtccattgatgatgtgtacacagagggggagctgatggtccttgccctgcctcctgctgtttacatagcagccaccaatgccttagtcctggagctgtggctgccctgtcacttatctgagctggtg

SEQ ID NO: 23683 - DNA, 99 bp, Homo sapiens
  MAP TO AL135923.11; EXPRESSED IN BONE MARROW, SIGNAL = 5.1; EXPRESSED IN ADULT LIVER, SIGNAL = 3.9; EXPRESSED IN HEART, SIGNAL = 4.8; EXPRESSED IN BRAIN, SIGNAL = 4.4; EXPRESSED IN LUNG, SIGNAL = 5.1; EXPRESSED IN PLACENTA, SIGNAL = 4.8; EXPRESSED IN FETAL LIVER, SIGNAL = 4.9; EST_HUMAN HIT: AW975807.1, EVALUE 3.10e-01; SWISSPROT HIT: Q09446, EVALUE 1.10e+00; NT HIT: U68399.1, EVALUE 2.10e-01
tagatacaaatgaatatttactgaatgcccgttatgttgtaggttgatgctgaagtggtgaacttgactgacagtctttgtgctcacactgtttacagt

SEQ ID NO: 23684 - DNA, 112 bp, Homo sapiens
  MAP TO AC010160.6; EXPRESSED IN ADULT LIVER, SIGNAL = 1.9; EXPRESSED IN BRAIN, SIGNAL = 1.7; EXPRESSED IN LUNG, SIGNAL = 2.1; EXPRESSED IN PLACENTA, SIGNAL = 1.9; EXPRESSED IN BONE MARROW, SIGNAL = 1.8; EXPRESSED IN FETAL LIVER, SIGNAL = 1.7; EXPRESSED IN HEART, SIGNAL = 1.9; NT HIT: AF149112.1, EVALUE 9.70e-01
cgccgagcagcaagtagaggccaagatcaccttcatactttgtgtgaggccacatagccaggaagaggagaagctagaaaataatcctggtgtggctcacagcaaatctcag

SEQ ID NO: 23685 - DNA, 96 bp, Homo sapiens
  MAP TO AC022050.2; EXPRESSED IN PLACENTA, SIGNAL = 1.4; EXPRESSED IN FETAL LIVER, SIGNAL = 1.2; EXPRESSED IN LUNG, SIGNAL = 1.2; EXPRESSED IN ADULT LIVER, SIGNAL = 1.4; EXPRESSED IN BRAIN, SIGNAL = 1.2; EXPRESSED IN BONE MARROW, SIGNAL = 1.3; EXPRESSED IN HEART, SIGNAL = 1.2; SWISSPROT HIT: P43636, EVALUE 2.50e+00; NT HIT: AF101084.1, EVALUE 2.00e-01; EST_HUMAN HIT: AU116913.1, EVALUE 7.50e-02
aaaagaagatgaggacagtaagtgcctcatggaattttgggaaaaattacggtgctgaaacctatagatatcttagtacagagcctgatttttatg

SEQ ID NO: 23686 - DNA, 112 bp, Homo sapiens
  MAP TO AC009695.4; EXPRESSED IN PLACENTA, SIGNAL = 1.5; EXPRESSED IN BONE MARROW, SIGNAL = 1.3; EXPRESSED IN ADULT LIVER, SIGNAL = 1.5; EXPRESSED IN HEART, SIGNAL = 1.7; EXPRESSED IN BRAIN, SIGNAL = 1.3; EXPRESSED IN LUNG, SIGNAL = 1.6; EXPRESSED IN FETAL LIVER, SIGNAL = 1.3; EST_HUMAN HIT: BF373382.1, EVALUE 5.60e+00; NT HIT: M90544.1, EVALUE 9.70e-01
ctgtttcttaacctggatggaaacgttatgttctaccttctcctctccctcctcctccttctcctcctcctcctccttattctttaaattgtatggggggtcctctatactc

SEQ ID NO: 23687 - DNA, 501 bp, Homo sapiens
  MAP TO AC007981.43; EXPRESSED IN LUNG, SIGNAL = 1.7; EXPRESSED IN PLACENTA, SIGNAL = 2.8; EXPRESSED IN ADULT LIVER, SIGNAL =   1; EXPRESSED IN HELA, SIGNAL = 4.6; EXPRESSED IN HEART, SIGNAL = 2.9; EXPRESSED IN FETAL LIVER, SIGNAL = 3.8; EXPRESSED IN BRAIN, SIGNAL = 2.6; EXPRESSED IN BONE MARROW, SIGNAL =   3; SWISSPROT HIT: P19440, EVALUE 3.00e-42; EST_HUMAN HIT: AI806336.1, EVALUE 1.00e-117; NT HIT: X98922.1, EVALUE 0.00e+00
atggacgacttcagctctcccagcatcaccaatgagtttggggcacccccctcacctgccaatttcatccagccaggtatggggtggaggtccggggggtgggggactggggtggagaggggcgggtgtcctgggcaggcagctgacgggcatccctgtcttctcccatcggccgcagggaagcagccgctcttgtccatgtgcccgacgatcatggtgggccaggacggccaggtccggatggtggtgggagctgctgggggcacgcagatcaccacagacactgcactggtatgtgtcaccccttttctccctggccctgcccactctgcacagcccccaagccacgctgatcacactcccatgccccaggccatcatctacaacctctggttcggctatgacgtgaagagggccgtggaggagccccggctgcacaacaagcttctgcccaacgtcacgacagtggagagaaacattgaccaggtgggccgggggttg

SEQ ID NO: 23688 - DNA, 150 bp, Homo sapiens
  MAP TO AC013291.4; EXPRESSED IN LUNG, SIGNAL =   2; EXPRESSED IN PLACENTA, SIGNAL = 2.1; EXPRESSED IN HELA, SIGNAL = 3.2; EXPRESSED IN HEART, SIGNAL = 2.6; EXPRESSED IN FETAL LIVER, SIGNAL = 2.5; EXPRESSED IN BONE MARROW, SIGNAL = 2.5; EXPRESSED IN ADULT LIVER, SIGNAL = 2.4; EXPRESSED IN BRAIN, SIGNAL = 2.3; SWISSPROT HIT: Q08905, EVALUE 9.00e+00; EST_HUMAN HIT: AI909783.1, EVALUE 3.20e-02; NT HIT: gi11427428, EVALUE 2.00e-79
gagtttgtcaattttttcctcctccattataagaaggaagtttctgtttctgatcaaatggaatttgtcaatggatggtacattatgattattattagtgacatattgacaatcattggatcaattctaaaaatggaaatccaagctaag

SEQ ID NO: 23689 - DNA, 420 bp, Homo sapiens
  MAP TO AC021383.3; EXPRESSED IN LUNG, SIGNAL = 7.2; EXPRESSED IN BRAIN, SIGNAL = 8.9; EXPRESSED IN BONE MARROW, SIGNAL = 8.4; EXPRESSED IN HELA, SIGNAL = 7.1; EXPRESSED IN PLACENTA, SIGNAL = 8.1; EXPRESSED IN ADULT LIVER, SIGNAL = 9.9; EXPRESSED IN HEART, SIGNAL = 6.8; EXPRESSED IN FETAL LIVER, SIGNAL = 6.7; EST_HUMAN HIT: AL046596.1, EVALUE 4.00e-35; NT HIT: AL163303.2, EVALUE 6.00e-30; SWISSPROT HIT: P10230, EVALUE 3.20e+00
ctcccatgactgctctcaagggcttgcaatgagtgcctgcagctttttcaggtgcactgtgcaagctgtcggtggatctaccattctggggcttggagaaccgtagccctattctcatagctccactaggcagtatccgagtggggactctgtgtgggacctctaacctcatatttcccctccacactgccctagtagaggttctccatgagggctctgcccctgcagcaggcttctgcctggaaatcctggtgcttccatatgtcctctgaaatctaggtggagcctcccaagaatttcttcttgccctctgcacacccacaggcttaacaccatgtggaggccacaaatgcttatggttttcaacctctagagcagcaacctgaaacatatccagggtctgtttagccacaactggag

SEQ ID NO: 23690 - DNA, 106 bp, Homo sapiens
  MAP TO AL158012.2; EXPRESSED IN PLACENTA, SIGNAL = 1.2; EXPRESSED IN HEART, SIGNAL = 1.3; EXPRESSED IN FETAL LIVER, SIGNAL = 1.3; EXPRESSED IN BONE MARROW, SIGNAL = 1.1; EXPRESSED IN LUNG, SIGNAL = 1.1; EXPRESSED IN ADULT LIVER, SIGNAL = 1.3; EXPRESSED IN BRAIN, SIGNAL = 1.1; SWISSPROT HIT: P11369, EVALUE 5.50e+00; NT HIT: AB042297.1, EVALUE 1.00e-06; EST_HUMAN HIT: BE179191.1, EVALUE 9.00e-42
ccatcctggtggttgtgttatttattgtggctttgatttggattttcctagtgactaatgatgccgagcatctttttgagcagcttttgataatgtcagcacatga

SEQ ID NO: 23691 - DNA, 183 bp, Homo sapiens
  MAP TO AL133259.21; EXPRESSED IN LUNG, SIGNAL = 3.6; EXPRESSED IN HEART, SIGNAL = 3.2; EXPRESSED IN FETAL LIVER, SIGNAL = 3.3; EXPRESSED IN PLACENTA, SIGNAL = 3.4; EXPRESSED IN ADULT LIVER, SIGNAL = 3.2; EXPRESSED IN BRAIN, SIGNAL = 3.4; EXPRESSED IN BONE MARROW, SIGNAL = 3.2; EST_HUMAN HIT: BE902044.1, EVALUE 6.30e-01
tactcccagcctgcccacaaccataacactagaaccaaattaaaggccacgtgcaaggttcactctccaacattgcagcctgactttgcatttaaggctgacacagtgaaggtagctccgtcttcagtcgtaaccttggtcagatttgtacagcatcagttggaacaggaagagaaagagcaa

SEQ ID NO: 23692 - DNA, 150 bp, Homo sapiens; identical to SEQ ID NO: 23402
  MAP TO AF241728.1; EXPRESSED IN LUNG, SIGNAL = 1.2; EXPRESSED IN FETAL LIVER, SIGNAL =   1; EXPRESSED IN BONE MARROW, SIGNAL = 1.1; EXPRESSED IN PLACENTA, SIGNAL = 1.3; EXPRESSED IN ADULT LIVER, SIGNAL = 2.2; EXPRESSED IN HEART, SIGNAL = 1.3; EXPRESSED IN BRAIN, SIGNAL =   1; SWISSPROT HIT: Q9Y487, EVALUE 1.80e+00; EST_HUMAN HIT: BF690522.1, EVALUE 1.30e-01

SEQ ID NO: 23693 - DNA, 210 bp, Homo sapiens
  MAP TO AC013550.4; EXPRESSED IN PLACENTA, SIGNAL = 1.6; EXPRESSED IN ADULT LIVER, SIGNAL =   2; EXPRESSED IN HEART, SIGNAL = 5.6; EXPRESSED IN BRAIN, SIGNAL = 1.9; EXPRESSED IN BONE MARROW, SIGNAL = 1.9; EXPRESSED IN LUNG, SIGNAL = 1.9; EXPRESSED IN FETAL LIVER, SIGNAL = 1.8; SWISSPROT HIT: O69890, EVALUE 7.40e-01; EST_HUMAN HIT: BE670741.1, EVALUE 7.40e-01; NT HIT: M92304.1, EVALUE 5.00e-01
cgtacggctcaggtgcggaggacatgaaccgactggctgattccatcttctctccaacctttccagcgtacggctcaggtgcggaggacatgaaccgactggctgattccatcttctccccatcctttccagcgtatggctcaggtgcacaggacatgaacggactggctgattccatcttctctccatcctttccagcgtctggctcag

SEQ ID NO: 23694 - DNA, 116 bp, Homo sapiens
  MAP TO AC009046.4; EXPRESSED IN LUNG, SIGNAL = 5.8; EXPRESSED IN PLACENTA, SIGNAL =  12; EXPRESSED IN ADULT LIVER, SIGNAL = 2.2; EXPRESSED IN HELA, SIGNAL =  17; EXPRESSED IN FETAL LIVER, SIGNAL =  11; EXPRESSED IN BRAIN, SIGNAL = 9.8; EXPRESSED IN BONE MARROW, SIGNAL =  11; EXPRESSED IN HEART, SIGNAL =  10; NT HIT: AF223391.1, EVALUE 2.50e-01; EST_HUMAN HIT: N69442.1, EVALUE 2.40e-02; SWISSPROT HIT: P18573, EVALUE 5.50e-02
gatcattttcctttttcattttcctggatatgaggatgatctggctgtgacatctgtcgtgttagcgatggccagggttgatttggctgagatggctggtaaggcagctgttccct

SEQ ID NO: 23695 - DNA, 246 bp, Homo sapiens
  MAP TO AL133260.7; EXPRESSED IN LUNG, SIGNAL = 2.5; EXPRESSED IN PLACENTA, SIGNAL = 3.5; EXPRESSED IN ADULT LIVER, SIGNAL = 5.2; EXPRESSED IN HELA, SIGNAL =  10; EXPRESSED IN FETAL LIVER, SIGNAL =  12; EXPRESSED IN BRAIN, SIGNAL = 7.2; EXPRESSED IN HEART, SIGNAL = 6.2; EXPRESSED IN BONE MARROW, SIGNAL =  12; SWISSPROT HIT: P02433, EVALUE 1.00e-36; NT HIT: K03002.1, EVALUE 3.00e-98; EST_HUMAN HIT: BF103853.1, EVALUE 1.00e-100
ctactcattttcttcgctgcacagcctggcactggggttggtgactgtgatggccagttgggcagctctttccacgatggctttgcggttcttggaggaaacattgtgagcgatctcggcacaagtacgattgttgcacatcagcagcacttccagctccttgacgttgtggaccaggaacttccggaagccactgggcagcatgtgctttgtttttttgttgctcccataaccagtgttgggcat

SEQ ID NO: 23696 - DNA, 347 bp, Homo sapiens
  MAP TO AP000230.2; EXPRESSED IN PLACENTA, SIGNAL = 4.3; EXPRESSED IN ADULT LIVER, SIGNAL = 4.2; EXPRESSED IN HEART, SIGNAL = 3.8; EXPRESSED IN BONE MARROW, SIGNAL = 3.8; EXPRESSED IN LUNG, SIGNAL = 3.7; EXPRESSED IN FETAL LIVER, SIGNAL = 2.9; EXPRESSED IN BRAIN, SIGNAL =   4; NT HIT: AL163210.2, EVALUE 2.00e-63; EST_HUMAN HIT: BE263672.1, EVALUE 3.00e-63; SWISSPROT HIT: O83558, EVALUE 4.70e-01
catgctgtgtgcagcctggggacttggtgccttgtgtcccagctgctccagccatggctgaaaggggccaacatagagctcggattgtggcttcagagggtgcaagctgtaagccttggcagcttccatgtggtgttgagcctgccagtgcacagaagtcaaaaattggggtttgggaacctctgcctagatttcagaagatgtatggaaatgcctggatgccctggcagaagtctgctgtaggggaggggccctcatggagaatctctgctagggcagtacagaagggaaatgtgggatcggagccccagcacagaatccctactggggcaccgcctagtggagct

SEQ ID NO: 23697 - DNA, 104 bp, Homo sapiens
  MAP TO AC008597.3; EXPRESSED IN BONE MARROW, SIGNAL = 6.2; EXPRESSED IN ADULT LIVER, SIGNAL = 4.2; EXPRESSED IN HELA, SIGNAL = 4.4; EXPRESSED IN HEART, SIGNAL = 7.2; EXPRESSED IN LUNG, SIGNAL =   6; EXPRESSED IN PLACENTA, SIGNAL = 5.5; EXPRESSED IN FETAL LIVER, SIGNAL = 5.5; EXPRESSED IN BRAIN, SIGNAL = 5.5; EST_HUMAN HIT: AA460574.1, EVALUE 6.00e-52; SWISSPROT HIT: P51659, EVALUE 5.00e-05; NT HIT: gi11417035, EVALUE 4.00e-52
tctattcttattctgagaaggaacttatatgccacaatcagttctctctctttcttgttggctctggaggctttggtggaaaacggacatcagacaaagtcaag

SEQ ID NO: 23698 - DNA, 110 bp, Homo sapiens; identical to SEQ ID NO: 17103
  MAP TO AP001412.1; EXPRESSED IN LUNG, SIGNAL =   5; EXPRESSED IN ADULT LIVER, SIGNAL = 5.9; EXPRESSED IN HELA, SIGNAL = 6.7; EXPRESSED IN FETAL LIVER, SIGNAL = 5.6; EXPRESSED IN BRAIN, SIGNAL = 4.7; EXPRESSED IN BONE MARROW, SIGNAL =   7; EXPRESSED IN PLACENTA, SIGNAL = 4.7; EXPRESSED IN HEART, SIGNAL = 3.5; SWISSPROT HIT: P39097, EVALUE 1.80e+00; NT HIT: L78810.1, EVALUE 2.00e-17; EST_HUMAN HIT: C18939.1, EVALUE 2.00e-30

SEQ ID NO: 23699 - DNA, 90 bp, Homo sapiens
  MAP TO AL157396.2; EXPRESSED IN PLACENTA, SIGNAL = 2.9; EXPRESSED IN HEART, SIGNAL = 3.9; EXPRESSED IN LUNG, SIGNAL = 2.5; EXPRESSED IN ADULT LIVER, SIGNAL = 1.3; EXPRESSED IN FETAL LIVER, SIGNAL = 2.7; EXPRESSED IN BRAIN, SIGNAL = 2.7; EXPRESSED IN BONE MARROW, SIGNAL = 2.9; SWISSPROT HIT: P51160, EVALUE 2.00e-10; NT HIT: X94354.1, EVALUE 8.00e-44
atgaataagctagaaaacagaaaggacattgctcaggaaatgctcatgaaccaaaccaaagccactcctgaagaaattaagtccattttg

SEQ ID NO: 23700 - DNA, 214 bp, Homo sapiens
  MAP TO AC013317.4; EXPRESSED IN PLACENTA, SIGNAL = 3.7; EXPRESSED IN ADULT LIVER, SIGNAL = 0.84; EXPRESSED IN HELA, SIGNAL = 6.5; EXPRESSED IN FETAL LIVER, SIGNAL =   4; EXPRESSED IN BRAIN, SIGNAL = 5.8; EXPRESSED IN BONE MARROW, SIGNAL = 4.8; EXPRESSED IN LUNG, SIGNAL = 2.4; EXPRESSED IN HEART, SIGNAL = 4.3; EST_HUMAN HIT: AI632733.1, EVALUE 3.00e-62; NT HIT: AL163227.2, EVALUE 2.00e-56
tgatatggacaatgaagtccaggctgaggtggtctcagatggacatgaggaatttgttgggaacaagagcaaaggtcactcttgttatgctttagcaaacagactagcggcattttgctcctgccctagaaatctatggaactttgaaattgagagagatgatttagggcatctgatggaagaaatttctaagcagcaaagcattcaagaggtg

SEQ ID NO: 23701 - DNA, 99 bp, Homo sapiens
  MAP TO AC022714.2; EXPRESSED IN PLACENTA, SIGNAL = 4.9; EXPRESSED IN ADULT LIVER, SIGNAL = 5.5; EXPRESSED IN HEART, SIGNAL =   5; EXPRESSED IN FETAL LIVER, SIGNAL =   5; EXPRESSED IN LUNG, SIGNAL = 5.3; EXPRESSED IN HELA, SIGNAL = 4.9; EXPRESSED IN BRAIN, SIGNAL = 5.3; EXPRESSED IN BONE MARROW, SIGNAL = 5.2; EST_HUMAN HIT: AW750067.1, EVALUE 4.80e+00
ctataaggccactaccatgtactgctgatgaagttcatacagctccataggtagcacataagaagtttcatcagtagccaagatgataatcaatagcat

SEQ ID NO: 23702 - DNA, 174 bp, Homo sapiens
  MAP TO AC023602.5; EXPRESSED IN LUNG, SIGNAL = 1.4; EXPRESSED IN PLACENTA, SIGNAL = 1.1; EXPRESSED IN ADULT LIVER, SIGNAL = 1.3; EXPRESSED IN HEART, SIGNAL = 1.2; EXPRESSED IN FETAL LIVER, SIGNAL = 1.1; EXPRESSED IN BRAIN, SIGNAL = 1.2; EXPRESSED IN BONE MARROW, SIGNAL = 1.1; SWISSPROT HIT: Q13740, EVALUE 6.00e-28; EST_HUMAN HIT: AA262217.1, EVALUE 4.00e-85; NT HIT: Y10183.1, EVALUE 1.00e-93
tactagcatgcacacaaatctcttttcatcactgatccttgcattactgatagacaaagtgtagttttctgagaggttcaatctgtctttgtattctggtacatcgtcgtactgcacacttttctttgtagaggatctgaaggcaataaatactggggagccatcgggcttttc

SEQ ID NO: 23703 - DNA, 118 bp, Homo sapiens
  MAP TO AC018583.3; EXPRESSED IN LUNG, SIGNAL = 1.9; EXPRESSED IN PLACENTA, SIGNAL = 1.7; EXPRESSED IN ADULT LIVER, SIGNAL = 2.2; EXPRESSED IN BRAIN, SIGNAL = 1.5; EXPRESSED IN HEART, SIGNAL = 1.6; EXPRESSED IN HELA, SIGNAL =   3; EXPRESSED IN FETAL LIVER, SIGNAL = 1.8; EXPRESSED IN BONE MARROW, SIGNAL = 1.6; NT HIT: AB036814.1, EVALUE 1.00e+00; EST_HUMAN HIT: N25507.1, EVALUE 4.00e-04
ctttacagtagttcctgctgtactgacttcccgagggaaatttctttggcagtttgcctttagctaaacctttagggatagactgaactgaagggatagacagcttcaagtgggtcat

SEQ ID NO: 23704 - DNA, 153 bp, Homo sapiens
  MAP TO AL157396.2; EXPRESSED IN LUNG, SIGNAL = 3.4; EXPRESSED IN ADULT LIVER, SIGNAL = 3.8; EXPRESSED IN HELA, SIGNAL =   3; EXPRESSED IN FETAL LIVER, SIGNAL = 3.4; EXPRESSED IN BRAIN, SIGNAL = 3.4; EXPRESSED IN PLACENTA, SIGNAL = 2.2; EXPRESSED IN HEART, SIGNAL = 3.4; EXPRESSED IN BONE MARROW, SIGNAL = 3.3; SWISSPROT HIT: P51160, EVALUE 5.00e-23; EST_HUMAN HIT: BF374572.1, EVALUE 2.00e+00; NT HIT: U20197.1, EVALUE 4.00e-81
ctcttcatcctgtttggaaaattcagatgcatttactttgttaactgccatgatcacagcaagaacctccttgcccaccacgatcggggttgccagcaggttcttagtgacatacccagtttgcttgtccatgaagtcagaaaaatggctgtt

SEQ ID NO: 23705 - DNA, 247 bp, Homo sapiens
  MAP TO AL133173.13; EXPRESSED IN LUNG, SIGNAL = 1.2; EXPRESSED IN ADULT LIVER, SIGNAL = 1.2; EXPRESSED IN HEART, SIGNAL = 1.2; EXPRESSED IN BRAIN, SIGNAL = 0.99; EXPRESSED IN FETAL LIVER, SIGNAL =   1; EXPRESSED IN PLACENTA, SIGNAL = 1.5; EXPRESSED IN BONE MARROW, SIGNAL = 0.99; NT HIT: U90288.1, EVALUE 1.00e-125; EST_HUMAN HIT: BE274237.1, EVALUE 1.00e-115; SWISSPROT HIT: P33897, EVALUE 7.00e-40
ggagtaccacacacacttgctacagttcgatggggagggtggctggaagttcgagaagctggactcagctgcccacctgagcctgacagaggagaagcagcggctggagcagcagctggcgggcattcccaagatgcagcggcacctccaggagctctgccaaatcctgggcgaggccgtggccccagcgcacgtgccggcacctagcctgcaaggccctggtggactccagggtgcctccacctga

SEQ ID NO: 23706 - DNA, 163 bp, Homo sapiens
  MAP TO AL161788.2; EXPRESSED IN PLACENTA, SIGNAL = 2.3; EXPRESSED IN ADULT LIVER, SIGNAL = 2.2; EXPRESSED IN HEART, SIGNAL = 1.8; EXPRESSED IN FETAL LIVER, SIGNAL = 1.8; EXPRESSED IN BRAIN, SIGNAL = 1.9; EXPRESSED IN BONE MARROW, SIGNAL = 1.9; EXPRESSED IN LUNG, SIGNAL =   2; EXPRESSED IN HELA, SIGNAL = 2.7; EST_HUMAN HIT: AI015304.1, EVALUE 1.00e-08; NT HIT: gi11426088, EVALUE 1.50e+00; SWISSPROT HIT: P18267, EVALUE 4.00e+00
agcctgggagcatgggcgcctgccccaccaactcagtaagggggcggggctcttgcttgttcatggctctctgaccaagaacatccctggggagaatgcagccctggtcgtccctctcctgctgcagctcgtatccttgaagcagctgctccagatgggccat

SEQ ID NO: 23707 - DNA, 233 bp, Homo sapiens
  MAP TO AL138796.2; EXPRESSED IN ADULT LIVER, SIGNAL = 0.63; EXPRESSED IN HEART, SIGNAL = 3.3; EXPRESSED IN BRAIN, SIGNAL = 0.73; EXPRESSED IN PLACENTA, SIGNAL = 0.67; EXPRESSED IN BONE MARROW, SIGNAL = 0.5; SWISSPROT HIT: P34926, EVALUE 6.40e-01; NT HIT: AB007923.1, EVALUE 1.00e-128; EST_HUMAN HIT: AW983553.1, EVALUE 1.00e-105
ctgatgtgggacactgaggagaatcctgcttcctcaatttgagcctttagctccttcagttcctcctcagctttcctcttctcttctaagtgctggtggaactcagccctcaggtggagcatttcttcctgaagacacctgttactgtcccctcccatcggagaaggaggggaaaaagatgggttctgggtctccacagttgccagacttttctccaaagccaccttgacaag

SEQ ID NO: 23708 - DNA, 189 bp, Homo sapiens
  MAP TO AC013644.3; EXPRESSED IN LUNG, SIGNAL = 5.6; EXPRESSED IN BONE MARROW, SIGNAL =  22; EXPRESSED IN HELA, SIGNAL =  21; EXPRESSED IN HEART, SIGNAL =   5; EXPRESSED IN PLACENTA, SIGNAL = 3.5; EXPRESSED IN ADULT LIVER, SIGNAL = 5.6; EXPRESSED IN FETAL LIVER, SIGNAL =  21; EXPRESSED IN BRAIN, SIGNAL = 8.4; NT HIT: S79979.1, EVALUE 7.00e-74; SWISSPROT HIT: P02403, EVALUE 2.00e-25; EST_HUMAN HIT: AA300378.1, EVALUE 3.00e-74
gcgagatgatgaagggaacgtcatcatttggaaagcattgcaataagacgtacacgttatgccaccactgtggctctaaggcctaccaccttcagaagtcgacctatggcaaatgtggctacactgccaagcgcaagagaaagtataactggagtaccaaggctaaaagacgaaataccaccagaactg

SEQ ID NO: 23709 - DNA, 88 bp, Homo sapiens
  MAP TO AL109824.21; EXPRESSED IN PLACENTA, SIGNAL =   1; EXPRESSED IN FETAL LIVER, SIGNAL = 1.1; EXPRESSED IN BONE MARROW, SIGNAL = 1.1; EXPRESSED IN LUNG, SIGNAL = 0.83; EXPRESSED IN ADULT LIVER, SIGNAL = 0.96; EXPRESSED IN HEART, SIGNAL = 1.4; EXPRESSED IN BRAIN, SIGNAL =   1; EST_HUMAN HIT: BE567435.1, EVALUE 6.90e-02
agggtaaggttcttaagaaggtcagaggagatgggatcaaaggcatagatggagaaactggccttagacttgaggaaggacagctgct

SEQ ID NO: 23710 - DNA, 77 bp, Homo sapiens
  MAP TO AP001439.1; EXPRESSED IN PLACENTA, SIGNAL = 1.4; EXPRESSED IN FETAL LIVER, SIGNAL = 1.1; EXPRESSED IN BONE MARROW, SIGNAL = 1.2; EXPRESSED IN LUNG, SIGNAL = 1.3; EXPRESSED IN ADULT LIVER, SIGNAL = 1.4; EXPRESSED IN HEART, SIGNAL = 1.4; EXPRESSED IN BRAIN, SIGNAL = 1.6; SWISSPROT HIT: Q9ZCM4, EVALUE 5.60e+00; NT HIT: D87675.1, EVALUE 4.00e-36; EST_HUMAN HIT: AV748792.1, EVALUE 9.00e-01
gcagctggcttccataacttgtttgaggaatgtagtaattccaaggttgctgcaaggactaatgtacaggaatattc

SEQ ID NO: 23711 - DNA, 164 bp, Homo sapiens
  MAP TO AC015842.4; EXPRESSED IN ADULT LIVER, SIGNAL = 3.2; EXPRESSED IN HELA, SIGNAL = 3.6; EXPRESSED IN FETAL LIVER, SIGNAL = 2.3; EXPRESSED IN BRAIN, SIGNAL =   2; EXPRESSED IN BONE MARROW, SIGNAL =   2; EXPRESSED IN LUNG, SIGNAL =   2; EXPRESSED IN PLACENTA, SIGNAL =   2; EXPRESSED IN HEART, SIGNAL = 3.1; SWISSPROT HIT: P45804, EVALUE 2.30e+00; NT HIT: AB046851.1, EVALUE 3.80e-01; EST_HUMAN HIT: AW898917.1, EVALUE 5.60e-01
ctcctggttggctgttgcaagaggctcctaagggtgtcccagccttttttatccaccacatcgtatataactattaagtgatcatcataaaatgcaaatatgatcatgcctctctcctccttaataatcattaatgctccttctgtcctcagaaacactattat

SEQ ID NO: 23712 - DNA, 105 bp, Homo sapiens
  MAP TO AC015897.3; EXPRESSED IN PLACENTA, SIGNAL =  23; EXPRESSED IN ADULT LIVER, SIGNAL =  21; EXPRESSED IN HEART, SIGNAL =  19; EXPRESSED IN BRAIN, SIGNAL =  19; EXPRESSED IN BONE MARROW, SIGNAL =  23; EXPRESSED IN LUNG, SIGNAL =  24; EXPRESSED IN HELA, SIGNAL =  15; EXPRESSED IN FETAL LIVER, SIGNAL =  18; NT HIT: X56832.1, EVALUE 8.90e-01; EST_HUMAN HIT: BF683954.1, EVALUE 3.30e-01
atcaatttgcttccatatttcaagagccacaggggcaaagatgagccatttgacatgtgcaatcccttcactgggtatcagctcaagactcagctgcagcaataa

SEQ ID NO: 23713 - DNA, 103 bp, Homo sapiens
  MAP TO AC022638.3; EXPRESSED IN PLACENTA, SIGNAL = 2.1; EXPRESSED IN ADULT LIVER, SIGNAL = 2.3; EXPRESSED IN HEART, SIGNAL = 2.3; EXPRESSED IN FETAL LIVER, SIGNAL = 1.8; EXPRESSED IN BONE MARROW, SIGNAL = 1.9; EXPRESSED IN LUNG, SIGNAL =   2; EXPRESSED IN BRAIN, SIGNAL =   2; EST_HUMAN HIT: AI018569.1, EVALUE 1.30e+00; NT HIT: AF020503.1, EVALUE 2.00e-04; SWISSPROT HIT: Q01360, EVALUE 9.40e+00
ttatgggcttgtgaatacacgctgtgatggaatggtgtccggttcagggatggtttctgccttggccctgagcttccaagacagggtttggccacctgtgacc

SEQ ID NO: 23714 - DNA, 235 bp, Homo sapiens
  MAP TO AC015873.2; EXPRESSED IN PLACENTA, SIGNAL = 5.6; EXPRESSED IN ADULT LIVER, SIGNAL = 1.7; EXPRESSED IN HELA, SIGNAL = 8.1; EXPRESSED IN FETAL LIVER, SIGNAL = 4.6; EXPRESSED IN BRAIN, SIGNAL = 4.8; EXPRESSED IN BONE MARROW, SIGNAL = 5.3; EXPRESSED IN LUNG, SIGNAL = 3.7; EXPRESSED IN HEART, SIGNAL = 5.4; SWISSPROT HIT: Q92543, EVALUE 2.00e-29; NT HIT: AL163203.2, EVALUE 1.00e-100; EST_HUMAN HIT: AV658021.1, EVALUE 6.00e-82
cgattgctaacaacagtgaggaggtgcaggagtttcttgctgtgaacacagatgctcgcatttcctttgtcaagaaaccatttatggtctctagaatagagaagatggtgttgagtgccattgtggacaccttgaagacagcgtttccttgctctgaatcccagagccccacagagaagctgagtgaggccgagactgaaagcaagtcccatatagaaggcaagaaggctagcaa

SEQ ID NO: 23715 - DNA, 153 bp, Homo sapiens
  MAP TO AL109614.27; EXPRESSED IN LUNG, SIGNAL = 2.7; EXPRESSED IN PLACENTA, SIGNAL = 3.2; EXPRESSED IN ADULT LIVER, SIGNAL = 4.6; EXPRESSED IN HEART, SIGNAL = 3.5; EXPRESSED IN FETAL LIVER, SIGNAL =   3; EXPRESSED IN BRAIN, SIGNAL = 3.3; EXPRESSED IN BONE MARROW, SIGNAL = 3.2; EXPRESSED IN HELA, SIGNAL = 5.1; NT HIT: AB033030.1, EVALUE 1.20e+00
cccccttgtgctccaagaccaccaagagcccctcctggccccattcctgaaagttcttctcgcagatgaatgccagatgattcccgttaaggagttagctgctaactacaggtgttaactgctaatgaaagtgccagcactaagatattagct

SEQ ID NO: 23716 - DNA, 136 bp, Homo sapiens
  MAP TO AF240629.1; EXPRESSED IN PLACENTA, SIGNAL = 1.3; EXPRESSED IN ADULT LIVER, SIGNAL = 1.4; EXPRESSED IN HEART, SIGNAL = 1.3; EXPRESSED IN LUNG, SIGNAL = 1.1; EXPRESSED IN BRAIN, SIGNAL = 1.2; EXPRESSED IN FETAL LIVER, SIGNAL = 1.1; EXPRESSED IN BONE MARROW, SIGNAL = 1.2; SWISSPROT HIT: P76197, EVALUE 7.00e+00; EST_HUMAN HIT: AW903638.1, EVALUE 1.10e-01; NT HIT: AL162754.2, EVALUE 1.90e-02
agaagtgaggtcacaggaaatgacaattttcctgaacagaaatccaaaatcagaaacctccacgagaaccagtgctgaaaccagaactgtaattaaggaattgctggaagctccatttggacaaataaaaactcca

SEQ ID NO: 23717 - DNA, 142 bp, Homo sapiens
  MAP TO AC015785.3; EXPRESSED IN PLACENTA, SIGNAL = 1.1; EXPRESSED IN ADULT LIVER, SIGNAL = 1.5; EXPRESSED IN HELA, SIGNAL = 2.8; EXPRESSED IN HEART, SIGNAL = 1.5; EXPRESSED IN FETAL LIVER, SIGNAL = 2.7; EXPRESSED IN BRAIN, SIGNAL = 2.6; EXPRESSED IN BONE MARROW, SIGNAL = 2.1; EXPRESSED IN LUNG, SIGNAL = 1.6; EST_HUMAN HIT: BE141963.1, EVALUE 4.80e-01; SWISSPROT HIT: P23678, EVALUE 3.10e+00; NT HIT: AE002015.1, EVALUE 3.20e-01
attcgttctccaaattatagtccatttttgacaaaaagggcaaaactttgcttgcacttgtggacttgcatttcaactgctgctggaagctctcgtgccatttgatgtttgccatcctgttcttccatggctgagggggcat

SEQ ID NO: 23718 - DNA, 162 bp, Homo sapiens
  MAP TO AC015756.4; EXPRESSED IN LUNG, SIGNAL = 2.4; EXPRESSED IN ADULT LIVER, SIGNAL = 3.1; EXPRESSED IN HELA, SIGNAL = 3.6; EXPRESSED IN BRAIN, SIGNAL = 2.3; EXPRESSED IN HEART, SIGNAL = 2.2; EXPRESSED IN PLACENTA, SIGNAL = 2.5; EXPRESSED IN FETAL LIVER, SIGNAL = 2.2; EXPRESSED IN BONE MARROW, SIGNAL = 2.4; NT HIT: gi11437135, EVALUE 2.00e-86; SWISSPROT HIT: O75936, EVALUE 2.00e-25; EST_HUMAN HIT: AW300383.1, EVALUE 3.00e-86
atgataaaggccaagtggttcgcatcaacttcaataacgcaactagggacacaatatttgatgtgcctgttgaaagagttcagcctttttatgctgctctgaaggagtttgttgacctcatgaacagcaaagaatccaagtttaccttcaagatgaatccag

SEQ ID NO: 23719 - DNA, 114 bp, Homo sapiens
  MAP TO AC013641.4; EXPRESSED IN LUNG, SIGNAL = 3.5; EXPRESSED IN PLACENTA, SIGNAL = 1.9; EXPRESSED IN ADULT LIVER, SIGNAL = 5.2; EXPRESSED IN HEART, SIGNAL =  14; EXPRESSED IN FETAL LIVER, SIGNAL = 7.9; EXPRESSED IN HELA, SIGNAL = 4.5; EXPRESSED IN BRAIN, SIGNAL = 9.3; EXPRESSED IN BONE MARROW, SIGNAL = 7.5; SWISSPROT HIT: P04406, EVALUE 1.00e-14; EST_HUMAN HIT: AA303115.1, EVALUE 1.00e-31; NT HIT: J04038.1, EVALUE 6.00e-33
tcactcctggaagatggttatgggatttccactgatgacaagcttcccgttctcagccttgatggtactgtggaacttgccatgggtggaatcatactgaaacatgtaggccat

SEQ ID NO: 23720 - DNA, 180 bp, Homo sapiens
  MAP TO AC008528.4; EXPRESSED IN PLACENTA, SIGNAL = 4.6; EXPRESSED IN HELA, SIGNAL = 7.4; EXPRESSED IN FETAL LIVER, SIGNAL = 4.7; EXPRESSED IN BONE MARROW, SIGNAL = 4.2; EXPRESSED IN LUNG, SIGNAL = 4.1; EXPRESSED IN ADULT LIVER, SIGNAL = 6.6; EXPRESSED IN HEART, SIGNAL = 5.4; EXPRESSED IN BRAIN, SIGNAL = 5.4; EST_HUMAN HIT: R13174.1, EVALUE 1.00e-11; SWISSPROT HIT: P79331, EVALUE 9.00e-08; NT HIT: Y11586.1, EVALUE 1.10e-01
gtggatgatgacagaatggaccccttgttcacgaacttgtggaaaaggaatgcagagcagacaagtggcctgtacccaacaactgagcaatggaacactgattagagcccgagagagggactgcattgggcccaagcccgcctctgcccagcgctgtgagggccaggactgcatgaccgt

SEQ ID NO: 23721 - DNA, 118 bp, Homo sapiens
  MAP TO AC019278.3; EXPRESSED IN PLACENTA, SIGNAL = 0.6; EXPRESSED IN ADULT LIVER, SIGNAL = 0.63; EXPRESSED IN FETAL LIVER, SIGNAL = 0.51; EXPRESSED IN BRAIN, SIGNAL = 0.51; EXPRESSED IN BONE MARROW, SIGNAL = 0.58; EXPRESSED IN HEART, SIGNAL = 2.6; SWISSPROT HIT: Q05860, EVALUE 2.00e-16; NT HIT: X62379.1, EVALUE 3.00e-41; EST_HUMAN HIT: AI040235.1, EVALUE 3.00e-60
ctgcttcagtgtacttcagtcccactttttcttctgtgtcttttgtctttgggggtggccagacagcttgaagtctgccaggagtcctgtcatcctgctcagtcaggctgtggtcagg

SEQ ID NO: 23722 - DNA, 178 bp, Homo sapiens
  MAP TO AC013800.3; EXPRESSED IN PLACENTA, SIGNAL = 1.5; EXPRESSED IN FETAL LIVER, SIGNAL = 1.4; EXPRESSED IN BRAIN, SIGNAL = 1.3; EXPRESSED IN BONE MARROW, SIGNAL = 1.2; EXPRESSED IN LUNG, SIGNAL = 1.4; EXPRESSED IN ADULT LIVER, SIGNAL = 1.4; EXPRESSED IN HEART, SIGNAL = 1.4; NT HIT: U51303.1, EVALUE 1.00e-01; EST_HUMAN HIT: BF360680.1, EVALUE 9.60e+00; SWISSPROT HIT: Q9QM81, EVALUE 3.00e-03
ctattcaagtgagaggtgatgagggagggactcagctcagcagtgaaacagaagtgggatgcggaaaactgacagaatctgggaatggagtcagaggtggggagagggaaaaggaggaggcggagatgaggcctagggatggcatggatggtggtgctgttcgtgaagatggggtaca

SEQ ID NO: 23723 - DNA, 175 bp, Homo sapiens
  MAP TO AC010789.7; EXPRESSED IN LUNG, SIGNAL = 4.9; EXPRESSED IN ADULT LIVER, SIGNAL = 5.3; EXPRESSED IN HEART, SIGNAL = 3.8; EXPRESSED IN BRAIN, SIGNAL = 4.4; EXPRESSED IN HELA, SIGNAL = 5.2; EXPRESSED IN BONE MARROW, SIGNAL = 4.9; EXPRESSED IN FETAL LIVER, SIGNAL = 3.8; EXPRESSED IN PLACENTA, SIGNAL = 4.4; SWISSPROT HIT: Q51933, EVALUE 3.90e+00; NT HIT: AB014579.1, EVALUE 3.00e-94; EST_HUMAN HIT: AW995409.1, EVALUE 5.00e-94
ctaaccactgtacaaaagacttcaccatagacattatactcttgatatcccaaacataggagtacatgtcataaagaattgtcctgttggcacaattggagagccgagtgaacattcccatcactagtccacacatctcttcaaacttggctgctcgtgaccgccattcttcaat

SEQ ID NO: 23724 - DNA, 497 bp, Homo sapiens
  MAP TO AL136419.2; EXPRESSED IN HELA, SIGNAL = 2.3; EXPRESSED IN LUNG, SIGNAL = 1.2; EXPRESSED IN PLACENTA, SIGNAL = 1.4; EXPRESSED IN FETAL LIVER, SIGNAL = 1.6; EXPRESSED IN BONE MARROW, SIGNAL = 1.5; EXPRESSED IN ADULT LIVER, SIGNAL = 2.1; EXPRESSED IN HEART, SIGNAL = 1.4; EXPRESSED IN BRAIN, SIGNAL = 1.9; SWISSPROT HIT: P10266, EVALUE 1.00e-57; EST_HUMAN HIT: AW513513.1, EVALUE 0.00e+00; NT HIT: M30520.1, EVALUE 1.00e-114
tctttttctttttctttttctccctggctctccacatctgccgttttctctcctttctctttctgatttctcttctcactttctctcttcctttctttcccagtttctcttttttctctgttggtctttcccaaataatgaaaaggagtggaggtctgaatgttatcagatgctattgtcaggcctgcgtttgcaacctctgtctgcagaaatgtgtaacagtcaattaatttgtctctcgtttctgcagcactcaaaatatcatcaacataatgaataatataacagtctgaaaacttgtctctaactggttgaagaacttgagctacaaaagtctgacaaatagttggactattaagcattccctgaggcaacactttccgctgaaatctggtggctggttttttattatttatggctggtatagtaaaagcaaatttttttaaatcctattttgccagaggaatggtaaaaacgcaatcctttagctcaattat

SEQ ID NO: 23725 - DNA, 305 bp, Homo sapiens
  MAP TO AC013751.3; EXPRESSED IN LUNG, SIGNAL = 8.3; EXPRESSED IN HELA, SIGNAL = 8.1; EXPRESSED IN PLACENTA, SIGNAL = 7.7; EXPRESSED IN FETAL LIVER, SIGNAL = 6.7; EXPRESSED IN BRAIN, SIGNAL = 7.3; EXPRESSED IN BONE MARROW, SIGNAL = 7.3; EXPRESSED IN ADULT LIVER, SIGNAL = 9.2; EXPRESSED IN HEART, SIGNAL = 7.2; NT HIT: X87285.1, EVALUE 2.90e+00; EST_HUMAN HIT: BF347847.1, EVALUE 2.80e-01; SWISSPROT HIT: P54557, EVALUE 4.30e+00
atgaggaaaatgagacatctctttccctaggcactgtgaatgcaaagatttcccatgtccagatattggaaagagctcaccacattccacagagcatactcatacacatgtggggcttttacgtaaaggccatggaaaagatgcagcaagagaaaaagagcacaggcaagcagtgggagcctgacaatcatcccatgagcaagctccccaaggtggttacacaaggatctgaccagactctgtctcagggattgaaccaccaagatctgtgcaaggaatctaggctttgggagagctcaaagcta

SEQ ID NO: 23726 - DNA, 325 bp, Homo sapiens
  MAP TO AP001538.1; EXPRESSED IN BONE MARROW, SIGNAL =  11; EXPRESSED IN LUNG, SIGNAL = 3.2; EXPRESSED IN ADULT LIVER, SIGNAL = 2.8; EXPRESSED IN HEART, SIGNAL = 3.6; EXPRESSED IN BRAIN, SIGNAL =  15; EXPRESSED IN PLACENTA, SIGNAL = 1.6; EXPRESSED IN HELA, SIGNAL =  10; EXPRESSED IN FETAL LIVER, SIGNAL =  16; NT HIT: gi11421256, EVALUE 0.00e+00; EST_HUMAN HIT: D52650.1, EVALUE 0.00e+00; SWISSPROT HIT: P05092, EVALUE 2.00e-49
aagcaattacttggctttgcagacgccgccgccgaggaaaaccgtgtactattagccatggtcaaccccaccgtgttcttcgacattgccgtcgacggcgagcccttgggccgcgtctcctttgagctgtttgcagacaaggtcccaaagacagcagaaaattttcgtgctctgagcactggagagaaaggatttggttataagggttcctgctttcacagaattattccagggtttatgtgtcagggtggtgacttcacacgccataatggcactggtggcaagtccatctatggggagaaatttgaagatgagaacttcatcc

SEQ ID NO: 23727 - DNA, 76 bp, Homo sapiens
  MAP TO AC022428.3; EXPRESSED IN ADULT LIVER, SIGNAL = 1.7; EXPRESSED IN BRAIN, SIGNAL = 1.6; EXPRESSED IN BONE MARROW, SIGNAL = 1.8; EXPRESSED IN LUNG, SIGNAL = 2.1; EXPRESSED IN PLACENTA, SIGNAL = 2.2; EXPRESSED IN HEART, SIGNAL = 1.4; EXPRESSED IN FETAL LIVER, SIGNAL =   2; NT HIT: D84476.1, EVALUE 1.50e-01; EST_HUMAN HIT: AL133790.1, EVALUE 2.30e-01; SWISSPROT HIT: P11247, EVALUE 9.70e+00
ctccatcttcatcagctccattcagctgaagctgttgctgttcttctgaaaagatcccaggagcttcccaatacat

SEQ ID NO: 23728 - DNA, 136 bp, Homo sapiens
  MAP TO AC019342.4; EXPRESSED IN PLACENTA, SIGNAL = 4.6; EXPRESSED IN FETAL LIVER, SIGNAL = 4.9; EXPRESSED IN HELA, SIGNAL = 7.3; EXPRESSED IN BONE MARROW, SIGNAL = 6.8; EXPRESSED IN LUNG, SIGNAL = 3.8; EXPRESSED IN ADULT LIVER, SIGNAL = 0.56; EXPRESSED IN HEART, SIGNAL = 5.2; EXPRESSED IN BRAIN, SIGNAL = 8.1; EST_HUMAN HIT: AA720574.1, EVALUE 1.00e-32; NT HIT: AL163227.2, EVALUE 3.00e-29; SWISSPROT HIT: O00337, EVALUE 4.10e+00
atgtgggaaagtttggaacttcctagagacttgttgaatggttttgaccaaaatgctgatggtaacaaggacaatgaagtccaggctgaggtggcctcagatggagataaagaaccttttgggaactggattaaag

SEQ ID NO: 23729 - DNA, 110 bp, Homo sapiens
  MAP TO AL117336.16; EXPRESSED IN LUNG, SIGNAL = 4.3; EXPRESSED IN PLACENTA, SIGNAL = 5.8; EXPRESSED IN ADULT LIVER, SIGNAL = 5.7; EXPRESSED IN HEART, SIGNAL = 5.3; EXPRESSED IN FETAL LIVER, SIGNAL = 4.8; EXPRESSED IN BRAIN, SIGNAL = 4.7; EXPRESSED IN BONE MARROW, SIGNAL =   5; EXPRESSED IN HELA, SIGNAL = 7.5; NT HIT: D83697.1, EVALUE 2.40e-01; EST_HUMAN HIT: AA309319.1, EVALUE 8.90e-02
gtagcattggtctacattaacaccaataacagaaagttaactgaattttacatgctgtttgtcccacctgtcattagatacattgaaggactgactgctgaccatcagat

SEQ ID NO: 23730 - DNA, 162 bp, Homo sapiens
  MAP TO AC011572.4; EXPRESSED IN PLACENTA, SIGNAL = 2.5; EXPRESSED IN ADULT LIVER, SIGNAL = 1.8; EXPRESSED IN HEART, SIGNAL = 2.6; EXPRESSED IN FETAL LIVER, SIGNAL = 2.3; EXPRESSED IN BRAIN, SIGNAL = 2.5; EXPRESSED IN HELA, SIGNAL = 2.2; EXPRESSED IN LUNG, SIGNAL = 2.7; EXPRESSED IN BONE MARROW, SIGNAL = 2.5; NT HIT: Z46863.1, EVALUE 9.40e-02; SWISSPROT HIT: P12370, EVALUE 6.80e+00; EST_HUMAN HIT: AI902213.1, EVALUE 8.60e+00
atggtgaaaggactcaacataaagaaaggactgttgaagctgttgaaacaatccaatcagctacttcttgacattcagacagtggtccaatctgagtggaagaaccactatgaactcttgctgtgggtcacacttgctaagaccaagccatacctcctgaca

SEQ ID NO: 23731 - DNA, 141 bp, Homo sapiens
  MAP TO AL133417.9; EXPRESSED IN ADULT LIVER, SIGNAL = 5.2; EXPRESSED IN HEART, SIGNAL = 4.3; EXPRESSED IN BRAIN, SIGNAL = 4.4; EXPRESSED IN BONE MARROW, SIGNAL = 4.4; EXPRESSED IN HELA, SIGNAL = 4.8; EXPRESSED IN LUNG, SIGNAL = 4.9; EXPRESSED IN PLACENTA, SIGNAL = 5.1; EXPRESSED IN FETAL LIVER, SIGNAL = 4.3; NT HIT: AL163278.2, EVALUE 4.90e+00; SWISSPROT HIT: P49894, EVALUE 3.10e+00
ctgcactttggatgtcttgtgcaaatttttccaagtcttcctcaggtgtctgggatcaggcaccccatcccacactgggacttgcatgagctctggcccccatttctccttttcaggatactctccaaccctctgccccat

SEQ ID NO: 23732 - DNA, 219 bp, Homo sapiens
  MAP TO AL138796.2; EXPRESSED IN PLACENTA, SIGNAL = 0.81; EXPRESSED IN ADULT LIVER, SIGNAL = 0.92; EXPRESSED IN FETAL LIVER, SIGNAL = 0.52; EXPRESSED IN BRAIN, SIGNAL = 1.2; EXPRESSED IN BONE MARROW, SIGNAL = 0.74; EXPRESSED IN HEART, SIGNAL = 4.1; SWISSPROT HIT: P09255, EVALUE 1.20e+00; NT HIT: AB007923.1, EVALUE 1.00e-102; EST_HUMAN HIT: T70176.1, EVALUE 2.00e-01
cttgttggcattctgcagctgggccttcagatctttgatgtcctttcgtaggaccaagatgttttctgacttccatatacccggaactctctgcttccctagctgttctccagggcttcctctcagaggaactagccagtgttgagccccggcgtccctgctcagagcacagcccctccatcaggaccatttccttgaggctgttgtgctcctcacact

SEQ ID NO: 23733 - DNA, 300 bp, Homo sapiens
  MAP TO AC022860.3; EXPRESSED IN HEART, SIGNAL = 1.3; EXPRESSED IN BRAIN, SIGNAL = 1.3; EXPRESSED IN BONE MARROW, SIGNAL = 1.3; EXPRESSED IN LUNG, SIGNAL = 0.94; EXPRESSED IN PLACENTA, SIGNAL =   2; EXPRESSED IN FETAL LIVER, SIGNAL = 1.2; SWISSPROT HIT: P50407, EVALUE 2.80e-01; EST_HUMAN HIT: AA442630.1, EVALUE 9.00e-20; NT HIT: AL163201.2, EVALUE 9.00e-22
gatcacaggcctaagcccactgaccccatcacctgtcacctggcccttgtccacttagggatgctcctcattgtggtcttcttggcatctccagacctgtttgagtcactgtattttcagaatgacttcaagtgtaaggcattcttctgcatgcacagggtgatgaggagcctctccatctgcaccacctgcctcctgagcatgctccaggctgtcgccatcagccctggcacctcctggtctgcaaggattaaacagaaattcaaaggttacatctttcactccttcttcttcctatgg

SEQ ID NO: 23734 - DNA, 148 bp, Homo sapiens
  MAP TO AC022474.3; EXPRESSED IN LUNG, SIGNAL = 2.1; EXPRESSED IN HELA, SIGNAL = 3.4; EXPRESSED IN HEART, SIGNAL = 1.9; EXPRESSED IN BRAIN, SIGNAL = 1.7; EXPRESSED IN BONE MARROW, SIGNAL = 1.9; EXPRESSED IN PLACENTA, SIGNAL =   2; EXPRESSED IN ADULT LIVER, SIGNAL = 2.4; EXPRESSED IN FETAL LIVER, SIGNAL = 1.8; SWISSPROT HIT: P52079, EVALUE 3.10e+00; NT HIT: gi6754779, EVALUE 8.50e-02; EST_HUMAN HIT: AU158230.1, EVALUE 7.80e+00
atgataccaataagatggtttaacagaagatgcctcatcatcactctccccagaatatctagcaactactcaaaagttaagaatctctctgaattcagcaaacttgaggaggaacttggatccacagaaacaagaaaaaccttgaccg

SEQ ID NO: 23735 - DNA, 182 bp, Homo sapiens
  MAP TO AL139115.2; EXPRESSED IN PLACENTA, SIGNAL = 4.4; EXPRESSED IN ADULT LIVER, SIGNAL = 4.1; EXPRESSED IN FETAL LIVER, SIGNAL = 3.8; EXPRESSED IN BRAIN, SIGNAL = 4.9; EXPRESSED IN BONE MARROW, SIGNAL = 3.8; EXPRESSED IN LUNG, SIGNAL = 3.9; EXPRESSED IN HEART, SIGNAL = 3.9; EXPRESSED IN HELA, SIGNAL = 3.8; SWISSPROT HIT: Q99962, EVALUE 1.00e-32; NT HIT: gi11428813, EVALUE 2.00e-98; EST_HUMAN HIT: AL134218.1, EVALUE 1.00e-94
cagaatttccacataattgatggggaagaagcctgaatggccatgcagcatcccctcataccagttctcatcaatttggttagtgagtgtgatgatatcgccctctttaaatcccaactccccttcattttcaggttcaaagtcgtacagagctcggcagcagggctgatccatttggacac

SEQ ID NO: 23736 - DNA, 117 bp, Homo sapiens
  MAP TO AL162261.1; EXPRESSED IN LUNG, SIGNAL = 0.97; EXPRESSED IN PLACENTA, SIGNAL = 1.2; EXPRESSED IN FETAL LIVER, SIGNAL = 0.7; EXPRESSED IN BONE MARROW, SIGNAL = 0.71; EXPRESSED IN ADULT LIVER, SIGNAL = 1.1; EXPRESSED IN HEART, SIGNAL = 1.7; EXPRESSED IN BRAIN, SIGNAL = 0.98; SWISSPROT HIT: P48722, EVALUE 1.80e+00; NT HIT: AB007923.1, EVALUE 1.00e-27; EST_HUMAN HIT: AI280018.1, EVALUE 3.00e-14
gtgaacccttgctgaagcaggacagtaacaaggtccaggtggacctccaggactcgggccacgagacttgtggccaaagcaagaatgaggctgaacaggaggaaaccaccagtcccg

SEQ ID NO: 23737 - DNA, 133 bp, Homo sapiens
  MAP TO AC024193.2; EXPRESSED IN PLACENTA, SIGNAL = 5.8; EXPRESSED IN ADULT LIVER, SIGNAL = 5.9; EXPRESSED IN HELA, SIGNAL = 9.1; EXPRESSED IN FETAL LIVER, SIGNAL = 6.4; EXPRESSED IN BRAIN, SIGNAL = 5.6; EXPRESSED IN BONE MARROW, SIGNAL = 5.8; EXPRESSED IN LUNG, SIGNAL = 6.8; EXPRESSED IN HEART, SIGNAL = 6.9; SWISSPROT HIT: P21880, EVALUE 7.00e+00; NT HIT: M61132.1, EVALUE 5.00e-03; EST_HUMAN HIT: AL048210.1, EVALUE 4.40e-01
atgaaggctgcagcagtcaccaccgacttggccaagcagggtgcaaccttctctgcatctattgtcttctgtcatcctggcactggctctctaaggttgattccatcatccctgtcttccaggggcacagatg

SEQ ID NO: 23738 - DNA, 80 bp, Homo sapiens
  MAP TO AC015954.3; EXPRESSED IN LUNG, SIGNAL = 1.7; EXPRESSED IN ADULT LIVER, SIGNAL = 1.7; EXPRESSED IN BRAIN, SIGNAL = 1.8; EXPRESSED IN BONE MARROW, SIGNAL = 1.6; EXPRESSED IN PLACENTA, SIGNAL = 1.6; EXPRESSED IN HEART, SIGNAL = 1.8; EXPRESSED IN FETAL LIVER, SIGNAL = 1.8; EST_HUMAN HIT: BF664979.1, EVALUE 9.50e-01; NT HIT: AE001247.1, EVALUE 6.40e-01
acccgttgtccactgccggaccatgtatcatgctctattttccatatgtcctgtatttcaatgtggactgaaactgaaca

SEQ ID NO: 23739 - DNA, 108 bp, Homo sapiens
  MAP TO AL157997.2; EXPRESSED IN HELA, SIGNAL = 2.7; EXPRESSED IN BONE MARROW, SIGNAL = 1.9; EXPRESSED IN LUNG, SIGNAL = 2.7; EXPRESSED IN ADULT LIVER, SIGNAL = 2.3; EXPRESSED IN HEART, SIGNAL = 1.9; EXPRESSED IN BRAIN, SIGNAL = 1.7; EXPRESSED IN PLACENTA, SIGNAL =   2; EXPRESSED IN FETAL LIVER, SIGNAL =   2; SWISSPROT HIT: P15436, EVALUE 7.20e+00; EST_HUMAN HIT: AI677788.1, EVALUE 3.40e-01; NT HIT: gi9055249, EVALUE 5.90e-02
atggtgtctagaaactcagacaacttcatcattccatatttgcatccaagagagagaaagaaaaactacaatcattttccatttacccatcaacccatcaacctccaa

SEQ ID NO: 23740 - DNA, 205 bp, Homo sapiens
  MAP TO AL118505.13; EXPRESSED IN ADULT LIVER, SIGNAL = 1.6; EXPRESSED IN PLACENTA, SIGNAL = 1.8; EXPRESSED IN HEART, SIGNAL = 1.9; EXPRESSED IN FETAL LIVER, SIGNAL = 1.5; EXPRESSED IN BRAIN, SIGNAL = 1.6; EXPRESSED IN BONE MARROW, SIGNAL = 1.8; EXPRESSED IN LUNG, SIGNAL = 2.5; EST_HUMAN HIT: BE389058.1, EVALUE 2.00e-44; SWISSPROT HIT: Q01101, EVALUE 2.50e-01
ttgagtcagggtggatcagagacctgccgaagctcacatccctctacctgaggaagatgcctcggctgacgaccctggagggggacattttcaagatgacccccaacctgcagcagctggactgtcaggactccccagcacttgcttctgtcgccacacacatctttcaagatactccacatctacaggtccttctgttccagaa

SEQ ID NO: 23741 - DNA, 191 bp, Homo sapiens
  MAP TO AC022470.3; EXPRESSED IN PLACENTA, SIGNAL =   1; EXPRESSED IN HEART, SIGNAL = 1.2; EXPRESSED IN FETAL LIVER, SIGNAL = 1.1; EXPRESSED IN BONE MARROW, SIGNAL = 0.92; EXPRESSED IN LUNG, SIGNAL = 1.1; EXPRESSED IN ADULT LIVER, SIGNAL = 1.1; EXPRESSED IN BRAIN, SIGNAL = 2.2; NT HIT: gi11436995, EVALUE 1.00e-103; EST_HUMAN HIT: AU140344.1, EVALUE 1.00e-103; SWISSPROT HIT: P37275, EVALUE 1.70e+00
agagttggctccgtggatgacagtgctggggctgctgctggctgtggtgctagagctggagcgcagtggggggttttcctgagagttctcactgtctgggccaggctcttctgcttccttctgattctgcagctcgtcaatctccacctcgctggcatcccccagtgctgcatgtgtcagagggtccacat

SEQ ID NO: 23742 - DNA, 468 bp, Homo sapiens
  MAP TO AC019099.3; EXPRESSED IN ADULT LIVER, SIGNAL = 4.5; EXPRESSED IN HELA, SIGNAL = 6.8; EXPRESSED IN HEART, SIGNAL = 4.5; EXPRESSED IN BRAIN, SIGNAL =   4; EXPRESSED IN PLACENTA, SIGNAL = 4.1; EXPRESSED IN FETAL LIVER, SIGNAL =   4; EXPRESSED IN BONE MARROW, SIGNAL = 3.9; EXPRESSED IN LUNG, SIGNAL = 4.5; SWISSPROT HIT: O75909, EVALUE 4.00e-11; NT HIT: AF287352.1, EVALUE 4.60e+00; EST_HUMAN HIT: BE378495.1, EVALUE 0.00e+00
tcaatgattggtaaggtcgtcaccaaactcctgccaccacggcttctcagcctcgacctcagcgggcacctcaactccgcagacctgcagggccaggtagagcactgccacggtgatgtgctgggcctggaagtggaggcacagccccccgtggtaggtgtcctgcagcagggcccaggcagtgacggcaacgggggtccgctgccaggtatggcggttcagccagttcttgagggaaaccaggtagtggagcaggtacttgtgtggatgctggaaggagacttggaagcgcagaactctcagcatgagaagctgacactgcacaatgctgtccctaagctcccagaagagggagtccaattccaggggctcatcgcttgggtttaagtacctgttggacacattgatgatgtcacgagtccgcaggtgctgctcttccactttgccggccaagtaaatggaagacat

SEQ ID NO: 23743 - DNA, 160 bp, Homo sapiens
  MAP TO AC020719.3; EXPRESSED IN LUNG, SIGNAL = 2.8; EXPRESSED IN PLACENTA, SIGNAL = 2.9; EXPRESSED IN ADULT LIVER, SIGNAL = 3.1; EXPRESSED IN HEART, SIGNAL = 2.3; EXPRESSED IN FETAL LIVER, SIGNAL = 3.5; EXPRESSED IN BRAIN, SIGNAL = 2.7; EXPRESSED IN HELA, SIGNAL = 3.7; EXPRESSED IN BONE MARROW, SIGNAL = 2.9; EST_HUMAN HIT: BE958970.1, EVALUE 3.50e-02; NT HIT: gi4826949, EVALUE 3.70e-01; SWISSPROT HIT: P36291, EVALUE 1.80e+00
ggtcctcattttctgcgcaggaaacctgtcactcctgtgcattttctccccttatctctgcaatgcaggcctgattttcaacacagtctgcctgtggctctatgagaagagaatctctttaaatgctaccttgaaggactttcagattttacgatcactc

SEQ ID NO: 23744 - DNA, 175 bp, Homo sapiens
  MAP TO AC009278.3; EXPRESSED IN PLACENTA, SIGNAL =   2; EXPRESSED IN ADULT LIVER, SIGNAL = 1.6; EXPRESSED IN HEART, SIGNAL =   2; EXPRESSED IN FETAL LIVER, SIGNAL = 1.8; EXPRESSED IN BRAIN, SIGNAL = 1.6; EXPRESSED IN BONE MARROW, SIGNAL = 1.8; EXPRESSED IN LUNG, SIGNAL = 1.8; EST_HUMAN HIT: Z38293.1, EVALUE 9.00e-31; SWISSPROT HIT: O14426, EVALUE 4.50e-01; NT HIT: AJ131016.1, EVALUE 7.00e-03
ttatggcaagagagctttgattggatccataccaaggctgtcaatctatcagttttgtgagcttcaaagttttaaagctaggaatatgtcctatcaccgtgttatttttcttgaaagttttggtaaagtagatgatgattgtacatctgctgcaatgatggtggacctctgttag

SEQ ID NO: 23745 - DNA, 128 bp, Homo sapiens
  MAP TO AC009466.2; EXPRESSED IN LUNG, SIGNAL = 1.7; EXPRESSED IN PLACENTA, SIGNAL = 1.6; EXPRESSED IN HEART, SIGNAL = 1.3; EXPRESSED IN FETAL LIVER, SIGNAL = 2.1; EXPRESSED IN BONE MARROW, SIGNAL = 1.9; EXPRESSED IN ADULT LIVER, SIGNAL = 1.5; EXPRESSED IN BRAIN, SIGNAL = 2.3; EST_HUMAN HIT: BF308000.1, EVALUE 1.70e+00; SWISSPROT HIT: P27736, EVALUE 3.10e+00
tcagccttgggcctcagataaccacagctttgggacacgcaggtagacccaataacaataatcctgcctttcaaggtcctctaactcaagtcttcccagctcttccccatcgtgaaggtgctgctcac

SEQ ID NO: 23746 - DNA, 518 bp, Homo sapiens
  MAP TO AL121723.35; EXPRESSED IN HEART, SIGNAL = 1.3; EXPRESSED IN BRAIN, SIGNAL = 2.6; EXPRESSED IN LUNG, SIGNAL = 2.6; EXPRESSED IN HELA, SIGNAL = 2.2; EXPRESSED IN PLACENTA, SIGNAL = 2.1; EXPRESSED IN ADULT LIVER, SIGNAL = 2.3; EXPRESSED IN FETAL LIVER, SIGNAL = 2.8; EXPRESSED IN BONE MARROW, SIGNAL =   4; SWISSPROT HIT: P50801, EVALUE 3.80e-01; NT HIT: AF110322.1, EVALUE 0.00e+00; EST_HUMAN HIT: AA410545.1, EVALUE 0.00e+00
ctcttggagatgtcagcttcaatcagcttctgcagctccttggtcttctccagcagcaggtccagcttaggctccagagcctcctgctcctcaagtgcctcctgctgcttctgcaccatcagctctttcttcaaagccagcagctgggactgcttcaggttttgctggaggaattcagtcactcggtccacataccttggtgaggccaggttcataaacaggtgttgcagttgaagactggtaagtttgccaatcagatcttccaacactgacaccatgataaccatcttctctttggtctggccctgcaggatgactggagccagctggaactggctcacagacaggacatctgccttctcactcaactccactgctctctgggctaagaagatctcaagttccatgagctcatcaaggaactgattctgggtctcagtgtattcaagaagtgtcagagcatctgggcccctggcaacaccttctggagcctggattcctgcttccaccactgtgat

SEQ ID NO: 23747 - DNA, 454 bp, Homo sapiens
  MAP TO AC025749.2; EXPRESSED IN PLACENTA, SIGNAL = 1.3; EXPRESSED IN ADULT LIVER, SIGNAL = 2.1; EXPRESSED IN HEART, SIGNAL = 4.3; EXPRESSED IN FETAL LIVER, SIGNAL = 2.4; EXPRESSED IN BRAIN, SIGNAL = 2.9; EXPRESSED IN BONE MARROW, SIGNAL = 3.3; EXPRESSED IN LUNG, SIGNAL = 1.9; EST_HUMAN HIT: BF313946.1, EVALUE 0.00e+00; NT HIT: gi4758075, EVALUE 0.00e+00; SWISSPROT HIT: O75390, EVALUE 3.00e-85
atgaacgggctggcagggcctctccatggactggcaaatcaggaagtgcttgtctggctaacacagctgcagaaggaagttggcaaagatgtgtcagatgagaagttacgagactacatctggaacacactcaactcaggacgggctgttccaggctatggccatgcagtactaaggaagactgatccacgatatacctgtcagcgagagtttgctctgaaacacctgcctaatgaccccatgtttaagttggttgctcagctatgcaagattgtgcccaatgtcctcttagagcagggtaaggccaagaatccttggcccaatgtagatgctcacagtggggtgctgctccagtattatggcatgacggagatgaattactacacagtcctgtttggggtgtcacgagcattgggtgtactggcacagctcatctggagccgagccttaggct

SEQ ID NO: 23748 - DNA, 113 bp, Homo sapiens
  MAP TO AC006460.3; EXPRESSED IN ADULT LIVER, SIGNAL = 0.93; EXPRESSED IN HEART, SIGNAL = 1.3; EXPRESSED IN FETAL LIVER, SIGNAL = 1.2; EXPRESSED IN BRAIN, SIGNAL = 1.1; EXPRESSED IN LUNG, SIGNAL =   1; EXPRESSED IN PLACENTA, SIGNAL =   1; EXPRESSED IN BONE MARROW, SIGNAL =   1; NT HIT: AF045452.1, EVALUE 2.00e-57; SWISSPROT HIT: O35589, EVALUE 1.00e-14; EST_HUMAN HIT: AI424555.1, EVALUE 3.00e-57
tgagtgggactttgcctcactggggtaaagtctgctcagctccccatccaccacaaaatgatggggttgtctgttctgtaaattaggcattcggagattcaaaggtctttctc

SEQ ID NO: 23749 - DNA, 210 bp, Homo sapiens
  MAP TO AC013612.3; EXPRESSED IN PLACENTA, SIGNAL = 6.8; EXPRESSED IN HELA, SIGNAL =  12; EXPRESSED IN FETAL LIVER, SIGNAL = 6.5; EXPRESSED IN BONE MARROW, SIGNAL =   7; EXPRESSED IN LUNG, SIGNAL = 6.5; EXPRESSED IN ADULT LIVER, SIGNAL = 8.3; EXPRESSED IN HEART, SIGNAL = 6.7; EXPRESSED IN BRAIN, SIGNAL = 5.9; EST_HUMAN HIT: BE144526.1, EVALUE 7.00e-29; SWISSPROT HIT: P11369, EVALUE 2.00e-17; NT HIT: AL163209.2, EVALUE 9.00e-46
atgaaggacaaaaacgatatgatcttttcaattgatattgaaaaagaattcaaaaaaattcagcatctcttcatgataaaaaccatcaaaaaactgggtatagaaggaacatacctcaacacaataaaagccatatatgacagactcatggttagcatcatactgaatggagaaacactgaaagcctttcctgtaaaatctggaatatga

SEQ ID NO: 23750 - DNA, 129 bp, Homo sapiens
  MAP TO AC016113.4; EXPRESSED IN LUNG, SIGNAL = 2.5; EXPRESSED IN PLACENTA, SIGNAL = 1.7; EXPRESSED IN ADULT LIVER, SIGNAL =   3; EXPRESSED IN HELA, SIGNAL = 2.2; EXPRESSED IN HEART, SIGNAL = 1.6; EXPRESSED IN FETAL LIVER, SIGNAL = 3.5; EXPRESSED IN BRAIN, SIGNAL = 3.6; EXPRESSED IN BONE MARROW, SIGNAL =   4; NT HIT: AB014607.1, EVALUE 2.00e-14; EST_HUMAN HIT: BE670617.1, EVALUE 2.00e-30; SWISSPROT HIT: O29313, EVALUE 9.20e+00
gtggatggctgtgttcaacgggtgttgcttgtgacagttggggtcctcctcagagtcattctccacatggctgcaactggggggagctcgggatcctcctggaatctcttcctcagcatctgtttcatg

SEQ ID NO: 23751 - DNA, 82 bp, Homo sapiens
  MAP TO AC021498.4; EXPRESSED IN HELA, SIGNAL = 4.3; EXPRESSED IN BONE MARROW, SIGNAL = 3.4; EXPRESSED IN PLACENTA, SIGNAL = 4.1; EXPRESSED IN ADULT LIVER, SIGNAL = 4.6; EXPRESSED IN FETAL LIVER, SIGNAL =   3; EXPRESSED IN BRAIN, SIGNAL = 3.7; EXPRESSED IN LUNG, SIGNAL = 3.9; EXPRESSED IN HEART, SIGNAL =   4; NT HIT: U79746.1, EVALUE 2.60e+00; EST_HUMAN HIT: H53236.1, EVALUE 2.50e-01
gcggcacccctgcttcaggtggccaaaatagaggacaggcaattgtactaccgattgtcagtaggagaaccagagaataaag

SEQ ID NO: 23752 - DNA, 289 bp, Homo sapiens
  MAP TO AL158091.7; EXPRESSED IN LUNG, SIGNAL = 1.6; EXPRESSED IN PLACENTA, SIGNAL = 1.4; EXPRESSED IN FETAL LIVER, SIGNAL = 1.3; EXPRESSED IN BONE MARROW, SIGNAL = 1.4; EXPRESSED IN ADULT LIVER, SIGNAL = 1.4; EXPRESSED IN HEART, SIGNAL = 1.4; EXPRESSED IN BRAIN, SIGNAL = 1.5; EST_HUMAN HIT: AW139673.1, EVALUE 0.00e+00; SWISSPROT HIT: Q00975, EVALUE 1.30e-02
ttacgggacagcgagtgggcccctctgggcaggtactcgaacagcagggagccgtcatcccccagcacgtcggccttcagcgacagcaggctgttcttactcatgagcgccgcgcgcaggttggccaccgcggtggcctgatgcagggcgtcgtccttctctggggtgaggggagggcccagatagctggcttctcctcccaggagaccctcctccacctgtgcatagagctcggccctctctcctcggctgtcggagctgctggcttcggtgacggacaggtccgcat

SEQ ID NO: 23753 - DNA, 368 bp, Homo sapiens
  MAP TO AC025324.2; EXPRESSED IN BONE MARROW, SIGNAL = 4.2; EXPRESSED IN LUNG, SIGNAL = 3.7; EXPRESSED IN PLACENTA, SIGNAL = 3.7; EXPRESSED IN ADULT LIVER, SIGNAL = 4.4; EXPRESSED IN HEART, SIGNAL = 3.7; EXPRESSED IN FETAL LIVER, SIGNAL =   4; EXPRESSED IN BRAIN, SIGNAL = 3.8; EXPRESSED IN HELA, SIGNAL = 4.9; EST_HUMAN HIT: AA810253.1, EVALUE 5.30e+00; NT HIT: AE004447.1, EVALUE 3.60e+00
gtggctctgactggccctgtggctgtggctgtgagtggcactgtggctgtggctatgactgatactgtgtcttggctggtgctatggctgtagctggcactgtggctgtggctgtgagtggcactgtggctgtggctatgactggtactgtgtcttggctggtgctatggctgtagctggcactgtggctgtggctgtggctctgactggccctgtggctgtggctgctgctgtggatgtagctggcactgtggctgtagctggtgctgtgactgtggctgtggctggtgctgtggctctgactggccctgtggctgtggctatgactggcaccgtggccgtggctgtggctggtgctggtgtgatcg

SEQ ID NO: 23754 - DNA, 99 bp, Homo sapiens
  MAP TO AC012662.5; EXPRESSED IN PLACENTA, SIGNAL = 0.84; EXPRESSED IN ADULT LIVER, SIGNAL = 0.91; EXPRESSED IN FETAL LIVER, SIGNAL = 1.2; EXPRESSED IN BRAIN, SIGNAL = 1.7; EXPRESSED IN BONE MARROW, SIGNAL = 0.83; EXPRESSED IN HEART, SIGNAL = 1.9; EXPRESSED IN LUNG, SIGNAL = 1.2; SWISSPROT HIT: P35661, EVALUE 3.20e+00; NT HIT: AF026802.1, EVALUE 8.30e-01; EST_HUMAN HIT: R45318.1, EVALUE 3.10e-01
cctaccctgccaggcctgctgaagctgttttccgatgaaattaatgtcatacccaatttttaccttaaccactttgaatacattcacccttttaggctc

SEQ ID NO: 23755 - DNA, 174 bp, Homo sapiens
  MAP TO AL139352.8; EXPRESSED IN LUNG, SIGNAL = 1.2; EXPRESSED IN PLACENTA, SIGNAL = 1.1; EXPRESSED IN ADULT LIVER, SIGNAL = 1.6; EXPRESSED IN HEART, SIGNAL = 1.6; EXPRESSED IN FETAL LIVER, SIGNAL = 1.3; EXPRESSED IN BRAIN, SIGNAL = 1.4; EXPRESSED IN BONE MARROW, SIGNAL = 1.3; SWISSPROT HIT: Q9Y2B9, EVALUE 2.00e-22; NT HIT: AF182032.1, EVALUE 1.00e-93; EST_HUMAN HIT: BE898478.1, EVALUE 2.00e-93
gcctgaggagcgatgcgacaggcatgatggaggtcgagtcctcctactcggacttcatctcctgtgaccggacaggccgtcggaatgcggtccctgacatccagggagactcagaggctgtgagcgtgaggaagctggctggagacatgggcgagctggcactcgagggggcag

SEQ ID NO: 23756 - DNA, 98 bp, Homo sapiens
  MAP TO AC008521.5; EXPRESSED IN ADULT LIVER, SIGNAL = 2.3; EXPRESSED IN HEART, SIGNAL = 1.8; EXPRESSED IN BRAIN, SIGNAL = 2.1; EXPRESSED IN LUNG, SIGNAL = 2.2; EXPRESSED IN HELA, SIGNAL = 3.2; EXPRESSED IN PLACENTA, SIGNAL = 2.1; EXPRESSED IN FETAL LIVER, SIGNAL =   2; EXPRESSED IN BONE MARROW, SIGNAL =   2; NT HIT: AL161535.2, EVALUE 5.30e-02; SWISSPROT HIT: Q61085, EVALUE 8.30e-01; EST_HUMAN HIT: H85494.1, EVALUE 3.00e-38
ccggtcctcatccgcacggctttcaggatctgctgattcaaagcagctctttgattctgcaatttactccggccggtttgtgcaaggggattacagcc

SEQ ID NO: 23757 - DNA, 179 bp, Homo sapiens
  MAP TO AL031661.28; EXPRESSED IN LUNG, SIGNAL = 1.5; EXPRESSED IN ADULT LIVER, SIGNAL = 1.8; EXPRESSED IN HEART, SIGNAL = 1.7; EXPRESSED IN BRAIN, SIGNAL = 1.6; EXPRESSED IN PLACENTA, SIGNAL = 1.7; EXPRESSED IN FETAL LIVER, SIGNAL = 1.6; EXPRESSED IN BONE MARROW, SIGNAL = 1.5; NT HIT: AL163218.2, EVALUE 6.50e+00; EST_HUMAN HIT: AW875126.1, EVALUE 2.40e+00
caccattgtacccatcatcatcctggtgatccccacggatcatcagcagcagcatctctgtcatcatcatcatcatcatcatcatcatcatcacaacagataacattgctagaccagtggttcttaaagtgtggtcctacatcaaaagcattagcattacttggaaagttgttagaaat

SEQ ID NO: 23758 - DNA, 110 bp, Homo sapiens
  MAP TO AL049870.3; EXPRESSED IN LUNG, SIGNAL = 2.4; EXPRESSED IN PLACENTA, SIGNAL = 4.6; EXPRESSED IN ADULT LIVER, SIGNAL = 2.8; EXPRESSED IN HEART, SIGNAL = 2.2; EXPRESSED IN BONE MARROW, SIGNAL = 2.5; EXPRESSED IN BRAIN, SIGNAL = 2.3; EXPRESSED IN FETAL LIVER, SIGNAL = 2.5; NT HIT: AF208161.1, EVALUE 6.00e-36; SWISSPROT HIT: P03384, EVALUE 7.00e-04; EST_HUMAN HIT: T70359.1, EVALUE 9.00e-36
aagagccatttgtagctttaccgcttcgattctggaagagaccaatttaataaggaggttaaagatacagggtccaaagaagagtaacaatattatagctgctagaggtc

SEQ ID NO: 23759 - DNA, 201 bp, Homo sapiens
  MAP TO AL136089.8; EXPRESSED IN LUNG, SIGNAL = 8.6; EXPRESSED IN PLACENTA, SIGNAL = 8.7; EXPRESSED IN HEART, SIGNAL = 8.4; EXPRESSED IN FETAL LIVER, SIGNAL =  11; EXPRESSED IN BONE MARROW, SIGNAL =  12; EXPRESSED IN ADULT LIVER, SIGNAL = 7.9; EXPRESSED IN HELA, SIGNAL =  11; EXPRESSED IN BRAIN, SIGNAL =   9; NT HIT: AF147880.1, EVALUE 2.00e-52; EST_HUMAN HIT: BE387085.1, EVALUE 3.00e-52; SWISSPROT HIT: P05218, EVALUE 2.00e-25
gccagtcactgtggcaaccagatcagtgtcaaattcttggaagtgatccatgatgaacatggcattgaccccaccatcacctaccatggtgacagtgacctgcagctggactgcatctccatgtactacgacgaagccacaggtggcaaacatgttcttcataccatcctggtagatctagaacctgggaccatggactct

SEQ ID NO: 23760 - DNA, 204 bp, Homo sapiens
  MAP TO AC015908.4; EXPRESSED IN FETAL LIVER, SIGNAL = 2.8; EXPRESSED IN PLACENTA, SIGNAL = 3.8; EXPRESSED IN HELA, SIGNAL = 4.8; EXPRESSED IN BONE MARROW, SIGNAL = 2.9; EXPRESSED IN LUNG, SIGNAL = 3.6; EXPRESSED IN ADULT LIVER, SIGNAL = 3.8; EXPRESSED IN HEART, SIGNAL = 3.7; EXPRESSED IN BRAIN, SIGNAL = 2.7; EST_HUMAN HIT: BE154006.1, EVALUE 4.60e-02; SWISSPROT HIT: P08547, EVALUE 7.50e-01; NT HIT: AF044083.1, EVALUE 4.80e-01
attttctactccaggtgcatttttttcttcagtttgaaaaactccatgaaatatccctaaggttcttaagggaattgctttgtatttataaattactttgtgtagaactgacctactggggcttcccaccaggaacacaatttgtctctgtttattcacatcttcctttgtggccttctggacagtttcacaacttttcttcat

SEQ ID NO: 23761 - DNA, 239 bp, Homo sapiens
  MAP TO AC007000.2; EXPRESSED IN ADULT LIVER, SIGNAL = 2.8; EXPRESSED IN FETAL LIVER, SIGNAL = 2.7; EXPRESSED IN BRAIN, SIGNAL = 2.8; EXPRESSED IN LUNG, SIGNAL =   2; EXPRESSED IN PLACENTA, SIGNAL = 2.8; EXPRESSED IN HEART, SIGNAL = 1.7; EXPRESSED IN BONE MARROW, SIGNAL = 3.6; SWISSPROT HIT: Q24325, EVALUE 1.20e+00; NT HIT: U29131.1, EVALUE 1.40e-01; EST_HUMAN HIT: AA077498.1, EVALUE 1.00e-109
ctgcagcgcatggaacaaaagaagtggaaccgatacttccggaacaaggctatctgagagcagttcttcctggccctcgggttcatgtaacggcataactggaaccaaagctcactgagcaagggtatatgagagcgggtctcctcgtacaggaagtagaagatgttttgtttgggggcctcgtcgtcctcctccatgtcattggccagatagctgaggacagaaatcaggttgctgct

SEQ ID NO: 23762 - DNA, 88 bp, Homo sapiens
  MAP TO AC024259.5; EXPRESSED IN BONE MARROW, SIGNAL = 4.9; EXPRESSED IN LUNG, SIGNAL = 3.6; EXPRESSED IN BRAIN, SIGNAL = 4.3; EXPRESSED IN HEART, SIGNAL = 4.7; EXPRESSED IN HELA, SIGNAL =   3; EXPRESSED IN ADULT LIVER, SIGNAL = 3.7; EXPRESSED IN PLACENTA, SIGNAL = 4.3; EXPRESSED IN FETAL LIVER, SIGNAL = 4.1; NT HIT: U60822.1, EVALUE 3.00e-15; EST_HUMAN HIT: AI002836.1, EVALUE 3.00e-16; SWISSPROT HIT: P27400, EVALUE 7.30e+00
atggacaatggagtccaggctgagttggtctcacatggagatgaggaacttctggggaagtggagcaaagctgactgttgctatgctt

SEQ ID NO: 23763 - DNA, 142 bp, Homo sapiens
  MAP TO AL158138.1; EXPRESSED IN ADULT LIVER, SIGNAL =   3; EXPRESSED IN HELA, SIGNAL = 2.6; EXPRESSED IN BRAIN, SIGNAL = 2.9; EXPRESSED IN BONE MARROW, SIGNAL = 3.6; EXPRESSED IN LUNG, SIGNAL = 3.5; EXPRESSED IN PLACENTA, SIGNAL = 3.3; EXPRESSED IN HEART, SIGNAL = 3.4; EXPRESSED IN FETAL LIVER, SIGNAL = 2.5; EST_HUMAN HIT: BF360206.1, EVALUE 1.90e+00; SWISSPROT HIT: O83195, EVALUE 5.30e+00; NT HIT: M90464.1, EVALUE 5.00e+00
atgaatgtaacacaatacattcctaaacacctggatttcctggagactgactatatcaccatattcacttgtctgcttccctgttcttaccaggtcctctcatctaagatgaacttcaactatagagtcaagcccagcaaca

SEQ ID NO: 23764 - DNA, 245 bp, Homo sapiens
  MAP TO AL138769.5; EXPRESSED IN ADULT LIVER, SIGNAL = 1.4; EXPRESSED IN HEART, SIGNAL = 1.4; EXPRESSED IN FETAL LIVER, SIGNAL = 1.3; EXPRESSED IN BRAIN, SIGNAL = 1.3; EXPRESSED IN BONE MARROW, SIGNAL = 1.3; EXPRESSED IN LUNG, SIGNAL = 1.4; EXPRESSED IN PLACENTA, SIGNAL = 1.5; SWISSPROT HIT: P24174, EVALUE 1.20e+00; EST_HUMAN HIT: AI887191.1, EVALUE 5.60e-02; NT HIT: M60675.1, EVALUE 3.80e-02
taaatggttagccagctgctccgggcagacctccagaggctttgcttctcccacattctccacatccaggccatcaacaaccttgtgggttccgcgttccacctgcagtcgctcctgctgtggccactgctttcttacgccccagaccgagtacacatgtttcccatctggactggtcacccgaccatcatctctcacctggacttgagattgtgctcggatcccccagtggcttcctcgcatac

SEQ ID NO: 23765 - DNA, 83 bp, Homo sapiens
  MAP TO AL133354.8; EXPRESSED IN HELA, SIGNAL = 4.7; EXPRESSED IN LUNG, SIGNAL = 4.3; EXPRESSED IN PLACENTA, SIGNAL = 4.2; EXPRESSED IN ADULT LIVER, SIGNAL = 4.6; EXPRESSED IN FETAL LIVER, SIGNAL = 3.6; EXPRESSED IN BRAIN, SIGNAL = 3.4; EXPRESSED IN BONE MARROW, SIGNAL =   4; EXPRESSED IN HEART, SIGNAL = 4.1; NT HIT: X62866.1, EVALUE 1.70e-01; EST_HUMAN HIT: AA093305.1, EVALUE 6.40e-02
tcaggccattgggtgtttggggttggcttttggttggtttgcttcattctcctctgagcacatggctgtcaactccaaggtac

SEQ ID NO: 23766 - DNA, 216 bp, Homo sapiens
  MAP TO AC018511.3; EXPRESSED IN BONE MARROW, SIGNAL =   1; EXPRESSED IN ADULT LIVER, SIGNAL = 0.56; EXPRESSED IN HEART, SIGNAL = 1.2; EXPRESSED IN BRAIN, SIGNAL =   1; EXPRESSED IN PLACENTA, SIGNAL = 0.94; EXPRESSED IN FETAL LIVER, SIGNAL = 0.89; NT HIT: AB002381.1, EVALUE 1.00e-118; EST_HUMAN HIT: AW748438.1, EVALUE 1.00e-113; SWISSPROT HIT: Q92794, EVALUE 4.00e-25
aagagaaggccaagcagggtctcctgaaaagcctctctccgatctgggccgtctctcctacctggcatattggaagagcgtcatcttggagtatctctaccaccaccatgagaggcacatcagcatcaaggcaattagcagagcgacgggcatgtgcccacatgacattgccaccactctgcagcacctccacatgatcgacaagagagatggcag

SEQ ID NO: 23767 - DNA, 151 bp, Homo sapiens
  MAP TO AL157376.1; EXPRESSED IN PLACENTA, SIGNAL = 4.9; EXPRESSED IN ADULT LIVER, SIGNAL = 8.5; EXPRESSED IN HELA, SIGNAL = 7.2; EXPRESSED IN FETAL LIVER, SIGNAL =  10; EXPRESSED IN BRAIN, SIGNAL =  11; EXPRESSED IN BONE MARROW, SIGNAL =  11; EXPRESSED IN LUNG, SIGNAL = 6.9; EXPRESSED IN HEART, SIGNAL = 6.8; SWISSPROT HIT: Q10396, EVALUE 9.10e-02; NT HIT: D14718.1, EVALUE 7.00e-21; EST_HUMAN HIT: AA468646.1, EVALUE 1.00e-20
aagccacagcttgagctctatgttggcccctttcagccacagctggagaagctgggatgctgggcacaaagtccctaggcctggcccaggaaaccacttttccctcctgggcctctgggtctgtgatggcaggggctgctgcgaacacctc

SEQ ID NO: 23768 - DNA, 136 bp, Homo sapiens
  MAP TO AL136172.12; EXPRESSED IN LUNG, SIGNAL = 1.4; EXPRESSED IN PLACENTA, SIGNAL = 1.3; EXPRESSED IN ADULT LIVER, SIGNAL = 1.3; EXPRESSED IN BRAIN, SIGNAL =   1; EXPRESSED IN FETAL LIVER, SIGNAL = 1.3; EXPRESSED IN HEART, SIGNAL = 1.5; EXPRESSED IN BONE MARROW, SIGNAL = 1.6; NT HIT: AF275948.1, EVALUE 4.70e+00; EST_HUMAN HIT: AA705457.1, EVALUE 7.00e-71; SWISSPROT HIT: Q03164, EVALUE 1.80e-02
agccacagccacatatgccatcttctcctgtgcaggctcattatggcatttctgcagcttcctcaggagcctccacagaatccaggtcgtgctgggaagctccaccgacagcattctccacacctcagccaggtgc

SEQ ID NO: 23769 - DNA, 426 bp, Homo sapiens
  MAP TO AL118505.13; EXPRESSED IN LUNG, SIGNAL = 2.4; EXPRESSED IN PLACENTA, SIGNAL = 2.2; EXPRESSED IN ADULT LIVER, SIGNAL = 2.4; EXPRESSED IN HEART, SIGNAL = 2.4; EXPRESSED IN FETAL LIVER, SIGNAL = 2.1; EXPRESSED IN BRAIN, SIGNAL = 5.9; EXPRESSED IN BONE MARROW, SIGNAL = 2.3; NT HIT: gi11421627, EVALUE 0.00e+00; EST_HUMAN HIT: BE260272.1, EVALUE 0.00e+00; SWISSPROT HIT: P05060, EVALUE 1.00e-56
aagcctgctttctttcattgagaaaagcgttttgtgtctctcctggctcttcaaggtgtttctcttcactgctatcttcccctcgctcccctttttgatagttctctccctcctcctcctcctcatcctctctctggctcttctcagaatggcgtgtcttcacttcttcagagacttggctgtcggagggatagaggctccactggggctcatccgctcgctctcggctgtgcccgcctccctctgcccatttctctgtgtctgcctttgttgggccttggatgtcctcctcccctggggctcctgcctctcccctgctggaggactcgtgggcttccgaggcatcagctgggtctcttaacaatcttacttcaaactttgtgttttcattttcagttgtctctttgtctttgacgtcttttctac

SEQ ID NO: 23770 - DNA, 111 bp, Homo sapiens
  MAP TO AC019162.3; EXPRESSED IN PLACENTA, SIGNAL = 2.8; EXPRESSED IN FETAL LIVER, SIGNAL = 4.6; EXPRESSED IN BONE MARROW, SIGNAL = 3.9; EXPRESSED IN ADULT LIVER, SIGNAL = 3.6; EXPRESSED IN HEART, SIGNAL = 3.5; EXPRESSED IN BRAIN, SIGNAL = 3.1; EXPRESSED IN LUNG, SIGNAL = 4.3; EST_HUMAN HIT: AI557072.1, EVALUE 8.00e-30; SWISSPROT HIT: P22532, EVALUE 1.80e+00; NT HIT: gi11433581, EVALUE 1.00e-27
cagtctgactggtacaggatgaacttcttggttctctttttgacaatcttgagtttcacaaggggtctgagggcagctgtgatgccaaggaggagatggctgcaacctctg

SEQ ID NO: 23771 - DNA, 288 bp, Homo sapiens
  MAP TO AC006460.3; EXPRESSED IN LUNG, SIGNAL = 2.5; EXPRESSED IN FETAL LIVER, SIGNAL = 2.6; EXPRESSED IN PLACENTA, SIGNAL = 2.9; EXPRESSED IN ADULT LIVER, SIGNAL = 2.7; EXPRESSED IN HEART, SIGNAL = 1.8; EXPRESSED IN BRAIN, SIGNAL = 2.5; EXPRESSED IN BONE MARROW, SIGNAL =   3; EST_HUMAN HIT: BF700165.1, EVALUE 0.00e+00; SWISSPROT HIT: P13135, EVALUE 6.70e-01; NT HIT: AL163249.2, EVALUE 5.00e-88
aaggtctgcagcttcaatcctgaagccagcgaggccaccagcccaccgggaggaacgaacaactccagacgcaccgccttaagagctgtaacactcaccgcgaaggtctgcagcttcactcctgagccagcgagaccacgaacccaccagaagaaagaaactccgaacacatccgaacaccagaaggaacaaactccagacgcgccaactgtaacactcaccgcgaggatccgtggcttcattcttgaagtcagtgagaccaagaacccaccaattccggacacactg

SEQ ID NO: 23772 - DNA, 93 bp, Homo sapiens
  MAP TO AC024570.2; EXPRESSED IN ADULT LIVER, SIGNAL =  14; EXPRESSED IN PLACENTA, SIGNAL =  14; EXPRESSED IN HELA, SIGNAL =  16; EXPRESSED IN HEART, SIGNAL =  13; EXPRESSED IN BRAIN, SIGNAL =  11; EXPRESSED IN BONE MARROW, SIGNAL =  13; EXPRESSED IN LUNG, SIGNAL =  15; EXPRESSED IN FETAL LIVER, SIGNAL =  12; EST_HUMAN HIT: W90539.1, EVALUE 2.90e-01; NT HIT: AB033024.1, EVALUE 1.90e-01
caacaattgtcattctgctcaatctgattttgaagaacatcactttaggaaacactaatccagaaaaggaccagaatgctgacaatgtctgtg

SEQ ID NO: 23773 - DNA, 294 bp, Homo sapiens
  MAP TO AL161422.3; EXPRESSED IN LUNG, SIGNAL = 2.8; EXPRESSED IN PLACENTA, SIGNAL = 2.6; EXPRESSED IN ADULT LIVER, SIGNAL = 2.9; EXPRESSED IN HEART, SIGNAL = 2.5; EXPRESSED IN FETAL LIVER, SIGNAL = 2.5; EXPRESSED IN BONE MARROW, SIGNAL = 2.6; EXPRESSED IN BRAIN, SIGNAL = 2.5; EXPRESSED IN HELA, SIGNAL = 3.2; SWISSPROT HIT: Q12873, EVALUE 1.20e-01; NT HIT: AL163203.2, EVALUE 9.00e-19
aatgtttttccccactgcctttcttttcttcccacagtgtttttccccaccatctttgcaaaccttctccccctcctgtttgtctccctgtttttccgcctccatctacccacttttttccaccatcttttccccaccatctttttgcaactccttcttctgctcgccccgccatccacttttccctttggcactcaccaccctctttactcctccatctaccccaaaactatttccttcctcctaccactccagctggctgcagtctccgttgctgccaccaaccacagcgat

SEQ ID NO: 23774 - DNA, 198 bp, Homo sapiens
  MAP TO AL133395.14; EXPRESSED IN HELA, SIGNAL = 2.9; EXPRESSED IN LUNG, SIGNAL = 1.6; EXPRESSED IN PLACENTA, SIGNAL = 1.4; EXPRESSED IN ADULT LIVER, SIGNAL = 1.7; EXPRESSED IN HEART, SIGNAL = 2.3; EXPRESSED IN BRAIN, SIGNAL = 1.5; EXPRESSED IN BONE MARROW, SIGNAL =   2; EXPRESSED IN FETAL LIVER, SIGNAL = 2.1; EST_HUMAN HIT: AA865565.1, EVALUE 6.90e-01; SWISSPROT HIT: P22837, EVALUE 5.80e-01; NT HIT: U32714.1, EVALUE 1.20e-01
ataaacctgaaggccaagctgccagagatgaattacaaagcacagctctttgctcaagtggcatttgataatgccaagcagtcgggggccaataaagtcgccacttctgcgaatcaaatgaaccagctcccaaacatgtataaccctgcgctggcacccttgccagaagagggagagggcaggaaggaaaatgggcaa

SEQ ID NO: 23775 - DNA, 240 bp, Homo sapiens
  MAP TO AC016109.3; EXPRESSED IN BONE MARROW, SIGNAL = 2.5; EXPRESSED IN LUNG, SIGNAL = 1.3; EXPRESSED IN ADULT LIVER, SIGNAL = 1.4; EXPRESSED IN BRAIN, SIGNAL = 1.4; EXPRESSED IN PLACENTA, SIGNAL = 1.2; EXPRESSED IN HEART, SIGNAL = 1.3; EXPRESSED IN FETAL LIVER, SIGNAL =   2; SWISSPROT HIT: Q10154, EVALUE 1.10e+00; NT HIT: AF151054.1, EVALUE 7.00e-22; EST_HUMAN HIT: W69638.1, EVALUE 1.00e-21
atgtctgtgaattacgtgcagcagaacagattttatcatgaggagctcaacgttcccatacagagaaacacagaagaacccaaaaccagactcttgagggtaggcgacacggagaagctaggtgacacagagaaggcagaggctgagaggtcccctcctaaccacaagcatcctgataagcagaaggccactgatgactatcgttataaaaaggtcaagaagatgaacaggcagtactga

SEQ ID NO: 23776 - DNA, 163 bp, Homo sapiens
  MAP TO AC010781.3; EXPRESSED IN LUNG, SIGNAL = 2.1; EXPRESSED IN PLACENTA, SIGNAL = 1.9; EXPRESSED IN ADULT LIVER, SIGNAL = 2.5; EXPRESSED IN BRAIN, SIGNAL = 3.6; EXPRESSED IN BONE MARROW, SIGNAL = 4.5; EXPRESSED IN FETAL LIVER, SIGNAL = 3.5; EXPRESSED IN HELA, SIGNAL = 3.1; EXPRESSED IN HEART, SIGNAL = 2.1; NT HIT: AL163284.2, EVALUE 2.00e-39; SWISSPROT HIT: P00421, EVALUE 8.90e+00; EST_HUMAN HIT: BE043031.1, EVALUE 1.00e-57
atgttgccatggcctttgtatactgtcatggcgctggtggaagtgtagcagtgaggatgaccagaggtcactctcatcaccatcttggttttggtgggttttagccagcttctttactgcaacgtgttttatcagcaaggtctttacgacctgtatcttgtgt

SEQ ID NO: 23777 - DNA, 285 bp, Homo sapiens
  MAP TO AL121895.18; EXPRESSED IN LUNG, SIGNAL = 3.9; EXPRESSED IN PLACENTA, SIGNAL = 4.1; EXPRESSED IN ADULT LIVER, SIGNAL = 4.1; EXPRESSED IN HELA, SIGNAL = 2.9; EXPRESSED IN FETAL LIVER, SIGNAL = 4.5; EXPRESSED IN BRAIN, SIGNAL = 4.3; EXPRESSED IN HEART, SIGNAL = 4.3; EXPRESSED IN BONE MARROW, SIGNAL = 4.1; SWISSPROT HIT: P49659, EVALUE 3.80e+00; EST_HUMAN HIT: BE830339.1, EVALUE 2.60e-01; NT HIT: AL161504.2, EVALUE 2.70e+00
cttccaagtatggacatgcagaatcttgagcagacgattctagtccctgagaagcaataagaaaaacactccgctccaccagactctgacacccagagccagccacgtatgtggttcttctgactgcaaatgccgggaggggtcaggaaggtttgtgagaagcccttgatgtccaaggaggggatgaggatggaggtgtgaggcagcatgctaggacttaataggagaggaaaaatcgaggacagatgtgaggcatgaaaggtggcagtggtcctggagcaggtg

SEQ ID NO: 23778 - DNA, 103 bp, Homo sapiens
  MAP TO AL121823.12; EXPRESSED IN PLACENTA, SIGNAL = 1.6; EXPRESSED IN HEART, SIGNAL = 1.6; EXPRESSED IN FETAL LIVER, SIGNAL = 2.1; EXPRESSED IN BONE MARROW, SIGNAL = 1.5; EXPRESSED IN LUNG, SIGNAL = 1.5; EXPRESSED IN ADULT LIVER, SIGNAL = 2.1; EXPRESSED IN BRAIN, SIGNAL = 1.7; EST_HUMAN HIT: BE901994.1, EVALUE 2.00e-51; SWISSPROT HIT: P11369, EVALUE 1.30e-01; NT HIT: U78308.1, EVALUE 3.00e-34
ctcattgtttagctcccacttataagtgagaatatgtggttcttggttttctgttcctgcattagtttgctgagcataagtgtttccagctccatccatgtcc

SEQ ID NO: 23779 - DNA, 208 bp, Homo sapiens
  MAP TO AC009466.2; EXPRESSED IN HELA, SIGNAL = 4.3; EXPRESSED IN LUNG, SIGNAL = 2.8; EXPRESSED IN PLACENTA, SIGNAL =   3; EXPRESSED IN HEART, SIGNAL = 3.4; EXPRESSED IN FETAL LIVER, SIGNAL = 4.1; EXPRESSED IN BONE MARROW, SIGNAL = 3.4; EXPRESSED IN ADULT LIVER, SIGNAL = 3.2; EXPRESSED IN BRAIN, SIGNAL = 3.8; NT HIT: U63041.1, EVALUE 1.00e-114; EST_HUMAN HIT: BF341180.1, EVALUE 1.00e-113; SWISSPROT HIT: P13591, EVALUE 2.00e-24
gagaaggcggccttgccctcctccatgtccttgcccttggccccgggcccggcttttccacacaggttgaccgcaatgcacatgaacaggccacacttgttcaggaagtagcaggtgatgtccacaaccaccaggagcaggacgaagatgacgatgaggatgcccacgatggccccggtgctcaggcctgaggtggggctgccgttgg

SEQ ID NO: 23780 - DNA, 122 bp, Homo sapiens
  MAP TO AC013685.3; EXPRESSED IN ADULT LIVER, SIGNAL = 2.6; EXPRESSED IN HEART, SIGNAL = 2.6; EXPRESSED IN BRAIN, SIGNAL = 3.1; EXPRESSED IN LUNG, SIGNAL = 2.6; EXPRESSED IN FETAL LIVER, SIGNAL = 4.1; EXPRESSED IN PLACENTA, SIGNAL = 3.1; EXPRESSED IN HELA, SIGNAL = 3.6; EXPRESSED IN BONE MARROW, SIGNAL = 3.2; NT HIT: gi11429198, EVALUE 6.00e-33; EST_HUMAN HIT: BF696085.1, EVALUE 9.00e-33
agcaacaactacagcaagttctggaacatccccttgaatttttatggaatcagcctcagtttcaacagatgagacaaattattcaacagagtccttcccttcttccagtgttactacagtag

SEQ ID NO: 23781 - DNA, 190 bp, Homo sapiens
  MAP TO AL162171.1; EXPRESSED IN PLACENTA, SIGNAL = 1.3; EXPRESSED IN LUNG, SIGNAL = 1.2; EXPRESSED IN ADULT LIVER, SIGNAL = 1.2; EXPRESSED IN HEART, SIGNAL = 1.4; EXPRESSED IN FETAL LIVER, SIGNAL = 1.1; EXPRESSED IN BRAIN, SIGNAL = 1.1; EXPRESSED IN BONE MARROW, SIGNAL = 1.1; NT HIT: gi11434746, EVALUE 1.00e-103; SWISSPROT HIT: Q16825, EVALUE 2.00e-27; EST_HUMAN HIT: BF109244.1, EVALUE 1.00e-103
aaagaagaagatgccactgccatttgggttgaaactgaaacgcacccggcgctacacggtgtccagcaagagttgcctggttgcccggatccaactgcttaataacgagtttgtggagttcaccctgtccgtggagagcactggccaggaaagcctcgaggccgtggcccagaggctggagctgcgggag

SEQ ID NO: 23782 - DNA, 100 bp, Homo sapiens
  MAP TO AC021468.2; EXPRESSED IN LUNG, SIGNAL = 1.3; EXPRESSED IN PLACENTA, SIGNAL = 1.2; EXPRESSED IN ADULT LIVER, SIGNAL = 1.5; EXPRESSED IN FETAL LIVER, SIGNAL = 1.2; EXPRESSED IN BRAIN, SIGNAL = 1.2; EXPRESSED IN HEART, SIGNAL = 1.3; EXPRESSED IN BONE MARROW, SIGNAL = 1.2; NT HIT: L11910.1, EVALUE 6.00e-08; EST_HUMAN HIT: AA782323.1, EVALUE 1.00e-12
atgggctatggtgttactgccttcttcatatgggcattcagcagggtcctgagttcttgtcctgcatccaagaagaatgagcttatgctgacagccatgg

SEQ ID NO: 23783 - DNA, 195 bp, Homo sapiens
  MAP TO AC007009.2; EXPRESSED IN LUNG, SIGNAL =   3; EXPRESSED IN ADULT LIVER, SIGNAL =   4; EXPRESSED IN HELA, SIGNAL = 2.6; EXPRESSED IN FETAL LIVER, SIGNAL = 3.9; EXPRESSED IN BRAIN, SIGNAL = 3.6; EXPRESSED IN BONE MARROW, SIGNAL = 3.3; EXPRESSED IN PLACENTA, SIGNAL = 2.8; EXPRESSED IN HEART, SIGNAL = 3.2; SWISSPROT HIT: Q05084, EVALUE 6.00e-34; NT HIT: U71256.1, EVALUE 1.00e-106; EST_HUMAN HIT: AI654123.1, EVALUE 1.00e-106
ctgaacttctccatttgcttgtagaggtctggatcaagctcctgagacacgtccttcatccataatagtgctcctctatattccgtcctgcactgttccatgcggttcaccgtcagccaagtatctgagatggcccgatgccgaaaagtctccacttcttggtgaaatcgacacaaaggatttcgtaaggccaac

SEQ ID NO: 23784 - DNA, 188 bp, Homo sapiens
  MAP TO AL157879.2; EXPRESSED IN LUNG, SIGNAL =  10; EXPRESSED IN ADULT LIVER, SIGNAL =  10; EXPRESSED IN HELA, SIGNAL = 2.2; EXPRESSED IN HEART, SIGNAL = 9.8; EXPRESSED IN FETAL LIVER, SIGNAL = 9.6; EXPRESSED IN BRAIN, SIGNAL = 9.6; EXPRESSED IN PLACENTA, SIGNAL =  11; EXPRESSED IN BONE MARROW, SIGNAL =  12; SWISSPROT HIT: P08236, EVALUE 5.00e-21; NT HIT: U21555.1, EVALUE 2.00e-99; EST_HUMAN HIT: W23507.1, EVALUE 2.00e-99
ctcccacgagtacaggtaggcggggtgttcgtgcatcaggtacggccaccagaggttggcacccagcaccttcagctggccctgggtcccagcctggttgtccacgactttgttgtctgatttcaaaagacacacttccaacttgaactggttactgcacttgacggagatatggtaattcaccagcc

SEQ ID NO: 23785 - DNA, 143 bp, Homo sapiens
  MAP TO AC009301.3; EXPRESSED IN BONE MARROW, SIGNAL = 1.7; EXPRESSED IN FETAL LIVER, SIGNAL = 1.6; EXPRESSED IN LUNG, SIGNAL = 1.6; EXPRESSED IN PLACENTA, SIGNAL = 1.9; EXPRESSED IN ADULT LIVER, SIGNAL = 2.3; EXPRESSED IN HEART, SIGNAL = 1.5; EXPRESSED IN BRAIN, SIGNAL = 1.8; SWISSPROT HIT: P29352, EVALUE 6.90e+00; NT HIT: gi9910247, EVALUE 1.30e+00
ggcagcatcaggagacctgggcttctgaccagctgtccatcaattacttctttgatatggaagaaaactcccttcaccctctggatccactgaacgggggccaggtctttgagggcttgcccacctatccagccactgattat

SEQ ID NO: 23786 - DNA, 159 bp, Homo sapiens
  MAP TO AC016205.4; EXPRESSED IN BONE MARROW, SIGNAL = 2.2; EXPRESSED IN LUNG, SIGNAL = 1.2; EXPRESSED IN PLACENTA, SIGNAL = 1.2; EXPRESSED IN HEART, SIGNAL = 1.4; EXPRESSED IN ADULT LIVER, SIGNAL = 1.3; EXPRESSED IN FETAL LIVER, SIGNAL = 1.7; EXPRESSED IN BRAIN, SIGNAL = 1.8; EST_HUMAN HIT: AA488048.1, EVALUE 1.00e-07; NT HIT: AJ271735.1, EVALUE 2.00e-09
ggtctggagtggaaccccagcaaactgcagcagccctatggaagacgggacaaactgaaaaacaacaacaacaacaacaaaacagaaagcaacaataacatcaacaaaaagaccccacaaaaaccccattcaaaagtcagcaacctcaaagatcaaaag

SEQ ID NO: 23787 - DNA, 80 bp, Homo sapiens
  MAP TO AC018993.3; EXPRESSED IN PLACENTA, SIGNAL = 7.1; EXPRESSED IN HELA, SIGNAL = 8.3; EXPRESSED IN FETAL LIVER, SIGNAL = 6.9; EXPRESSED IN BONE MARROW, SIGNAL = 7.4; EXPRESSED IN LUNG, SIGNAL = 7.2; EXPRESSED IN ADULT LIVER, SIGNAL = 7.9; EXPRESSED IN HEART, SIGNAL = 7.4; EXPRESSED IN BRAIN, SIGNAL =   7; NT HIT: M96868.1, EVALUE 4.10e-02; EST_HUMAN HIT: AI553983.1, EVALUE 4.00e-03
ctcataagtttattgtgaggattataggagtcaagagtataggaaccatatgaaatgatggccacttcaccagtttttaa

SEQ ID NO: 23788 - DNA, 156 bp, Homo sapiens
  MAP TO AL121901.10; EXPRESSED IN LUNG, SIGNAL = 9.1; EXPRESSED IN HELA, SIGNAL = 4.8; EXPRESSED IN PLACENTA, SIGNAL =   5; EXPRESSED IN ADULT LIVER, SIGNAL = 5.5; EXPRESSED IN FETAL LIVER, SIGNAL = 4.4; EXPRESSED IN BRAIN, SIGNAL = 4.5; EXPRESSED IN HEART, SIGNAL = 4.7; EXPRESSED IN BONE MARROW, SIGNAL = 4.9; NT HIT: gi9938032, EVALUE 3.00e-14; SWISSPROT HIT: P94177, EVALUE 2.70e-01; EST_HUMAN HIT: BF672220.1, EVALUE 9.00e-83
gtctggcatcctgcacttgctgccctctgacacctgggaagatggccggcccgtggaccttcacccttctctgtggtttgctggcagccaccttgatccaagccaccctcagtcccactgcagttctcatcctcggcccaaaagtcatcaaagaaa

SEQ ID NO: 23789 - DNA, 179 bp, Homo sapiens
  MAP TO AL157377.1; EXPRESSED IN PLACENTA, SIGNAL =  21; EXPRESSED IN ADULT LIVER, SIGNAL =  27; EXPRESSED IN HEART, SIGNAL =  21; EXPRESSED IN FETAL LIVER, SIGNAL =  22; EXPRESSED IN BRAIN, SIGNAL =  21; EXPRESSED IN BONE MARROW, SIGNAL =  25; EXPRESSED IN LUNG, SIGNAL =  26; EXPRESSED IN HELA, SIGNAL =  29; EST_HUMAN HIT: BE895699.1, EVALUE 6.20e-01; NT HIT: gi11419429, EVALUE 1.00e-96; SWISSPROT HIT: P22413, EVALUE 4.00e-11
attttgtaggtgagggcagaaacagtcaagagactctgtgggcaatggattagcaaagccacaaacagaaaactttgacacctcctctgcatgggatggctcataaaaaggcaccttcagaagatggtttaaactaccatgggttccattgtttggtgctggttgaatgcgtagaagat

SEQ ID NO: 23790 - DNA, 485 bp, Homo sapiens
  MAP TO AL136528.9; EXPRESSED IN HEART, SIGNAL = 2.8; EXPRESSED IN PLACENTA, SIGNAL = 2.5; EXPRESSED IN ADULT LIVER, SIGNAL = 2.4; EXPRESSED IN HELA, SIGNAL = 3.7; EXPRESSED IN BRAIN, SIGNAL = 2.2; EXPRESSED IN BONE MARROW, SIGNAL = 2.8; EXPRESSED IN LUNG, SIGNAL =   3; EXPRESSED IN FETAL LIVER, SIGNAL = 2.6; EST_HUMAN HIT: BE968569.1, EVALUE 1.20e-01; SWISSPROT HIT: P08640, EVALUE 4.00e-02
ccggtgcctgctgcggggcgagcagcactgcctactcggaatcccatctgcacagagccatggtgcgtggagctgtgcgtctgcttccttttccctggcatcttgctggttttgagtgtgctgggttgtggggtggatcagtggcccgttcctccatcttgagagtgctgggtcatggtgtggagagagtgctgggtcgtggcatggatcagtggcctgttcctcccgtcttgagtgtactgggtcatggcttggatccgtggcccattcctctcaccctgagcatgctgagttgtggtgtggatcggtggcccgttccttccgtcttcagcacactgggtcgtagcgtggatcagcggccccttccttccctcctgagtgctctgggtcatgtggatccctctggtcctttcttcctgctgctgagtgctgtggagcccatcccacgggtctcctccgctggcttctccagtggtcagtggaag

SEQ ID NO: 23791 - DNA, 96 bp, Homo sapiens
  MAP TO AC019126.3; EXPRESSED IN LUNG, SIGNAL = 1.7; EXPRESSED IN ADULT LIVER, SIGNAL = 1.3; EXPRESSED IN HEART, SIGNAL = 1.8; EXPRESSED IN BRAIN, SIGNAL = 1.7; EXPRESSED IN BONE MARROW, SIGNAL = 1.8; EXPRESSED IN PLACENTA, SIGNAL = 1.8; EXPRESSED IN FETAL LIVER, SIGNAL = 1.8; SWISSPROT HIT: P52747, EVALUE 1.00e-12; NT HIT: AF071771.1, EVALUE 2.00e-47; EST_HUMAN HIT: AV747469.1, EVALUE 3.00e-47
atggggcaccagcagcatagccatcacttagtaaccacagaaaccagacctctgaccttagtagcaacatccaatggcacccagattgcagttcag

SEQ ID NO: 23792 - DNA, 84 bp, Homo sapiens
  MAP TO AC019042.3; EXPRESSED IN LUNG, SIGNAL = 4.5; EXPRESSED IN ADULT LIVER, SIGNAL = 6.2; EXPRESSED IN HEART, SIGNAL = 4.3; EXPRESSED IN FETAL LIVER, SIGNAL = 4.6; EXPRESSED IN BRAIN, SIGNAL = 5.3; EXPRESSED IN PLACENTA, SIGNAL = 3.5; EXPRESSED IN BONE MARROW, SIGNAL = 5.5; NT HIT: AL163227.2, EVALUE 2.00e-13; EST_HUMAN HIT: BE143312.1, EVALUE 5.00e-18
ctttattctagttctcaacaagtttctcatctccatctgagaaaacctcagtctggacttcgttgtccatatcactatcagcat

SEQ ID NO: 23793 - DNA, 216 bp, Homo sapiens
  MAP TO AC013451.7; EXPRESSED IN PLACENTA, SIGNAL = 1.9; EXPRESSED IN FETAL LIVER, SIGNAL = 1.6; EXPRESSED IN LUNG, SIGNAL = 1.9; EXPRESSED IN HEART, SIGNAL = 1.3; EXPRESSED IN BONE MARROW, SIGNAL = 1.3; EXPRESSED IN ADULT LIVER, SIGNAL = 1.7; EXPRESSED IN BRAIN, SIGNAL = 2.1; NT HIT: gi4557732, EVALUE 1.00e-118; SWISSPROT HIT: Q00918, EVALUE 5.40e-01; EST_HUMAN HIT: AA852962.1, EVALUE 1.00e-103
ccttgtcagggatggtcccggcctcaagccaggtgtccgtgacgacccggaggggctgcctctctgctggcccgggcagtgccccgctgctcctctgcccttgctcccttgggggccttgccagttcctcctcctcggctttcctcatggacaggcggatgtcggagctcgcgtaggtgtagccgtggccggcagggcagatctctctgaaggcct

SEQ ID NO: 23794 - DNA, 138 bp, Homo sapiens
  MAP TO AC005103.2; EXPRESSED IN LUNG, SIGNAL = 4.6; EXPRESSED IN HELA, SIGNAL = 5.2; EXPRESSED IN PLACENTA, SIGNAL = 3.8; EXPRESSED IN FETAL LIVER, SIGNAL = 3.6; EXPRESSED IN ADULT LIVER, SIGNAL = 5.3; EXPRESSED IN HEART, SIGNAL =   4; EXPRESSED IN BRAIN, SIGNAL = 3.6; EXPRESSED IN BONE MARROW, SIGNAL = 4.3; NT HIT: M74099.1, EVALUE 7.00e-70; EST_HUMAN HIT: BE018909.1, EVALUE 1.00e-69; SWISSPROT HIT: P39880, EVALUE 4.00e-19
cgtaccagctttggatctcggacagcaactccagctcaaagtgcagcgcctgcacgatattgaaacagagaaccagaaacttagggaaactctggaagaatacaacaaggaatttgctgaagtgaaaaatcaaggttg

SEQ ID NO: 23795 - DNA, 119 bp, Homo sapiens
  MAP TO AC013396.4; EXPRESSED IN LUNG, SIGNAL = 1.7; EXPRESSED IN PLACENTA, SIGNAL = 1.8; EXPRESSED IN ADULT LIVER, SIGNAL = 1.7; EXPRESSED IN HEART, SIGNAL = 1.9; EXPRESSED IN BRAIN, SIGNAL = 1.3; EXPRESSED IN FETAL LIVER, SIGNAL = 1.1; EXPRESSED IN BONE MARROW, SIGNAL = 1.5; EST_HUMAN HIT: AW369761.1, EVALUE 1.50e+00; NT HIT: M38427.1, EVALUE 1.00e+00
tgtcatcccataaactgactatgacactggttgtgatggtgctgccgtggccagaggcaattgaagaggtcaccttctacagtgcttggaagagtctcaagctcacagggaagaactaa

SEQ ID NO: 23796 - DNA, 237 bp, Homo sapiens
  MAP TO AC025826.1; EXPRESSED IN BONE MARROW, SIGNAL = 1.2; EXPRESSED IN HEART, SIGNAL = 1.2; EXPRESSED IN LUNG, SIGNAL = 1.4; EXPRESSED IN PLACENTA, SIGNAL = 1.2; EXPRESSED IN ADULT LIVER, SIGNAL = 0.99; EXPRESSED IN BRAIN, SIGNAL =   2; EXPRESSED IN FETAL LIVER, SIGNAL = 1.6; SWISSPROT HIT: P10272, EVALUE 4.00e-11; NT HIT: gi9635487, EVALUE 8.00e-99; EST_HUMAN HIT: BE730569.1, EVALUE 2.00e-91
actgaccatgacacccatcagtcccagcagcttacctgggctgtgctgctgcaaggtttcatggacagccctcattacttcagccaagctgtttctcgtgatttactttctttccacccctctgcttctcaccttattcaatatattgatgaccttcttctttgtagcccctcctttgaatcttctcaacaagacatacttctgctccttcagcatttattctccaaaggatatcag

SEQ ID NO: 23797 - DNA, 85 bp, Homo sapiens
  MAP TO AL133319.21; EXPRESSED IN PLACENTA, SIGNAL = 1.9; EXPRESSED IN ADULT LIVER, SIGNAL = 2.3; EXPRESSED IN HELA, SIGNAL =   4; EXPRESSED IN HEART, SIGNAL = 2.5; EXPRESSED IN FETAL LIVER, SIGNAL = 3.3; EXPRESSED IN LUNG, SIGNAL = 2.3; EXPRESSED IN BRAIN, SIGNAL = 2.1; EXPRESSED IN BONE MARROW, SIGNAL = 3.2; EST_HUMAN HIT: N62647.1, EVALUE 4.10e+00; NT HIT: D00384.1, EVALUE 1.70e-01
ctttttgccaattgatcttcattaagtcagtcaacaagagaagcttaataatgttcatgtcctttaagatgctatttaccttcat

SEQ ID NO: 23798 - DNA, 287 bp, Homo sapiens
  MAP TO AL109624.11; EXPRESSED IN BONE MARROW, SIGNAL =   1; EXPRESSED IN LUNG, SIGNAL = 1.4; EXPRESSED IN PLACENTA, SIGNAL = 1.6; EXPRESSED IN HEART, SIGNAL = 1.6; EXPRESSED IN FETAL LIVER, SIGNAL = 1.1; EXPRESSED IN ADULT LIVER, SIGNAL = 1.2; EXPRESSED IN BRAIN, SIGNAL = 1.2; EST_HUMAN HIT: H87208.1, EVALUE 3.00e-10; NT HIT: U82828.1, EVALUE 5.00e-08; SWISSPROT HIT: P77877, EVALUE 3.80e+00
atggctgctcttagtctcacctcagaattccagaccagcaaaggagggaggggtggggcctatattggtgaaacaaaagctgtccctgaaatccccagcagatttttacttgcttttcattgtcaaacaggcattgttatcataggcgatgtcagctccatgaggattattgcccctgaagaccttccaggggataagatggtgaaggtggagacagtgatactgatgatcttgaacctgtctgtgtaggccgaggctcatgtgtgtgtttgtgtcttcgtttttta

SEQ ID NO: 23799 - DNA, 152 bp, Homo sapiens
  MAP TO AC013698.3; EXPRESSED IN HELA, SIGNAL = 9.8; EXPRESSED IN HEART, SIGNAL = 7.6; EXPRESSED IN LUNG, SIGNAL = 8.4; EXPRESSED IN PLACENTA, SIGNAL = 8.4; EXPRESSED IN ADULT LIVER, SIGNAL = 8.4; EXPRESSED IN BRAIN, SIGNAL = 5.4; EXPRESSED IN FETAL LIVER, SIGNAL = 7.8; EXPRESSED IN BONE MARROW, SIGNAL = 8.5; EST_HUMAN HIT: AW887541.1, EVALUE 5.00e-29; SWISSPROT HIT: P34449, EVALUE 1.00e+00; NT HIT: AF036405.1, EVALUE 1.00e-22
atgaaacatggctttaccagtatgatcctgaagataaagcacaaccacaatggctaccaagagagagaagtggtccagtcaaagcacaagcagactggtcaagagcaaaggttggcaacaattctttgggacgctcaaggcaggttgctggt

SEQ ID NO: 23800 - DNA, 384 bp, Homo sapiens
  MAP TO AC007000.2; EXPRESSED IN HEART, SIGNAL = 6.4; EXPRESSED IN FETAL LIVER, SIGNAL =  18; EXPRESSED IN BONE MARROW, SIGNAL =  13; EXPRESSED IN BRAIN, SIGNAL = 7.8; EXPRESSED IN HELA, SIGNAL =  10; EXPRESSED IN ADULT LIVER, SIGNAL =  12; EXPRESSED IN PLACENTA, SIGNAL = 3.7; EXPRESSED IN LUNG, SIGNAL =  11; NT HIT: gi4506660, EVALUE 0.00e+00; SWISSPROT HIT: P12970, EVALUE 2.00e-48; EST_HUMAN HIT: AA962527.1, EVALUE 0.00e+00
gggaggtcccctttgcccacaactctgcctgggccaacagcctccacttcttctcttgctttgtctctggtctgtatttgtgggccagcttaagcagctgagtagctgtttggccttccagggcctgggtgaactggttaatcgcaggaggcactttcagctgcttatagagtatggatctctgccattgcaacctgatatagcggggccatttcacaaagcaggtgaggtctcttttgggctggatgtcctgtccaatgccaaaattcttaggccttttctcaaacaggggattcaccactttcttggcctcctgcttcttcacaaaagcaggggccagagccaacttcttccccttggcctcctttcctttcggcatcttgg

SEQ ID NO: 23801 - DNA, 139 bp, Homo sapiens
  MAP TO AC007164.3; EXPRESSED IN LUNG, SIGNAL = 2.2; EXPRESSED IN PLACENTA, SIGNAL = 3.2; EXPRESSED IN ADULT LIVER, SIGNAL = 2.2; EXPRESSED IN HEART, SIGNAL = 2.1; EXPRESSED IN FETAL LIVER, SIGNAL = 2.6; EXPRESSED IN BRAIN, SIGNAL = 2.9; EXPRESSED IN BONE MARROW, SIGNAL = 2.2; EST_HUMAN HIT: BE350127.1, EVALUE 4.00e-29; SWISSPROT HIT: Q9ZCN6, EVALUE 1.80e+00; NT HIT: D38044.1, EVALUE 3.00e-29
gtcaggaccctcaatctctctatcttccacctctacatcttgtcccactggaagatcttcaggggcaataacacacatggagctctcatctcctgtgataataattccttcttctgaatatctcctgaaggatcttgcc

SEQ ID NO: 23802 - DNA, 258 bp, Homo sapiens
  MAP TO AL121871.8; EXPRESSED IN PLACENTA, SIGNAL = 4.4; EXPRESSED IN HELA, SIGNAL =  12; EXPRESSED IN FETAL LIVER, SIGNAL =  14; EXPRESSED IN BRAIN, SIGNAL = 8.4; EXPRESSED IN BONE MARROW, SIGNAL =  17; EXPRESSED IN ADULT LIVER, SIGNAL = 7.1; EXPRESSED IN HEART, SIGNAL = 5.7; EXPRESSED IN LUNG, SIGNAL = 7.1; SWISSPROT HIT: Q02877, EVALUE 2.00e-36; NT HIT: L07287.1, EVALUE 1.00e-109; EST_HUMAN HIT: BE787540.1, EVALUE 1.00e-109
agttttagcctagtgataaccaccttgctggggtgaatgcctacgtggacagttgtgccattagccttttcccgctgcacccgttcaatgtagatagcatatttcttcctgtaaaccttgactattttgccaatttgttgacctttatagtgtcctcgtacaacctgaacttcatcatccttttggatgggcatggatcacccgttatacttctgtttcagctcgttggaaagaggggaagacaatcttcccgtgaat

SEQ ID NO: 23803 - DNA, 80 bp, Homo sapiens
  MAP TO AC011841.3; EXPRESSED IN LUNG, SIGNAL = 3.2; EXPRESSED IN ADULT LIVER, SIGNAL = 3.2; EXPRESSED IN FETAL LIVER, SIGNAL =   3; EXPRESSED IN BRAIN, SIGNAL = 2.6; EXPRESSED IN BONE MARROW, SIGNAL = 3.4; EXPRESSED IN PLACENTA, SIGNAL = 3.6; EXPRESSED IN HELA, SIGNAL = 3.8; EXPRESSED IN HEART, SIGNAL = 2.9; NT HIT: L11910.1, EVALUE 1.00e-05; EST_HUMAN HIT: AA171406.1, EVALUE 1.00e-37
cttctattcctaacttgttgagagttttcatcataatcaaggctgaatttcatccaattcttcttctgcatatgcaaaag

SEQ ID NO: 23804 - DNA, 528 bp, Homo sapiens
  MAP TO AC015649.5; EXPRESSED IN PLACENTA, SIGNAL = 3.4; EXPRESSED IN HEART, SIGNAL = 3.5; EXPRESSED IN BONE MARROW, SIGNAL = 4.8; EXPRESSED IN LUNG, SIGNAL =   2; EXPRESSED IN ADULT LIVER, SIGNAL = 0.53; EXPRESSED IN HELA, SIGNAL = 5.1; EXPRESSED IN FETAL LIVER, SIGNAL = 4.7; EXPRESSED IN BRAIN, SIGNAL = 3.1; SWISSPROT HIT: P16157, EVALUE 3.00e-97; NT HIT: gi10947037, EVALUE 0.00e+00; EST_HUMAN HIT: AA100825.1, EVALUE 1.00e-107
gttactcctcactgcaggacgagctgctgtcccctgcctccctgggctgtgcactttcctctccgctacgtgcagaccagtactggaatgaggtggccgtcctagacgccatccccttggcggccacggagcatgacaccatgctggagatgtctgacatgcaggtgtggtctgcgggcctcacgccttctctggtcactgctgaggactcctctctggagtgtagcaaggctgaggactctgatgccacaggtcacgagtggaagttggagggggcactctcagaggaaccgcggggccccgagttgggctctctggaacttgtggaggacgacacagtggattcagatgccacaaatggccttatcgatttgcttgaacaggaggaaggtcagaggtcagaagagaagctgccaggttctaagaggcaggatgacgcgacaggtgcagggcaggactcagagaatgaagtgtctcttgtttcaggccatcagagggggcaagcccgaatcacacattcccccaccg

SEQ ID NO: 23805 - DNA, 90 bp, Homo sapiens
  MAP TO AC022995.2; EXPRESSED IN HELA, SIGNAL = 4.5; EXPRESSED IN HEART, SIGNAL = 3.4; EXPRESSED IN LUNG, SIGNAL = 3.9; EXPRESSED IN PLACENTA, SIGNAL = 5.4; EXPRESSED IN ADULT LIVER, SIGNAL = 3.1; EXPRESSED IN BRAIN, SIGNAL =   3; EXPRESSED IN FETAL LIVER, SIGNAL = 3.5; EXPRESSED IN BONE MARROW, SIGNAL = 3.4; EST_HUMAN HIT: AI752367.1, EVALUE 8.00e-08; NT HIT: U82671.2, EVALUE 2.00e-07; SWISSPROT HIT: O60908, EVALUE 9.50e+00
ttctgaggttgggaagtccaatatcaaggtgctggcatctggtgaagacctctgtgctgtgtcagcccgtggtggcaggctgatgggcca

SEQ ID NO: 23806 - DNA, 110 bp, Homo sapiens
  MAP TO AC011218.4; EXPRESSED IN LUNG, SIGNAL = 2.8; EXPRESSED IN PLACENTA, SIGNAL = 3.8; EXPRESSED IN ADULT LIVER, SIGNAL = 4.1; EXPRESSED IN HEART, SIGNAL = 3.1; EXPRESSED IN FETAL LIVER, SIGNAL = 2.6; EXPRESSED IN BRAIN, SIGNAL = 3.3; EXPRESSED IN BONE MARROW, SIGNAL = 3.1; EST_HUMAN HIT: AL119158.1, EVALUE 2.00e-24; SWISSPROT HIT: P52662, EVALUE 5.40e+00; NT HIT: AL163210.2, EVALUE 3.00e-22
agacttgctgaatgactttgacaaaagtgctgatagtgtattgaacaataagttccaggccgaggtgttctcagatggagatgaggaacttcttgtgaactggaacaaag

SEQ ID NO: 23807 - DNA, 139 bp, Homo sapiens
  MAP TO AC011929.3; EXPRESSED IN LUNG, SIGNAL = 3.1; EXPRESSED IN PLACENTA, SIGNAL = 2.7; EXPRESSED IN ADULT LIVER, SIGNAL = 2.5; EXPRESSED IN BRAIN, SIGNAL = 2.6; EXPRESSED IN BONE MARROW, SIGNAL = 2.7; EXPRESSED IN FETAL LIVER, SIGNAL = 2.5; EXPRESSED IN HELA, SIGNAL = 3.5; EXPRESSED IN HEART, SIGNAL = 2.8; NT HIT: AL163268.2, EVALUE 9.00e-11; EST_HUMAN HIT: T99920.1, EVALUE 1.00e-19; SWISSPROT HIT: P32522, EVALUE 1.60e-01
ctgccaggtcttgaccctgatgataaggtttggggaatgacttgtctctgaaatacttcttgacatggtttggctgtgtccccacccatatctcatcttttgaattgtagttctcataatccccatgtgtcacaggaga

SEQ ID NO: 23808 - DNA, 169 bp, Homo sapiens
  MAP TO AC007326.28; EXPRESSED IN LUNG, SIGNAL = 2.9; EXPRESSED IN HELA, SIGNAL = 7.7; EXPRESSED IN HEART, SIGNAL = 4.7; EXPRESSED IN BRAIN, SIGNAL = 4.3; EXPRESSED IN BONE MARROW, SIGNAL = 4.2; EXPRESSED IN PLACENTA, SIGNAL = 3.8; EXPRESSED IN ADULT LIVER, SIGNAL = 0.71; EXPRESSED IN FETAL LIVER, SIGNAL = 4.8; EST_HUMAN HIT: BF087215.1, EVALUE 5.00e-60; NT HIT: gi5174644, EVALUE 3.00e-60; SWISSPROT HIT: O43272, EVALUE 2.00e-16
ctgcagcaccgccacctccagcttggtgtccatggcagccaggcccgcctgcccttgctccacagccatttggtgaaagaagcacctccacttggccagcacctctgagaactgcagctgcaaacgcaggcctgaatgccatctgcacacgcccctgcccaccccagtc

SEQ ID NO: 23809 - DNA, 161 bp, Homo sapiens
  MAP TO AC015473.3; EXPRESSED IN PLACENTA, SIGNAL =   4; EXPRESSED IN ADULT LIVER, SIGNAL = 2.9; EXPRESSED IN HELA, SIGNAL = 3.6; EXPRESSED IN HEART, SIGNAL = 2.9; EXPRESSED IN FETAL LIVER, SIGNAL = 3.4; EXPRESSED IN LUNG, SIGNAL =   4; EXPRESSED IN BRAIN, SIGNAL = 3.1; EXPRESSED IN BONE MARROW, SIGNAL = 4.1; SWISSPROT HIT: O02791, EVALUE 1.00e-25; EST_HUMAN HIT: AW389879.1, EVALUE 2.00e-83; NT HIT: L38557.1, EVALUE 7.00e-86
aatcacctgtaaccctgtaagatccatttgcaaaaatccagaagaaaattcctctggcacttctaatcaaaataccacctttatttactcttcctgcaatgaacacacctcctgtgtcaggggtctctatgtaaacatcacactttgtagtcagattggtc

SEQ ID NO: 23810 - DNA, 210 bp, Homo sapiens
  MAP TO AC013625.3; EXPRESSED IN LUNG, SIGNAL = 4.3; EXPRESSED IN PLACENTA, SIGNAL = 3.6; EXPRESSED IN FETAL LIVER, SIGNAL =   6; EXPRESSED IN BRAIN, SIGNAL = 6.2; EXPRESSED IN BONE MARROW, SIGNAL =   3; EXPRESSED IN ADULT LIVER, SIGNAL =   4; EXPRESSED IN HELA, SIGNAL = 5.5; EXPRESSED IN HEART, SIGNAL = 4.7; SWISSPROT HIT: Q04619, EVALUE 1.00e-12; EST_HUMAN HIT: BE305002.1, EVALUE 1.00e-24; NT HIT: J04988.1, EVALUE 4.00e-29
atggccaaaaagcacctggaaatcaaccttgaccaacctattgtggagacactgcagcagaaggctgaggtggacaaggacgacaaagctgtcaaagacctgggggtgctgctgtttgaaactgtggggctctcttctggcttctcccctgaggattctcagacctactccaatagcatctaccatgaacaagctcggtctagctacaga

SEQ ID NO: 23811 - DNA, 131 bp, Homo sapiens
  MAP TO AC015823.3; EXPRESSED IN LUNG, SIGNAL =   2; EXPRESSED IN ADULT LIVER, SIGNAL = 1.3; EXPRESSED IN HELA, SIGNAL = 3.2; EXPRESSED IN HEART, SIGNAL = 2.5; EXPRESSED IN BONE MARROW, SIGNAL = 2.5; EXPRESSED IN BRAIN, SIGNAL = 2.3; EXPRESSED IN PLACENTA, SIGNAL = 2.5; EXPRESSED IN FETAL LIVER, SIGNAL = 2.2; SWISSPROT HIT: P44477, EVALUE 4.10e+00; NT HIT: AL163248.2, EVALUE 8.00e-05; EST_HUMAN HIT: AW083252.1, EVALUE 6.00e-65
gaatctccatactgttttctacagcagctgcactgttttacattctcaggatggcacaaataatcagtttcttcacatctatgccaatacttcttatttcgtctttttcgataaaaaccatcttaagaggt

SEQ ID NO: 23812 - DNA, 207 bp, Homo sapiens
  MAP TO AC027273.2; EXPRESSED IN PLACENTA, SIGNAL =  12; EXPRESSED IN ADULT LIVER, SIGNAL =  12; EXPRESSED IN HEART, SIGNAL = 8.3; EXPRESSED IN FETAL LIVER, SIGNAL = 7.6; EXPRESSED IN BONE MARROW, SIGNAL =  10; EXPRESSED IN LUNG, SIGNAL = 9.2; EXPRESSED IN HELA, SIGNAL = 6.6; EXPRESSED IN BRAIN, SIGNAL = 7.6; SWISSPROT HIT: P18516, EVALUE 9.80e-01; EST_HUMAN HIT: AI831462.1, EVALUE 3.00e-46; NT HIT: AL163227.2, EVALUE 5.00e-44
atggacaatgaaatcccggttgaggtggtctcagatggagatgggaaatttgttgggaactggaacaaaggtgactcttttcatgttttagcaaagagactggcagcattttgttcctgccctggagatctgtggaactttgaatttgatagagataatttagagcatctggcagaagcaatttctaagcaacaaggcattcaagaa

SEQ ID NO: 23813 - DNA, 208 bp, Homo sapiens
  MAP TO AC011181.5; EXPRESSED IN LUNG, SIGNAL = 1.7; EXPRESSED IN PLACENTA, SIGNAL = 1.4; EXPRESSED IN ADULT LIVER, SIGNAL = 2.5; EXPRESSED IN HEART, SIGNAL = 1.7; EXPRESSED IN FETAL LIVER, SIGNAL = 2.4; EXPRESSED IN BONE MARROW, SIGNAL = 2.6; EXPRESSED IN BRAIN, SIGNAL = 2.5; EST_HUMAN HIT: AI311783.1, EVALUE 2.00e-75; NT HIT: AB014607.1, EVALUE 5.00e-41
ctggggacagatcaagaagctgtcagagatggcggaagaaaatctgaggaaagcaggacaaccagtcacaatgaataatttaatggtagctatgatagtggtgatcactattgctgtgagtatttcttcaacaagagctgacacagagaacaattatacttattgggcatatttatcaatcttggctggcaataatgcctggatgtaa

SEQ ID NO: 23814 - DNA, 182 bp, Homo sapiens
  MAP TO AC025747.3; EXPRESSED IN LUNG, SIGNAL = 3.9; EXPRESSED IN PLACENTA, SIGNAL = 4.1; EXPRESSED IN FETAL LIVER, SIGNAL =   3; EXPRESSED IN BRAIN, SIGNAL = 2.7; EXPRESSED IN BONE MARROW, SIGNAL = 3.6; EXPRESSED IN ADULT LIVER, SIGNAL = 4.2; EXPRESSED IN HEART, SIGNAL = 3.3; SWISSPROT HIT: Q46901, EVALUE 6.60e+00; EST_HUMAN HIT: H46698.1, EVALUE 3.00e-98
ctatgacagtcttcaggttgtgcacgtaaatgactgcattgttggagccagaggccatcagatagctcaattctggctggctgccatgctcatgatgccagctaatggtattcacaagcttgtgatgctgttggatagtacagatcagtttcaggttgggaatctgaaatatttctattgat

SEQ ID NO: 23815 - DNA, 196 bp, Homo sapiens
  MAP TO AC022045.2; EXPRESSED IN ADULT LIVER, SIGNAL = 2.5; EXPRESSED IN HEART, SIGNAL =   2; EXPRESSED IN BONE MARROW, SIGNAL = 2.2; EXPRESSED IN LUNG, SIGNAL = 2.5; EXPRESSED IN PLACENTA, SIGNAL = 2.3; EXPRESSED IN HELA, SIGNAL = 3.2; EXPRESSED IN FETAL LIVER, SIGNAL =   2; EXPRESSED IN BRAIN, SIGNAL = 2.1; EST_HUMAN HIT: AA736969.1, EVALUE 4.40e-02; SWISSPROT HIT: P21817, EVALUE 3.40e-01; NT HIT: U16272.2, EVALUE 4.60e-01
agcggactcacaggctgtgagacttgatgtcgatgccctgtcagtccgaggactgcagagggttttgccgtcagaggaggtagatccaaaagatgccctccagccccagttctgccactcggagcctcggtctgcctgggagctggacgaggagacttcctctggtcccaaaaagaaatggaagcctcctctttcc

SEQ ID NO: 23816 - DNA, 77 bp, Homo sapiens
  MAP TO AC021855.3; EXPRESSED IN LUNG, SIGNAL = 3.5; EXPRESSED IN PLACENTA, SIGNAL =   3; EXPRESSED IN ADULT LIVER, SIGNAL = 3.8; EXPRESSED IN HELA, SIGNAL =   3; EXPRESSED IN HEART, SIGNAL = 3.8; EXPRESSED IN FETAL LIVER, SIGNAL = 2.6; EXPRESSED IN BONE MARROW, SIGNAL = 2.7; EXPRESSED IN BRAIN, SIGNAL = 2.7; SWISSPROT HIT: P04929, EVALUE 7.40e+00
ctaatagcttcaccatttacatagtttccaaaaccagaatccttggatttttcctcaacaccttcttcttcatcata

SEQ ID NO: 23817 - DNA, 199 bp, Homo sapiens
  MAP TO AL136438.8; EXPRESSED IN LUNG, SIGNAL = 3.1; EXPRESSED IN PLACENTA, SIGNAL = 2.8; EXPRESSED IN HEART, SIGNAL = 2.9; EXPRESSED IN FETAL LIVER, SIGNAL = 2.9; EXPRESSED IN BONE MARROW, SIGNAL = 3.1; EXPRESSED IN ADULT LIVER, SIGNAL = 3.3; EXPRESSED IN HELA, SIGNAL = 3.7; EXPRESSED IN BRAIN, SIGNAL = 3.5; SWISSPROT HIT: P08547, EVALUE 2.00e-09; NT HIT: AJ131016.1, EVALUE 1.00e-50; EST_HUMAN HIT: AA244041.1, EVALUE 1.00e-60
tcagctccccatgcggtgtttggtcttctgtttctgcgttagtttgctgagggtaatggcttccagttccatccatgtccctgcaaaggacatgatctcattcctttctatggctgcacagtattctatggtgtatatgtaccacattttctttagcattctatcattgatgggcatttgggttgattccgtgtctttg

SEQ ID NO: 23818 - DNA, 170 bp, Homo sapiens
  MAP TO AC019214.2; EXPRESSED IN PLACENTA, SIGNAL = 1.5; EXPRESSED IN FETAL LIVER, SIGNAL = 1.4; EXPRESSED IN HEART, SIGNAL = 1.3; EXPRESSED IN BONE MARROW, SIGNAL = 1.3; EXPRESSED IN LUNG, SIGNAL =   2; EXPRESSED IN ADULT LIVER, SIGNAL = 1.8; EXPRESSED IN BRAIN, SIGNAL = 1.5; EST_HUMAN HIT: AV649878.1, EVALUE 5.00e-91; SWISSPROT HIT: P05895, EVALUE 1.00e+00; NT HIT: gi11426247, EVALUE 1.50e+00
ctctgaggccctgtcccaccgagccagccctggttccccgttggacagctgacccttgtgccagccactcctctgctccttggagaaggaaaagtcgggagcggcagccggctgcactatgtcggcaggaaagagtccggaacggcccccggcagagccaaactgccagc

SEQ ID NO: 23819 - DNA, 438 bp, Homo sapiens
  MAP TO AC019214.2; EXPRESSED IN BONE MARROW, SIGNAL = 1.2; EXPRESSED IN LUNG, SIGNAL = 1.5; EXPRESSED IN PLACENTA, SIGNAL = 1.6; EXPRESSED IN ADULT LIVER, SIGNAL = 1.5; EXPRESSED IN FETAL LIVER, SIGNAL = 1.3; EXPRESSED IN BRAIN, SIGNAL = 1.3; EXPRESSED IN HEART, SIGNAL = 1.3; SWISSPROT HIT: P16144, EVALUE 1.00e-16; EST_HUMAN HIT: BE005172.1, EVALUE 2.00e-09; NT HIT: Y11107.3, EVALUE 0.00e+00
ctccctcagggctggaaactccctccttcccagcgcagtcacaatcatagcgacaatgacagtggccagggcctctgggcttcgtgacactaacccatttactgccccagcaagcctccgggctcgacgcttgcatgccgaggaaaccaacaagcagaggagcaacctaggctcatccgagcggctaggcccagggatctgcacccaggcctgcctgactccaggggccacgctcttgaccgctgttttaaacgattccactcggtgtggggcgctgtgcctatcccccaccccgctgcccccacagaggcgtaccacttccccccgccggatgtgaaaggacccagtcctcgtcttctggaacatcttggaggtgacctctgtccgaaggcctcgggggctgtctagggcccggatgtccaggttggagcggatccg

SEQ ID NO: 23820 - DNA, 183 bp, Homo sapiens
  MAP TO AC013818.3; EXPRESSED IN BONE MARROW, SIGNAL = 2.2; EXPRESSED IN LUNG, SIGNAL = 2.7; EXPRESSED IN HELA, SIGNAL = 2.6; EXPRESSED IN PLACENTA, SIGNAL = 2.7; EXPRESSED IN ADULT LIVER, SIGNAL = 2.9; EXPRESSED IN HEART, SIGNAL = 2.2; EXPRESSED IN FETAL LIVER, SIGNAL = 1.9; EXPRESSED IN BRAIN, SIGNAL = 2.3; EST_HUMAN HIT: BF091686.1, EVALUE 3.00e-03; SWISSPROT HIT: P52848, EVALUE 2.00e-25; NT HIT: AB036429.1, EVALUE 6.00e-99
ctgccatagagggtctttctgctcagggaagagctcaaaatactggtgggccagttgcactggaggcagagtttgcaatttcaggttggtccagctctgcacaaagttgaccaagttcacaaaggtatataaccctaggcggtcatttccatagtttgataaatgggtcatgaaaatgctgat

SEQ ID NO: 23821 - DNA, 209 bp, Homo sapiens
  MAP TO AC025749.2; EXPRESSED IN HELA, SIGNAL = 7.9; EXPRESSED IN LUNG, SIGNAL = 7.4; EXPRESSED IN ADULT LIVER, SIGNAL = 6.7; EXPRESSED IN BRAIN, SIGNAL = 6.9; EXPRESSED IN BONE MARROW, SIGNAL = 5.8; EXPRESSED IN PLACENTA, SIGNAL = 5.8; EXPRESSED IN FETAL LIVER, SIGNAL = 5.5; EXPRESSED IN HEART, SIGNAL = 6.3; NT HIT: AB011133.1, EVALUE 1.00e-114; SWISSPROT HIT: P25341, EVALUE 4.00e-13; EST_HUMAN HIT: BE895244.1, EVALUE 1.00e-45
ggccgtctacctggtgcggcaccgtgacacacggcagcgctttgccatcaagaagatcaacaaacagaacttgatcctgcgtaaccagatccagcaggtctttgtggagcgtgacattctcacctttgccgagaacccctttgtggtcagcatgttctgctcctttgagacccggcgccacctatgtatggtcatggaatacgtggaag

SEQ ID NO: 23822 - DNA, 294 bp, Homo sapiens
  MAP TO AC025749.2; EXPRESSED IN LUNG, SIGNAL = 1.7; EXPRESSED IN PLACENTA, SIGNAL = 0.74; EXPRESSED IN ADULT LIVER, SIGNAL = 0.82; EXPRESSED IN FETAL LIVER, SIGNAL = 1.8; EXPRESSED IN BRAIN, SIGNAL = 0.65; EXPRESSED IN HEART, SIGNAL = 1.3; EXPRESSED IN BONE MARROW, SIGNAL = 1.4; SWISSPROT HIT: P25232, EVALUE 5.00e-19; EST_HUMAN HIT: AA376399.1, EVALUE 3.00e-69; NT HIT: gi11968181, EVALUE 1.00e-64
atgacgaaagccagagaggatgagggcaatgtggggcttccataccccaaatatgatcctggtgcctggtatggaaccccagagcctgccaccgtgtctctagtgatccttgaaaagttccagcatattttgggagtactcaacaccaacatcgatgggtggtggaaaatagcctttgctatcactgccattaaaggtgtggatggaagatacgcttatgtggtgttgaggaaaacagacattgacctcaccaagagggcgggagactcacggaggatgagatggaatgagtga

SEQ ID NO: 23823 - DNA, 125 bp, Homo sapiens
  MAP TO AC012571.3; EXPRESSED IN LUNG, SIGNAL =   3; EXPRESSED IN ADULT LIVER, SIGNAL = 3.2; EXPRESSED IN HELA, SIGNAL = 6.3; EXPRESSED IN BRAIN, SIGNAL = 4.1; EXPRESSED IN PLACENTA, SIGNAL =   4; EXPRESSED IN FETAL LIVER, SIGNAL = 3.4; EXPRESSED IN HEART, SIGNAL = 1.8; EXPRESSED IN BONE MARROW, SIGNAL = 3.4; NT HIT: AL163213.2, EVALUE 7.00e-39; EST_HUMAN HIT: AI936748.1, EVALUE 7.00e-43; SWISSPROT HIT: P32657, EVALUE 7.00e+00
gcaaccactcccagagcccctggaactctggcccaagactctctgactgactccttcccagatcttctcagcttagcagctgaagactgaagctgcccgatcacctcagaagcctcctggaccat

SEQ ID NO: 23824 - DNA, 170 bp, Homo sapiens
  MAP TO AC019222.3; EXPRESSED IN LUNG, SIGNAL = 3.3; EXPRESSED IN ADULT LIVER, SIGNAL = 2.7; EXPRESSED IN HEART, SIGNAL = 3.3; EXPRESSED IN BRAIN, SIGNAL = 2.6; EXPRESSED IN BONE MARROW, SIGNAL = 2.5; EXPRESSED IN PLACENTA, SIGNAL = 2.7; EXPRESSED IN FETAL LIVER, SIGNAL = 2.6; NT HIT: D16494.1, EVALUE 3.00e-91; EST_HUMAN HIT: BF688320.1, EVALUE 5.00e-91; SWISSPROT HIT: P98166, EVALUE 7.00e-29
tgctcttagtgatggcagcagtaggtggctacttgatgtggcggaattggcaacacaagaacatgaaaagcatgaactttgacaatcctgtgtacttgaaaaccactgaagaggacctctccatagacattggtagacacagtgcttctgttggacacacgtacccagca

SEQ ID NO: 23825 - DNA, 103 bp, Homo sapiens
  MAP TO AL133419.11; EXPRESSED IN LUNG, SIGNAL =   3; EXPRESSED IN PLACENTA, SIGNAL = 3.2; EXPRESSED IN ADULT LIVER, SIGNAL = 3.9; EXPRESSED IN FETAL LIVER, SIGNAL =   3; EXPRESSED IN BRAIN, SIGNAL =   3; EXPRESSED IN HEART, SIGNAL = 3.1; EXPRESSED IN BONE MARROW, SIGNAL = 2.8; EST_HUMAN HIT: AW875126.1, EVALUE 8.20e-02; SWISSPROT HIT: P50418, EVALUE 4.20e+00
gtacaaagaacagtatgatgccaaggaacacatgccactttttgatggagaatatgaaagcatcctgggggaagaaagagatgatgcagaccattcagagcag

SEQ ID NO: 23826 - DNA, 555 bp, Homo sapiens
  MAP TO AC017073.3; EXPRESSED IN HELA, SIGNAL = 2.9; EXPRESSED IN LUNG, SIGNAL = 3.7; EXPRESSED IN PLACENTA, SIGNAL = 2.9; EXPRESSED IN BONE MARROW, SIGNAL = 3.3; EXPRESSED IN ADULT LIVER, SIGNAL = 2.7; EXPRESSED IN HEART, SIGNAL = 1.5; EXPRESSED IN FETAL LIVER, SIGNAL =   4; EXPRESSED IN BRAIN, SIGNAL = 1.9; NT HIT: L10911.1, EVALUE 0.00e+00; SWISSPROT HIT: P19684, EVALUE 1.00e-06; EST_HUMAN HIT: AV718377.1, EVALUE 0.00e+00
aatttttgtcaacataaatatgaataattcctccatgtttattacattcctcaatcacatcgtccttaatctctgtatcccatccaacttcttctgtttgagggttaaacatgttagagagttggaaacactgtgttgcaagtggctgaacagaagcagctgcagctaaagctgaagcttcagtctgctgggaaagtcttgtttgcaaatccataacaaaagaaaattctgccacagcaccaaatgccaaagagccactcatttgtagagcttgctgtgctgctggtggaatctgcaaacctgtatcctctgcaagtcttgccactaactgaagacgaccagttgttcccaaatcaattctagtcctttccagttcatcactgtccaaaaatgaactagtactcgaagcatcagcacgttcaataacatgaccaactttcattggcctccctgctagttcaaatccattaaattgttccaaagactttttggcacattctgaatcagaaaatgtaataaatccatatcccttggatcgaccagtttcactgtcta

SEQ ID NO: 23827 - DNA, 151 bp, Homo sapiens
  MAP TO AL133458.11; EXPRESSED IN PLACENTA, SIGNAL = 5.6; EXPRESSED IN ADULT LIVER, SIGNAL = 5.1; EXPRESSED IN HEART, SIGNAL = 4.8; EXPRESSED IN BRAIN, SIGNAL = 4.9; EXPRESSED IN BONE MARROW, SIGNAL = 4.5; EXPRESSED IN LUNG, SIGNAL = 5.1; EXPRESSED IN FETAL LIVER, SIGNAL = 4.3; SWISSPROT HIT: Q24322, EVALUE 4.00e+00; EST_HUMAN HIT: BF329911.1, EVALUE 2.00e-62
agacagaaacacagagatgtgtttggaagccagcgtggatgccctgtatctctgcatacacgtgaacatgcatgccaggcccatacaggagcagagagacacatttggaagccgatgtacgccctgtgatctgtgcgtacacgtgacacat

SEQ ID NO: 23828 - DNA, 149 bp, Homo sapiens
  MAP TO AC023340.2; EXPRESSED IN HEART, SIGNAL = 3.5; EXPRESSED IN BONE MARROW, SIGNAL = 4.1; EXPRESSED IN PLACENTA, SIGNAL = 4.2; EXPRESSED IN ADULT LIVER, SIGNAL = 4.1; EXPRESSED IN BRAIN, SIGNAL = 3.7; EXPRESSED IN LUNG, SIGNAL = 4.1; EXPRESSED IN HELA, SIGNAL = 2.5; EXPRESSED IN FETAL LIVER, SIGNAL = 3.2; EST_HUMAN HIT: AW161274.1, EVALUE 5.00e-72; SWISSPROT HIT: P25107, EVALUE 4.00e+00; NT HIT: AE005155.1, EVALUE 1.30e+00
cttggagcgatgcacctccccgtcgtcatcctccccgcccacgccgaggatcttgcgggtcttcaggcggctcacgaggtccgtctggctgtgcttcttcatcagaggcgggggctgcttggccgccatcttctcctccagcccggcct

SEQ ID NO: 23829 - DNA, 87 bp, Homo sapiens
  MAP TO AL157392.2; EXPRESSED IN LUNG, SIGNAL = 3.5; EXPRESSED IN HEART, SIGNAL = 2.8; EXPRESSED IN BONE MARROW, SIGNAL =   3; EXPRESSED IN FETAL LIVER, SIGNAL = 2.8; EXPRESSED IN PLACENTA, SIGNAL = 2.9; EXPRESSED IN ADULT LIVER, SIGNAL = 2.5; EXPRESSED IN BRAIN, SIGNAL = 3.6; NT HIT: AB037715.1, EVALUE 5.00e-42; SWISSPROT HIT: P35241, EVALUE 4.30e+00; EST_HUMAN HIT: R13545.1, EVALUE 1.10e+00
gacaagcagggcataccatggtggctgggcctgagctacaaagggatcttccagtatgactaccatgataaagtgaagccaagaaag

SEQ ID NO: 23830 - DNA, 240 bp, Homo sapiens
  MAP TO AC019214.2; EXPRESSED IN LUNG, SIGNAL =   3; EXPRESSED IN PLACENTA, SIGNAL = 3.1; EXPRESSED IN ADULT LIVER, SIGNAL = 1.9; EXPRESSED IN HEART, SIGNAL = 3.6; EXPRESSED IN BRAIN, SIGNAL = 3.3; EXPRESSED IN FETAL LIVER, SIGNAL = 3.1; EXPRESSED IN BONE MARROW, SIGNAL = 3.4; SWISSPROT HIT: P16144, EVALUE 2.00e-41; NT HIT: X53587.1, EVALUE 0.00e+00; EST_HUMAN HIT: AW337277.1, EVALUE 0.00e+00
agcacctggtgaatggccggatggactttgccttcccgggcagcaccaactccctgcacaggatgaccacgaccagtgctgctgcctatggcacccacctgagcccacacgtgccccaccgcgtgctaagcacatcctccaccctcacacgggactacaactcactgacccgctcagaacactcacactcgaccacactgcccagggactactccaccctcacctccgtctcctcccacg

SEQ ID NO: 23831 - DNA, 191 bp, Homo sapiens
  MAP TO AC018730.3; EXPRESSED IN PLACENTA, SIGNAL = 2.4; EXPRESSED IN HELA, SIGNAL = 2.2; EXPRESSED IN FETAL LIVER, SIGNAL = 1.7; EXPRESSED IN BONE MARROW, SIGNAL = 1.7; EXPRESSED IN LUNG, SIGNAL = 1.8; EXPRESSED IN ADULT LIVER, SIGNAL = 2.1; EXPRESSED IN HEART, SIGNAL = 1.5; EXPRESSED IN BRAIN, SIGNAL = 2.3; SWISSPROT HIT: P71067, EVALUE 6.60e+00; NT HIT: gi11444786, EVALUE 4.50e-01
tcaggccacggaatgctgcaattcagtgcccttgttcagacttccattggtatctacagcttccaaaatattcagaacaacagccctgaaagtcatctggtcaagctttgcaatagaagaaagcttatcctccgattcccaaagccctgaagtcagggatttgattacacttatcatgatctcagcttcca

SEQ ID NO: 23832 - DNA, 153 bp, Homo sapiens
  MAP TO AC010789.7; EXPRESSED IN ADULT LIVER, SIGNAL = 1.3; EXPRESSED IN LUNG, SIGNAL = 1.4; EXPRESSED IN PLACENTA, SIGNAL = 1.3; EXPRESSED IN FETAL LIVER, SIGNAL = 1.5; EXPRESSED IN BRAIN, SIGNAL = 1.4; EXPRESSED IN BONE MARROW, SIGNAL = 1.4; EXPRESSED IN HEART, SIGNAL = 1.6; NT HIT: U05588.1, EVALUE 8.80e-02; EST_HUMAN HIT: AV754081.1, EVALUE 1.00e-60; SWISSPROT HIT: Q91612, EVALUE 2.30e+00
cacactgggacgctgccactgactggcatctctggagcctctttcctggaggctcagattcccatcctctgggtgttgtctggcccttttcttcctaagtgcattgtgttcttgcccattttcctgcccacttacaaaggcttatacggttaa

SEQ ID NO: 23833 - DNA, 261 bp, Homo sapiens
  MAP TO AC025249.2; EXPRESSED IN ADULT LIVER, SIGNAL = 1.7; EXPRESSED IN HELA, SIGNAL = 2.3; EXPRESSED IN HEART, SIGNAL = 1.6; EXPRESSED IN FETAL LIVER, SIGNAL = 1.4; EXPRESSED IN BONE MARROW, SIGNAL = 1.6; EXPRESSED IN LUNG, SIGNAL = 1.2; EXPRESSED IN PLACENTA, SIGNAL = 1.6; EXPRESSED IN BRAIN, SIGNAL = 1.1; NT HIT: gi8922379, EVALUE 0.00e+00; SWISSPROT HIT: Q12815, EVALUE 1.40e+00; EST_HUMAN HIT: AU124051.1, EVALUE 0.00e+00
atacaggtggaaacccgaaaacagagtattgtatgggagtttgaaaaataccagcgattactagagaaaaagcagccaccacatcggcagctgggggcagaggtagcagcagctctggccagcctacagcgggaggcagcggagaccatgcagaaactggagttgaaccatagcgagctcatccagcagagccaggtcctgtggaggatgattgcagagttgaaagagaggtcgcagaggcctgtccgctggatgttgcag

SEQ ID NO: 23834 - DNA, 420 bp, Homo sapiens
  MAP TO AL133279.2; EXPRESSED IN PLACENTA, SIGNAL = 1.8; EXPRESSED IN HELA, SIGNAL = 2.3; EXPRESSED IN HEART, SIGNAL =   2; EXPRESSED IN LUNG, SIGNAL = 1.6; EXPRESSED IN BRAIN, SIGNAL = 1.9; EXPRESSED IN ADULT LIVER, SIGNAL = 1.8; EXPRESSED IN FETAL LIVER, SIGNAL = 2.5; EXPRESSED IN BONE MARROW, SIGNAL = 1.8; SWISSPROT HIT: Q09562, EVALUE 5.50e+00; EST_HUMAN HIT: BF347229.1, EVALUE 9.00e-33; NT HIT: AJ271735.1, EVALUE 3.00e-16
tctgaattctttgttgtcatttcaacaatgttcacagcatctttaccaggcaggagcagattccatctcaagaaatcactttctttgttcatccataagaagaagctcctaattcattcaagttttatcatgagatgcagcatttcagtcacatcttcacactctacttctaattccaacacatcagcagtggcatcctctagtgaagtcttgaagctctcaaagtcatccatgagccttggaatcaacttcttccaaactcttgttaatgttggtattttgacctcttccaattcatcacaaatgttcttaatggcatctacaatgatgactcctttccagaagatgttcaaatcactttgctcagactcatcagaggaatcattatgtatggcagctacagccttatgaaatgtattt

SEQ ID NO: 23835 - DNA, 177 bp, Homo sapiens
  MAP TO AC013751.3; EXPRESSED IN LUNG, SIGNAL =   4; EXPRESSED IN PLACENTA, SIGNAL = 4.3; EXPRESSED IN HELA, SIGNAL = 2.6; EXPRESSED IN HEART, SIGNAL = 3.4; EXPRESSED IN FETAL LIVER, SIGNAL = 3.8; EXPRESSED IN BRAIN, SIGNAL = 3.7; EXPRESSED IN ADULT LIVER, SIGNAL = 3.4; EXPRESSED IN BONE MARROW, SIGNAL = 3.8; NT HIT: gi4758451, EVALUE 3.00e-45; SWISSPROT HIT: Q08379, EVALUE 9.00e-17; EST_HUMAN HIT: BE253863.1, EVALUE 4.00e-45
atggctctccatggggaaggagatggactggacagtgaggaggaggcgcttccgctcatgccaagcatcccggaggaactggagagtcgggaggccatggtggcatttttaaactcagctgtggccagtgccgaggaggagcaggcatggccacgtgggcagctgaaggagcaaagg

SEQ ID NO: 23836 - DNA, 164 bp, Homo sapiens
  MAP TO AC015502.3; EXPRESSED IN ADULT LIVER, SIGNAL =  10; EXPRESSED IN HEART, SIGNAL = 5.4; EXPRESSED IN BONE MARROW, SIGNAL =  10; EXPRESSED IN LUNG, SIGNAL = 5.9; EXPRESSED IN PLACENTA, SIGNAL = 8.3; EXPRESSED IN HELA, SIGNAL =  11; EXPRESSED IN FETAL LIVER, SIGNAL = 7.4; EXPRESSED IN BRAIN, SIGNAL = 7.4; EST_HUMAN HIT: AW983880.1, EVALUE 1.00e-29; SWISSPROT HIT: Q95917, EVALUE 2.30e+00; NT HIT: U60822.1, EVALUE 8.00e-24
tgatatggacaatgaagcccaagctgagatggtctcagatggagacgaggaacttgttggtaaatggagcaaagaggacacttgttctgcttcagcaaagagactggaggcattttggccctatcttagagctctgtgtaacattgaacttgagagagattatt

SEQ ID NO: 23837 - DNA, 198 bp, Homo sapiens
  MAP TO AL158150.2; EXPRESSED IN PLACENTA, SIGNAL = 1.9; EXPRESSED IN ADULT LIVER, SIGNAL = 1.7; EXPRESSED IN FETAL LIVER, SIGNAL = 1.8; EXPRESSED IN BRAIN, SIGNAL = 1.8; EXPRESSED IN BONE MARROW, SIGNAL = 1.6; EXPRESSED IN LUNG, SIGNAL =   2; EXPRESSED IN HEART, SIGNAL = 2.1; SWISSPROT HIT: P49588, EVALUE 9.90e-01; NT HIT: AF275654.1, EVALUE 3.00e-02
ctttgtgactttgaataagagaatgctgtcattggtaccccttccactcccgctttctggttcaggggtatttaacctggggtccacaagctttgggaactccataagccctctaatatatgtgcaaatatgcttttctctggtgaaagaatccagaactttattcagtttcttaatagatgcattacccagcaacat

SEQ ID NO: 23838 - DNA, 151 bp, Homo sapiens
  MAP TO AC016429.4; EXPRESSED IN LUNG, SIGNAL =   6; EXPRESSED IN PLACENTA, SIGNAL = 5.4; EXPRESSED IN HELA, SIGNAL = 8.1; EXPRESSED IN HEART, SIGNAL = 5.2; EXPRESSED IN FETAL LIVER, SIGNAL =   4; EXPRESSED IN BRAIN, SIGNAL = 4.5; EXPRESSED IN BONE MARROW, SIGNAL = 4.6; EXPRESSED IN ADULT LIVER, SIGNAL = 5.8; EST_HUMAN HIT: Z43240.1, EVALUE 2.00e+00; NT HIT: AJ271735.1, EVALUE 1.40e+00
atgagcagcttcagtccatggaacttcagtattatggataatgatatagccagcaaatatctaagtgttatagacatagatcgtattatagataatttgtctttttatgtttttcttttttggttcgccaatatcgacatgagtgacatga

SEQ ID NO: 23839 - DNA, 77 bp, Homo sapiens
  MAP TO AL161644.1; EXPRESSED IN ADULT LIVER, SIGNAL = 1.4; EXPRESSED IN HEART, SIGNAL = 1.8; EXPRESSED IN FETAL LIVER, SIGNAL = 1.2; EXPRESSED IN BONE MARROW, SIGNAL = 1.2; EXPRESSED IN LUNG, SIGNAL = 1.2; EXPRESSED IN PLACENTA, SIGNAL = 1.5; EXPRESSED IN BRAIN, SIGNAL = 1.1; NT HIT: gi11431065, EVALUE 6.10e-01; SWISSPROT HIT: P24563, EVALUE 7.40e+00
cctggcagctcctcagggtcaggacaagtctgatgtgcctccagaccccagcatggggctggctggccacataggag

SEQ ID NO: 23840 - DNA, 102 bp, Homo sapiens
  MAP TO AC026442.1; EXPRESSED IN PLACENTA, SIGNAL = 4.5; EXPRESSED IN ADULT LIVER, SIGNAL = 4.5; EXPRESSED IN HEART, SIGNAL = 3.1; EXPRESSED IN FETAL LIVER, SIGNAL = 2.7; EXPRESSED IN BONE MARROW, SIGNAL = 3.6; EXPRESSED IN LUNG, SIGNAL = 3.8; EXPRESSED IN HELA, SIGNAL = 2.6; EXPRESSED IN BRAIN, SIGNAL = 3.6; NT HIT: AF009660.1, EVALUE 4.00e-06; EST_HUMAN HIT: AW139674.1, EVALUE 8.00e-05
atgttgaagctgacaagacttatggccaaaaacttctggagctgtggcccaacctgtacctggggccttttgagccagagctggagctggagcagcagagat

SEQ ID NO: 23841 - DNA, 75 bp, Homo sapiens
  MAP TO AC011111.3; EXPRESSED IN PLACENTA, SIGNAL = 2.5; EXPRESSED IN HELA, SIGNAL = 3.9; EXPRESSED IN HEART, SIGNAL = 2.3; EXPRESSED IN FETAL LIVER, SIGNAL = 2.2; EXPRESSED IN BONE MARROW, SIGNAL = 2.5; EXPRESSED IN LUNG, SIGNAL = 2.1; EXPRESSED IN ADULT LIVER, SIGNAL = 2.4; EXPRESSED IN BRAIN, SIGNAL = 2.9; NT HIT: gi4506086, EVALUE 9.10e+00; EST_HUMAN HIT: BE542663.1, EVALUE 5.60e-02
attccactggctgaacacaataagtaggatggccaggccaaagtcaatggggcagggaaacagactcttttccat

SEQ ID NO: 23842 - DNA, 164 bp, Homo sapiens
  MAP TO AL133334.14; EXPRESSED IN PLACENTA, SIGNAL = 4.1; EXPRESSED IN ADULT LIVER, SIGNAL = 4.8; EXPRESSED IN FETAL LIVER, SIGNAL = 4.4; EXPRESSED IN HELA, SIGNAL = 4.8; EXPRESSED IN BRAIN, SIGNAL =   4; EXPRESSED IN BONE MARROW, SIGNAL =  15; EXPRESSED IN LUNG, SIGNAL = 4.9; EXPRESSED IN HEART, SIGNAL = 4.2; EST_HUMAN HIT: AV684703.1, EVALUE 5.60e-01; SWISSPROT HIT: P48804, EVALUE 7.80e-01
tgtcccaaggaggaccccagccagcagctggctccattgcctggagtttgctgccaatgtggccagaatcatgcatttggcctgctgtggtccaccaaagcccacaggccccatcctgtgtacctggcccaaggcaggcactatggtgcacttggtctcagaag

SEQ ID NO: 23843 - DNA, 142 bp, Homo sapiens
  MAP TO AL121901.10; EXPRESSED IN ADULT LIVER, SIGNAL = 4.9; EXPRESSED IN BRAIN, SIGNAL = 4.9; EXPRESSED IN PLACENTA, SIGNAL = 7.8; EXPRESSED IN HEART, SIGNAL = 3.9; EXPRESSED IN FETAL LIVER, SIGNAL = 7.8; EXPRESSED IN BONE MARROW, SIGNAL = 3.9; EXPRESSED IN LUNG, SIGNAL = 5.5; EXPRESSED IN HELA, SIGNAL = 2.8; SWISSPROT HIT: P00736, EVALUE 1.40e+00; NT HIT: AF214562.1, EVALUE 1.00e-74; EST_HUMAN HIT: AW292495.1, EVALUE 2.00e-74
agtctccatcctgattagggtcttcccccaacagaactatttcttgctgctcaatccatttcctctggcccagcttcccagtgctcacagatggctggcccatgtgctggaagatgacacagttgccttctctccgaggaac

SEQ ID NO: 23844 - DNA, 339 bp, Homo sapiens
  MAP TO AC016546.2; EXPRESSED IN PLACENTA, SIGNAL = 8.4; EXPRESSED IN ADULT LIVER, SIGNAL =  13; EXPRESSED IN HEART, SIGNAL =  11; EXPRESSED IN FETAL LIVER, SIGNAL =  23; EXPRESSED IN BONE MARROW, SIGNAL =  27; EXPRESSED IN BRAIN, SIGNAL = 8.6; EXPRESSED IN LUNG, SIGNAL =  14; EXPRESSED IN HELA, SIGNAL = 6.8; SWISSPROT HIT: P47914, EVALUE 6.00e-26; EST_HUMAN HIT: BF214902.1, EVALUE 1.00e-111; NT HIT: AF116627.1, EVALUE 7.00e-60
atgcactttgccaagaagcacaagaagggcctaaagaagatgcaggccaacaatgccaaggccatgagtgcacgcgctgaggctatcaagatcctcgtaaagcccaaagaggttgagcctaagaccccaaagggtgtcagctgcaagctagatcgacttgcctacattgcccaccccaagcttgggaagcgtgctcgtgcccgcattgccaaggggctcaggctatgccagccaaaggccaaggccaaggatcaaaccaaggccctggctgcagctccagcttcagttccagctcaggctcccagaggtgcccagggccctacaaaggcttcagagtag

SEQ ID NO: 23845 - DNA, 118 bp, Homo sapiens
  MAP TO AC015805.3; EXPRESSED IN LUNG, SIGNAL = 4.4; EXPRESSED IN PLACENTA, SIGNAL = 3.8; EXPRESSED IN HELA, SIGNAL = 5.8; EXPRESSED IN HEART, SIGNAL = 3.9; EXPRESSED IN BRAIN, SIGNAL =   4; EXPRESSED IN ADULT LIVER, SIGNAL = 4.4; EXPRESSED IN FETAL LIVER, SIGNAL = 3.5; EXPRESSED IN BONE MARROW, SIGNAL = 3.7; NT HIT: AB037721.1, EVALUE 4.10e+00; SWISSPROT HIT: P05095, EVALUE 4.20e-02
ccacaacctggataatctgggccaggaggacgccatctgtcacatcttgctggagatccctgatgagacgcttgtggccggatttggctaggtaatgattggcccagtctgtgtagat

SEQ ID NO: 23846 - DNA, 124 bp, Homo sapiens
  MAP TO AC019083.5; EXPRESSED IN LUNG, SIGNAL = 1.3; EXPRESSED IN PLACENTA, SIGNAL = 0.98; EXPRESSED IN ADULT LIVER, SIGNAL = 1.3; EXPRESSED IN HEART, SIGNAL = 1.7; EXPRESSED IN FETAL LIVER, SIGNAL = 1.8; EXPRESSED IN BRAIN, SIGNAL = 2.2; EXPRESSED IN BONE MARROW, SIGNAL = 1.1; NT HIT: gi4826853, EVALUE 3.00e-19; EST_HUMAN HIT: AW674891.1, EVALUE 8.00e-21; SWISSPROT HIT: O95169, EVALUE 8.00e-10
atgatcaaggacatgcccctggggttctattccaagaccccagaagaatgggccaccgctgccaagaagtataatatgtgtgtggaagactatcagccttacttggatgatggcatggagtatg

SEQ ID NO: 23847 - DNA, 284 bp, Homo sapiens
  MAP TO AC013552.3; EXPRESSED IN ADULT LIVER, SIGNAL = 3.3; EXPRESSED IN LUNG, SIGNAL = 2.3; EXPRESSED IN HEART, SIGNAL = 2.2; EXPRESSED IN BRAIN, SIGNAL = 2.2; EXPRESSED IN BONE MARROW, SIGNAL = 4.7; EXPRESSED IN PLACENTA, SIGNAL = 2.3; EXPRESSED IN HELA, SIGNAL = 9.5; EXPRESSED IN FETAL LIVER, SIGNAL = 4.1; EST_HUMAN HIT: AL046352.1, EVALUE 1.00e-114; SWISSPROT HIT: P23588, EVALUE 1.00e-34; NT HIT: gi11434772, EVALUE 1.00e-115
gtaacaggagaattcgagtggacgttgctgatcaagcacaggatacagacagggacgatcgttcttttggccgtgatagaaatcgggattctgacaaaacagatacagactggagggctcgttctgccacagacagctttgatgactacccgcctagaaggggtgatgataggtttggagacaagtatcgagatcgttatgattcagaccagtatggccgtgggtattggtatgagtatcgggatggcccatgccgggatatggatcgatatggctggcggtag

SEQ ID NO: 23848 - DNA, 111 bp, Homo sapiens
  MAP TO AC016847.3; EXPRESSED IN ADULT LIVER, SIGNAL = 6.3; EXPRESSED IN FETAL LIVER, SIGNAL = 5.2; EXPRESSED IN PLACENTA, SIGNAL = 6.1; EXPRESSED IN HELA, SIGNAL =   8; EXPRESSED IN BRAIN, SIGNAL = 4.7; EXPRESSED IN BONE MARROW, SIGNAL =   5; EXPRESSED IN LUNG, SIGNAL = 6.5; EXPRESSED IN HEART, SIGNAL = 5.7; EST_HUMAN HIT: T28240.1, EVALUE 2.00e-52; NT HIT: gi11418704, EVALUE 3.00e-56; SWISSPROT HIT: P22003, EVALUE 1.00e-17
cagagtctgaactatagcgtggttggtggcattcatatgggcgttaagtggaaaagaacattctccatcacaataaaatgcagcgtatccttctggtgctataatccagtc

SEQ ID NO: 23849 - DNA, 186 bp, Homo sapiens
  MAP TO U82670.2; EXPRESSED IN PLACENTA, SIGNAL = 5.7; EXPRESSED IN FETAL LIVER, SIGNAL = 8.5; EXPRESSED IN BONE MARROW, SIGNAL = 1.8; EXPRESSED IN LUNG, SIGNAL = 1.7; EXPRESSED IN ADULT LIVER, SIGNAL =   2; EXPRESSED IN HEART, SIGNAL = 2.2; EXPRESSED IN BRAIN, SIGNAL = 2.1; EST_HUMAN HIT: T95967.1, EVALUE 1.60e-01; NT HIT: U02482.1, EVALUE 1.10e-01; SWISSPROT HIT: P94598, EVALUE 1.70e+00
ggatcccagagtggcgcccatgaacacgcaagaaagaaattatcagacaaggggacacccattgacggggaagtgtgcatctgcaggggagttgcaagatataccagtcctaagcacattaaaaacgggcaaaaaaaaaatgatttcaacaagatgattactgctgaagaaaacaaagttcattaa

SEQ ID NO: 23850 - DNA, 236 bp, Homo sapiens
  MAP TO AC008597.3; EXPRESSED IN PLACENTA, SIGNAL = 2.1; EXPRESSED IN FETAL LIVER, SIGNAL = 4.1; EXPRESSED IN BONE MARROW, SIGNAL = 2.9; EXPRESSED IN LUNG, SIGNAL = 2.8; EXPRESSED IN ADULT LIVER, SIGNAL = 2.8; EXPRESSED IN HEART, SIGNAL = 2.4; EXPRESSED IN BRAIN, SIGNAL = 2.4; NT HIT: gi11417035, EVALUE 1.00e-130; SWISSPROT HIT: P51659, EVALUE 5.00e-40; EST_HUMAN HIT: AW956242.1, EVALUE 1.00e-130
ctttgcaaagttgattgaaagtccaggaatttctgctaatcctccacccatcatagatttctgacctatgataactccgaaggtgggcaaacaggagaaatcagaacttccttcataaataaatttcaaatcttttggatccttgattgacgctcccactccaagggcatacataatagcttccagttccgtataagcataagaaaatggagggagtttctggccaatagctccag

SEQ ID NO: 23851 - DNA, 97 bp, Homo sapiens
  MAP TO AC011022.4; EXPRESSED IN LUNG, SIGNAL = 1.2; EXPRESSED IN HEART, SIGNAL = 1.2; EXPRESSED IN FETAL LIVER, SIGNAL = 1.6; EXPRESSED IN BONE MARROW, SIGNAL = 1.8; EXPRESSED IN ADULT LIVER, SIGNAL = 0.82; EXPRESSED IN BRAIN, SIGNAL = 1.9; EXPRESSED IN PLACENTA, SIGNAL =   1; EXPRESSED IN HELA, SIGNAL = 2.5; SWISSPROT HIT: P38757, EVALUE 1.00e-03; NT HIT: gi7661721, EVALUE 3.00e-43; EST_HUMAN HIT: BE279508.1, EVALUE 5.00e-43
ctgccacagcaaagccatagatctccatgctttctgtaaacaccaccagctcgtaccactggctcaccacttccaggaagaaatccacatggggcct

SEQ ID NO: 23852 - DNA, 169 bp, Homo sapiens
  MAP TO AL133174.9; EXPRESSED IN BONE MARROW, SIGNAL =   4; EXPRESSED IN HEART, SIGNAL = 3.8; EXPRESSED IN LUNG, SIGNAL =   4; EXPRESSED IN PLACENTA, SIGNAL =   3; EXPRESSED IN ADULT LIVER, SIGNAL =   4; EXPRESSED IN HELA, SIGNAL = 3.5; EXPRESSED IN FETAL LIVER, SIGNAL = 4.2; EXPRESSED IN BRAIN, SIGNAL = 3.7; NT HIT: gi11422086, EVALUE 1.00e-90; SWISSPROT HIT: P40095, EVALUE 2.30e+00; EST_HUMAN HIT: BE891800.1, EVALUE 2.00e-71
caagacacgctggatgcagatatccacatagagacggaggatcagggcatgtataagtacatgtcttcccagcacctcttcaagctgttggactgtttgcaggaatcccattcattctcaaaggccttcaactccaattacgagcagcggactgtcctgtggcgagcag

SEQ ID NO: 23853 - DNA, 122 bp, Homo sapiens
  MAP TO AC021186.2; EXPRESSED IN LUNG, SIGNAL = 3.4; EXPRESSED IN HELA, SIGNAL = 4.8; EXPRESSED IN HEART, SIGNAL = 3.4; EXPRESSED IN FETAL LIVER, SIGNAL = 3.8; EXPRESSED IN BONE MARROW, SIGNAL =   4; EXPRESSED IN PLACENTA, SIGNAL = 3.3; EXPRESSED IN ADULT LIVER, SIGNAL =   4; EXPRESSED IN BRAIN, SIGNAL = 3.7; SWISSPROT HIT: P08036, EVALUE 1.10e+00; NT HIT: AL163208.2, EVALUE 2.00e-14; EST_HUMAN HIT: AU136779.1, EVALUE 2.00e-21
aggggaacacaatggtgcccagaagcttggagatgccagaaaccacagagccccaaagagggtggcacagccctggctcagggagccccagctcttctctacttcttgttgcccacagtgtg

SEQ ID NO: 23854 - DNA, 151 bp, Homo sapiens
  MAP TO AC011957.2; EXPRESSED IN LUNG, SIGNAL = 3.5; EXPRESSED IN PLACENTA, SIGNAL = 3.4; EXPRESSED IN HEART, SIGNAL = 3.1; EXPRESSED IN FETAL LIVER, SIGNAL = 2.4; EXPRESSED IN ADULT LIVER, SIGNAL = 3.2; EXPRESSED IN BRAIN, SIGNAL = 3.2; EXPRESSED IN BONE MARROW, SIGNAL = 3.1; EST_HUMAN HIT: T07621.1, EVALUE 4.00e-48; NT HIT: gi11526464, EVALUE 6.00e-80; SWISSPROT HIT: Q10656, EVALUE 3.10e+00
ttctgattccggttcttgatgttgaagaagagaaaagcactggccatgatcatcccgaggatggtgagggcagagaggatgctgtagagaggtagggagatcttccgcagctgctccaggatgatggtcttgtcttttggtggttcggatc

SEQ ID NO: 23855 - DNA, 202 bp, Homo sapiens
  MAP TO AL157405.2; EXPRESSED IN ADULT LIVER, SIGNAL = 2.3; EXPRESSED IN FETAL LIVER, SIGNAL = 3.8; EXPRESSED IN BRAIN, SIGNAL = 1.9; EXPRESSED IN BONE MARROW, SIGNAL = 1.9; EXPRESSED IN LUNG, SIGNAL = 2.1; EXPRESSED IN PLACENTA, SIGNAL = 2.3; EXPRESSED IN HELA, SIGNAL = 2.5; EXPRESSED IN HEART, SIGNAL = 2.2; SWISSPROT HIT: Q58054, EVALUE 2.90e+00; EST_HUMAN HIT: BF354030.1, EVALUE 3.00e-28
gacctcttaccctcagttcttccgtctttctggctgttctctcattctaccattttctgaaaataaaattgcctatgagacagcaacaaatgttgtctgaatacaaacactatctgaagaagaaaaactcagatattaaaagtctagccaataccaaacaaatctgtgctcttatcttccatgaggccctagttaccagttt

SEQ ID NO: 23856 - DNA, 123 bp, Homo sapiens
  MAP TO AC013584.3; EXPRESSED IN FETAL LIVER, SIGNAL = 8.2; EXPRESSED IN HELA, SIGNAL =  13; EXPRESSED IN HEART, SIGNAL = 9.4; EXPRESSED IN BRAIN, SIGNAL = 7.4; EXPRESSED IN BONE MARROW, SIGNAL = 9.5; EXPRESSED IN ADULT LIVER, SIGNAL = 8.1; EXPRESSED IN PLACENTA, SIGNAL =   9; EXPRESSED IN LUNG, SIGNAL = 9.7; EST_HUMAN HIT: BF370628.1, EVALUE 6.30e+00; SWISSPROT HIT: P24091, EVALUE 2.40e+00; NT HIT: AF193835.1, EVALUE 4.30e+00
tgaatctgattgttttgaggatactgcccatggtatttgctgccattgggcatttgctgccatggcatttgccatggcatttgctgccattgcaatctcattttcttcttccgcatcggattt

SEQ ID NO: 23857 - DNA, 256 bp, Homo sapiens
  MAP TO AC021973.2; EXPRESSED IN LUNG, SIGNAL = 1.2; EXPRESSED IN PLACENTA, SIGNAL = 1.4; EXPRESSED IN ADULT LIVER, SIGNAL = 0.88; EXPRESSED IN HEART, SIGNAL = 1.2; EXPRESSED IN FETAL LIVER, SIGNAL = 1.6; EXPRESSED IN BRAIN, SIGNAL = 0.9; EXPRESSED IN BONE MARROW, SIGNAL = 0.93; SWISSPROT HIT: P21242, EVALUE 4.00e+00; NT HIT: U67557.1, EVALUE 9.60e+00; EST_HUMAN HIT: BF345554.1, EVALUE 1.50e-02
tagtttggaaggagacgtgtgggaggaaattaagtcttcatatgacgacaagagtaaaggcatgagcaaatcaacagtttgttctgcagcagccaagattatctatactgcaattagccatagcaatgcagaaaataacttcatccatcattttagtgttgtcacgttgaattttattgttggtatatatgtgtttatatttctcttaaaatttttctttgcttctgttgttgtgttagggagtttggttattctc

SEQ ID NO: 23858 - DNA, 154 bp, Homo sapiens
  MAP TO AC016487.4; EXPRESSED IN PLACENTA, SIGNAL = 2.8; EXPRESSED IN HELA, SIGNAL =   5; EXPRESSED IN HEART, SIGNAL = 2.6; EXPRESSED IN BONE MARROW, SIGNAL = 3.9; EXPRESSED IN LUNG, SIGNAL = 2.3; EXPRESSED IN ADULT LIVER, SIGNAL = 2.3; EXPRESSED IN FETAL LIVER, SIGNAL = 3.4; EXPRESSED IN BRAIN, SIGNAL = 3.6; NT HIT: AL163249.2, EVALUE 7.00e-21; EST_HUMAN HIT: M78590.1, EVALUE 7.00e-22
cacgagggtccacggcttcattcttgaagtcagtgagaccaagaacccaccaattcagggcagaaaatgacaaagccaccaagaagcctggtgatgaaagcctgaacaccagaaaccagaaggtcacaccataaagataggtaagcttgatcca

SEQ ID NO: 23859 - DNA, 281 bp, Homo sapiens
  MAP TO AL135929.2; EXPRESSED IN LUNG, SIGNAL = 1.4; EXPRESSED IN ADULT LIVER, SIGNAL = 1.7; EXPRESSED IN FETAL LIVER, SIGNAL = 1.5; EXPRESSED IN BRAIN, SIGNAL = 2.5; EXPRESSED IN BONE MARROW, SIGNAL = 1.2; EXPRESSED IN PLACENTA, SIGNAL = 1.3; EXPRESSED IN HEART, SIGNAL = 1.4; SWISSPROT HIT: Q95242, EVALUE 3.00e-05; NT HIT: AB028174.1, EVALUE 5.00e-20
agtgacattcagcaccatgctctggacagggccgtagctgttgtctgctgtacagtagtatccccctgcatggctctgtctgatggcagggagctccagctctgctctcagggaacgctgagttttcctccccagactctcctgcatgtcctctcggtgccaggagaatgtggtatcccctgtgccttcagccacggagcagacaaggaccagcatctccccttcaacagcctggccccctgagggctgggtctccaggagcaccccagacacagggatcc

SEQ ID NO: 23860 - DNA, 90 bp, Homo sapiens
  MAP TO AC013612.3; EXPRESSED IN PLACENTA, SIGNAL =  29; EXPRESSED IN ADULT LIVER, SIGNAL =  31; EXPRESSED IN HEART, SIGNAL =  25; EXPRESSED IN FETAL LIVER, SIGNAL =  27; EXPRESSED IN BRAIN, SIGNAL =  25; EXPRESSED IN BONE MARROW, SIGNAL =  31; EXPRESSED IN LUNG, SIGNAL =  33; EXPRESSED IN HELA, SIGNAL =  39; EST_HUMAN HIT: AW963676.1, EVALUE 1.00e-43; NT HIT: U92227.1, EVALUE 7.40e-01
tctgatgaagcagctgagagatgatggctgctttaagcatctggatcagcggattcagagaagattcttgcaaaaatgcccaacacttct

SEQ ID NO: 23861 - DNA, 75 bp, Homo sapiens
  MAP TO AC019159.3; EXPRESSED IN PLACENTA, SIGNAL = 3.1; EXPRESSED IN HEART, SIGNAL = 1.7; EXPRESSED IN FETAL LIVER, SIGNAL = 1.2; EXPRESSED IN BONE MARROW, SIGNAL = 1.3; EXPRESSED IN LUNG, SIGNAL =   2; EXPRESSED IN ADULT LIVER, SIGNAL = 1.6; EXPRESSED IN BRAIN, SIGNAL = 1.2; NT HIT: gi4501972, EVALUE 1.50e-01; SWISSPROT HIT: P09087, EVALUE 9.70e+00
gaatcattccagccatcattgtctggatcctctgaacaacctccagcagcatcatgacctttaccaacatccgag

SEQ ID NO: 23862 - DNA, 171 bp, Homo sapiens
  MAP TO AL136969.2; EXPRESSED IN PLACENTA, SIGNAL = 3.9; EXPRESSED IN LUNG, SIGNAL = 4.9; EXPRESSED IN HEART, SIGNAL = 5.9; EXPRESSED IN FETAL LIVER, SIGNAL = 6.2; EXPRESSED IN BONE MARROW, SIGNAL = 4.3; EXPRESSED IN ADULT LIVER, SIGNAL = 3.7; EXPRESSED IN BRAIN, SIGNAL = 4.7; NT HIT: M29063.1, EVALUE 3.00e-51; SWISSPROT HIT: P07910, EVALUE 6.00e-22; EST_HUMAN HIT: AU131648.1, EVALUE 4.00e-51
atggccagcaatgttaccaacagaacagatcctcgctccatgaactcccatgtgttcactggaaatctcaacactcttgtggtcaagaagtgtgatgtggaggcaatcttttcgatgtgcagcaaaattgtgggttgctcagttcataagggctttgcctttgttcaacag

SEQ ID NO: 23863 - DNA, 127 bp, Homo sapiens
  MAP TO AC020991.3; EXPRESSED IN ADULT LIVER, SIGNAL = 0.93; EXPRESSED IN FETAL LIVER, SIGNAL = 2.4; EXPRESSED IN PLACENTA, SIGNAL =   1; EXPRESSED IN BRAIN, SIGNAL = 1.2; EXPRESSED IN BONE MARROW, SIGNAL = 1.9; EXPRESSED IN LUNG, SIGNAL = 1.2; EXPRESSED IN HEART, SIGNAL = 1.8; EST_HUMAN HIT: BF698707.1, EVALUE 1.00e-65; SWISSPROT HIT: Q64252, EVALUE 6.00e-18; NT HIT: U54562.1, EVALUE 1.00e-65
ctgttgaataactttaactagatcttttagaacctgccgacgttttcgaacatccttgtttgttatgactgctgtagtcaaatagcgaagaatgtgtggacacattgtctgaattgcattaagatat

SEQ ID NO: 23864 - DNA, 196 bp, Homo sapiens
  MAP TO AL161668.1; EXPRESSED IN LUNG, SIGNAL = 1.2; EXPRESSED IN HEART, SIGNAL = 1.3; EXPRESSED IN FETAL LIVER, SIGNAL = 1.2; EXPRESSED IN BONE MARROW, SIGNAL = 1.3; EXPRESSED IN PLACENTA, SIGNAL = 1.2; EXPRESSED IN ADULT LIVER, SIGNAL = 1.2; EXPRESSED IN BRAIN, SIGNAL = 1.1; EST_HUMAN HIT: BE868452.1, EVALUE 1.00e-20; NT HIT: AK024463.1, EVALUE 2.00e-65; SWISSPROT HIT: P07507, EVALUE 1.70e+00
aggcacggaaggacagaattgaggggctcaacaagggaaatgattcattcttctctgctccttcccaaggctggagggccaaggcccagctacactgtatcaggaagtggacgaggccattcaccagcttgtgcgcctctccaacctgcacgtgcagcagcaagagcagcggcagtgcctgcggcgactccagcag

SEQ ID NO: 23865 - DNA, 121 bp, Homo sapiens
  MAP TO AC011831.4; EXPRESSED IN PLACENTA, SIGNAL = 6.4; EXPRESSED IN HELA, SIGNAL =  11; EXPRESSED IN HEART, SIGNAL = 6.3; EXPRESSED IN BRAIN, SIGNAL =   5; EXPRESSED IN BONE MARROW, SIGNAL = 5.9; EXPRESSED IN ADULT LIVER, SIGNAL = 7.5; EXPRESSED IN FETAL LIVER, SIGNAL = 5.4; EXPRESSED IN LUNG, SIGNAL = 7.3; NT HIT: AB033089.1, EVALUE 4.00e-62
gtgataaaacaggaagaacttggcaaggatctctttgattgtactttgtatgttctattgaaatatgatgattttaatgctgacaagcacctggctcttgaagaattttatagagcattcc

SEQ ID NO: 23866 - DNA, 284 bp, Homo sapiens
  MAP TO AL121586.28; EXPRESSED IN LUNG, SIGNAL = 2.7; EXPRESSED IN PLACENTA, SIGNAL = 3.6; EXPRESSED IN HEART, SIGNAL = 2.2; EXPRESSED IN FETAL LIVER, SIGNAL = 2.2; EXPRESSED IN BONE MARROW, SIGNAL = 2.9; EXPRESSED IN ADULT LIVER, SIGNAL = 2.8; EXPRESSED IN BRAIN, SIGNAL = 2.3; NT HIT: U15132.1, EVALUE 1.10e-02; EST_HUMAN HIT: N45480.1, EVALUE 2.00e-66; SWISSPROT HIT: P31696, EVALUE 6.40e+00
cggggccccgagctctgctctgtgcagctggcccgcaatggggccgggccgaggtgcaatctgtttcgctgccgccgcctgaggggctggtggccggtagtgaagctgaaggaggcagaggacgtggagcgggaggcgcaggaggctcaggctggcaagaagaagcgaaagcagaggaggaggaagggccggccagaagacctggagttcacagacatgggtggcaatgtgtacatcctcacggtgggtgcccgtgggcagaggccaggctgagctggggcctg

SEQ ID NO: 23867 - DNA, 160 bp, Homo sapiens
  MAP TO AC024196.2; EXPRESSED IN LUNG, SIGNAL = 1.9; EXPRESSED IN ADULT LIVER, SIGNAL = 1.6; EXPRESSED IN HEART, SIGNAL = 1.7; EXPRESSED IN BRAIN, SIGNAL = 1.8; EXPRESSED IN BONE MARROW, SIGNAL = 1.8; EXPRESSED IN PLACENTA, SIGNAL = 1.6; EXPRESSED IN FETAL LIVER, SIGNAL = 1.5; SWISSPROT HIT: P11679, EVALUE 7.00e-05; NT HIT: M22831.1, EVALUE 6.00e-03; EST_HUMAN HIT: H62051.1, EVALUE 2.00e-06
ctgcacgcctggccctccagggccaccttgatgctcatcagctcctggtactcacagagcagctggtccagcctccacctcagccagcttgtcctgggcatctccgatggctaccttgcccttctgctctgcctccaggatggtgtcttgcagggcagca

SEQ ID NO: 23868 - DNA, 118 bp, Homo sapiens
  MAP TO AC015785.3; EXPRESSED IN PLACENTA, SIGNAL = 1.5; EXPRESSED IN ADULT LIVER, SIGNAL = 1.2; EXPRESSED IN HELA, SIGNAL = 2.4; EXPRESSED IN FETAL LIVER, SIGNAL = 1.5; EXPRESSED IN LUNG, SIGNAL = 1.2; EXPRESSED IN HEART, SIGNAL = 1.3; EXPRESSED IN BRAIN, SIGNAL = 1.5; EXPRESSED IN BONE MARROW, SIGNAL = 1.5; NT HIT: AB028991.1, EVALUE 1.00e+00; EST_HUMAN HIT: AI953984.1, EVALUE 9.70e-02; SWISSPROT HIT: P41349, EVALUE 1.80e+00
ctgacttcggcacagctactgtggacagttccatgcaccttggctggagtcccacattgagcatgtgcagcagggtgcctatgctctgtcttctcctgagctgcagaaggattcccat

SEQ ID NO: 23869 - DNA, 179 bp, Homo sapiens
  MAP TO AL133352.10; EXPRESSED IN LUNG, SIGNAL =   2; EXPRESSED IN PLACENTA, SIGNAL = 2.2; EXPRESSED IN HEART, SIGNAL =   2; EXPRESSED IN ADULT LIVER, SIGNAL = 2.7; EXPRESSED IN FETAL LIVER, SIGNAL = 2.2; EXPRESSED IN BRAIN, SIGNAL = 2.1; EXPRESSED IN BONE MARROW, SIGNAL = 2.2; EST_HUMAN HIT: AL042767.1, EVALUE 2.00e-96; NT HIT: AF274863.1, EVALUE 1.00e-96; SWISSPROT HIT: P42917, EVALUE 2.00e-01
cgaggagattttggttttcttcttggccaagtagcgctcctgtgtttgcttcagcagatctgtacccccagcctgggccaggataatggcatcagcaaagcgctcctccttcagacacagctccacggccggacccagttccccaagcaggagagcctggcttaggagtccatcaatat

SEQ ID NO: 23870 - DNA, 151 bp, Homo sapiens
  MAP TO AC013314.4; EXPRESSED IN BONE MARROW, SIGNAL = 1.9; EXPRESSED IN PLACENTA, SIGNAL = 1.9; EXPRESSED IN ADULT LIVER, SIGNAL = 1.9; EXPRESSED IN FETAL LIVER, SIGNAL = 1.6; EXPRESSED IN BRAIN, SIGNAL = 1.7; EXPRESSED IN LUNG, SIGNAL = 1.8; EXPRESSED IN HEART, SIGNAL = 1.6; EST_HUMAN HIT: AW845685.1, EVALUE 5.10e-01; NT HIT: gi9633624, EVALUE 3.40e-01; SWISSPROT HIT: P24003, EVALUE 3.10e+00
aggtgctgttttaccagctgttttatacagatgtggaacagaatcaaaccactgatgagaccaaagacttgccggtctccttgttcaaaatgaggcaaaagcagtcagaaactgtagccctacacaatgataaacatgggaaataccccat

SEQ ID NO: 23871 - DNA, 151 bp, Homo sapiens
  MAP TO AC013691.3; EXPRESSED IN LUNG, SIGNAL = 2.7; EXPRESSED IN PLACENTA, SIGNAL = 2.3; EXPRESSED IN ADULT LIVER, SIGNAL = 2.7; EXPRESSED IN HELA, SIGNAL = 3.3; EXPRESSED IN HEART, SIGNAL = 2.1; EXPRESSED IN FETAL LIVER, SIGNAL = 2.1; EXPRESSED IN BRAIN, SIGNAL =   2; EXPRESSED IN BONE MARROW, SIGNAL = 2.2; NT HIT: AF195953.1, EVALUE 5.40e+00; SWISSPROT HIT: O43281, EVALUE 1.80e+00
agtccctctccaggttcagttcgttatctctcctctgcaccattgcctcagcctcctccatggtgtcttcattagggttcccccaaaagcagaccctgatataaggacttgggttatgtagtttatcaggggcagtgtgggggtgatcctc

SEQ ID NO: 23872 - DNA, 403 bp, Homo sapiens
  MAP TO AL161662.1; EXPRESSED IN BONE MARROW, SIGNAL = 1.9; EXPRESSED IN LUNG, SIGNAL = 1.3; EXPRESSED IN ADULT LIVER, SIGNAL = 1.4; EXPRESSED IN FETAL LIVER, SIGNAL = 1.8; EXPRESSED IN BRAIN, SIGNAL = 1.7; EXPRESSED IN PLACENTA, SIGNAL = 1.3; EXPRESSED IN HEART, SIGNAL = 1.4; NT HIT: AL163246.2, EVALUE 3.00e-81; EST_HUMAN HIT: AW340174.1, EVALUE 2.00e-92; SWISSPROT HIT: P33459, EVALUE 4.60e-01
gcctggggcaaagttttccagaaggccatgtatgctctgagtcagcgtccaatatatggtattatttctcccatagccaggattcacacatccaggaatcaaggggtggaagtggaagtagcaccactcaccatcacccctagtgatccattagcaaaatttttctttcctgacccagtgacattatgttctgttcgcctagaggtcttagttccagagggaggaatggtgccaccaggagacacaacaacgattccattaagctggaagttaagattgccacctggacactttgggctactcctacttttaagtcaacaggctaagaagaaagttacagtgttggctggggtgattgacctagacaatcaagatgaaatcagtctactattacacaatggag

SEQ ID NO: 23873 - DNA, 113 bp, Homo sapiens
  MAP TO AC015908.4; EXPRESSED IN LUNG, SIGNAL = 5.4; EXPRESSED IN PLACENTA, SIGNAL = 5.1; EXPRESSED IN ADULT LIVER, SIGNAL = 6.3; EXPRESSED IN HEART, SIGNAL = 4.7; EXPRESSED IN FETAL LIVER, SIGNAL = 4.1; EXPRESSED IN BRAIN, SIGNAL = 4.2; EXPRESSED IN BONE MARROW, SIGNAL =   5; EXPRESSED IN HELA, SIGNAL = 5.8; EST_HUMAN HIT: AU117659.1, EVALUE 3.00e-57; SWISSPROT HIT: P32709, EVALUE 5.40e+00
ttctggacgtggtcagggtggctttctctggctggcatggacttgagcagaaactcattgccggcttcctccttgcacgagcaccaagtgattcccaggtcccccatcctccc

SEQ ID NO: 23874 - DNA, 183 bp, Homo sapiens
  MAP TO AL139248.2; EXPRESSED IN LUNG, SIGNAL = 6.6; EXPRESSED IN HELA, SIGNAL = 4.2; EXPRESSED IN HEART, SIGNAL = 3.6; EXPRESSED IN PLACENTA, SIGNAL = 7.6; EXPRESSED IN ADULT LIVER, SIGNAL = 4.4; EXPRESSED IN FETAL LIVER, SIGNAL =   4; EXPRESSED IN BRAIN, SIGNAL = 3.3; EXPRESSED IN BONE MARROW, SIGNAL = 3.8; EST_HUMAN HIT: AL039234.1, EVALUE 9.00e-99; NT HIT: AF080255.1, EVALUE 6.00e-99
ctcgatagcactgactggatcctccagcagtcacctggcaggcagactttagttctagagaacccacaggttgggtaccacgacgaggaaggggttggggaggcaccaggtggggagggccagtggtagttttggtgaagtgactctgctgtggtacttgactgttactcttctcattagttc

SEQ ID NO: 23875 - DNA, 149 bp, Homo sapiens
  MAP TO AC018909.3; EXPRESSED IN PLACENTA, SIGNAL = 1.2; EXPRESSED IN HELA, SIGNAL = 2.3; EXPRESSED IN HEART, SIGNAL = 1.2; EXPRESSED IN BONE MARROW, SIGNAL = 1.2; EXPRESSED IN ADULT LIVER, SIGNAL = 1.7; EXPRESSED IN FETAL LIVER, SIGNAL = 1.2; EXPRESSED IN BRAIN, SIGNAL = 1.4; EXPRESSED IN LUNG, SIGNAL = 1.2; NT HIT: AF078779.1, EVALUE 5.00e-34; SWISSPROT HIT: Q56978, EVALUE 9.00e+00; EST_HUMAN HIT: AA669506.1, EVALUE 5.00e-01
ctgttaatattctccccatatttcacagtaccaaataaaacaactccagcaaaagcgtaacacagcagcaagagaaacatgcctactatgataaagaagctcttgtacatgctgacgaccactgtcaagaggagcatctttagcgttac

SEQ ID NO: 23876 - DNA, 118 bp, Homo sapiens
  MAP TO AL137026.10; EXPRESSED IN PLACENTA, SIGNAL = 3.1; EXPRESSED IN ADULT LIVER, SIGNAL =   4; EXPRESSED IN HELA, SIGNAL = 5.1; EXPRESSED IN FETAL LIVER, SIGNAL = 3.4; EXPRESSED IN LUNG, SIGNAL = 1.7; EXPRESSED IN HEART, SIGNAL = 3.9; EXPRESSED IN BRAIN, SIGNAL =   3; EXPRESSED IN BONE MARROW, SIGNAL = 4.9; EST_HUMAN HIT: AU119023.1, EVALUE 3.00e-60; NT HIT: L36033.1, EVALUE 2.00e-60; SWISSPROT HIT: O62657, EVALUE 2.00e-17
ggaagcccgtcagcctgagctacagatgcccatgccgattcttcgaaagccatgttgccagagccaacgtcaagcatctcaaaattctcaacactccaaactgtgcccttcagattgt

SEQ ID NO: 23877 - DNA, 115 bp, Homo sapiens
  MAP TO AC013550.4; EXPRESSED IN PLACENTA, SIGNAL = 0.62; EXPRESSED IN ADULT LIVER, SIGNAL = 0.69; EXPRESSED IN HEART, SIGNAL = 6.7; EXPRESSED IN FETAL LIVER, SIGNAL = 0.7; EXPRESSED IN BRAIN, SIGNAL = 0.66; EXPRESSED IN BONE MARROW, SIGNAL = 0.59; SWISSPROT HIT: P54296, EVALUE 2.00e-16; EST_HUMAN HIT: C03894.1, EVALUE 2.00e-58; NT HIT: gi4505314, EVALUE 1.00e-58
atacacagaattaaatgtgacaaagctactggcattattgagatggtgatggatcgatttagtattgaaaatgaggggacctacactgtgcagattcatgatgggaaagccaaaa

SEQ ID NO: 23878 - DNA, 240 bp, Homo sapiens
  MAP TO AL138796.2; EXPRESSED IN ADULT LIVER, SIGNAL = 0.53; EXPRESSED IN BRAIN, SIGNAL = 0.86; EXPRESSED IN PLACENTA, SIGNAL = 0.64; EXPRESSED IN FETAL LIVER, SIGNAL = 0.54; EXPRESSED IN BONE MARROW, SIGNAL = 0.55; EXPRESSED IN HEART, SIGNAL = 2.6; SWISSPROT HIT: P03291, EVALUE 1.50e+00; EST_HUMAN HIT: BF347213.1, EVALUE 1.00e-83; NT HIT: AB007923.1, EVALUE 0.00e+00
cttacagcctggatgcctgtcaccaaatccctttgagcagtgacctgagccacctggtggcagaggtacgagctctgagagggcagctggagcagagcattcaggggaacaattgtctgcgactgcagctgcaacagcagctggagagcggtgctggcaaagccagcctcagcccctcctccattaaccagaacttcccagccagcactgaccctggaaacaagcagctgctcctccaag

SEQ ID NO: 23879 - DNA, 320 bp, Homo sapiens
  MAP TO AC013657.3; EXPRESSED IN LUNG, SIGNAL =   6; EXPRESSED IN ADULT LIVER, SIGNAL = 6.3; EXPRESSED IN HELA, SIGNAL = 8.1; EXPRESSED IN HEART, SIGNAL = 4.4; EXPRESSED IN BONE MARROW, SIGNAL = 5.1; EXPRESSED IN PLACENTA, SIGNAL = 4.8; EXPRESSED IN FETAL LIVER, SIGNAL = 3.9; EXPRESSED IN BRAIN, SIGNAL = 4.4; SWISSPROT HIT: Q07468, EVALUE 9.30e-01; EST_HUMAN HIT: AW592233.1, EVALUE 0.00e+00; NT HIT: AJ271736.1, EVALUE 1.00e-11
tcagtcgaattctttcttctgaggaggcaaggactgaagttgctgtggacccatagggattcgccattggtaactcggggtaactcggctctcttccactgctgacgtatgtagcaagtcctgtcttcgggttggcaggcaccacggctgacaccacatgcgcagagagaggggaaagaccaagaagtgactcatgacatcaccctcgtctctgaaagacaagatgttggtctcctcaggtgccgtgcagtcttcagtgttggctgcagccacagcccctgcaatgcagaccaggatgagggaaagccgctggaagaggc

SEQ ID NO: 23880 - DNA, 204 bp, Homo sapiens
  MAP TO AC008773.3; EXPRESSED IN HEART, SIGNAL =  14; EXPRESSED IN BRAIN, SIGNAL =  13; EXPRESSED IN BONE MARROW, SIGNAL =  15; EXPRESSED IN LUNG, SIGNAL =  14; EXPRESSED IN HELA, SIGNAL =  19; EXPRESSED IN PLACENTA, SIGNAL =  16; EXPRESSED IN ADULT LIVER, SIGNAL =  16; EXPRESSED IN FETAL LIVER, SIGNAL =  13; SWISSPROT HIT: P17301, EVALUE 7.00e-35; NT HIT: X17033.1, EVALUE 1.00e-111; EST_HUMAN HIT: AU126174.1, EVALUE 1.00e-104
ggcattttgggtcagcaccaatttcttgaaggccccgagggcattgaaaacactcgatttggttcagcaattgcagctctttcagacatcaacatggatggctttaatgatgtgattgttggttcaccactagaaaatcagaattctggagctgtatacatttacaatggtcatcagggcactatccgcacaaagtattcccag

SEQ ID NO: 23881 - DNA, 79 bp, Homo sapiens
  MAP TO AL121911.10; EXPRESSED IN ADULT LIVER, SIGNAL = 0.98; EXPRESSED IN BRAIN, SIGNAL = 0.95; EXPRESSED IN BONE MARROW, SIGNAL = 0.8; EXPRESSED IN HEART, SIGNAL = 1.7; EXPRESSED IN FETAL LIVER, SIGNAL = 0.91; EXPRESSED IN PLACENTA, SIGNAL = 0.79; NT HIT: S62927.1, EVALUE 6.30e-01
ccctgtctaagtccgatactgatgcctgacatccagcctgggccttcaccgatgatgccacctccttgtagagtgacat

SEQ ID NO: 23882 - DNA, 113 bp, Homo sapiens
  MAP TO AC022050.2; EXPRESSED IN LUNG, SIGNAL = 3.9; EXPRESSED IN BRAIN, SIGNAL = 4.2; EXPRESSED IN PLACENTA, SIGNAL = 3.2; EXPRESSED IN ADULT LIVER, SIGNAL = 3.4; EXPRESSED IN HEART, SIGNAL = 4.4; EXPRESSED IN FETAL LIVER, SIGNAL = 4.5; EXPRESSED IN BONE MARROW, SIGNAL = 4.7; NT HIT: AL163209.2, EVALUE 4.00e-03; EST_HUMAN HIT: AA825968.1, EVALUE 3.60e-01
ctccaacaatgaggactttgatttgtcatgatatttggtggaacaaacatccaaaccatatcagtaggtttggccacttcatgtaactcatatttgttaaaggctttgttcat

SEQ ID NO: 23883 - DNA, 204 bp, Homo sapiens
  MAP TO AL160281.2; EXPRESSED IN BONE MARROW, SIGNAL = 1.1; EXPRESSED IN ADULT LIVER, SIGNAL = 0.9; EXPRESSED IN FETAL LIVER, SIGNAL = 1.1; EXPRESSED IN BRAIN, SIGNAL =   1; EXPRESSED IN LUNG, SIGNAL = 0.97; EXPRESSED IN PLACENTA, SIGNAL =   1; EXPRESSED IN HEART, SIGNAL = 1.2; SWISSPROT HIT: P17119, EVALUE 9.80e-01; EST_HUMAN HIT: T76987.1, EVALUE 1.20e-02; NT HIT: AL163285.2, EVALUE 1.20e-01
ttaacggaccaggaaaaaggtgacttcgctgaacagaaaacctttttgaagatacacagccttctccagccaaacactaatggaatgcaccttcctttcaagcacctgctgaacattctccaaatagaccacaccgggggtcataaaacacctccacaaattgaagtcgtacagagtatgttctctgattataatagcatagaa

SEQ ID NO: 23884 - DNA, 244 bp, Homo sapiens
  MAP TO AC008572.6; EXPRESSED IN PLACENTA, SIGNAL =  10; EXPRESSED IN FETAL LIVER, SIGNAL = 9.5; EXPRESSED IN ADULT LIVER, SIGNAL =  11; EXPRESSED IN BONE MARROW, SIGNAL = 9.8; EXPRESSED IN LUNG, SIGNAL =  12; EXPRESSED IN HELA, SIGNAL =  12; EXPRESSED IN HEART, SIGNAL = 8.6; EXPRESSED IN BRAIN, SIGNAL =   9; SWISSPROT HIT: P03949, EVALUE 2.70e+00; NT HIT: AJ270774.1, EVALUE 5.80e-01; EST_HUMAN HIT: AI828354.1, EVALUE 8.70e-01
tttcaatttcttcagctccttctctgtctcaacctttactctccaaatacccctgagagaggagctcagggacctaagtcagaagtatgtctacatcacaattatcaagctattgccattgtcagccggactaaggtcaatattattgggtgagtttgtctgcctctcttccctcgggataataaatcttctccctagaaattcttcaccagttggatttatagcggccagcttcatcaggtca

SEQ ID NO: 23885 - DNA, 142 bp, Homo sapiens
  MAP TO AC015805.3; EXPRESSED IN PLACENTA, SIGNAL = 1.6; EXPRESSED IN ADULT LIVER, SIGNAL = 1.8; EXPRESSED IN HEART, SIGNAL = 1.7; EXPRESSED IN FETAL LIVER, SIGNAL = 1.8; EXPRESSED IN BONE MARROW, SIGNAL = 1.5; EXPRESSED IN LUNG, SIGNAL = 1.8; EXPRESSED IN BRAIN, SIGNAL = 1.6; NT HIT: U03488.1, EVALUE 3.20e-01; EST_HUMAN HIT: AW770982.1, EVALUE 3.00e-05
ttaggtctttccttcatatgactcattactcttgtaattatttaattcattcaggtatttattgagcacatactctggtactctgataatcttagaggattcaacagtgtctaaggaagtgctctcatgaggctttattcta

SEQ ID NO: 23886 - DNA, 89 bp, Homo sapiens
  MAP TO AC013641.4; EXPRESSED IN HEART, SIGNAL = 3.9; SWISSPROT HIT: Q92581, EVALUE 3.00e-08; EST_HUMAN HIT: AW368451.1, EVALUE 1.00e-34; NT HIT: D87743.1, EVALUE 1.80e-01
ctgtttagttcttattttggaatccgaagacagattgttgtaggtataatgtgcttgtgtgactccacagaagagaacagcaactatcc

SEQ ID NO: 23887 - DNA, 262 bp, Homo sapiens
  MAP TO AC025747.3; EXPRESSED IN BONE MARROW, SIGNAL = 1.5; EXPRESSED IN LUNG, SIGNAL =   2; EXPRESSED IN ADULT LIVER, SIGNAL = 2.5; EXPRESSED IN HEART, SIGNAL = 1.9; EXPRESSED IN BRAIN, SIGNAL = 1.3; EXPRESSED IN PLACENTA, SIGNAL = 1.9; EXPRESSED IN FETAL LIVER, SIGNAL = 1.3; SWISSPROT HIT: O51781, EVALUE 1.90e+00
gaataagaaaaagaaagacaaggctgaggggctagaagagggaaaggagcagaatgctgaatcaaaggcaagagatcatttcagaaactctaagtttgcttttcctgtgggtgaaaatagatattattccattaatatactgaagtatcattctaattctgataaaattaaaaagagacagcaagttttagtgaagaatattagactgggtatcaggacccagcatgataactatacatacaatgaaaaatttcagatcaaa

SEQ ID NO: 23888 - DNA, 101 bp, Homo sapiens
  MAP TO AC024193.2; EXPRESSED IN LUNG, SIGNAL = 4.8; EXPRESSED IN ADULT LIVER, SIGNAL = 4.6; EXPRESSED IN HELA, SIGNAL = 2.3; EXPRESSED IN BRAIN, SIGNAL = 3.5; EXPRESSED IN BONE MARROW, SIGNAL = 4.1; EXPRESSED IN PLACENTA, SIGNAL = 4.6; EXPRESSED IN HEART, SIGNAL = 4.3; EXPRESSED IN FETAL LIVER, SIGNAL = 3.5; NT HIT: AE001713.1, EVALUE 2.20e-01; EST_HUMAN HIT: BE878538.1, EVALUE 1.30e+00
ctgcacacttgctctcgcacatcaggtaccatgctattgattctggtatcatcaaggcttgccacgttccaaatgccaatcttcttttccttgttgggccc

SEQ ID NO: 23889 - DNA, 178 bp, Homo sapiens
  MAP TO AC018390.3; EXPRESSED IN LUNG, SIGNAL = 1.7; EXPRESSED IN ADULT LIVER, SIGNAL = 1.8; EXPRESSED IN HEART, SIGNAL = 1.5; EXPRESSED IN BRAIN, SIGNAL = 1.2; EXPRESSED IN BONE MARROW, SIGNAL = 1.4; EXPRESSED IN PLACENTA, SIGNAL = 1.6; EXPRESSED IN FETAL LIVER, SIGNAL = 1.2; SWISSPROT HIT: P03126, EVALUE 1.30e+00; NT HIT: gi6912431, EVALUE 3.00e-05; EST_HUMAN HIT: AW015820.1, EVALUE 4.00e-05
ggagatacagaagagacagaaagaagaatgtcatgggaagatggaggtagagattgtggttatgttgccacagtcaaagaacacctgcaatcaccagaagctacaagaggcaaagaagcattcttccctagagactttggaaggaacatggccctaccaatctatgatgacatacttc

SEQ ID NO: 23890 - DNA, 116 bp, Homo sapiens
  MAP TO AC025539.2; EXPRESSED IN LUNG, SIGNAL = 3.8; EXPRESSED IN PLACENTA, SIGNAL = 3.8; EXPRESSED IN HEART, SIGNAL = 3.4; EXPRESSED IN FETAL LIVER, SIGNAL = 3.1; EXPRESSED IN BRAIN, SIGNAL =   3; EXPRESSED IN BONE MARROW, SIGNAL = 3.7; EXPRESSED IN ADULT LIVER, SIGNAL = 3.9; EXPRESSED IN HELA, SIGNAL = 5.4; NT HIT: AL163278.2, EVALUE 4.00e-03; SWISSPROT HIT: Q10638, EVALUE 9.30e+00; EST_HUMAN HIT: AA640920.1, EVALUE 9.50e-02
gcccagttgaaacggatgagggcagccacaccaccatccatccacagatggatgtgcctcatctgagactgagagacaggattgacttcacctccagcattcgtagatggatacat

SEQ ID NO: 23891 - DNA, 139 bp, Homo sapiens
  MAP TO AP001427.1; EXPRESSED IN LUNG, SIGNAL = 8.2; EXPRESSED IN BONE MARROW, SIGNAL = 7.2; EXPRESSED IN BRAIN, SIGNAL = 6.4; EXPRESSED IN FETAL LIVER, SIGNAL = 7.4; EXPRESSED IN HELA, SIGNAL = 7.9; EXPRESSED IN ADULT LIVER, SIGNAL = 7.8; EXPRESSED IN PLACENTA, SIGNAL = 7.4; EXPRESSED IN HEART, SIGNAL = 6.9; NT HIT: AF213884.1, EVALUE 4.90e+00; SWISSPROT HIT: Q61982, EVALUE 1.10e-02
cctgtgcaccgcagaatggctcgtacgaggccgtggggaaccaggatggcaacaacaaaaaatgggttctccgcctccaggagaggcaaggcaagacctggtgacagcagccttgtctgcattctgtaattggcagcct

SEQ ID NO: 23892 - DNA, 79 bp, Homo sapiens
  MAP TO AL158175.6; EXPRESSED IN ADULT LIVER, SIGNAL = 1.8; EXPRESSED IN HELA, SIGNAL = 2.5; EXPRESSED IN HEART, SIGNAL = 2.1; EXPRESSED IN BRAIN, SIGNAL = 1.8; EXPRESSED IN BONE MARROW, SIGNAL = 1.9; EXPRESSED IN LUNG, SIGNAL = 1.6; EXPRESSED IN FETAL LIVER, SIGNAL = 1.8; EXPRESSED IN PLACENTA, SIGNAL = 1.6; NT HIT: L01950.2, EVALUE 5.30e-01; EST_HUMAN HIT: BE171019.1, EVALUE 2.50e+00
acacaaacacattcagagcagtctgttgctggagaaggtttatctccttggctttgaaacgcttgcagcctttcagccc

SEQ ID NO: 23893 - DNA, 210 bp, Homo sapiens
  MAP TO AL139352.8; EXPRESSED IN ADULT LIVER, SIGNAL = 1.7; EXPRESSED IN HELA, SIGNAL = 4.3; EXPRESSED IN HEART, SIGNAL = 1.5; EXPRESSED IN BONE MARROW, SIGNAL = 2.5; EXPRESSED IN LUNG, SIGNAL = 1.6; EXPRESSED IN PLACENTA, SIGNAL = 1.5; EXPRESSED IN FETAL LIVER, SIGNAL = 3.2; EXPRESSED IN BRAIN, SIGNAL = 2.8; NT HIT: AL163246.2, EVALUE 2.00e-16; EST_HUMAN HIT: AW812488.1, EVALUE 4.00e-30
cttcttcccagactgctcctcctcagctcgctccccaccaggctgaatcagcctccaactcttcttcagcctctgctcccacatcctataacccttctattacccgccctccccacacccagtctggttttcagtttcgttctgcggctagctctcccccacctgcccaacaatttcctcttagagaggtggctggagctgaaggcatag

SEQ ID NO: 23894 - DNA, 164 bp, Homo sapiens
  MAP TO AC011440.5; EXPRESSED IN PLACENTA, SIGNAL = 2.9; EXPRESSED IN ADULT LIVER, SIGNAL = 2.9; EXPRESSED IN FETAL LIVER, SIGNAL = 2.6; EXPRESSED IN BRAIN, SIGNAL = 2.9; EXPRESSED IN BONE MARROW, SIGNAL = 2.7; EXPRESSED IN HEART, SIGNAL = 2.7; EXPRESSED IN LUNG, SIGNAL = 2.6; EXPRESSED IN HELA, SIGNAL = 3.4; EST_HUMAN HIT: AA626621.1, EVALUE 2.00e-13; NT HIT: D14547.1, EVALUE 2.00e-15; SWISSPROT HIT: P43558, EVALUE 6.80e+00
ctgaaagtggatcatcataaaggtcttcatcatcattgtcttcatgttgagcaggttgaggaggaggaagagagaagttagtcttgctgtctcaggcatggcagaggtggaagatatggaggaggtggaaggagaggcgaaggaggcagtatattcagtgtgag

SEQ ID NO: 23895 - DNA, 309 bp, Homo sapiens
  MAP TO AC019222.3; EXPRESSED IN LUNG, SIGNAL = 1.5; EXPRESSED IN PLACENTA, SIGNAL = 1.6; EXPRESSED IN ADULT LIVER, SIGNAL = 1.7; EXPRESSED IN BRAIN, SIGNAL = 1.2; EXPRESSED IN BONE MARROW, SIGNAL = 1.2; EXPRESSED IN HEART, SIGNAL = 1.4; EXPRESSED IN FETAL LIVER, SIGNAL = 1.3; NT HIT: X67838.1, EVALUE 3.00e+00; SWISSPROT HIT: Q03376, EVALUE 9.90e+00
gacacaactttatcaaggctttaaacattttcagtccaagttctgattgcagtagaatttcagtggttatggaagacacgataagtatagtctggatacagattaccctcgttagtcacttaaagggtgctttaagtgtgtgcatgctggggcctcctactgtgggctctgtggttacggtcccaaacatcacaaatgtcaatgcgcttgaagaaaaggttaaagacaacaaaaggaagacaaagttacatggcaaaaagagaaatgctcctgggatctccaaccttattaaacatgacaacatatata

SEQ ID NO: 23896 - DNA, 164 bp, Homo sapiens
  MAP TO AC013497.4; EXPRESSED IN PLACENTA, SIGNAL = 0.95; EXPRESSED IN ADULT LIVER, SIGNAL = 1.4; EXPRESSED IN FETAL LIVER, SIGNAL =   1; EXPRESSED IN BRAIN, SIGNAL = 0.97; EXPRESSED IN HEART, SIGNAL = 1.2; EXPRESSED IN BONE MARROW, SIGNAL = 0.97; SWISSPROT HIT: Q11206, EVALUE 1.00e-08; EST_HUMAN HIT: W52470.1, EVALUE 4.00e-85; NT HIT: AB022918.1, EVALUE 1.00e-87
tattttgtcacccatcaacaattccaacagccaccttaaatcatgtggcttaaaagcagtgagaatcactgtcgtattagggtcattgtgaataggatctgaaaaaacagattctggataaaaaagtcggaaggttgtccttctcccaacttcttcttcatgtc

SEQ ID NO: 23897 - DNA, 151 bp, Homo sapiens
  MAP TO AL133377.4; EXPRESSED IN ADULT LIVER, SIGNAL = 3.9; EXPRESSED IN HELA, SIGNAL =   4; EXPRESSED IN BRAIN, SIGNAL = 3.3; EXPRESSED IN LUNG, SIGNAL = 4.1; EXPRESSED IN PLACENTA, SIGNAL = 3.5; EXPRESSED IN FETAL LIVER, SIGNAL = 3.7; EXPRESSED IN BONE MARROW, SIGNAL = 3.8; EXPRESSED IN HEART, SIGNAL = 3.8; NT HIT: AF219924.1, EVALUE 3.40e-01; EST_HUMAN HIT: AW808692.1, EVALUE 8.00e-03; SWISSPROT HIT: P75183, EVALUE 9.00e+00
ttgacagatccaacatggaccttgaagaacatgtgaatattttcaagggagtagccataaacctttatttgaatgccagtgaaaataattacatactccaaatcatattcctgtgccattgtcaaattcagaatttggtgttaaaggaact

SEQ ID NO: 23898 - DNA, 165 bp, Homo sapiens
  MAP TO AC011294.3; EXPRESSED IN PLACENTA, SIGNAL = 4.9; EXPRESSED IN ADULT LIVER, SIGNAL = 5.3; EXPRESSED IN HELA, SIGNAL = 7.6; EXPRESSED IN HEART, SIGNAL = 4.5; EXPRESSED IN FETAL LIVER, SIGNAL = 4.6; EXPRESSED IN BONE MARROW, SIGNAL = 4.7; EXPRESSED IN LUNG, SIGNAL = 5.2; EXPRESSED IN BRAIN, SIGNAL = 4.2; NT HIT: AL115397.1, EVALUE 3.80e-01; SWISSPROT HIT: P17388, EVALUE 6.80e+00; EST_HUMAN HIT: AA307073.1, EVALUE 1.40e-01
ttgccacctgtgcaattgacccactggctgggatgtggtctaagagaagaaacgtgtgccttctgctggatcttttggaactcctccaagataaaaggaattctgacaccacattcagcagtatcaacttcagggaggtactacagaaacactcacggatctcaa

SEQ ID NO: 23899 - DNA, 104 bp, Homo sapiens
  MAP TO AC011938.3; EXPRESSED IN LUNG, SIGNAL = 1.3; EXPRESSED IN PLACENTA, SIGNAL = 2.4; EXPRESSED IN ADULT LIVER, SIGNAL =   3; EXPRESSED IN HELA, SIGNAL = 3.8; EXPRESSED IN HEART, SIGNAL = 2.2; EXPRESSED IN FETAL LIVER, SIGNAL = 2.6; EXPRESSED IN BRAIN, SIGNAL = 2.2; EXPRESSED IN BONE MARROW, SIGNAL = 2.4; SWISSPROT HIT: P49646, EVALUE 7.20e+00; NT HIT: AL163227.2, EVALUE 1.00e-05; EST_HUMAN HIT: BE089073.1, EVALUE 3.00e-04
cagtctttggtaaccactattccatactctacttctgtgagatcaatttctttagatttcacatatgtgtgatactggtctttctgtgcctggcttatttcact

SEQ ID NO: 23900 - DNA, 156 bp, Homo sapiens
  MAP TO AL157837.4; EXPRESSED IN LUNG, SIGNAL = 5.6; EXPRESSED IN ADULT LIVER, SIGNAL =   5; EXPRESSED IN HEART, SIGNAL = 6.1; EXPRESSED IN FETAL LIVER, SIGNAL = 5.7; EXPRESSED IN BRAIN, SIGNAL =   6; EXPRESSED IN PLACENTA, SIGNAL = 5.3; EXPRESSED IN HELA, SIGNAL = 6.3; EXPRESSED IN BONE MARROW, SIGNAL = 6.2; EST_HUMAN HIT: AA194306.1, EVALUE 3.40e-02; SWISSPROT HIT: gi462760, EVALUE 6.80e+00; NT HIT: X78708.1, EVALUE 9.00e-02
catgattatttcttcacttaatttctgctttggcttcttcattgctctgcttgcctccattccagctccaccattcctgactgtgccaggtagtattaccaaggtaatcatattaaaattaaaatctcgtatcatggtcttgagtaaattaagcat

SEQ ID NO: 23901 - DNA, 147 bp, Homo sapiens
  MAP TO AL138914.5; EXPRESSED IN LUNG, SIGNAL = 3.1; EXPRESSED IN PLACENTA, SIGNAL =   3; EXPRESSED IN HEART, SIGNAL = 3.3; EXPRESSED IN FETAL LIVER, SIGNAL = 3.6; EXPRESSED IN BONE MARROW, SIGNAL = 3.2; EXPRESSED IN ADULT LIVER, SIGNAL = 3.1; EXPRESSED IN HELA, SIGNAL =   5; EXPRESSED IN BRAIN, SIGNAL = 3.1; SWISSPROT HIT: P16992, EVALUE 3.10e+00; EST_HUMAN HIT: F31500.1, EVALUE 2.00e+00; NT HIT: AF189277.1, EVALUE 5.20e+00
aaagtgaagggagcattggatacgtcggggtctctggagtcactaaggtgagacattccagggtggaaagccttagagaccacctagctgagcctctgttaacgtcggaagtggggtctagaaagatgcagatgacagctgagcaag

SEQ ID NO: 23902 - DNA, 154 bp, Homo sapiens
  MAP TO AC022020.3; EXPRESSED IN LUNG, SIGNAL = 1.5; EXPRESSED IN PLACENTA, SIGNAL = 1.2; EXPRESSED IN FETAL LIVER, SIGNAL = 1.1; EXPRESSED IN ADULT LIVER, SIGNAL = 1.3; EXPRESSED IN HEART, SIGNAL = 3.2; EXPRESSED IN BONE MARROW, SIGNAL = 1.1; EXPRESSED IN BRAIN, SIGNAL = 1.2; SWISSPROT HIT: Q12573, EVALUE 1.00e+00; NT HIT: gi4507610, EVALUE 3.50e-01; EST_HUMAN HIT: W31136.1, EVALUE 5.20e-01
tttctctgtcctatgactattccaggagtgccagacagaactagttcttacgctctgcgaagaaaagagtggactggaggtgggtcacattgacattttggtaagagccctactccttagaaacagaatgaaagttgtcaatgaggggaaggga

SEQ ID NO: 23903 - DNA, 154 bp, Homo sapiens
  MAP TO AL157396.2; EXPRESSED IN PLACENTA, SIGNAL = 2.7; EXPRESSED IN BONE MARROW, SIGNAL = 3.3; EXPRESSED IN ADULT LIVER, SIGNAL = 2.5; EXPRESSED IN HELA, SIGNAL = 3.2; EXPRESSED IN HEART, SIGNAL = 3.3; EXPRESSED IN BRAIN, SIGNAL =   3; EXPRESSED IN LUNG, SIGNAL = 2.7; EXPRESSED IN FETAL LIVER, SIGNAL = 2.9; EST_HUMAN HIT: BE888016.1, EVALUE 2.00e-19; NT HIT: D14547.1, EVALUE 3.00e-20
cctcatcatcttcatgttgagtaggcttaggaggaagaggaagaagaggggttggtcttgctgtctcatgggtggcagaggcagaaaagatggagaaggtggaagagaaggtggaataaccaggtacactcagtgtaactttacagcaatacat

SEQ ID NO: 23904 - DNA, 212 bp, Homo sapiens
  MAP TO AL133511.5; EXPRESSED IN PLACENTA, SIGNAL = 1.1; EXPRESSED IN FETAL LIVER, SIGNAL = 1.2; EXPRESSED IN ADULT LIVER, SIGNAL = 1.3; EXPRESSED IN HEART, SIGNAL = 1.4; EXPRESSED IN BONE MARROW, SIGNAL = 1.4; EXPRESSED IN LUNG, SIGNAL = 1.5; EXPRESSED IN BRAIN, SIGNAL = 1.7; EST_HUMAN HIT: BE565507.1, EVALUE 1.00e-116; SWISSPROT HIT: Q99683, EVALUE 3.00e-26; NT HIT: gi6031181, EVALUE 1.00e-116
ctattggtttctattttcatccttccaagctgtacattcagtgaccggtgagcactctgggaatcatgagacacagtagaactgagcgtgctcacgcctgaggtagccacagcatcttcaatgacagcctgaggtcttcggacagtttgatttgaaggctgttcctcatggtcatcttctacatccaagtcttcttgatcagcagtatcact

SEQ ID NO: 23905 - DNA, 117 bp, Homo sapiens
  MAP TO AC013726.3; EXPRESSED IN ADULT LIVER, SIGNAL = 3.2; EXPRESSED IN BRAIN, SIGNAL = 2.6; EXPRESSED IN LUNG, SIGNAL = 2.8; EXPRESSED IN PLACENTA, SIGNAL = 2.9; EXPRESSED IN HELA, SIGNAL = 3.6; EXPRESSED IN BONE MARROW, SIGNAL = 2.7; EXPRESSED IN HEART, SIGNAL = 2.3; EXPRESSED IN FETAL LIVER, SIGNAL =   4; EST_HUMAN HIT: W23260.1, EVALUE 8.00e-58; SWISSPROT HIT: P10523, EVALUE 1.00e-08; NT HIT: gi11428949, EVALUE 8.00e-60
atggtgctggaggcaaggtttgtgtcctcgtgcttgattttcccatccagggcaatgcctctcctttctcgattgttagccagcaagggcagcagcgtcagcgtcttggtcaaagtg

SEQ ID NO: 23906 - DNA, 159 bp, Homo sapiens
  MAP TO AC007940.2; EXPRESSED IN LUNG, SIGNAL = 1.6; EXPRESSED IN ADULT LIVER, SIGNAL = 1.6; EXPRESSED IN HEART, SIGNAL = 1.4; EXPRESSED IN FETAL LIVER, SIGNAL = 1.3; EXPRESSED IN BRAIN, SIGNAL = 1.4; EXPRESSED IN PLACENTA, SIGNAL = 1.5; EXPRESSED IN BONE MARROW, SIGNAL = 1.4; NT HIT: Y11204.1, EVALUE 1.00e-03; EST_HUMAN HIT: BF591771.1, EVALUE 9.00e-03
gtaagtagtgtagaattttgtggaagtgtaaaatactggacttatagaaatagtgctgaattccctccttctcctcctctccctcctcttcctccttctcctcctcatcatcactatcctcatcctcatcaccatcattatttaattgattgcttacca

SEQ ID NO: 23907 - DNA, 464 bp, Homo sapiens
  MAP TO AC013611.3; EXPRESSED IN LUNG, SIGNAL = 3.3; EXPRESSED IN ADULT LIVER, SIGNAL = 3.1; EXPRESSED IN BRAIN, SIGNAL = 2.8; EXPRESSED IN PLACENTA, SIGNAL = 3.2; EXPRESSED IN FETAL LIVER, SIGNAL = 2.6; EXPRESSED IN HEART, SIGNAL = 2.8; EXPRESSED IN BONE MARROW, SIGNAL =   3; SWISSPROT HIT: P29323, EVALUE 1.00e-88; NT HIT: L36643.1, EVALUE 0.00e+00; EST_HUMAN HIT: AL040428.1, EVALUE 0.00e+00
ctcggcagacggtgccattctcaacggcctcgaagcctgctttgcacatgcagcgcccgatgggcaccagccactcgccgtccccgttacagtagagcttgatgggtacatccacctcttccgcattggcgatgcagctgccccgggcagccactagcgatgtgctctcagcccccgacagggtttcctggaagatggcgccattctggatgatgcgggggcacttgcggtagaagacacgcacggcgatgagggacatgcagccgccatagtcctggaaggccaggtagaagccgctgcgggacacaggtccgaagctccgcacctcggtgttgattttcatgacgcggccacccaggtccacctgggagaagctctcgtcggctgcaatggtatccaccttcacccatggattctccatccagttggggaaggtcttggtggccgagtcaaagtcagcctca

SEQ ID NO: 23908 - DNA, 264 bp, Homo sapiens
  MAP TO AL133414.3; EXPRESSED IN PLACENTA, SIGNAL = 1.3; EXPRESSED IN FETAL LIVER, SIGNAL = 1.5; EXPRESSED IN LUNG, SIGNAL = 1.6; EXPRESSED IN ADULT LIVER, SIGNAL = 1.4; EXPRESSED IN HEART, SIGNAL = 1.2; EXPRESSED IN BRAIN, SIGNAL = 1.2; EXPRESSED IN BONE MARROW, SIGNAL = 1.3; SWISSPROT HIT: P43626, EVALUE 1.00e-42; EST_HUMAN HIT: AW951147.1, EVALUE 6.00e-79; NT HIT: AF133901.1, EVALUE 0.00e+00
gtcccctggtgaaatcagaagagacagtcatcctgcaatgttggtcagatgtcatgtttgagcacttccttctgcacagagaggggaagtttaatgacactttgcgcctcactggagagctccatgatggggtctccaaggccaacttctccatcggtcgcatgacgcaagaccttgcagggacctacagatgctacggttctgttcctcattccccctatcagttgtcagctcccagtgaccctctggacatcgtgattacag

SEQ ID NO: 23909 - DNA, 304 bp, Homo sapiens
  MAP TO AL133324.7; EXPRESSED IN PLACENTA, SIGNAL = 2.1; EXPRESSED IN ADULT LIVER, SIGNAL =   2; EXPRESSED IN HEART, SIGNAL =  19; EXPRESSED IN FETAL LIVER, SIGNAL = 1.7; EXPRESSED IN LUNG, SIGNAL = 2.4; EXPRESSED IN BRAIN, SIGNAL =   2; EXPRESSED IN BONE MARROW, SIGNAL = 1.9; EST_HUMAN HIT: F01027.1, EVALUE 7.00e-36; NT HIT: AB040945.1, EVALUE 0.00e+00; SWISSPROT HIT: P02563, EVALUE 2.00e-26
gagcaggacaacctggcagatgccgaggagcgctgccacttgctgatcaagtccaaggtgcagctggaggggaaggtgaaggagctgagtgagcggctggaggatgaggaggaggtgaacgctgacctggccgcccgccggcgcaagctggaggacgagtgcacggagctcaagaaggacattgatgacctggagctgacactggccaaagctgagaaggagaagcaagccactgagaacaaggtgtgggccgggccagctgtggggaagggccctgagccaggggccagctttggggccaggt

SEQ ID NO: 23910 - DNA, 90 bp, Homo sapiens
  MAP TO AC020704.3; EXPRESSED IN BONE MARROW, SIGNAL = 1.6; EXPRESSED IN PLACENTA, SIGNAL = 1.3; EXPRESSED IN ADULT LIVER, SIGNAL = 1.2; EXPRESSED IN BRAIN, SIGNAL = 0.96; EXPRESSED IN LUNG, SIGNAL = 1.3; EXPRESSED IN HEART, SIGNAL = 1.2; EXPRESSED IN FETAL LIVER, SIGNAL = 1.1; NT HIT: X89211.1, EVALUE 4.70e-02; EST_HUMAN HIT: AW300839.1, EVALUE 4.40e+00
cttcattggaacctgtccatatgaccctatcttaagtttcagggtctcattccttctcaattcgtgtccaaagttcatatgattttgcat

SEQ ID NO: 23911 - DNA, 140 bp, Homo sapiens
  MAP TO AP001538.1; EXPRESSED IN HELA, SIGNAL = 4.5; EXPRESSED IN BONE MARROW, SIGNAL = 2.8; EXPRESSED IN LUNG, SIGNAL = 2.7; EXPRESSED IN PLACENTA, SIGNAL = 2.7; EXPRESSED IN FETAL LIVER, SIGNAL = 2.7; EXPRESSED IN ADULT LIVER, SIGNAL = 3.7; EXPRESSED IN HEART, SIGNAL = 3.2; EXPRESSED IN BRAIN, SIGNAL = 2.8; EST_HUMAN HIT: AA693576.1, EVALUE 1.00e-07; SWISSPROT HIT: P25010, EVALUE 4.00e+00; NT HIT: AJ277662.1, EVALUE 2.00e-02
ggccatggctcccagatttgtaaacaaatatttgtcttggtgtttctatgaaggttttcagatgtgataaacatttaaacttgtgggctttgagtaaagcagattgtccttcatgatgtggtaaggactcatccaatgag

SEQ ID NO: 23912 - DNA, 205 bp, Homo sapiens
  MAP TO AC019214.2; EXPRESSED IN ADULT LIVER, SIGNAL = 2.5; EXPRESSED IN HELA, SIGNAL = 3.1; EXPRESSED IN BRAIN, SIGNAL = 2.1; EXPRESSED IN BONE MARROW, SIGNAL = 2.6; EXPRESSED IN LUNG, SIGNAL = 2.8; EXPRESSED IN PLACENTA, SIGNAL = 2.6; EXPRESSED IN HEART, SIGNAL = 2.2; EXPRESSED IN FETAL LIVER, SIGNAL = 2.5; SWISSPROT HIT: P16144, EVALUE 6.00e-34; EST_HUMAN HIT: BE867635.1, EVALUE 1.00e-112; NT HIT: gi4504768, EVALUE 1.00e-112
ccaggttctgccccatcttcttgaggttgtccagatcatcggacatggagttggagaagtccatgaggatgtacaggtccacggggctctccagtggctcaaacacctccagctcaaaatgccgctcctcaccgggccgcagacggacccgcaggccttggggggacatctggctgcgccgcagggtggtgtcaatctgggtctc

SEQ ID NO: 23913 - DNA, 88 bp, Homo sapiens
  MAP TO AC011572.4; EXPRESSED IN LUNG, SIGNAL = 4.6; EXPRESSED IN PLACENTA, SIGNAL = 5.3; EXPRESSED IN ADULT LIVER, SIGNAL = 6.1; EXPRESSED IN HEART, SIGNAL = 5.5; EXPRESSED IN FETAL LIVER, SIGNAL = 4.9; EXPRESSED IN BRAIN, SIGNAL = 4.7; EXPRESSED IN HELA, SIGNAL = 8.1; EXPRESSED IN BONE MARROW, SIGNAL = 5.1; EST_HUMAN HIT: AI809013.1, EVALUE 4.20e+00
cctttgctggtccttcatttccgtaaagtttattaattttaagaaactcaggaacttccccaaaattaacattcattttactaatgcc

SEQ ID NO: 23914 - DNA, 168 bp, Homo sapiens
  MAP TO AC015908.4; EXPRESSED IN LUNG, SIGNAL = 2.4; EXPRESSED IN PLACENTA, SIGNAL = 2.1; EXPRESSED IN ADULT LIVER, SIGNAL = 2.3; EXPRESSED IN BRAIN, SIGNAL = 1.6; EXPRESSED IN FETAL LIVER, SIGNAL = 1.5; EXPRESSED IN HEART, SIGNAL = 1.9; EXPRESSED IN BONE MARROW, SIGNAL = 1.8; EST_HUMAN HIT: BE962525.2, EVALUE 7.00e-90; SWISSPROT HIT: P31902, EVALUE 5.10e+00; NT HIT: gi6678200, EVALUE 1.50e+00
ggttgacgtggtatacaccaaaaggatcctcagagtagccaccatcatgggtgtgaccagcaaagaaacacaccacacactcatgagaccaaatgactgccagggcatctctgtagttccaggccaggcacacattgtcagaggcgtccgggtaaatgggaagatggc

SEQ ID NO: 23915 - DNA, 92 bp, Homo sapiens
  MAP TO AC015842.4; EXPRESSED IN LUNG, SIGNAL = 1.5; EXPRESSED IN PLACENTA, SIGNAL = 1.3; EXPRESSED IN ADULT LIVER, SIGNAL = 1.5; EXPRESSED IN HEART, SIGNAL = 1.3; EXPRESSED IN BRAIN, SIGNAL = 0.74; EXPRESSED IN BONE MARROW, SIGNAL =   1; EXPRESSED IN FETAL LIVER, SIGNAL = 0.91; EST_HUMAN HIT: AW846856.1, EVALUE 1.10e+00; NT HIT: gi6753577, EVALUE 7.60e-01
ctctctatgattacccctaatcccagcctctccacttatcagctctgtgtctttggcaagatatttagtcccatgagcttgagagtcctcat

SEQ ID NO: 23916 - DNA, 85 bp, Homo sapiens
  MAP TO AC018528.3; EXPRESSED IN LUNG, SIGNAL = 2.2; EXPRESSED IN PLACENTA, SIGNAL = 2.2; EXPRESSED IN ADULT LIVER, SIGNAL = 2.4; EXPRESSED IN BRAIN, SIGNAL = 1.8; EXPRESSED IN BONE MARROW, SIGNAL = 1.7; EXPRESSED IN FETAL LIVER, SIGNAL = 1.7; EXPRESSED IN HEART, SIGNAL = 2.2; NT HIT: AL116459.1, EVALUE 2.70e+00
tcagggtggaagccaggatatcatcatcatcatcatcatcatcatcatcatcatcatcatcatcttcgtcatcttcatgatatca

SEQ ID NO: 23917 - DNA, 290 bp, Homo sapiens
  MAP TO AC018909.3; EXPRESSED IN ADULT LIVER, SIGNAL = 1.3; EXPRESSED IN FETAL LIVER, SIGNAL = 1.3; EXPRESSED IN BRAIN, SIGNAL = 1.3; EXPRESSED IN BONE MARROW, SIGNAL = 1.2; EXPRESSED IN LUNG, SIGNAL = 1.3; EXPRESSED IN PLACENTA, SIGNAL = 1.3; EXPRESSED IN HEART, SIGNAL = 1.5; EST_HUMAN HIT: AW301652.1, EVALUE 1.70e-02; NT HIT: AF078779.1, EVALUE 3.00e-40; SWISSPROT HIT: P28926, EVALUE 1.30e+00
ggggtgatccccacgttccgcgtcaagttcctgctgcggctactgcgtgggaggctggaggtggacctggacaaggacaagctcctgtttaagcacatgtgctacgaaatggagaggctccacaatggcggcgacgtcaccttccatgatgtcctgaggtacaaggcaggctttcgcagggctgaatgggggccagaaaccacagctgtcagccttcaaggcctctgcagtacaattaacaagtgtgtttccaacccaaaatgccacatctgctgtggtcgtgaagtggg

SEQ ID NO: 23918 - DNA, 80 bp, Homo sapiens
  MAP TO AL157836.3; EXPRESSED IN PLACENTA, SIGNAL = 1.8; EXPRESSED IN ADULT LIVER, SIGNAL = 2.1; EXPRESSED IN HEART, SIGNAL = 1.9; EXPRESSED IN FETAL LIVER, SIGNAL = 1.9; EXPRESSED IN BRAIN, SIGNAL = 1.7; EXPRESSED IN LUNG, SIGNAL = 2.1; EXPRESSED IN BONE MARROW, SIGNAL = 1.9; NT HIT: Z49501.1, EVALUE 1.60e-01; EST_HUMAN HIT: AW468443.1, EVALUE 2.40e-01
gtttattgagtgcctgctgcacaacagggcctatgctaagtatttcacatacatcagctcctttcttcttcacaatggtc

SEQ ID NO: 23919 - DNA, 361 bp, Homo sapiens
  MAP TO AL133227.7; EXPRESSED IN BONE MARROW, SIGNAL = 1.6; EXPRESSED IN LUNG, SIGNAL = 1.5; EXPRESSED IN ADULT LIVER, SIGNAL = 1.6; EXPRESSED IN HEART, SIGNAL = 1.7; EXPRESSED IN BRAIN, SIGNAL = 1.6; EXPRESSED IN PLACENTA, SIGNAL = 1.7; EXPRESSED IN FETAL LIVER, SIGNAL = 1.6; EST_HUMAN HIT: N29001.1, EVALUE 1.00e-03; SWISSPROT HIT: P52742, EVALUE 2.00e-41; NT HIT: gi11426988, EVALUE 1.00e-03
agtagttgtaaaaaaacctttgtccgtctgtcagatctaacacaacataaaggaactcatacaggagagagaccttaccaatgtacaacttgtgaaaaagcctttaaatatcagtcaaactttactaaacatcagaaaacccattctatagggaggccctttacatgtaatgaatgtggaaagacctttcgccttaactggaaacttaatcaacacaaaaaaattcatactggagagaaaccctatgaatgtggtgaatgtggaaaatgttttaacaataattcaaatcttagtaaacacaagaaaatccatacaggagagaaacactttgtatgtaatcaatgtggaaaagcttttagct

SEQ ID NO: 23920 - DNA, 89 bp, Homo sapiens
  MAP TO AC015600.4; EXPRESSED IN BONE MARROW, SIGNAL = 2.5; EXPRESSED IN PLACENTA, SIGNAL =   3; EXPRESSED IN ADULT LIVER, SIGNAL =   3; EXPRESSED IN FETAL LIVER, SIGNAL = 2.3; EXPRESSED IN BRAIN, SIGNAL = 2.7; EXPRESSED IN LUNG, SIGNAL = 3.3; EXPRESSED IN HEART, SIGNAL = 2.6; NT HIT: AB026678.1, EVALUE 4.70e-02; EST_HUMAN HIT: AA729387.1, EVALUE 1.10e+00
aagtcatgtgcctaactgggatgccattgctcaacagcctggcgtgggctcacaaagccatctctggcaagagaggccagattatctga

SEQ ID NO: 23921 - DNA, 160 bp, Homo sapiens
  MAP TO AC020719.3; EXPRESSED IN LUNG, SIGNAL = 3.2; EXPRESSED IN PLACENTA, SIGNAL = 4.4; EXPRESSED IN ADULT LIVER, SIGNAL = 3.8; EXPRESSED IN FETAL LIVER, SIGNAL = 3.7; EXPRESSED IN BRAIN, SIGNAL = 3.8; EXPRESSED IN HEART, SIGNAL = 4.1; EXPRESSED IN HELA, SIGNAL =   5; EXPRESSED IN BONE MARROW, SIGNAL = 3.4; SWISSPROT HIT: P37125, EVALUE 3.50e-01; EST_HUMAN HIT: AI091851.1, EVALUE 4.00e-85; NT HIT: gi11430889, EVALUE 3.00e-85
tactttccttctcctctatggcttccaggctgcgcttgctcttggcctcagcactgctgctgggggctttactcagtccacaggacaggcatgccagctggatctgcttcatgttttctatagcttcattcttggcattcttcaacagatctccttggcc

SEQ ID NO: 23922 - DNA, 198 bp, Homo sapiens
  MAP TO AC011815.2; EXPRESSED IN LUNG, SIGNAL = 5.3; EXPRESSED IN PLACENTA, SIGNAL = 4.9; EXPRESSED IN ADULT LIVER, SIGNAL = 4.9; EXPRESSED IN HELA, SIGNAL = 6.7; EXPRESSED IN HEART, SIGNAL = 5.1; EXPRESSED IN FETAL LIVER, SIGNAL = 5.5; EXPRESSED IN BRAIN, SIGNAL = 5.6; EXPRESSED IN BONE MARROW, SIGNAL = 5.8; NT HIT: U62908.1, EVALUE 2.00e-12; EST_HUMAN HIT: AV689461.1, EVALUE 2.00e-96; SWISSPROT HIT: Q9Y5A6, EVALUE 6.00e-24
atcacttttctccgttcccacctgctgccctgggtcatcaaactccctctctaaatcctccaacagggtcacagcttcctcgccgctttctggattatgttgctgaacccagatctgcagctcctcaggcagaatgctcaggaactgctccagtaccagcagttctaagatctgctcctttgtgtgcaactctggcat

SEQ ID NO: 23923 - DNA, 174 bp, Homo sapiens
  MAP TO AC023296.2; EXPRESSED IN ADULT LIVER, SIGNAL = 3.7; EXPRESSED IN BRAIN, SIGNAL = 2.7; EXPRESSED IN LUNG, SIGNAL = 3.7; EXPRESSED IN HEART, SIGNAL = 2.8; EXPRESSED IN PLACENTA, SIGNAL = 3.3; EXPRESSED IN FETAL LIVER, SIGNAL = 2.5; EXPRESSED IN BONE MARROW, SIGNAL = 2.5; NT HIT: L13458.1, EVALUE 4.00e-01; SWISSPROT HIT: Q63769, EVALUE 9.00e-06
ccagacatcgagtttcgctgccgctccagagcccatttgccaagcactctctgacatgagaccccacaagcgtgtagccggtgttgcacgtaaatatagctgtggccccataaactgtcaacgttccaatcttgttgccatttgggggaaaggaaaggcttccacacgagataa

SEQ ID NO: 23924 - DNA, 143 bp, Homo sapiens
  MAP TO AL121712.19; EXPRESSED IN LUNG, SIGNAL = 1.5; EXPRESSED IN PLACENTA, SIGNAL = 1.3; EXPRESSED IN HEART, SIGNAL = 1.2; EXPRESSED IN FETAL LIVER, SIGNAL = 1.2; EXPRESSED IN ADULT LIVER, SIGNAL = 1.4; EXPRESSED IN BRAIN, SIGNAL = 1.2; EXPRESSED IN BONE MARROW, SIGNAL = 1.2; NT HIT: gi11420804, EVALUE 3.00e-75; SWISSPROT HIT: O95863, EVALUE 9.00e-23; EST_HUMAN HIT: AA465052.1, EVALUE 5.00e-75
atcctgagcagccggactcttggtgcttgtggagcagggacattcgggagaaggtccgagcacacgcctggcactggtacttcttgacatctgagtgggtctggaggtgggcccgcaggttggagcggtcagcgaaggcacgg

SEQ ID NO: 23925 - DNA, 198 bp, Homo sapiens
  MAP TO AL161642.2; EXPRESSED IN BONE MARROW, SIGNAL = 2.3; EXPRESSED IN HELA, SIGNAL = 2.9; EXPRESSED IN LUNG, SIGNAL = 1.2; EXPRESSED IN PLACENTA, SIGNAL = 1.7; EXPRESSED IN ADULT LIVER, SIGNAL = 1.7; EXPRESSED IN HEART, SIGNAL = 1.9; EXPRESSED IN FETAL LIVER, SIGNAL = 1.9; EXPRESSED IN BRAIN, SIGNAL = 2.3; EST_HUMAN HIT: BE079780.1, EVALUE 1.00e-27; NT HIT: AL163303.2, EVALUE 8.00e-12
gaacttaaagtaaaattaaaacaaacaaaaaaagaagtaaagcctgaagatgtgactgaatcactacagtctcatgataaaactttagcaaataaggagttgcttcttatggatgagcaaagaaataagtttattgaaatggaatctattcctggtgaagatgctgtgaacattattgaaatgataacaaaattctag

SEQ ID NO: 23926 - DNA, 109 bp, Homo sapiens
  MAP TO AC013705.3; EXPRESSED IN PLACENTA, SIGNAL = 2.1; EXPRESSED IN HEART, SIGNAL = 1.8; EXPRESSED IN FETAL LIVER, SIGNAL = 1.2; EXPRESSED IN BONE MARROW, SIGNAL = 1.3; EXPRESSED IN LUNG, SIGNAL = 2.1; EXPRESSED IN ADULT LIVER, SIGNAL = 2.4; EXPRESSED IN BRAIN, SIGNAL = 1.1; EST_HUMAN HIT: AA151872.1, EVALUE 8.80e-02; SWISSPROT HIT: P36774, EVALUE 4.20e+00; NT HIT: S57147.1, EVALUE 2.40e-01
agcctgtgggagtaatagggaggacatggaattcaggagggagcgaggtctcaacaccaacgccagaagaaatggacccagaagtcccagaccacagcattcttaccag

SEQ ID NO: 23927 - DNA, 132 bp, Homo sapiens
  MAP TO AL121901.10; EXPRESSED IN HELA, SIGNAL = 3.3; EXPRESSED IN LUNG, SIGNAL = 2.6; EXPRESSED IN HEART, SIGNAL = 3.1; EXPRESSED IN BONE MARROW, SIGNAL = 2.6; EXPRESSED IN PLACENTA, SIGNAL = 2.5; EXPRESSED IN ADULT LIVER, SIGNAL = 3.1; EXPRESSED IN FETAL LIVER, SIGNAL = 2.8; EXPRESSED IN BRAIN, SIGNAL = 2.6; EST_HUMAN HIT: AA938892.1, EVALUE 8.00e-09; SWISSPROT HIT: O13396, EVALUE 5.30e+00; NT HIT: U38791.1, EVALUE 2.90e-01
atgctccatgtcactgactccatcagcttccctggtttacaggtgaggaaggctcagaggcgtaaggacaaggaggaggatcatcataataacatggttttggaggactggcccaagcatgattcgctttaa

SEQ ID NO: 23928 - DNA, 145 bp, Homo sapiens
  MAP TO AC016057.3; EXPRESSED IN LUNG, SIGNAL =   2; EXPRESSED IN PLACENTA, SIGNAL =   2; EXPRESSED IN HEART, SIGNAL = 1.4; EXPRESSED IN FETAL LIVER, SIGNAL = 1.5; EXPRESSED IN BONE MARROW, SIGNAL = 1.8; EXPRESSED IN ADULT LIVER, SIGNAL =   2; EXPRESSED IN BRAIN, SIGNAL = 1.5; NT HIT: AF050157.1, EVALUE 5.10e+00; SWISSPROT HIT: P94993, EVALUE 6.90e+00; EST_HUMAN HIT: BF209791.1, EVALUE 4.90e-01
ttaccagcccccacatccaactggtcacaaattccttccaaattctttcctccttctgcacccctccagctatttcctggtgcctctcaggatcacacttcagctcctgcaaggctgctcttacacactgtgctgtctccctcat

SEQ ID NO: 23929 - DNA, 333 bp, Homo sapiens
  MAP TO AL136528.9; EXPRESSED IN HELA, SIGNAL =   6; EXPRESSED IN LUNG, SIGNAL = 3.3; EXPRESSED IN ADULT LIVER, SIGNAL = 4.1; EXPRESSED IN BRAIN, SIGNAL =   4; EXPRESSED IN BONE MARROW, SIGNAL = 4.8; EXPRESSED IN PLACENTA, SIGNAL = 2.8; EXPRESSED IN HEART, SIGNAL =   4; EXPRESSED IN FETAL LIVER, SIGNAL = 6.2; SWISSPROT HIT: O15350, EVALUE 1.00e-61; EST_HUMAN HIT: BE901651.1, EVALUE 4.80e+00; NT HIT: gi11422857, EVALUE 0.00e+00
tcagtggatctcggcctccgtgaactcctccttgatgggctgcttgcgggccttgcagtcgggcaggtcgaagccgaagtccgcccactcgtcagggccgccgcctgggccgccgcggttggggatggtgatggtgtggcgcacgcggaagtgcacggcctccatgacccgctggcgctgcagttcccctgagccgccgatggagatggtggccgcgttgctagagcggagcagctgctgcgcggtgctgtagtcgtggccctgcttcaggtcctgcaggccccgccagatggtcatgcggtactgctcggggatcttcagggcccccaggtc

SEQ ID NO: 23930 - DNA, 211 bp, Homo sapiens
  MAP TO AC021880.2; EXPRESSED IN PLACENTA, SIGNAL =  11; EXPRESSED IN ADULT LIVER, SIGNAL =  12; EXPRESSED IN FETAL LIVER, SIGNAL =  13; EXPRESSED IN BRAIN, SIGNAL =  11; EXPRESSED IN BONE MARROW, SIGNAL =  10; EXPRESSED IN LUNG, SIGNAL =  11; EXPRESSED IN HELA, SIGNAL =  10; EXPRESSED IN HEART, SIGNAL = 8.5; NT HIT: AB037838.1, EVALUE 1.30e-01; EST_HUMAN HIT: AW613774.1, EVALUE 3.00e-03; SWISSPROT HIT: O79680, EVALUE 4.90e+00
agtcatcagcagtatcaggcactgtgccaatctcgaccccacgttccactgccaggtaaccaccgacatgctgccagtcgctacagataggagttttgtctgtgctagaatgaaacatgtattgagtcataaacagcatgtgctttccaacctgcttctgctcagcacaaggtttctgagattcatccacactgttgtttgcatctgtcat

SEQ ID NO: 23931 - DNA, 100 bp, Homo sapiens
  MAP TO AL121747.19; EXPRESSED IN LUNG, SIGNAL = 1.4; EXPRESSED IN PLACENTA, SIGNAL = 1.5; EXPRESSED IN ADULT LIVER, SIGNAL = 1.4; EXPRESSED IN FETAL LIVER, SIGNAL = 1.3; EXPRESSED IN BRAIN, SIGNAL = 1.3; EXPRESSED IN HEART, SIGNAL = 1.2; EXPRESSED IN BONE MARROW, SIGNAL = 1.1; NT HIT: Z70177.1, EVALUE 8.40e-01; EST_HUMAN HIT: BE409340.1, EVALUE 1.00e-49
atggctatcagtgaaggagggctcctgactgatgagatcagacgaaaagtgtggcccaagctcctcaatgtcaatgccaatgacccacctcctatatcag

SEQ ID NO: 23932 - DNA, 150 bp, Homo sapiens
  MAP TO AC009416.2; EXPRESSED IN LUNG, SIGNAL = 1.1; EXPRESSED IN PLACENTA, SIGNAL = 1.1; EXPRESSED IN ADULT LIVER, SIGNAL = 1.3; EXPRESSED IN HEART, SIGNAL = 1.2; EXPRESSED IN FETAL LIVER, SIGNAL = 0.92; EXPRESSED IN BRAIN, SIGNAL =   1; EXPRESSED IN BONE MARROW, SIGNAL = 0.98; SWISSPROT HIT: Q23356, EVALUE 2.00e-06; NT HIT: AF003249.1, EVALUE 6.00e-12
actgactggatccagaattttcactgcagccaggctcccatctctcttgttagttaccttgtagactttgccataggtgcctttaccaatggtctctataatttcccaggtgtctgtgggatctggaagtgattcaagtccaagcatcat

SEQ ID NO: 23933 - DNA, 130 bp, Homo sapiens
  MAP TO AL139352.8; EXPRESSED IN LUNG, SIGNAL = 0.92; EXPRESSED IN PLACENTA, SIGNAL = 1.3; EXPRESSED IN ADULT LIVER, SIGNAL = 1.1; EXPRESSED IN FETAL LIVER, SIGNAL = 1.1; EXPRESSED IN BRAIN, SIGNAL = 1.2; EXPRESSED IN HEART, SIGNAL = 1.3; EXPRESSED IN BONE MARROW, SIGNAL = 1.1; EST_HUMAN HIT: AW602635.1, EVALUE 2.00e-67; SWISSPROT HIT: P00813, EVALUE 1.00e-19; NT HIT: gi11420852, EVALUE 2.00e-67
cagccttttaaactcctcttcagtaaagcccatgtcccgtttggtcatctggtaatcagtgtccagggtggacttgaagatgagcgggtcatctgtgttgagcgagtagttagcctggtcatttttgagc

SEQ ID NO: 23934 - DNA, 339 bp, Homo sapiens
  MAP TO AL136089.8; EXPRESSED IN LUNG, SIGNAL = 0.94; EXPRESSED IN PLACENTA, SIGNAL = 0.59; EXPRESSED IN ADULT LIVER, SIGNAL = 0.72; EXPRESSED IN HEART, SIGNAL = 1.4; EXPRESSED IN FETAL LIVER, SIGNAL = 8.3; EXPRESSED IN BRAIN, SIGNAL = 2.7; EXPRESSED IN HELA, SIGNAL = 3.6; EXPRESSED IN BONE MARROW, SIGNAL = 5.3; EST_HUMAN HIT: BE798352.1, EVALUE 2.00e-98; SWISSPROT HIT: P05218, EVALUE 2.00e-43; NT HIT: AF141349.1, EVALUE 1.00e-98
ctgcctctgtttccctggccagctcaatgccgacctccacaagttggcagtcaacatggtccccttcccacatctccatttctttatgcctggctcttcccctctcaccagccatggaagccagcagtatcaagctcacagtgtctgaattcacccagcatgtcttcaatgccaagaacatgatggctgcctgtgaaccccgccatggcttatacttcaccttggctgctgtcttcactggtcagatatccatgaaggacgtcaatgacaaaatgttaaatatgcaaaacaaaaacagcagctactttgtggaatggatctccaacaacgtcaagaaca

SEQ ID NO: 23935 - DNA, 250 bp, Homo sapiens
  MAP TO AL161450.2; EXPRESSED IN LUNG, SIGNAL = 1.1; EXPRESSED IN ADULT LIVER, SIGNAL = 1.3; EXPRESSED IN HEART, SIGNAL = 1.3; EXPRESSED IN BRAIN, SIGNAL = 1.2; EXPRESSED IN BONE MARROW, SIGNAL = 1.4; EXPRESSED IN PLACENTA, SIGNAL = 1.6; EXPRESSED IN FETAL LIVER, SIGNAL = 1.2; SWISSPROT HIT: P01854, EVALUE 7.00e-31; NT HIT: K01241.1, EVALUE 0.00e+00; EST_HUMAN HIT: AI241852.1, EVALUE 3.00e-50
gtgagccagtcgctgtctcatggaccacagagcagatgaactcgtttttctgttcccattcagccctggtaacctccaggcagctgaagactaagacgccagagcccttggttttgcggggctgcgtcatgctgtgccaagtgtccgggagctgcacctcgttgtacagccactgcaccaagatgtccttgggccagaagttctggatcaggcaggtgagggtgcgcttgtcctggttcctcggctcttc

SEQ ID NO: 23936 - DNA, 156 bp, Homo sapiens
  MAP TO AC024259.5; EXPRESSED IN PLACENTA, SIGNAL =   3; EXPRESSED IN HELA, SIGNAL =   5; EXPRESSED IN HEART, SIGNAL = 3.4; EXPRESSED IN FETAL LIVER, SIGNAL = 3.1; EXPRESSED IN BONE MARROW, SIGNAL = 2.8; EXPRESSED IN LUNG, SIGNAL = 2.8; EXPRESSED IN ADULT LIVER, SIGNAL = 3.2; EXPRESSED IN BRAIN, SIGNAL = 2.7; NT HIT: gi4504956, EVALUE 3.60e-01; EST_HUMAN HIT: AW816233.1, EVALUE 8.30e+00
ctcatcttggaaggggtggggctcccgtttgttcctggtggctccacaggcagctgccgtgataaacatcatgaatatgaataatatcagcaacgaagtcagaaaagtgtaggcatcataacattgaggaaattccacattccatggttgaagtga

SEQ ID NO: 23937 - DNA, 111 bp, Homo sapiens
  MAP TO AL158138.1; EXPRESSED IN HELA, SIGNAL = 3.2; EXPRESSED IN LUNG, SIGNAL = 2.9; EXPRESSED IN BONE MARROW, SIGNAL = 3.1; EXPRESSED IN PLACENTA, SIGNAL =   3; EXPRESSED IN ADULT LIVER, SIGNAL = 3.4; EXPRESSED IN HEART, SIGNAL =   3; EXPRESSED IN FETAL LIVER, SIGNAL = 3.5; EXPRESSED IN BRAIN, SIGNAL = 3.1; SWISSPROT HIT: P11210, EVALUE 9.30e+00
ttatattcagatgtggcttaattggacaaaccccactgaggttcatcacttttcttttccttttctgcttgactgtcctctttctcctccagccatccatccacctgcgag

SEQ ID NO: 23938 - DNA, 483 bp, Homo sapiens
  MAP TO AL121889.3; EXPRESSED IN BONE MARROW, SIGNAL = 4.2; EXPRESSED IN ADULT LIVER, SIGNAL = 7.5; EXPRESSED IN HELA, SIGNAL =   7; EXPRESSED IN HEART, SIGNAL = 2.7; EXPRESSED IN BRAIN, SIGNAL = 4.3; EXPRESSED IN LUNG, SIGNAL = 5.3; EXPRESSED IN PLACENTA, SIGNAL = 5.3; EXPRESSED IN FETAL LIVER, SIGNAL = 4.1; NT HIT: AB020630.1, EVALUE 0.00e+00; EST_HUMAN HIT: AI820688.1, EVALUE 3.00e-85; SWISSPROT HIT: Q15428, EVALUE 4.40e-01
aaccccaggctggagaagcccgtgctactctccgaatttcctaccaagatcccacgaggtgaactggacatgcctgttgagaatggcctccgggctccggtcagtgcctaccagtatgcgctggccaacggggatgtctggaaggtgcatgaggtgcctgactacagcatggcctatggcaaccctggcgtggccgacgccaccccgccctggagcagctacaaggaacagagccctcagacgcttctggagctgaagcggcagcgggctgcagccaagctgctcagccaccccttccttagcacacacctgggcagcagcatggccaggacgggcgagagtagcagtgaaggcaaggcccccttgatcggaggcagaacttcaccgtacagcagcaatgggacctcggtatattacacggtcaccagcggagatcccccactcttaaagttcaaggcccccatagaggagatggaggagaag

SEQ ID NO: 23939 - DNA, 199 bp, Homo sapiens
  MAP TO AL158049.2; EXPRESSED IN LUNG, SIGNAL =   1; EXPRESSED IN PLACENTA, SIGNAL = 1.1; EXPRESSED IN ADULT LIVER, SIGNAL = 1.2; EXPRESSED IN HEART, SIGNAL = 1.2; EXPRESSED IN FETAL LIVER, SIGNAL = 1.5; EXPRESSED IN BRAIN, SIGNAL = 1.1; EXPRESSED IN BONE MARROW, SIGNAL = 0.93; NT HIT: gi7705552, EVALUE 3.00e-02; SWISSPROT HIT: P87730, EVALUE 1.70e+00; EST_HUMAN HIT: AA036800.1, EVALUE 1.00e-101
ctttgtactgtggggtgaaccgcttcatggccagtggcagggattcatagaacctctgctcccgggagacgaggggcttgcacaccgtatgctcgtcatacttcatcacgctcatgtgccccccgacctggtgcaggaagggctccagctgcacgcctgccctcatgtccccggcatctgcgctgttttgcacaaccat

SEQ ID NO: 23940 - DNA, 126 bp, Homo sapiens
  MAP TO AC019222.3; EXPRESSED IN PLACENTA, SIGNAL = 4.6; EXPRESSED IN BONE MARROW, SIGNAL = 4.2; EXPRESSED IN ADULT LIVER, SIGNAL = 4.7; EXPRESSED IN HELA, SIGNAL =   5; EXPRESSED IN HEART, SIGNAL = 4.3; EXPRESSED IN BRAIN, SIGNAL = 3.5; EXPRESSED IN LUNG, SIGNAL = 4.9; EXPRESSED IN FETAL LIVER, SIGNAL = 4.2; EST_HUMAN HIT: AA427878.1, EVALUE 6.00e-65; NT HIT: AF104382.1, EVALUE 1.10e+00; SWISSPROT HIT: Q13574, EVALUE 3.10e+00
gttttcacagatgcctcttttgaaatcagcaaatctcctcaggagcatcatctggctcctgtcacccctactccagggagccctcgtcactgcagtaatgccagtgtcagagcagatgttccataa

SEQ ID NO: 23941 - DNA, 242 bp, Homo sapiens
  MAP TO AL162387.2; EXPRESSED IN PLACENTA, SIGNAL = 1.8; EXPRESSED IN ADULT LIVER, SIGNAL = 1.5; EXPRESSED IN FETAL LIVER, SIGNAL = 1.6; EXPRESSED IN BRAIN, SIGNAL = 1.8; EXPRESSED IN LUNG, SIGNAL = 2.1; EXPRESSED IN HEART, SIGNAL =   2; EXPRESSED IN BONE MARROW, SIGNAL = 1.7; SWISSPROT HIT: P40426, EVALUE 4.00e-30; EST_HUMAN HIT: AV660739.1, EVALUE 0.00e+00; NT HIT: X59841.1, EVALUE 0.00e+00
ctgttcatatttctccagttctgtgtgatagatttgtctgatctgggtcaatttggctctgtaatctgagtgttcaatagagttatctgaagaacctccagaggctgccgcggctgcagctgctgccgccgatcccccacctttctcaggacctgaaaccccttctgccaaaagcatattgtccagtctcattagctggggatcgggagggtcctcctcctgggctcctctgatgctgagac

SEQ ID NO: 23942 - DNA, 108 bp, Homo sapiens
  MAP TO AL132874.14; EXPRESSED IN LUNG, SIGNAL = 1.7; EXPRESSED IN ADULT LIVER, SIGNAL = 1.9; EXPRESSED IN HEART, SIGNAL = 1.5; EXPRESSED IN BRAIN, SIGNAL =   2; EXPRESSED IN PLACENTA, SIGNAL = 1.9; EXPRESSED IN FETAL LIVER, SIGNAL = 1.4; EXPRESSED IN BONE MARROW, SIGNAL = 1.6; SWISSPROT HIT: Q01588, EVALUE 7.20e+00; EST_HUMAN HIT: W56471.1, EVALUE 7.00e-52
aattagtttctttatgatctggtctctttctgtaagcatggcttttaattctgtaatcatctgtatatcttctggttttgattctctcattagatatttttcttccat

SEQ ID NO: 23943 - DNA, 423 bp, Homo sapiens
  MAP TO AL121579.2; EXPRESSED IN PLACENTA, SIGNAL = 1.7; EXPRESSED IN HEART, SIGNAL = 1.3; EXPRESSED IN FETAL LIVER, SIGNAL =   1; EXPRESSED IN BONE MARROW, SIGNAL = 1.1; EXPRESSED IN LUNG, SIGNAL = 1.3; EXPRESSED IN ADULT LIVER, SIGNAL = 1.7; EXPRESSED IN BRAIN, SIGNAL = 0.98; EST_HUMAN HIT: AV694317.1, EVALUE 2.00e-61; SWISSPROT HIT: P40317, EVALUE 1.10e+00; NT HIT: AF090403.1, EVALUE 2.60e-01
ctggcctccttccataccctcatggcttacttgtgctgtctgagacatctccgttctcacctgagtctcttcattgtctccaagcttgggggtccttatccggcttacactctctaatttggtgtcatcccactcatcacttaaggcagaggcagctggaacagctgtgctgacactcactgtgacttctggggctcccagcagactatcagtttctggctcaacactcagggtgtactcggaagtttcgagtggttgcttggtggcagcagcctgggtgttatcagctgtcatctgcgaaggcttctccttatcaggggtgaggcttccaggctcactgcctgctgtggactcagcaccaggaaaagaagttgtcctgtggtctgtgtctgcttcaaatttctcagtctttggattggtggt

SEQ ID NO: 23944 - DNA, 245 bp, Homo sapiens
  MAP TO AL139819.2; EXPRESSED IN LUNG, SIGNAL = 3.8; EXPRESSED IN ADULT LIVER, SIGNAL = 4.1; EXPRESSED IN HELA, SIGNAL = 4.5; EXPRESSED IN HEART, SIGNAL = 3.4; EXPRESSED IN BRAIN, SIGNAL = 2.9; EXPRESSED IN BONE MARROW, SIGNAL = 3.1; EXPRESSED IN PLACENTA, SIGNAL = 3.4; EXPRESSED IN FETAL LIVER, SIGNAL = 3.4; SWISSPROT HIT: Q13563, EVALUE 1.00e-21; NT HIT: gi7706638, EVALUE 0.00e+00; EST_HUMAN HIT: BE868170.1, EVALUE 8.70e-01
ggcccactactggacagtttgtattggaccaaatggtacaacaaccagagcctgggccatggctcccactccttcatctactatgagaacatgctgctgggggttccgaggctgcggcagctaaaggtccgcaatgactcctgtgtggtgcatgaagacttccgggaggacattctgagctgctatgatgtctactctccagacaaagaagaacaactcccctttgggcccttcaatggcacagc

SEQ ID NO: 23945 - DNA, 151 bp, Homo sapiens
  MAP TO AP001505.1; EXPRESSED IN BONE MARROW, SIGNAL = 1.6; EXPRESSED IN LUNG, SIGNAL = 1.8; EXPRESSED IN PLACENTA, SIGNAL = 1.6; EXPRESSED IN FETAL LIVER, SIGNAL = 1.6; EXPRESSED IN ADULT LIVER, SIGNAL = 1.8; EXPRESSED IN HEART, SIGNAL = 1.7; EXPRESSED IN BRAIN, SIGNAL = 1.5; EST_HUMAN HIT: AI201312.1, EVALUE 6.00e-16; NT HIT: AL163301.2, EVALUE 6.00e-80; SWISSPROT HIT: P01091, EVALUE 9.00e+00
tcactgaaatttcattcctcactgcaaatctttggttaatttccagaggtctgaaaaagccgattctgatcatttttgccagcgttctcattgctttcatcaatgaggctttttggacgtccttatcctgccattttgcagtcgtcattat

SEQ ID NO: 23946 - DNA, 296 bp, Homo sapiens
  MAP TO AL157375.1; EXPRESSED IN HELA, SIGNAL = 2.7; EXPRESSED IN LUNG, SIGNAL = 1.7; EXPRESSED IN ADULT LIVER, SIGNAL =   2; EXPRESSED IN BRAIN, SIGNAL = 2.6; EXPRESSED IN BONE MARROW, SIGNAL = 2.3; EXPRESSED IN PLACENTA, SIGNAL = 1.3; EXPRESSED IN HEART, SIGNAL = 1.6; EXPRESSED IN FETAL LIVER, SIGNAL = 2.9; NT HIT: gi11427873, EVALUE 2.00e-63; SWISSPROT HIT: P32889, EVALUE 1.00e-37; EST_HUMAN HIT: AU129040.1, EVALUE 1.00e-65
ctgtccacaagcatggggagcatctttgtcaacctcttcgaaagcatttttggcaaaaaagaaatgcacatcctcatcgtggtcctcagtgctgcagggaaaacaacaatcctatataagctgaagctgagtgacatcatgaccaccatccctaccataggcttcaatgtggaaaccatggagtacaggaacatcagcttaaccatgtggaacatgggcagccaagaaaacatctggcctctgtggcaccactacttccagaatacacaaggactgatcttcgtagtggacagcaa

SEQ ID NO: 23947 - DNA, 302 bp, Homo sapiens
  MAP TO AC015452.4; EXPRESSED IN PLACENTA, SIGNAL =   4; EXPRESSED IN ADULT LIVER, SIGNAL = 3.1; EXPRESSED IN HEART, SIGNAL = 3.7; EXPRESSED IN FETAL LIVER, SIGNAL = 3.2; EXPRESSED IN BRAIN, SIGNAL = 3.8; EXPRESSED IN BONE MARROW, SIGNAL = 3.7; EXPRESSED IN LUNG, SIGNAL = 3.8; NT HIT: AF003528.1, EVALUE 6.00e-88; SWISSPROT HIT: P33459, EVALUE 3.00e-08; EST_HUMAN HIT: AW262358.1, EVALUE 7.00e-73
ctctgttatagagtagtagactgatttcaccttgatagtctgggtcagccaccccagccaacactgtaacacccttcttagactgttgacttaaaggtaggagaagccaaaactgtccaggtggcaatcttaacttccagtttaatggaatcattgttgtgtctcctggtggcagtgttcctccctctggaactaagacctctaggccagctgaacttaatgctgtgggaacaggaagcaaaaattttgctagtggatcactaaggatgatgatgagtgttgccacttccacttccatccct

SEQ ID NO: 23948 - DNA, 240 bp, Homo sapiens
  MAP TO AL121908.7; EXPRESSED IN LUNG, SIGNAL = 3.1; EXPRESSED IN PLACENTA, SIGNAL = 2.9; EXPRESSED IN ADULT LIVER, SIGNAL =   3; EXPRESSED IN HELA, SIGNAL = 2.7; EXPRESSED IN HEART, SIGNAL = 2.3; EXPRESSED IN FETAL LIVER, SIGNAL = 3.1; EXPRESSED IN BRAIN, SIGNAL = 4.3; EXPRESSED IN BONE MARROW, SIGNAL = 3.9; NT HIT: AF242872.1, EVALUE 2.30e+00; EST_HUMAN HIT: AW855039.1, EVALUE 2.20e-01
tcagttatgtttaaagtcctggaacagtgccaatgcccaccacatagtaatttccatgtaaatgtgagctgccatgatgatggtgatgatcatggttgtgatgatggtggtgatgattgtgatgttgatggtgatgatgatggtcgtgatgatgatggtgatgatgatggtcgtgatgattgtgatcatgatggtgatgatcatggtggtcctgatgatggttgtgatgattgtcatcat

SEQ ID NO: 23949 - DNA, 96 bp, Homo sapiens
  MAP TO AC013726.3; EXPRESSED IN LUNG, SIGNAL = 2.1; EXPRESSED IN ADULT LIVER, SIGNAL = 2.3; EXPRESSED IN HEART, SIGNAL = 1.7; EXPRESSED IN BRAIN, SIGNAL = 1.9; EXPRESSED IN FETAL LIVER, SIGNAL =   2; EXPRESSED IN PLACENTA, SIGNAL = 1.8; EXPRESSED IN HELA, SIGNAL = 2.5; EXPRESSED IN BONE MARROW, SIGNAL = 1.9; SWISSPROT HIT: Q9Y6J0, EVALUE 7.20e+00; EST_HUMAN HIT: AW377210.1, EVALUE 1.20e+00
aacccagccaagggtgttgtgaagaagccagagagtcatccaggaaaaccatacatcaatgtcattggtgctccaggcacagcccagctcaactga

SEQ ID NO: 23950 - DNA, 222 bp, Homo sapiens
  MAP TO AC019214.2; EXPRESSED IN PLACENTA, SIGNAL = 1.2; EXPRESSED IN ADULT LIVER, SIGNAL = 1.4; EXPRESSED IN HEART, SIGNAL = 1.3; EXPRESSED IN BRAIN, SIGNAL = 1.2; EXPRESSED IN BONE MARROW, SIGNAL = 1.2; EXPRESSED IN LUNG, SIGNAL = 1.5; EXPRESSED IN FETAL LIVER, SIGNAL = 1.4; NT HIT: gi11424216, EVALUE 1.00e-122; SWISSPROT HIT: P08111, EVALUE 2.00e-08; EST_HUMAN HIT: AL044577.1, EVALUE 1.00e-118
cttggccatatttggtgaagacgcaggaggcgatgccactgacgtcctcccggcggatgcagctgtagcgcacctggggcttgagcaggggcagcgagaccacctggatgtcgcccaggttggtaaggactgccaggtggtgctccccgtagtcctcggctcgacgactgccgaagtgggccacgctgacccgccgcactcttgagccctccaggcgcgtca

SEQ ID NO: 23951 - DNA, 78 bp, Homo sapiens
  MAP TO AL117334.29; EXPRESSED IN LUNG, SIGNAL =   3; EXPRESSED IN ADULT LIVER, SIGNAL = 2.6; EXPRESSED IN HEART, SIGNAL = 2.8; EXPRESSED IN BRAIN, SIGNAL = 2.7; EXPRESSED IN PLACENTA, SIGNAL = 3.3; EXPRESSED IN FETAL LIVER, SIGNAL = 2.9; EXPRESSED IN BONE MARROW, SIGNAL = 2.7; NT HIT: M20231.1, EVALUE 2.40e+00; EST_HUMAN HIT: AW103658.1, EVALUE 1.00e-36
acttcagctattcccttccacattgccacatccaagcagctcaacacagctgcaggaaaagtgtacaactatgctaag

SEQ ID NO: 23952 - DNA, 116 bp, Homo sapiens
  MAP TO AC011440.5; EXPRESSED IN LUNG, SIGNAL = 6.3; EXPRESSED IN HELA, SIGNAL = 9.1; EXPRESSED IN PLACENTA, SIGNAL = 5.3; EXPRESSED IN FETAL LIVER, SIGNAL = 4.8; EXPRESSED IN BRAIN, SIGNAL = 4.5; EXPRESSED IN ADULT LIVER, SIGNAL = 6.5; EXPRESSED IN HEART, SIGNAL = 6.3; EXPRESSED IN BONE MARROW, SIGNAL = 4.8; SWISSPROT HIT: P13061, EVALUE 3.20e+00; NT HIT: U25956.1, EVALUE 4.00e+00
ttgcagctcttccttcatctcaaatatccactggattaggtacatctgtgtgtacttcatcttatccatcctgttaaagaaaaaattatagaaggacaattgttaaagcatggtag

SEQ ID NO: 23953 - DNA, 178 bp, Homo sapiens
  MAP TO AC018501.5; EXPRESSED IN PLACENTA, SIGNAL = 2.8; EXPRESSED IN ADULT LIVER, SIGNAL = 3.4; EXPRESSED IN HEART, SIGNAL = 2.8; EXPRESSED IN FETAL LIVER, SIGNAL = 2.5; EXPRESSED IN BONE MARROW, SIGNAL = 2.5; EXPRESSED IN LUNG, SIGNAL = 3.2; EXPRESSED IN HELA, SIGNAL = 4.1; EXPRESSED IN BRAIN, SIGNAL = 2.4; SWISSPROT HIT: P29994, EVALUE 2.00e-20; EST_HUMAN HIT: T08138.1, EVALUE 1.00e-36; NT HIT: gi11431994, EVALUE 1.00e-65
gatttttgaagttaaagatatgggtacctcctcggactcccttaaacgggtagaaaaacgccaccagcaggttcatcaggacggccaggttaaacgaaatgctgctccagaaagacatgttgcgggcacaccagtacaacacgggctgggctgcagagacaaaggcaaagccgcgtga

SEQ ID NO: 23954 - DNA, 219 bp, Homo sapiens
  MAP TO AC019214.2; EXPRESSED IN LUNG, SIGNAL =   5; EXPRESSED IN ADULT LIVER, SIGNAL = 3.6; EXPRESSED IN HEART, SIGNAL = 5.7; EXPRESSED IN BRAIN, SIGNAL =   5; EXPRESSED IN PLACENTA, SIGNAL = 5.1; EXPRESSED IN HELA, SIGNAL = 3.2; EXPRESSED IN FETAL LIVER, SIGNAL = 5.3; EXPRESSED IN BONE MARROW, SIGNAL = 5.1; SWISSPROT HIT: P35187, EVALUE 4.70e+00; NT HIT: AB042824.1, EVALUE 1.00e-118; EST_HUMAN HIT: BE263134.1, EVALUE 1.00e-118
gtgccgccatgccgccattgccaagtacttcggggatgcgctgcctgcctgcgccaaaggctgcgaccactgccagaaccccacggccgtgcggaggcggctggaggccttggagcgcagcagcagctggagcaagacctgcatcgggccctcccaggggaacggctttgaccccgagctgtatgagggaggccgcaagggctacggggacttcagcag

SEQ ID NO: 23955 - DNA, 336 bp, Homo sapiens
  MAP TO AL121988.10; EXPRESSED IN PLACENTA, SIGNAL = 6.7; EXPRESSED IN FETAL LIVER, SIGNAL = 5.9; EXPRESSED IN HEART, SIGNAL = 5.9; EXPRESSED IN BONE MARROW, SIGNAL = 6.1; EXPRESSED IN ADULT LIVER, SIGNAL = 6.8; EXPRESSED IN BRAIN, SIGNAL = 5.6; EXPRESSED IN LUNG, SIGNAL = 6.9; EXPRESSED IN HELA, SIGNAL = 5.8; EST_HUMAN HIT: AA658825.1, EVALUE 3.10e-01; SWISSPROT HIT: Q14028, EVALUE 9.90e-01; NT HIT: Z35786.1, EVALUE 2.10e-01
ttacggagtgtcctgcccctgccctctggctgtggaggcagctggggagcagggctgagttgcctggtgcagctcatgatgttttcccctctttcccggaaggggtttcctgaaggtggaagtgagacctgaaggcatagagagtgtgcattgttcagctgcacctggcggtgagctcatgtcagcagacagaacagggaaggcagcaccagaccaggaattggaaactgcctgagcagtttccttggcccaggtccctacatccatctttgcttcctctttctgggaactggtcccttccttgagtcccgagctgactctcatgaggccagggac

SEQ ID NO: 23956 - DNA, 131 bp, Homo sapiens
  MAP TO AC019221.3; EXPRESSED IN PLACENTA, SIGNAL = 5.6; EXPRESSED IN FETAL LIVER, SIGNAL =   5; EXPRESSED IN HEART, SIGNAL = 5.4; EXPRESSED IN BONE MARROW, SIGNAL = 5.9; EXPRESSED IN LUNG, SIGNAL = 6.8; EXPRESSED IN ADULT LIVER, SIGNAL = 6.1; EXPRESSED IN HELA, SIGNAL = 5.7; EXPRESSED IN BRAIN, SIGNAL =   5; SWISSPROT HIT: Q16760, EVALUE 7.00e-21; NT HIT: D63479.2, EVALUE 4.00e-68; EST_HUMAN HIT: BE888147.1, EVALUE 6.00e-68
cttgaggtccctccgctccaggtgcaggagctcagagccccggatgtcgtgccgtgtgaagatgtccttatactcacagagactgaggtgctccagccaggcagcaacctcctctgtcccccagaggtgaa

SEQ ID NO: 23957 - DNA, 92 bp, Homo sapiens
  MAP TO AC008474.4; EXPRESSED IN ADULT LIVER, SIGNAL = 1.8; EXPRESSED IN HELA, SIGNAL = 2.3; EXPRESSED IN LUNG, SIGNAL = 1.7; EXPRESSED IN PLACENTA, SIGNAL = 1.5; EXPRESSED IN FETAL LIVER, SIGNAL = 1.8; EXPRESSED IN BONE MARROW, SIGNAL = 1.3; EXPRESSED IN HEART, SIGNAL = 1.7; EXPRESSED IN BRAIN, SIGNAL =   2; SWISSPROT HIT: O14737, EVALUE 2.00e-10; EST_HUMAN HIT: R81019.1, EVALUE 8.00e-45; NT HIT: gi4759223, EVALUE 5.00e-45
taagtaacttagcacttgtaaagcctgaaaaaactaaagcagtagagaattaccttatacagatggcaagatatggacaactaagtgagaag

SEQ ID NO: 23958 - DNA, 359 bp, Homo sapiens
  MAP TO AL121777.16; EXPRESSED IN HELA, SIGNAL = 2.9; EXPRESSED IN LUNG, SIGNAL = 1.2; EXPRESSED IN PLACENTA, SIGNAL = 0.96; EXPRESSED IN ADULT LIVER, SIGNAL = 1.4; EXPRESSED IN FETAL LIVER, SIGNAL =   2; EXPRESSED IN BONE MARROW, SIGNAL = 1.5; EXPRESSED IN HEART, SIGNAL = 1.4; EXPRESSED IN BRAIN, SIGNAL = 1.8; NT HIT: gi4507208, EVALUE 1.00e-15; SWISSPROT HIT: P19623, EVALUE 2.00e-14; EST_HUMAN HIT: BE904452.1, EVALUE 2.00e-15
ctgcatctgccccacctgctgctgtgtcaggtgctgcaccagctcccggtcacgggtgatcatgttctgccgcacagcatgaagccagtctggctgcaggggtagatggggaccatgcagtaggtgtagcccaccacggctactggcagaactgccacatctccttatgaggtgaaggtgcagccactggtgctctccctggcagcagagaatgctgtcctccgcgagggccaccttcaccttcatctgctgacaataggcttccttgaagaggctttcagccgggcccatgtggtctgagaagtcagtgatacatcaaaggcatcctggttctgcttcatgaactcaaaactgtcacc

SEQ ID NO: 23959 - DNA, 128 bp, Homo sapiens
  MAP TO AL132866.21; EXPRESSED IN LUNG, SIGNAL = 2.7; EXPRESSED IN HELA, SIGNAL =   3; EXPRESSED IN BRAIN, SIGNAL =   2; EXPRESSED IN PLACENTA, SIGNAL = 2.3; EXPRESSED IN ADULT LIVER, SIGNAL = 2.8; EXPRESSED IN FETAL LIVER, SIGNAL = 2.2; EXPRESSED IN HEART, SIGNAL = 2.2; EXPRESSED IN BONE MARROW, SIGNAL = 2.3; EST_HUMAN HIT: AA192153.1, EVALUE 1.10e-01; NT HIT: AL161582.2, EVALUE 2.80e-01
tatttttccgtgaatttgtgccctggaacaatcggaaccatcttagagcagacacctgctcttcccacctgtttctctccctgggtttggttgtacccggcgtgatgttctctgaaacaatagacctg

SEQ ID NO: 23960 - DNA, 109 bp, Homo sapiens
  MAP TO AL121905.10; EXPRESSED IN LUNG, SIGNAL = 2.6; EXPRESSED IN PLACENTA, SIGNAL = 2.3; EXPRESSED IN HEART, SIGNAL = 2.1; EXPRESSED IN FETAL LIVER, SIGNAL = 2.4; EXPRESSED IN BRAIN, SIGNAL = 3.5; EXPRESSED IN ADULT LIVER, SIGNAL = 2.8; EXPRESSED IN HELA, SIGNAL = 2.3; EXPRESSED IN BONE MARROW, SIGNAL = 2.6; EST_HUMAN HIT: AI360263.1, EVALUE 7.00e-55; SWISSPROT HIT: Q03348, EVALUE 1.00e-15; NT HIT: gi4506302, EVALUE 5.00e-55
atccccaagcaccaacaggaaatacccacccctgcccgtggacaagctggaagaggaaattaaccggagaatggcagacgacaataagctcttcagggaggaattcaac

SEQ ID NO: 23961 - DNA, 92 bp, Homo sapiens
  MAP TO AL133419.11; EXPRESSED IN LUNG, SIGNAL =   4; EXPRESSED IN PLACENTA, SIGNAL = 4.3; EXPRESSED IN ADULT LIVER, SIGNAL = 4.3; EXPRESSED IN HELA, SIGNAL = 3.3; EXPRESSED IN FETAL LIVER, SIGNAL = 4.4; EXPRESSED IN BRAIN, SIGNAL =   4; EXPRESSED IN BONE MARROW, SIGNAL =   4; EXPRESSED IN HEART, SIGNAL = 4.1; NT HIT: AL161589.2, EVALUE 3.00e-03
cttctacctcctcctttgcctttttctggatcttgaaaatccccatgtatctctgctttttctacagtaaaccttccctggagagactccat

SEQ ID NO: 23962 - DNA, 431 bp, Homo sapiens
  MAP TO AC022262.3; EXPRESSED IN LUNG, SIGNAL = 4.8; EXPRESSED IN PLACENTA, SIGNAL = 4.2; EXPRESSED IN HEART, SIGNAL = 3.9; EXPRESSED IN FETAL LIVER, SIGNAL = 4.5; EXPRESSED IN BRAIN, SIGNAL = 4.6; EXPRESSED IN BONE MARROW, SIGNAL = 4.2; EXPRESSED IN ADULT LIVER, SIGNAL = 4.1; EXPRESSED IN HELA, SIGNAL = 3.2; EST_HUMAN HIT: BE315402.1, EVALUE 0.00e+00; SWISSPROT HIT: Q02084, EVALUE 5.00e-28; NT HIT: gi11423970, EVALUE 0.00e+00
gtggcagtggtcccaggaggttgtggtctccttctgcctggactagatgcggacggtgttgatccgcagcggctgaacgttcttgccattggcgtggctctggccagggctgaagtaagagcagagcttgccagggaacttctcgcggaaggtgtagagccaggacatgtcatcagcattgtagaagatgagcaagccttggtcatagtccaggaagacacccaccttgtcaagcttgtcccggacgttaagccgcgtccagggctccgtgcaggcgctgtactggttgccatcgtgcatcacgatgcagtagaagccgcggctgggctggatctggatgctgcccttgcggcttgcggcttcgtgtgccagcccgatcacccactgggtcttctccgccaccaccacctcccagtagtggacgccactac

SEQ ID NO: 23963 - DNA, 195 bp, Homo sapiens
  MAP TO AC017086.3; EXPRESSED IN ADULT LIVER, SIGNAL = 1.3; EXPRESSED IN PLACENTA, SIGNAL = 1.5; EXPRESSED IN FETAL LIVER, SIGNAL = 1.4; EXPRESSED IN BRAIN, SIGNAL = 1.9; EXPRESSED IN BONE MARROW, SIGNAL = 1.2; EXPRESSED IN LUNG, SIGNAL = 1.4; EXPRESSED IN HEART, SIGNAL = 1.3; EST_HUMAN HIT: BF365119.1, EVALUE 1.00e-11; SWISSPROT HIT: P21399, EVALUE 2.90e+00; NT HIT: AF090481.1, EVALUE 1.80e+00
agcatgcatggagctgagaggcaacacagtgctaagtggcacagagggagatctaatctggtcatgctactttgtaatgtggctaatcctgttttcccaaggacctttcaccttgtgagtaaccctgaccttgtgctggcagtgtctatgaccaagactagaaatgaagtttgtggctatccagttattgttcag

SEQ ID NO: 23964 - DNA, 78 bp, Homo sapiens
  MAP TO AC008379.3; EXPRESSED IN ADULT LIVER, SIGNAL = 1.7; EXPRESSED IN HELA, SIGNAL = 2.3; EXPRESSED IN BONE MARROW, SIGNAL = 1.8; EXPRESSED IN LUNG, SIGNAL = 1.8; EXPRESSED IN PLACENTA, SIGNAL = 1.5; EXPRESSED IN HEART, SIGNAL = 1.5; EXPRESSED IN FETAL LIVER, SIGNAL = 1.6; EXPRESSED IN BRAIN, SIGNAL = 1.6; NT HIT: AF153715.1, EVALUE 1.00e-08; EST_HUMAN HIT: AW850731.1, EVALUE 3.00e-10
gggacaacgaccactatgttcaagttggcagataaagtggctgcattcaaagccgaactggaattatgggggcgacga

SEQ ID NO: 23965 - DNA, 261 bp, Homo sapiens
  MAP TO AL136528.9; EXPRESSED IN HELA, SIGNAL =   4; EXPRESSED IN LUNG, SIGNAL = 3.1; EXPRESSED IN PLACENTA, SIGNAL = 2.5; EXPRESSED IN HEART, SIGNAL =   3; EXPRESSED IN FETAL LIVER, SIGNAL = 2.9; EXPRESSED IN BONE MARROW, SIGNAL = 3.2; EXPRESSED IN ADULT LIVER, SIGNAL = 3.2; EXPRESSED IN BRAIN, SIGNAL = 2.8; NT HIT: gi11422854, EVALUE 1.00e-105; EST_HUMAN HIT: AW016879.1, EVALUE 1.00e-105; SWISSPROT HIT: P53855, EVALUE 8.30e-01
acaccggtgccctgtccttccttcctcagacaacattcccaatgccgtctgggtctgggacattcagaagctgaggctgttcgcggtgctcgagcagctgtccccagtgcgcgcgtttcagtgggacccgcagcagccgcggctggccatctgcacgggaggcagcaggctctacctgtggtccccagcgggctgcatgtcggtgcaggtgcctggggaaggtaagcacatccccgaggccacggacgtggcagccttgct

SEQ ID NO: 23966 - DNA, 114 bp, Homo sapiens
  MAP TO AL121747.19; EXPRESSED IN PLACENTA, SIGNAL = 4.9; EXPRESSED IN LUNG, SIGNAL = 5.4; EXPRESSED IN HELA, SIGNAL = 3.1; EXPRESSED IN HEART, SIGNAL = 5.3; EXPRESSED IN FETAL LIVER, SIGNAL = 5.4; EXPRESSED IN BONE MARROW, SIGNAL = 5.5; EXPRESSED IN ADULT LIVER, SIGNAL = 4.8; EXPRESSED IN BRAIN, SIGNAL = 5.4; SWISSPROT HIT: P47171, EVALUE 1.40e+00; EST_HUMAN HIT: AW419134.1, EVALUE 4.00e-07; NT HIT: gi11426088, EVALUE 1.00e-03
ctggtgatggcagtggcagcccatctggagtggacgctgccatcaagccagctgcagcagggagggacagctggggctgcacattccacagagctgcagagctggggacaatga

SEQ ID NO: 23967 - DNA, 138 bp, Homo sapiens
  MAP TO AC021878.2; EXPRESSED IN ADULT LIVER, SIGNAL = 0.84; EXPRESSED IN LUNG, SIGNAL = 0.9; EXPRESSED IN PLACENTA, SIGNAL = 0.8; EXPRESSED IN FETAL LIVER, SIGNAL = 0.83; EXPRESSED IN BONE MARROW, SIGNAL = 0.66; EXPRESSED IN HEART, SIGNAL = 2.1; EXPRESSED IN BRAIN, SIGNAL = 0.79; SWISSPROT HIT: P07743, EVALUE 1.80e+00; EST_HUMAN HIT: BF691315.1, EVALUE 1.80e+00; NT HIT: AF233437.1, EVALUE 7.80e-02
gatgttcctgctgacagtagaatgcagaatgaactggagagagcacagagtttgaggttagaggccacactggagacttttgcaatatttcatctgagagatgatagtggaaataacactggaaacagagaggagtgg

SEQ ID NO: 23968 - DNA, 84 bp, Homo sapiens
  MAP TO AC021115.3; EXPRESSED IN LUNG, SIGNAL = 6.1; EXPRESSED IN ADULT LIVER, SIGNAL = 5.7; EXPRESSED IN HELA, SIGNAL = 2.7; EXPRESSED IN FETAL LIVER, SIGNAL = 3.9; EXPRESSED IN BRAIN, SIGNAL = 5.2; EXPRESSED IN BONE MARROW, SIGNAL = 5.5; EXPRESSED IN PLACENTA, SIGNAL = 5.8; EXPRESSED IN HEART, SIGNAL = 4.9; EST_HUMAN HIT: BE009416.1, EVALUE 4.00e-40; NT HIT: AF026284.1, EVALUE 6.80e-01
ctgaggcgtgaagcacagatctgtagcaataagccccatatacaaaaggtgaccaatgatacgctcttccttttcatttcccat

SEQ ID NO: 23969 - DNA, 106 bp, Homo sapiens
  MAP TO AL133458.11; EXPRESSED IN PLACENTA, SIGNAL = 9.8; EXPRESSED IN HEART, SIGNAL = 8.6; EXPRESSED IN BONE MARROW, SIGNAL = 9.5; EXPRESSED IN LUNG, SIGNAL = 9.9; EXPRESSED IN ADULT LIVER, SIGNAL =  11; EXPRESSED IN HELA, SIGNAL = 8.9; EXPRESSED IN FETAL LIVER, SIGNAL = 7.1; EXPRESSED IN BRAIN, SIGNAL = 8.4; NT HIT: gi5901953, EVALUE 3.00e-53; SWISSPROT HIT: P25280, EVALUE 9.40e+00; EST_HUMAN HIT: AW467052.1, EVALUE 4.00e-53
ctttagatggcaaagacaaagctggcctttgtccagatgaagatgatatggaaggagattctttctttgatgatcccattcctaagccagagaaaacttacggttt

SEQ ID NO: 23970 - DNA, 479 bp, Homo sapiens
  MAP TO AC011599.8; EXPRESSED IN PLACENTA, SIGNAL = 1.6; EXPRESSED IN ADULT LIVER, SIGNAL = 1.8; EXPRESSED IN FETAL LIVER, SIGNAL = 1.6; EXPRESSED IN BONE MARROW, SIGNAL = 1.8; EXPRESSED IN LUNG, SIGNAL =   2; EXPRESSED IN HEART, SIGNAL = 1.5; EXPRESSED IN BRAIN, SIGNAL = 2.1; SWISSPROT HIT: P08121, EVALUE 3.00e-03; NT HIT: gi7662289, EVALUE 1.00e-62; EST_HUMAN HIT: BE677277.1, EVALUE 2.90e-02
ctgatgtgaacagccagaatcctagcagtcgcaatcataacctctttcaacttcagtttcctcatcttcacaattaaaataatcggtacagtcttctccacccccaccacctcacaatggctgaaaggagcccgacacagtgcctggaacgtaggaggagccagtacgatcacccccaaagcaacattcagggacacctggccctgtctagggatggtggggatgcagtctttggtccatcctcgggccctgaagctgggggacaccattcttccctgatgcagcagccccagccagcccgggccccacctgaacgcctctatgagccgctccactttctgagcctccccttggacacggatgtgcgcctggaatttcctgagggcctcatccagctccatggtagagaagtccatctcgtccacgacgcagctggaatagagacagacagccccgcataagcaccccttgcaggtgcg

SEQ ID NO: 23971 - DNA, 206 bp, Homo sapiens
  MAP TO AC023340.2; EXPRESSED IN PLACENTA, SIGNAL = 2.6; EXPRESSED IN LUNG, SIGNAL = 2.6; EXPRESSED IN HELA, SIGNAL = 2.5; EXPRESSED IN HEART, SIGNAL = 2.5; EXPRESSED IN FETAL LIVER, SIGNAL = 2.2; EXPRESSED IN BONE MARROW, SIGNAL = 2.2; EXPRESSED IN ADULT LIVER, SIGNAL = 2.8; EXPRESSED IN BRAIN, SIGNAL =   3; EST_HUMAN HIT: AA452578.1, EVALUE 1.00e-05; SWISSPROT HIT: P33225, EVALUE 6.50e+00; NT HIT: AJ229041.1, EVALUE 7.60e+00
ccagatgccaaatcactggcatcttgatcttggccttccgagcctcctgaactgggagcaacaaaagtcttgtgtttaagccactcagttggtagcattttgttatggaaacctgaactaagccagaatcgctctttactttggtggtgcttttccttcaagaaagaggaccttccccacactgcagcaattataaagccagccat

SEQ ID NO: 23972 - DNA, 263 bp, Homo sapiens
  MAP TO AC021079.2; EXPRESSED IN ADULT LIVER, SIGNAL = 1.9; EXPRESSED IN BRAIN, SIGNAL = 3.7; EXPRESSED IN LUNG, SIGNAL = 1.9; EXPRESSED IN BONE MARROW, SIGNAL = 1.7; EXPRESSED IN FETAL LIVER, SIGNAL = 1.8; EXPRESSED IN HEART, SIGNAL = 1.9; EXPRESSED IN HELA, SIGNAL = 2.4; EXPRESSED IN PLACENTA, SIGNAL = 1.7; SWISSPROT HIT: P14867, EVALUE 8.00e-33; EST_HUMAN HIT: AV722519.1, EVALUE 7.00e-91; NT HIT: X14766.1, EVALUE 0.00e+00
ccaaagaaagtaaaggatcctcttattaagaaaaacaacacttacgctccaacagcaaccagctacacccctaatttggccaggggcgacccgggcttagccaccattgctaaaagtgcaaccatagaacctaaagaggtcaagcccgaaacaaaaccaccagaacccaagaaaacctttaacagtgtcagcaaaattgaccgactgtcaagaatagccttcccgctgctatttggaatctttaacttagtctactgggctac

SEQ ID NO: 23973 - DNA, 171 bp, Homo sapiens
  MAP TO AL138807.7; EXPRESSED IN PLACENTA, SIGNAL = 2.5; EXPRESSED IN HEART, SIGNAL = 2.6; EXPRESSED IN FETAL LIVER, SIGNAL = 2.5; EXPRESSED IN BRAIN, SIGNAL = 2.8; EXPRESSED IN BONE MARROW, SIGNAL = 2.5; EXPRESSED IN LUNG, SIGNAL =   3; EXPRESSED IN ADULT LIVER, SIGNAL =   3; EXPRESSED IN HELA, SIGNAL = 3.3; EST_HUMAN HIT: AW374292.1, EVALUE 1.00e-91; SWISSPROT HIT: O70228, EVALUE 2.00e-17; NT HIT: AB014511.1, EVALUE 8.00e-92
cttgatgccagcattcctcagggtctccagcgtgggccgcacatctgcctgcagctggtcctccacgcccgtcaggcacagcagttccatctccatctccaggctctcgatcaccgtggccactttgagggagcggtcgtgcacactcagcttggcctggacgtagcgggc

SEQ ID NO: 23974 - DNA, 149 bp, Homo sapiens
  MAP TO AL121747.19; EXPRESSED IN LUNG, SIGNAL =   6; EXPRESSED IN ADULT LIVER, SIGNAL = 6.5; EXPRESSED IN HELA, SIGNAL = 4.9; EXPRESSED IN BONE MARROW, SIGNAL = 5.5; EXPRESSED IN PLACENTA, SIGNAL = 4.8; EXPRESSED IN HEART, SIGNAL =   5; EXPRESSED IN FETAL LIVER, SIGNAL = 7.1; EXPRESSED IN BRAIN, SIGNAL = 5.1; EST_HUMAN HIT: AL134963.1, EVALUE 1.00e-78; NT HIT: J02853.1, EVALUE 9.00e-79; SWISSPROT HIT: P19139, EVALUE 2.00e-24
acactctcgaaagcgatgggaacgctttgtccacagtgaaaatcagcaccttgtcagccctgaggccttggatttcctggacaaactgctgcgatatgaccaccagtcacggcttactgcaagagaggcaatggagcacccctatttct

SEQ ID NO: 23975 - DNA, 230 bp, Homo sapiens
  MAP TO AC008757.4; EXPRESSED IN BONE MARROW, SIGNAL = 4.7; EXPRESSED IN LUNG, SIGNAL = 7.6; EXPRESSED IN ADULT LIVER, SIGNAL = 7.9; EXPRESSED IN HELA, SIGNAL = 9.7; EXPRESSED IN PLACENTA, SIGNAL =  10; EXPRESSED IN HEART, SIGNAL = 8.9; EXPRESSED IN FETAL LIVER, SIGNAL =   7; EXPRESSED IN BRAIN, SIGNAL = 6.4; SWISSPROT HIT: P48678, EVALUE 1.40e+00; NT HIT: M88356.1, EVALUE 1.40e-01; EST_HUMAN HIT: AI016731.1, EVALUE 3.00e-03
ttatttatgtacagcttctcttcttctagtctccattccacgttttcccaccctgctgctgaccaggctcccctgccttccccactgccagaccacaggtcccagcagctcctggccttgagcggagggagggagggagggagcacgtgcaactcgctcctggtcttttctctgctgctgctgctgctgctgccgccgccgccgccgccgccgatactgctgctcattct

SEQ ID NO: 23976 - DNA, 156 bp, Homo sapiens
  MAP TO AL121575.24; EXPRESSED IN LUNG, SIGNAL = 2.7; EXPRESSED IN PLACENTA, SIGNAL = 2.9; EXPRESSED IN HELA, SIGNAL = 4.1; EXPRESSED IN FETAL LIVER, SIGNAL = 3.8; EXPRESSED IN BRAIN, SIGNAL =   5; EXPRESSED IN BONE MARROW, SIGNAL = 3.6; EXPRESSED IN ADULT LIVER, SIGNAL = 2.7; EXPRESSED IN HEART, SIGNAL =   2; EST_HUMAN HIT: AA171451.1, EVALUE 8.00e-71; SWISSPROT HIT: P22533, EVALUE 5.20e+00; NT HIT: AL163246.2, EVALUE 2.00e-64
aacaggaaagaaggaaatttggggaaatggggtgaatgtcaggtggatcagagagatacagtcatgggggtcaggtgtggtatccagaataatgtgagaggccggattgaagtctgggccaggaacaacggtaattgtgggagactcaacaaagag

SEQ ID NO: 23977 - DNA, 142 bp, Homo sapiens
  MAP TO AL078646.29; EXPRESSED IN ADULT LIVER, SIGNAL = 1.9; EXPRESSED IN BRAIN, SIGNAL = 2.1; EXPRESSED IN LUNG, SIGNAL =   2; EXPRESSED IN PLACENTA, SIGNAL = 1.5; EXPRESSED IN HELA, SIGNAL = 2.3; EXPRESSED IN HEART, SIGNAL = 1.8; EXPRESSED IN FETAL LIVER, SIGNAL = 2.3; EXPRESSED IN BONE MARROW, SIGNAL = 2.7; NT HIT: D87675.1, EVALUE 4.00e-28; EST_HUMAN HIT: AA877764.1, EVALUE 2.00e-31
gatcttctgggtaacttgctgcagcttctccatcagcacttgctgcttcaccttgcacgtttatggtatggaggtggcttcttcccttaaacctcatgagtcaacctctcctagctttcagctcctcttctgcagcttcctc

SEQ ID NO: 23978 - DNA, 143 bp, Homo sapiens
  MAP TO AC015649.5; EXPRESSED IN LUNG, SIGNAL = 2.9; EXPRESSED IN BONE MARROW, SIGNAL = 2.3; EXPRESSED IN HEART, SIGNAL = 2.2; EXPRESSED IN PLACENTA, SIGNAL = 2.5; EXPRESSED IN ADULT LIVER, SIGNAL = 2.4; EXPRESSED IN HELA, SIGNAL = 2.6; EXPRESSED IN FETAL LIVER, SIGNAL = 2.1; EXPRESSED IN BRAIN, SIGNAL = 2.2; NT HIT: M86511.1, EVALUE 3.20e-01; EST_HUMAN HIT: AA344809.1, EVALUE 4.80e-01; SWISSPROT HIT: P07202, EVALUE 1.80e+00
aattgcaggctgagcggagctgcaggtccgcggaaggccagctcgctgacaagccttccagtgtgtgtcctgagggacgccaacgcgctgtctgctggggacaggacgctgcacgcacacagcagattagatgttcagaagtt

SEQ ID NO: 23979 - DNA, 214 bp, Homo sapiens
  MAP TO AC018761.2; EXPRESSED IN PLACENTA, SIGNAL =   7; EXPRESSED IN FETAL LIVER, SIGNAL = 6.9; EXPRESSED IN BONE MARROW, SIGNAL = 6.8; EXPRESSED IN HEART, SIGNAL = 6.5; EXPRESSED IN ADULT LIVER, SIGNAL = 7.1; EXPRESSED IN LUNG, SIGNAL = 7.9; EXPRESSED IN HELA, SIGNAL = 8.1; EXPRESSED IN BRAIN, SIGNAL = 6.8; SWISSPROT HIT: O00754, EVALUE 5.00e-18; NT HIT: U60889.1, EVALUE 5.00e-78; EST_HUMAN HIT: BE872939.1, EVALUE 2.00e-59
gaaaacaaagacagcactgagagctatgcacataacccaaggcccccggatgcaagcgcacatgtgcacaagggtaccacagggtaggcgcactgacctgcgcatttaccagccggatgagcttgtcaaggttcttgaaccacatgttggcattctcatattggaagtccgagcccatggtcatcacagtgtggttggtgcggtaataccggcc

SEQ ID NO: 23980 - DNA, 148 bp, Homo sapiens
  MAP TO AL138811.1; EXPRESSED IN ADULT LIVER, SIGNAL = 3.5; EXPRESSED IN LUNG, SIGNAL = 3.5; EXPRESSED IN HELA, SIGNAL = 5.6; EXPRESSED IN BRAIN, SIGNAL = 3.3; EXPRESSED IN PLACENTA, SIGNAL = 2.9; EXPRESSED IN HEART, SIGNAL = 3.8; EXPRESSED IN FETAL LIVER, SIGNAL = 3.6; EXPRESSED IN BONE MARROW, SIGNAL = 3.5; NT HIT: gi11436804, EVALUE 5.00e-71; EST_HUMAN HIT: BE960836.1, EVALUE 5.00e-78
agcaatcctcaacaggctgctgagcttcgtgcttatctgaaatctaaaggagctgagatttcagaagagaactcggaaggtggacttcatgttgatttagctcaaattattgaagcctgtgatgtgtgtctgaaggaggatgataaag

SEQ ID NO: 23981 - DNA, 255 bp, Homo sapiens
  MAP TO AC005297.1; EXPRESSED IN PLACENTA, SIGNAL =   2; EXPRESSED IN FETAL LIVER, SIGNAL = 1.8; EXPRESSED IN BRAIN, SIGNAL =   2; EXPRESSED IN BONE MARROW, SIGNAL =   2; EXPRESSED IN HEART, SIGNAL = 2.1; EXPRESSED IN LUNG, SIGNAL = 2.1; EXPRESSED IN ADULT LIVER, SIGNAL = 2.3; EXPRESSED IN HELA, SIGNAL = 2.9; EST_HUMAN HIT: AI954607.1, EVALUE 0.00e+00; SWISSPROT HIT: O15480, EVALUE 9.00e-32; NT HIT: U93163.1, EVALUE 1.00e-29
ggtttcagtataggctcttggaccccaaaggaattgatagtgtgcaggataactgcagggcacctggtggtactccaggtacgttagcctcacgaaatcctgagtgatgagcttcctgggctctccatagatgtagtacttcttcccatcatatatttgcatcatatccagaaatttccaggtatcttccttgttggcacagttgcctttcaggaagatcacaaccaggaaagtcatgaggagaccagtcttggg

SEQ ID NO: 23982 - DNA, 231 bp, Homo sapiens
  MAP TO AC016549.4; EXPRESSED IN ADULT LIVER, SIGNAL = 3.4; EXPRESSED IN LUNG, SIGNAL = 3.6; EXPRESSED IN HELA, SIGNAL = 4.6; EXPRESSED IN BRAIN, SIGNAL = 2.8; EXPRESSED IN PLACENTA, SIGNAL = 3.4; EXPRESSED IN HEART, SIGNAL = 3.3; EXPRESSED IN FETAL LIVER, SIGNAL =   3; EXPRESSED IN BONE MARROW, SIGNAL = 2.9; NT HIT: AF091395.1, EVALUE 1.00e-111; SWISSPROT HIT: O75962, EVALUE 2.00e-37; EST_HUMAN HIT: BE773167.1, EVALUE 1.00e-110
gtcagccaagatgggaagtcgctccttgacaagctccagcggcccttgactcccggcagctccgattccctgacagcctctgccaactactccaaggccgtgcaccatgtcctggatgtcatccacgaggtgctgcaccaccagcggcagctggagaacatctggcaacaccgcaaggtccggctgcatcagaggctgcagctgtgtgttttccagcaggacgttcagcag

SEQ ID NO: 23983 - DNA, 150 bp, Homo sapiens
  MAP TO AC019278.3; EXPRESSED IN BONE MARROW, SIGNAL =  13; EXPRESSED IN LUNG, SIGNAL = 4.4; EXPRESSED IN ADULT LIVER, SIGNAL = 6.4; EXPRESSED IN HELA, SIGNAL =  13; EXPRESSED IN PLACENTA, SIGNAL = 4.7; EXPRESSED IN HEART, SIGNAL = 5.1; EXPRESSED IN FETAL LIVER, SIGNAL =  15; EXPRESSED IN BRAIN, SIGNAL = 5.9; SWISSPROT HIT: P09651, EVALUE 2.00e-20; NT HIT: X79536.1, EVALUE 1.00e-53; EST_HUMAN HIT: BF360711.1, EVALUE 1.00e-41
atggaagtgattgaaatcatgactgaccgaggcagtggcaagaaaaggggctttgcctttgtaacctttgacaaccatgactctgtggataagactgtcgttcagaaataccacactgcaaatgaccacaactgtgaaggtaggaaagcc

SEQ ID NO: 23984 - DNA, 175 bp, Homo sapiens
  MAP TO AC023114.3; EXPRESSED IN ADULT LIVER, SIGNAL = 1.3; EXPRESSED IN BONE MARROW, SIGNAL = 1.4; EXPRESSED IN LUNG, SIGNAL = 1.8; EXPRESSED IN BRAIN, SIGNAL = 1.4; EXPRESSED IN PLACENTA, SIGNAL = 1.5; EXPRESSED IN HEART, SIGNAL = 1.2; EXPRESSED IN FETAL LIVER, SIGNAL = 1.3; EST_HUMAN HIT: W87935.1, EVALUE 6.00e-01; SWISSPROT HIT: P28227, EVALUE 7.70e-01; NT HIT: gi6755521, EVALUE 4.10e-01
aggcatgggacacgtccttttctggatcctgcagcccagtcttttctccacatcccagggacttgctactcttcataacatctcctgtgttcacagcagcatacgtgtacctgctgctgtcgtcatttgtgataactgcacaccgctggccgcagcccggctcagagagactcat

SEQ ID NO: 23985 - DNA, 398 bp, Homo sapiens
  MAP TO AC008468.4; EXPRESSED IN LUNG, SIGNAL = 5.3; EXPRESSED IN PLACENTA, SIGNAL = 5.7; EXPRESSED IN FETAL LIVER, SIGNAL = 4.6; EXPRESSED IN BRAIN, SIGNAL = 4.6; EXPRESSED IN HEART, SIGNAL = 4.5; EXPRESSED IN ADULT LIVER, SIGNAL = 5.3; EXPRESSED IN HELA, SIGNAL = 5.7; EXPRESSED IN BONE MARROW, SIGNAL = 4.1; SWISSPROT HIT: P34616, EVALUE 1.00e-04; NT HIT: gi9256595, EVALUE 0.00e+00; EST_HUMAN HIT: AA382839.1, EVALUE 3.00e-14
gcagtggacgccgactcgggctacaacgcgtggctttcgtatgagctgcagccagctgcaagcagccctcgcatcccgttccgcgtggggctgtacacgggcgagatcagcaccactcgtgtcctggacgaagcggactctccgcgccaccgtctgctggtcctggtgaaggatcatggtgaacctgcgctgaccgccacggccacggttctggtgtcgctggtggagagcggccaggctccaaaagcgtcatcgaggcagtcggctggcgttttgggtccggaagcggcgctggtggatgtcaacgtgtacctgatcatcgccatctgcgcggtatccagcctgctggtgctcacgctgctgctgtacactgcgctgcggtgctcagcactgcccac

SEQ ID NO: 23986 - DNA, 138 bp, Homo sapiens
  MAP TO AC015493.4; EXPRESSED IN PLACENTA, SIGNAL = 5.3; EXPRESSED IN ADULT LIVER, SIGNAL = 4.4; EXPRESSED IN HEART, SIGNAL = 5.6; EXPRESSED IN FETAL LIVER, SIGNAL = 4.6; EXPRESSED IN BRAIN, SIGNAL = 5.3; EXPRESSED IN LUNG, SIGNAL =   5; EXPRESSED IN BONE MARROW, SIGNAL = 5.6; EST_HUMAN HIT: AA557683.1, EVALUE 5.00e-50; NT HIT: AL163249.2, EVALUE 4.00e-31; SWISSPROT HIT: Q04503, EVALUE 2.40e+00
agctgtaacactcactgcgaaggtctgcagcttcactcctgaagccagcgagaccatgaaccccccgggaggaatgaacaactccagatatgccaccttaagagctgtaacactcaccgcaaaggtctgcatcttcat

SEQ ID NO: 23987 - DNA, 109 bp, Homo sapiens
  MAP TO AC020919.3; EXPRESSED IN LUNG, SIGNAL =   2; EXPRESSED IN PLACENTA, SIGNAL = 1.7; EXPRESSED IN FETAL LIVER, SIGNAL = 2.1; EXPRESSED IN BRAIN, SIGNAL = 1.7; EXPRESSED IN HEART, SIGNAL = 1.9; EXPRESSED IN ADULT LIVER, SIGNAL = 1.6; EXPRESSED IN BONE MARROW, SIGNAL = 1.6; EST_HUMAN HIT: R20459.1, EVALUE 1.40e+00
atactctgcttagaattagtattatttataccttgtcaattagtgtgtttatcatcacttctctgataacaatagaaatgtatccccgtgaagagaatatgtttacaag

SEQ ID NO: 23988 - DNA, 207 bp, Homo sapiens
  MAP TO AC018761.2; EXPRESSED IN ADULT LIVER, SIGNAL = 3.1; EXPRESSED IN HELA, SIGNAL = 3.6; EXPRESSED IN LUNG, SIGNAL = 3.3; EXPRESSED IN HEART, SIGNAL =   3; EXPRESSED IN BRAIN, SIGNAL = 3.1; EXPRESSED IN BONE MARROW, SIGNAL = 2.9; EXPRESSED IN PLACENTA, SIGNAL = 2.9; EXPRESSED IN FETAL LIVER, SIGNAL =   3; EST_HUMAN HIT: BE382842.1, EVALUE 1.00e-113; SWISSPROT HIT: P49366, EVALUE 4.00e-34; NT HIT: U79262.1, EVALUE 1.00e-113
catggcattgacttgctgtacagcgcgcccgaagttggttgcttggaagccggtggtgccgaaggcctccagcagtgcgcggtaattcacaccgcggttgaagtcgtagccccggacctgggtgctttcgggcggcaacgtcgagctgtgctttagcacggcggccagcgcccccgctggcgcctcccgttccagggaaccttccat

SEQ ID NO: 23989 - DNA, 211 bp, Homo sapiens
  MAP TO AC018684.2; EXPRESSED IN LUNG, SIGNAL =   8; EXPRESSED IN HEART, SIGNAL = 7.2; EXPRESSED IN BRAIN, SIGNAL =   7; EXPRESSED IN PLACENTA, SIGNAL = 6.9; EXPRESSED IN FETAL LIVER, SIGNAL = 7.2; EXPRESSED IN ADULT LIVER, SIGNAL = 7.4; EXPRESSED IN HELA, SIGNAL = 9.9; EXPRESSED IN BONE MARROW, SIGNAL = 7.1; EST_HUMAN HIT: BE747503.1, EVALUE 7.40e-01; SWISSPROT HIT: O86231, EVALUE 1.30e+00
catcagctttccaacctttcagaagaatttctccaatacttcccagccaaagccattgttccaaacccgcaggtggcttggcactcagcacccagcggaattctagattcttcagctcacttccttcccttggccgcactcttgacccaagcctaagcagaaagcacctcgaggcagagattgtattcatctttggcacaatttcatccat

SEQ ID NO: 23990 - DNA, 125 bp, Homo sapiens
  MAP TO AC006054.2; EXPRESSED IN ADULT LIVER, SIGNAL = 1.2; EXPRESSED IN LUNG, SIGNAL = 1.3; EXPRESSED IN PLACENTA, SIGNAL = 1.2; EXPRESSED IN BRAIN, SIGNAL = 1.3; EXPRESSED IN BONE MARROW, SIGNAL = 1.2; EXPRESSED IN HEART, SIGNAL = 1.2; EXPRESSED IN FETAL LIVER, SIGNAL = 1.4; NT HIT: gi9628113, EVALUE 7.00e-02; SWISSPROT HIT: P33868, EVALUE 1.80e+00
aatgagggagagaagagccaccatcaagatcaaatgaggagcaggcaagtagaaggcctaggcaacaactggaatatcaagaatcctctaagcttttccacaatttcaggatatggggcatgcag

SEQ ID NO: 23991 - DNA, 289 bp, Homo sapiens
  MAP TO AF241728.1; EXPRESSED IN PLACENTA, SIGNAL = 2.4; EXPRESSED IN ADULT LIVER, SIGNAL = 4.3; EXPRESSED IN HELA, SIGNAL = 6.6; EXPRESSED IN FETAL LIVER, SIGNAL = 2.8; EXPRESSED IN BRAIN, SIGNAL = 1.6; EXPRESSED IN BONE MARROW, SIGNAL = 2.9; EXPRESSED IN LUNG, SIGNAL = 2.5; EXPRESSED IN HEART, SIGNAL =   2; SWISSPROT HIT: P77173, EVALUE 1.30e+00; EST_HUMAN HIT: AI216352.1, EVALUE 1.00e-116; NT HIT: AL163246.2, EVALUE 1.00e-112
gtcaaacgttcagtttccaccaaatcccagtaacaggccaagaactgtctctcaaaaggagagtagttatttgcagaagatggcagggccttgctccaaaatcctagagacctccgctgtgattcacctatgggagcctgccaaaggctccaaacagcaaccctatctgccactgacacctcaagcaccattggatctactgggtcatatggcccaagtggcagagcagcttgcacagcagcctggacctgttgcagagccttctcctgttctggaccccactcaaaac

SEQ ID NO: 23992 - DNA, 122 bp, Homo sapiens
  MAP TO AL161670.1; EXPRESSED IN HEART, SIGNAL = 1.8; EXPRESSED IN BONE MARROW, SIGNAL = 2.3; EXPRESSED IN LUNG, SIGNAL = 2.1; EXPRESSED IN ADULT LIVER, SIGNAL = 1.8; EXPRESSED IN BRAIN, SIGNAL = 2.2; EXPRESSED IN PLACENTA, SIGNAL = 2.1; EXPRESSED IN FETAL LIVER, SIGNAL = 2.6; NT HIT: gi11420566, EVALUE 2.00e-33; SWISSPROT HIT: P09849, EVALUE 4.10e+00; EST_HUMAN HIT: AI052256.1, EVALUE 2.00e-33
cacgtttctctgatagttgttaaagtaggcaaggagtatgtcaacagcttcagcatcagcgtcttgcaaggatttcagaccaaccaaccactctccaaacaacttggcagcttttttatctt

SEQ ID NO: 23993 - DNA, 187 bp, Homo sapiens
  MAP TO AC022470.3; EXPRESSED IN PLACENTA, SIGNAL = 1.9; EXPRESSED IN HELA, SIGNAL = 2.4; EXPRESSED IN LUNG, SIGNAL = 2.1; EXPRESSED IN ADULT LIVER, SIGNAL = 2.3; EXPRESSED IN FETAL LIVER, SIGNAL = 2.4; EXPRESSED IN BRAIN, SIGNAL =   2; EXPRESSED IN BONE MARROW, SIGNAL =   2; EXPRESSED IN HEART, SIGNAL = 1.8; NT HIT: X15533.1, EVALUE 1.00e-62; EST_HUMAN HIT: BE315157.1, EVALUE 5.00e-54; SWISSPROT HIT: P11117, EVALUE 5.00e-15
gcaaggagctggatttcttctctgttcggttcctgcgggtgtggggaacaatgctgacgggcagcccctctcccccgcagcacgacactaccctggttgccctgcaaatggcactggatgtctacaatggtgaacaagccccctacgcctcctgccacatatttgaactgtaccaggaagattctgg

SEQ ID NO: 23994 - DNA, 249 bp, Homo sapiens
  MAP TO AC007957.34; EXPRESSED IN PLACENTA, SIGNAL = 2.7; EXPRESSED IN ADULT LIVER, SIGNAL = 1.6; EXPRESSED IN HELA, SIGNAL = 2.8; EXPRESSED IN BRAIN, SIGNAL = 1.4; EXPRESSED IN BONE MARROW, SIGNAL = 1.2; EXPRESSED IN LUNG, SIGNAL = 2.2; EXPRESSED IN HEART, SIGNAL = 1.5; EXPRESSED IN FETAL LIVER, SIGNAL = 2.1; SWISSPROT HIT: P02457, EVALUE 8.00e-03; EST_HUMAN HIT: AW958311.1, EVALUE 0.00e+00
gtggctgagatggaggtggggacagagcagactgataggaggtggcgttctccggcccaagggcacctgccttctgtggcccacctcgaggactttcaggggctcaccatcccccagggttcctccctggtgctccaggggaactccaagagactcccactgtggactccaaagatcatgatagcagctctggactatgatcctggggatgggcaaatggggggccaggggaagggcaggctggcgctg

SEQ ID NO: 23995 - DNA, 80 bp, Homo sapiens
  MAP TO AC016575.4; EXPRESSED IN LUNG, SIGNAL = 1.9; EXPRESSED IN PLACENTA, SIGNAL = 1.5; EXPRESSED IN HEART, SIGNAL = 1.7; EXPRESSED IN BRAIN, SIGNAL = 1.5; EXPRESSED IN FETAL LIVER, SIGNAL = 1.7; EXPRESSED IN ADULT LIVER, SIGNAL = 1.6; EXPRESSED IN BONE MARROW, SIGNAL = 1.5; NT HIT: D50307.1, EVALUE 2.50e+00
attgttactgagtctgcttctgccagatacacataaaacgtggggtgaatgttggactcaatggacgccaggatctccat

SEQ ID NO: 23996 - DNA, 177 bp, Homo sapiens
  MAP TO AL132866.21; EXPRESSED IN LUNG, SIGNAL =   3; EXPRESSED IN PLACENTA, SIGNAL = 2.6; EXPRESSED IN HELA, SIGNAL = 2.5; EXPRESSED IN HEART, SIGNAL = 2.5; EXPRESSED IN BRAIN, SIGNAL = 2.9; EXPRESSED IN FETAL LIVER, SIGNAL = 2.5; EXPRESSED IN ADULT LIVER, SIGNAL = 2.6; EXPRESSED IN BONE MARROW, SIGNAL = 3.1; SWISSPROT HIT: Q10812, EVALUE 7.70e-01; NT HIT: AE004440.1, EVALUE 4.10e-01; EST_HUMAN HIT: N74226.1, EVALUE 1.50e-01
tcagactggctcagcccacaggcttccatcatgtttatggaagccaggccccatacgctccacataagaacgggccccttgttcctgaatgatgcgttttgttgatctgccagtgggtcccgcctctccccaggtcaccgacagagcccgtctcagcgccgtctcgccgtgctgagt

SEQ ID NO: 23997 - DNA, 80 bp, Homo sapiens
  MAP TO AC022392.3; EXPRESSED IN PLACENTA, SIGNAL =   1; EXPRESSED IN ADULT LIVER, SIGNAL = 1.2; EXPRESSED IN BONE MARROW, SIGNAL = 1.1; EXPRESSED IN LUNG, SIGNAL = 1.3; EXPRESSED IN HEART, SIGNAL = 1.2; EXPRESSED IN FETAL LIVER, SIGNAL = 1.1; EXPRESSED IN BRAIN, SIGNAL =   1; EST_HUMAN HIT: AW861102.1, EVALUE 9.50e-01
gaatttatccaatggaattaatcagaaatatggggacaaatatctatatgaagatcccgattacagtattgtatataaca

SEQ ID NO: 23998 - DNA, 191 bp, Homo sapiens
  MAP TO AC016549.4; EXPRESSED IN ADULT LIVER, SIGNAL = 3.5; EXPRESSED IN HELA, SIGNAL = 3.8; EXPRESSED IN LUNG, SIGNAL = 3.6; EXPRESSED IN PLACENTA, SIGNAL = 3.2; EXPRESSED IN BRAIN, SIGNAL = 2.9; EXPRESSED IN BONE MARROW, SIGNAL = 2.9; EXPRESSED IN HEART, SIGNAL = 3.1; EXPRESSED IN FETAL LIVER, SIGNAL = 2.8; NT HIT: gi6005921, EVALUE 1.00e-103; SWISSPROT HIT: O75962, EVALUE 7.00e-31; EST_HUMAN HIT: AW083155.1, EVALUE 1.00e-102
ggtttgatgaaaacattgagtctcagggagaactcatcctacaggaatccttccaagtgtgggacccaaaaaccttaattcgaaagggtcgagaacggcatctcttcctttttgaaatgtccttagtatttagtaaagaagtgaaagattccagtgggagaagcaagtacctttataaaagcaaattgttt

SEQ ID NO: 23999 - DNA, 119 bp, Homo sapiens
  MAP TO AL121828.6; EXPRESSED IN BONE MARROW, SIGNAL = 2.8; EXPRESSED IN PLACENTA, SIGNAL = 2.5; EXPRESSED IN ADULT LIVER, SIGNAL = 2.5; EXPRESSED IN HEART, SIGNAL = 2.1; EXPRESSED IN FETAL LIVER, SIGNAL = 2.4; EXPRESSED IN LUNG, SIGNAL = 2.7; EXPRESSED IN HELA, SIGNAL =   3; EXPRESSED IN BRAIN, SIGNAL = 2.9; NT HIT: AJ271735.1, EVALUE 5.00e-12; EST_HUMAN HIT: BE465820.1, EVALUE 7.00e-12
ttattctcctcctcctcctccctcctcctcctcctcctgctcctcctcctcctcctcctcctcctctgctgactgatcagggtgatggttgctgaaggttggagtgagtgtggcaattc

SEQ ID NO: 24000 - DNA, 310 bp, Homo sapiens
  MAP TO AL138934.2; EXPRESSED IN PLACENTA, SIGNAL = 1.3; EXPRESSED IN ADULT LIVER, SIGNAL =   3; EXPRESSED IN BRAIN, SIGNAL = 2.5; EXPRESSED IN BONE MARROW, SIGNAL = 4.7; EXPRESSED IN LUNG, SIGNAL = 2.9; EXPRESSED IN HEART, SIGNAL = 1.5; EXPRESSED IN FETAL LIVER, SIGNAL = 2.8; SWISSPROT HIT: P04027, EVALUE 3.00e-24; EST_HUMAN HIT: AW847812.1, EVALUE 1.00e-117; NT HIT: gi9635487, EVALUE 0.00e+00
ttgcttggttggcaagtttttgggctctatccttgagtttttttatgttgtcatacaccaggccagattgatttaggtaaaaacaacactcctcatttaagaatatgcagagtcctcctttttcagcattgagtaagtcaaggcctcggcggttttggaggacaactgcagctaaagagtcaacttgggcctggaggactgataaagtttgtgatatgtgtgtgatgctagcagagaagtcattagacaggctacagaaggtcatgacagacgttgaaatgcctgctattccagtaccgagagcaatcat

SEQ ID NO: 24001 - DNA, 101 bp, Homo sapiens
  MAP TO AL162263.1; EXPRESSED IN LUNG, SIGNAL = 1.8; EXPRESSED IN PLACENTA, SIGNAL =   2; EXPRESSED IN HEART, SIGNAL = 1.7; EXPRESSED IN FETAL LIVER, SIGNAL = 1.8; EXPRESSED IN BRAIN, SIGNAL = 1.5; EXPRESSED IN BONE MARROW, SIGNAL = 1.4; EXPRESSED IN ADULT LIVER, SIGNAL = 2.6; EXPRESSED IN HELA, SIGNAL = 2.2; NT HIT: gi8393247, EVALUE 2.20e-01; EST_HUMAN HIT: BE887334.1, EVALUE 1.30e+00
atgaagccccaaaacctcaacgtgacttacaaggccctccaagatctggccctgcttcctgccacggccccgtctctcattcctcggacacttgctcccgt

SEQ ID NO: 24002 - DNA, 181 bp, Homo sapiens
  MAP TO AP001442.1; EXPRESSED IN PLACENTA, SIGNAL = 1.8; EXPRESSED IN FETAL LIVER, SIGNAL =   2; EXPRESSED IN ADULT LIVER, SIGNAL = 4.3; EXPRESSED IN BRAIN, SIGNAL = 6.3; EXPRESSED IN BONE MARROW, SIGNAL =   2; EXPRESSED IN LUNG, SIGNAL = 3.3; EXPRESSED IN HEART, SIGNAL = 2.8; SWISSPROT HIT: Q95241, EVALUE 3.00e-29; NT HIT: X06989.1, EVALUE 9.00e-98; EST_HUMAN HIT: BE712768.1, EVALUE 1.00e-97
gaatgccacggctggagatcgtccaggctgaactctccattcacgggaaggagctccacggtggttttcgtttcggtcaaagatggcatgagagcatcgtttccgtaactgatccttggttcactaatcatgttggccaagacgtcatctgaatagttttgctctttctgaagcagctcat

SEQ ID NO: 24003 - DNA, 268 bp, Homo sapiens
  MAP TO AL138796.2; EXPRESSED IN LUNG, SIGNAL =  12; EXPRESSED IN BONE MARROW, SIGNAL =  13; EXPRESSED IN HEART, SIGNAL = 4.3; EXPRESSED IN ADULT LIVER, SIGNAL = 8.8; EXPRESSED IN PLACENTA, SIGNAL = 4.2; EXPRESSED IN HELA, SIGNAL =  12; EXPRESSED IN FETAL LIVER, SIGNAL = 9.6; EXPRESSED IN BRAIN, SIGNAL = 6.8; EST_HUMAN HIT: BE181640.1, EVALUE 1.00e-125; NT HIT: gi7657016, EVALUE 1.00e-88; SWISSPROT HIT: P12112, EVALUE 6.50e-01
atctctcaggtcagtaagggccacttggaacaggaatatcacccctatctggaagaccaggtggaggcttatcaccttcatagtaaggtactcactgtccaagtcaagagccaagccaaggtactgttcctccaatgagtaaacagcactgctgtagggctggcctaagtcaggcagttcaagataacctgaaggagtcgaataccatctacccagtgagtcctgcaagacttcaggctctttctcatccagcagctccctgctgagc

SEQ ID NO: 24004 - DNA, 137 bp, Homo sapiens
  MAP TO AC022658.3; EXPRESSED IN HELA, SIGNAL =   3; EXPRESSED IN HEART, SIGNAL = 4.3; EXPRESSED IN FETAL LIVER, SIGNAL = 3.4; EXPRESSED IN BRAIN, SIGNAL = 3.7; EXPRESSED IN PLACENTA, SIGNAL = 3.9; EXPRESSED IN ADULT LIVER, SIGNAL = 3.1; EXPRESSED IN BONE MARROW, SIGNAL = 3.7; EXPRESSED IN LUNG, SIGNAL = 3.4; NT HIT: M30471.1, EVALUE 1.00e-03; SWISSPROT HIT: P18044, EVALUE 6.90e+00; EST_HUMAN HIT: BE048673.1, EVALUE 2.00e-03
agaagcataaggaacagaaaaatgaacacttgtgttctcagcacccagtttggacaaatcttaacattttgctcaactgcttcatattcaacgaaataaaacaagaaaatgttacgtacacagttgaagtcacctaa

SEQ ID NO: 24005 - DNA, 233 bp, Homo sapiens
  MAP TO AL121772.12; EXPRESSED IN LUNG, SIGNAL = 4.6; EXPRESSED IN ADULT LIVER, SIGNAL = 4.7; EXPRESSED IN BRAIN, SIGNAL = 5.1; EXPRESSED IN BONE MARROW, SIGNAL = 4.8; EXPRESSED IN PLACENTA, SIGNAL = 3.9; EXPRESSED IN HELA, SIGNAL = 4.3; EXPRESSED IN HEART, SIGNAL = 5.2; EXPRESSED IN FETAL LIVER, SIGNAL = 4.1; NT HIT: J03544.1, EVALUE 1.00e-45; SWISSPROT HIT: P11216, EVALUE 1.00e-11; EST_HUMAN HIT: BE887843.1, EVALUE 1.00e-45
gtggccatccagctgaacgacacccaccccgccctctccatccctgagctcatgcggatcctggtggacgtggagaaggtggactgggacaaggtgagcatggaggaaaagggcggcacctccccagagcctggagcccgtgcagaccagggctacaaggagctgagctggggggcctcttccctggccttgggagagctgtgtggtcatcatgcccaggagagacgcgagct

SEQ ID NO: 24006 - DNA, 97 bp, Homo sapiens
  MAP TO AL109976.21; EXPRESSED IN LUNG, SIGNAL = 1.9; EXPRESSED IN HEART, SIGNAL = 1.5; EXPRESSED IN PLACENTA, SIGNAL = 1.6; EXPRESSED IN FETAL LIVER, SIGNAL = 2.2; EXPRESSED IN BONE MARROW, SIGNAL = 1.9; EXPRESSED IN ADULT LIVER, SIGNAL = 1.8; EXPRESSED IN BRAIN, SIGNAL = 2.1; EST_HUMAN HIT: BE743111.1, EVALUE 9.00e-48; NT HIT: AF026816.1, EVALUE 6.00e-48; SWISSPROT HIT: P47119, EVALUE 7.30e-02
gtacgcagagatgcctaaggcggagaagaacgctgtctcccatcgcttccgggccctgctggagctgcaggagtactttggcagtttggcagcttga

SEQ ID NO: 24007 - DNA, 99 bp, Homo sapiens
  MAP TO AL158175.6; EXPRESSED IN ADULT LIVER, SIGNAL = 1.9; EXPRESSED IN LUNG, SIGNAL = 1.7; EXPRESSED IN PLACENTA, SIGNAL = 1.7; EXPRESSED IN HEART, SIGNAL = 1.8; EXPRESSED IN FETAL LIVER, SIGNAL = 1.8; EXPRESSED IN BRAIN, SIGNAL = 1.6; EXPRESSED IN BONE MARROW, SIGNAL = 2.1; EST_HUMAN HIT: BE614974.1, EVALUE 7.80e-02; NT HIT: X03127.1, EVALUE 5.30e-02
gatccaagacttcaaagaaaacctataaatttaataaagtttctcctgaaacctacaacaaagaaaacaatgacaaaggaattgcccacaattctgtga

SEQ ID NO: 24008 - DNA, 160 bp, Homo sapiens
  MAP TO AC023296.2; EXPRESSED IN LUNG, SIGNAL = 1.7; EXPRESSED IN HEART, SIGNAL = 1.5; EXPRESSED IN PLACENTA, SIGNAL = 1.6; EXPRESSED IN FETAL LIVER, SIGNAL = 1.1; EXPRESSED IN ADULT LIVER, SIGNAL = 1.5; EXPRESSED IN BRAIN, SIGNAL = 1.3; EXPRESSED IN BONE MARROW, SIGNAL = 1.4; SWISSPROT HIT: P36307, EVALUE 6.80e+00
ccagcagccacgtgatgccttctgtcaagaattacaaccctgcactcattggcatctgttgcttctacatggctgtttatatcctctatccaggttttactatagtttcaacagagtctgcatttaatatcagcgaatttttcatgctcaggactagaag

SEQ ID NO: 24009 - DNA, 234 bp, Homo sapiens
  MAP TO AF241726.1; EXPRESSED IN ADULT LIVER, SIGNAL = 0.84; EXPRESSED IN BRAIN, SIGNAL =   1; EXPRESSED IN PLACENTA, SIGNAL = 1.1; EXPRESSED IN FETAL LIVER, SIGNAL = 0.92; EXPRESSED IN BONE MARROW, SIGNAL = 1.3; EXPRESSED IN LUNG, SIGNAL = 1.2; EXPRESSED IN HEART, SIGNAL = 1.4; SWISSPROT HIT: P06298, EVALUE 9.60e+00; NT HIT: L42571.1, EVALUE 4.00e-08; EST_HUMAN HIT: AU145147.1, EVALUE 1.00e-05
tgccatcctcctcatcatctttatccttgtcatcctccttattcttgtccctatctttgatctcatcctcaatgctggacttggaggagtccccaccatcagaggagtcactagtctcatcatcttcctcttcttcctcttcatccttgctgtccttctcctcagacttctaattggacttcagggtagtccagctggacttggagttcaggtctcaaagcttagtcatgctct

SEQ ID NO: 24010 - DNA, 170 bp, Homo sapiens
  MAP TO AC009416.2; EXPRESSED IN ADULT LIVER, SIGNAL = 1.6; EXPRESSED IN BRAIN, SIGNAL = 1.5; EXPRESSED IN LUNG, SIGNAL = 1.6; EXPRESSED IN PLACENTA, SIGNAL = 1.3; EXPRESSED IN FETAL LIVER, SIGNAL = 1.9; EXPRESSED IN BONE MARROW, SIGNAL = 2.2; EXPRESSED IN HEART, SIGNAL = 1.4; NT HIT: Y12853.1, EVALUE 2.50e-02; EST_HUMAN HIT: BF001867.1, EVALUE 6.00e-07; SWISSPROT HIT: O34996, EVALUE 5.10e+00
aaaagaagacccaaagacgtgggaaaggcggccatgtgaaaacgaagccagagattggaatcatactgccacaagccaaggaaaagctggagccaccagaagctggcagaggcaaagacggattcttacttagagtcttcaaagggagtgtggccctgctgacccgctga

SEQ ID NO: 24011 - DNA, 297 bp, Homo sapiens
  MAP TO AC022470.3; EXPRESSED IN BONE MARROW, SIGNAL = 1.5; EXPRESSED IN LUNG, SIGNAL = 1.2; EXPRESSED IN HEART, SIGNAL = 6.9; EXPRESSED IN PLACENTA, SIGNAL =   1; EXPRESSED IN ADULT LIVER, SIGNAL = 1.3; EXPRESSED IN FETAL LIVER, SIGNAL = 1.2; EXPRESSED IN BRAIN, SIGNAL = 1.8; NT HIT: gi11436995, EVALUE 0.00e+00; SWISSPROT HIT: P22089, EVALUE 4.70e-01; EST_HUMAN HIT: BF525911.1, EVALUE 2.00e-85
cttgtgctctaacagaatgcaggttagcacctggagacaggcgtccacacctagaagttccaagggaaggtgcagtgggaaatccactagggtgaatcgagatgggtctggaagagcaaaggtcagagctggctggagctcttggggtaggacctcgatgtctactcgcttctgcccagagacgggtactggggagcgcagcaatcgatagatccaggcctcaatctctcgaaggtcatgcagaagggcacttgacttctcctctaccagcagcgatccagtaaagatccgccacat

SEQ ID NO: 24012 - DNA, 195 bp, Homo sapiens
  MAP TO AC026156.2; EXPRESSED IN BONE MARROW, SIGNAL = 2.5; EXPRESSED IN ADULT LIVER, SIGNAL = 2.9; EXPRESSED IN BRAIN, SIGNAL = 3.3; EXPRESSED IN LUNG, SIGNAL = 2.7; EXPRESSED IN HELA, SIGNAL = 2.4; EXPRESSED IN HEART, SIGNAL = 1.9; EXPRESSED IN PLACENTA, SIGNAL = 2.3; EXPRESSED IN FETAL LIVER, SIGNAL =   2; EST_HUMAN HIT: AA825307.1, EVALUE 1.00e-106; NT HIT: gi11432184, EVALUE 1.00e-106; SWISSPROT HIT: O75787, EVALUE 4.00e-33
aagaacccagcaagtccctataaccttgcatataagtataattttgaatattccgtggttttcaacatggtactttggataatgatcgccttggccttggctgtgattatcacctcttacaatatttggaacatggatcctggatatgatagcatcatttataggatgacaaaccagaagattcgaatggattga

SEQ ID NO: 24013 - DNA, 134 bp, Homo sapiens
  MAP TO AL162387.2; EXPRESSED IN LUNG, SIGNAL = 4.6; EXPRESSED IN PLACENTA, SIGNAL = 5.6; EXPRESSED IN HEART, SIGNAL = 3.7; EXPRESSED IN FETAL LIVER, SIGNAL =   4; EXPRESSED IN ADULT LIVER, SIGNAL = 4.1; EXPRESSED IN BRAIN, SIGNAL = 3.8; EXPRESSED IN BONE MARROW, SIGNAL = 2.8; EST_HUMAN HIT: T99152.1, EVALUE 1.00e-69; NT HIT: X59841.1, EVALUE 7.00e-70; SWISSPROT HIT: P40426, EVALUE 1.40e-02
cggaatttggtgtggtgggcgaattggtctggttgttctgcacagctgctgctactgcgtgtgcagctgtcacggccgtctttgcagcatagaggttggcttcttcctgaaacttgccaatgttcttcttgtac

SEQ ID NO: 24014 - DNA, 110 bp, Homo sapiens
  MAP TO AC016080.3; EXPRESSED IN LUNG, SIGNAL =   5; EXPRESSED IN PLACENTA, SIGNAL = 4.3; EXPRESSED IN ADULT LIVER, SIGNAL = 5.6; EXPRESSED IN HELA, SIGNAL = 2.8; EXPRESSED IN FETAL LIVER, SIGNAL = 3.8; EXPRESSED IN BRAIN, SIGNAL = 6.2; EXPRESSED IN BONE MARROW, SIGNAL = 6.2; EXPRESSED IN HEART, SIGNAL = 4.3; SWISSPROT HIT: P53115, EVALUE 3.20e+00; EST_HUMAN HIT: AI002836.1, EVALUE 2.00e-55; NT HIT: AL163210.2, EVALUE 4.00e-34
agacttgttgaatgactttgacaaaaatgctgaaaatgatatggacaatgaagtccaggctgaggtggtctcagatagagatgaggaacttgttgggaactggagcaaag

SEQ ID NO: 24015 - DNA, 205 bp, Homo sapiens
  MAP TO AC022882.3; EXPRESSED IN ADULT LIVER, SIGNAL = 2.4; EXPRESSED IN BRAIN, SIGNAL =   2; EXPRESSED IN LUNG, SIGNAL = 2.6; EXPRESSED IN PLACENTA, SIGNAL = 2.1; EXPRESSED IN HELA, SIGNAL = 2.8; EXPRESSED IN FETAL LIVER, SIGNAL = 2.5; EXPRESSED IN HEART, SIGNAL = 2.4; EXPRESSED IN BONE MARROW, SIGNAL = 2.2; SWISSPROT HIT: P78714, EVALUE 2.90e-01; NT HIT: gi11418491, EVALUE 1.00e-20; EST_HUMAN HIT: AW956233.1, EVALUE 7.20e-01
atggcagaggggcccgaggaagcccaaggccgccctcctgggcacgacgagggtggagggggccacgagtccctccctaccctgagaggccctcctgccgccaccgtcccatgcccccatgacgacccccaggccaaaccccatgcccctggccagcccacagcccgggcctcatggctgtgcctgacaaatcagagccgccccg

SEQ ID NO: 24016 - DNA, 311 bp, Homo sapiens
  MAP TO AL162171.1; EXPRESSED IN BONE MARROW, SIGNAL = 3.4; EXPRESSED IN LUNG, SIGNAL = 3.7; EXPRESSED IN PLACENTA, SIGNAL = 3.2; EXPRESSED IN HEART, SIGNAL =   4; EXPRESSED IN ADULT LIVER, SIGNAL =   3; EXPRESSED IN FETAL LIVER, SIGNAL = 4.2; EXPRESSED IN BRAIN, SIGNAL = 3.8; EST_HUMAN HIT: AI380356.1, EVALUE 1.00e-92; NT HIT: gi5902031, EVALUE 4.00e-92; SWISSPROT HIT: Q16825, EVALUE 3.00e-28
tttttgctgttgttcttctctgagaagaaaggcaataagagactgctgtcatttggtcacaggtcagggattagtgcgactgaagtcattgaaatccttttgtatgttattgcctccttcaatgaccttctgtctttccaggtcacttacttcagcctctggtactacaacaagcaaaatcagcgccggtgggtagatttggaaaaacctttgaagaagcagctggataaatatgcattggaacctaccgtctattttggagtggtgttttatgtgccttcagtttctcagctgcagcaggagattaccag

SEQ ID NO: 24017 - DNA, 136 bp, Homo sapiens
  MAP TO AL133229.19; EXPRESSED IN FETAL LIVER, SIGNAL = 2.3; EXPRESSED IN PLACENTA, SIGNAL = 2.8; EXPRESSED IN ADULT LIVER, SIGNAL = 4.4; EXPRESSED IN HELA, SIGNAL = 4.2; EXPRESSED IN HEART, SIGNAL = 2.5; EXPRESSED IN BONE MARROW, SIGNAL = 2.1; EXPRESSED IN LUNG, SIGNAL = 2.6; EXPRESSED IN BRAIN, SIGNAL =   2; EST_HUMAN HIT: T72675.1, EVALUE 1.10e-01; SWISSPROT HIT: P70788, EVALUE 5.30e+00; NT HIT: gi6755992, EVALUE 1.20e+00
tttcagtggagaccatgtggagatccagtattcctactactactcagcaagcagtatcaagaagttccctacctttggtgtcaacagaagctgagtagaaacctgaacgtccatctacagctagcaataatgagag

SEQ ID NO: 24018 - DNA, 193 bp, Homo sapiens
  MAP TO AL161644.1; EXPRESSED IN PLACENTA, SIGNAL = 2.4; EXPRESSED IN HEART, SIGNAL = 2.2; EXPRESSED IN FETAL LIVER, SIGNAL = 2.6; EXPRESSED IN BONE MARROW, SIGNAL = 3.6; EXPRESSED IN LUNG, SIGNAL = 2.7; EXPRESSED IN ADULT LIVER, SIGNAL = 2.7; EXPRESSED IN BRAIN, SIGNAL = 5.2; EST_HUMAN HIT: BF448230.1, EVALUE 1.00e-104; NT HIT: M18157.1, EVALUE 1.10e-01; SWISSPROT HIT: P41232, EVALUE 9.90e-01
agacgtgctggctccagtcctgtttttactttcaaaaaccaacaagcccgacagtggagcctgtcccctcccgggagggtgctcatggccccactcacctcatcaccccacggaaacctttgtgtcttgccctggaagacacccgaattctttgtacattgacatgcccttctccttcctccctcccctgtag

SEQ ID NO: 24019 - DNA, 150 bp, Homo sapiens
  MAP TO AC007009.2; EXPRESSED IN LUNG, SIGNAL = 1.5; EXPRESSED IN HEART, SIGNAL = 1.8; EXPRESSED IN FETAL LIVER, SIGNAL = 1.8; EXPRESSED IN ADULT LIVER, SIGNAL = 1.7; EXPRESSED IN BRAIN, SIGNAL = 1.8; EXPRESSED IN PLACENTA, SIGNAL = 1.7; EXPRESSED IN BONE MARROW, SIGNAL =   2; SWISSPROT HIT: Q11127, EVALUE 2.30e+00; NT HIT: U78308.1, EVALUE 5.30e+00
tgaattcctactggttgtttcaggctcaactcaagggcaatctcctccatgaagcatctcagggtttctctgccctttctcctgttggggtgggatgcccccgccctgggctgcattaccacctgtgtctctatctccttcttgctttcc

SEQ ID NO: 24020 - DNA, 302 bp, Homo sapiens
  MAP TO AC009234.3; EXPRESSED IN LUNG, SIGNAL = 1.6; EXPRESSED IN FETAL LIVER, SIGNAL = 0.83; EXPRESSED IN BONE MARROW, SIGNAL = 1.3; EXPRESSED IN HEART, SIGNAL = 1.4; EXPRESSED IN PLACENTA, SIGNAL = 1.6; EXPRESSED IN ADULT LIVER, SIGNAL = 1.5; EXPRESSED IN BRAIN, SIGNAL = 1.1; EST_HUMAN HIT: BE796798.1, EVALUE 4.00e-31; NT HIT: AB011150.1, EVALUE 0.00e+00; SWISSPROT HIT: Q21313, EVALUE 1.00e-09
ctgacgcagattcctggtgactttcacatcatgccaggcattatcattaaactttccattcacaggctccactagtgcttcaaaggcccctgatcccaaattaatgaccagagagacagctccatttttcagggcaagattgacataatcagccgatttcccagtgtgaagcatcagtccattcctctgaagggttttaaatgacagagttatttcatcactgctgctttgaatggggttttgagacaagtcgtagcagaagtattcagatcctttgaacgtggcaatatattcttcttttc

SEQ ID NO: 24021 - DNA, 412 bp, Homo sapiens
  MAP TO AC021880.2; EXPRESSED IN BRAIN, SIGNAL = 7.7; EXPRESSED IN BONE MARROW, SIGNAL = 4.9; EXPRESSED IN LUNG, SIGNAL = 5.1; EXPRESSED IN HELA, SIGNAL = 3.1; EXPRESSED IN PLACENTA, SIGNAL = 3.4; EXPRESSED IN ADULT LIVER, SIGNAL = 4.6; EXPRESSED IN HEART, SIGNAL = 2.6; EXPRESSED IN FETAL LIVER, SIGNAL = 7.2; NT HIT: AF023860.1, EVALUE 0.00e+00; EST_HUMAN HIT: BE794823.1, EVALUE 0.00e+00; SWISSPROT HIT: P05092, EVALUE 6.00e-58
gaaacatggccactctgcagacaccggcgccgtcgggaaacctgttctatcagccatggtcaaccccactgtgttctctgacatcgctgtcaacggcgagcccttgggccgcatctccttcgagctgtttgcaaacaagtttccaaagacagcagaaaactttcacgctctgagcactggagagaaaggagttggttataagggttcctgctttcacaggaacattccagggtttatgtatcagggtggtgacttcacacgccgtaatggcactggtggcaagtccatctatggggagaaatttgaagatgagaacttcatcctaaagcatacaggtcccggcatcttgtccatggcaaatgctggacccaacacaaacggttcccagttttccacacgcactgccaagact

SEQ ID NO: 24022 - DNA, 147 bp, Homo sapiens
  MAP TO AL162458.1; EXPRESSED IN LUNG, SIGNAL = 3.1; EXPRESSED IN HEART, SIGNAL = 2.6; EXPRESSED IN FETAL LIVER, SIGNAL = 2.4; EXPRESSED IN PLACENTA, SIGNAL = 2.8; EXPRESSED IN ADULT LIVER, SIGNAL = 2.9; EXPRESSED IN BRAIN, SIGNAL = 3.5; EXPRESSED IN BONE MARROW, SIGNAL = 3.1; SWISSPROT HIT: P08563, EVALUE 1.60e-01; NT HIT: gi11560151, EVALUE 9.00e-42; EST_HUMAN HIT: BE905908.1, EVALUE 1.00e-41
ctaagctcctggcgagtggggcctcagcacctgcctcgccatgcccgccccccccaccaacaggtgcagtatatcatctcccaggatggtgtccagcacctgctcccccaggaatatgttgtggtccctgaaggccatcacatccag

SEQ ID NO: 24023 - DNA, 136 bp, Homo sapiens
  MAP TO AC024736.2; EXPRESSED IN ADULT LIVER, SIGNAL = 0.81; EXPRESSED IN HEART, SIGNAL = 1.2; EXPRESSED IN BRAIN, SIGNAL = 0.77; EXPRESSED IN PLACENTA, SIGNAL = 0.78; EXPRESSED IN FETAL LIVER, SIGNAL = 0.63; EXPRESSED IN BONE MARROW, SIGNAL = 0.66; SWISSPROT HIT: P32528, EVALUE 4.10e+00; EST_HUMAN HIT: R31042.1, EVALUE 1.80e+00; NT HIT: AF050215.1, EVALUE 4.70e+00
ctgctttgcagtcctcagatttgtaaacttctgcctcataacaagatacagctctctgcatgtactcttttgaaattttcacgaagtcaaagcttattagcaatgttttcacagtgatattatccaatatgtcaca

SEQ ID NO: 24024 - DNA, 153 bp, Homo sapiens
  MAP TO AC022860.3; EXPRESSED IN HELA, SIGNAL = 2.7; EXPRESSED IN LUNG, SIGNAL = 2.5; EXPRESSED IN PLACENTA, SIGNAL = 2.2; EXPRESSED IN ADULT LIVER, SIGNAL = 2.7; EXPRESSED IN FETAL LIVER, SIGNAL = 2.4; EXPRESSED IN BRAIN, SIGNAL =   2; EXPRESSED IN BONE MARROW, SIGNAL = 2.1; EXPRESSED IN HEART, SIGNAL = 2.3; EST_HUMAN HIT: R85021.1, EVALUE 9.00e-09; NT HIT: gi4503710, EVALUE 6.00e-09; SWISSPROT HIT: Q61851, EVALUE 1.00e-02
atgtaccttatggccttcatgtgcaccttcactgggaagggctccttgctggacttgaggacaagaagcagcaaaactcttcattttcaccgcctgtctaccagcaatcccacttcctccatctcctggctgaagaagggcaaggagttccat

SEQ ID NO: 24025 - DNA, 131 bp, Homo sapiens
  MAP TO AC015599.3; EXPRESSED IN PLACENTA, SIGNAL = 3.2; EXPRESSED IN ADULT LIVER, SIGNAL = 2.8; EXPRESSED IN HEART, SIGNAL = 2.4; EXPRESSED IN BRAIN, SIGNAL = 3.1; EXPRESSED IN BONE MARROW, SIGNAL = 2.8; EXPRESSED IN LUNG, SIGNAL = 3.6; EXPRESSED IN FETAL LIVER, SIGNAL = 2.9; SWISSPROT HIT: Q02779, EVALUE 6.20e-01; NT HIT: AB040918.1, EVALUE 4.00e-68; EST_HUMAN HIT: BE252691.1, EVALUE 6.00e-68
ctgcttaaccacagtcaccgtccctggtgccatggcaaccaccgaggcaagggcagtggcgtcatgggtctcggcgcccagctcaatgatctgctgcaggatgttcacagccgtggggtccagtcggtcgc

SEQ ID NO: 24026 - DNA, 208 bp, Homo sapiens
  MAP TO AC018938.3; EXPRESSED IN ADULT LIVER, SIGNAL = 8.1; EXPRESSED IN HELA, SIGNAL = 6.6; EXPRESSED IN BRAIN, SIGNAL =   7; EXPRESSED IN LUNG, SIGNAL = 7.7; EXPRESSED IN PLACENTA, SIGNAL =   7; EXPRESSED IN FETAL LIVER, SIGNAL = 7.2; EXPRESSED IN BONE MARROW, SIGNAL = 7.2; EXPRESSED IN HEART, SIGNAL = 8.3; SWISSPROT HIT: P03374, EVALUE 6.50e+00
tggtgggggaggacatgcagcccaaggatcctgcagctcttgggtcaagtaggtcttctccacacagagctgccggccacagttcccacaaaagaaaactgtcggggccaccgctgcagctgcaaccgacccctcccctgcaactgaggtgggatagagacgaggggcccccaccggctaagcttccatgtctatctcctgaggcact

SEQ ID NO: 24027 - DNA, 109 bp, Homo sapiens
  MAP TO AC008572.6; EXPRESSED IN BRAIN, SIGNAL = 1.3; EXPRESSED IN LUNG, SIGNAL = 1.6; EXPRESSED IN PLACENTA, SIGNAL = 1.3; EXPRESSED IN ADULT LIVER, SIGNAL = 1.6; EXPRESSED IN HEART, SIGNAL = 1.3; EXPRESSED IN FETAL LIVER, SIGNAL = 1.3; EXPRESSED IN BONE MARROW, SIGNAL = 1.2; NT HIT: AP000007.1, EVALUE 2.40e-01; SWISSPROT HIT: P32468, EVALUE 5.50e+00; EST_HUMAN HIT: AA889581.1, EVALUE 7.00e-55
acttgtagggctggtgttaacttacgacttcactaactgtgactttgagaagattaaagcagcctatctcagtactatttctaaagacctgattacatatatgagtggg

SEQ ID NO: 24028 - DNA, 347 bp, Homo sapiens
  MAP TO AL162458.1; EXPRESSED IN PLACENTA, SIGNAL = 1.2; EXPRESSED IN BONE MARROW, SIGNAL = 1.4; EXPRESSED IN ADULT LIVER, SIGNAL = 1.2; EXPRESSED IN HEART, SIGNAL = 1.2; EXPRESSED IN BRAIN, SIGNAL = 1.3; EXPRESSED IN LUNG, SIGNAL = 1.3; EXPRESSED IN FETAL LIVER, SIGNAL = 1.2; NT HIT: AB046857.1, EVALUE 0.00e+00; EST_HUMAN HIT: BE883843.1, EVALUE 0.00e+00; SWISSPROT HIT: P98177, EVALUE 1.10e+00
cacctcggccctgccacgtagctcaccaggcagagagtcggtgctgctcctcatcagccgctccttccgctctcgcaggtagttgatgatcttgtcagtctcttcagcagtgaggtacctgttgtctgccagcaggttgatgaggctctggatggctggagggtggcccccacgcactccctcctcagggcctcctctctctctttcctgcaggatggcttcatcggccatcttggctgcctgtctggcaatctcctcacgttccttctcccggcactcattcttgtaacgctcataatttctggccaccagcaccatggcatctgcttggggcatgttgcgatgct

SEQ ID NO: 24029 - DNA, 176 bp, Homo sapiens
  MAP TO AL121941.13; EXPRESSED IN BONE MARROW, SIGNAL = 1.2; EXPRESSED IN PLACENTA, SIGNAL = 1.1; EXPRESSED IN ADULT LIVER, SIGNAL = 1.2; EXPRESSED IN FETAL LIVER, SIGNAL = 1.1; EXPRESSED IN BRAIN, SIGNAL =   1; EXPRESSED IN LUNG, SIGNAL = 1.1; EXPRESSED IN HEART, SIGNAL = 1.2; NT HIT: AF102855.2, EVALUE 1.00e-01; SWISSPROT HIT: P09920, EVALUE 2.30e+00; EST_HUMAN HIT: BE045458.1, EVALUE 1.50e-01
ctggaaatggcctgcagggtgtggaatttggaccagggaagggaattcggcagagagaggaaggaagcaattgggaaacagggtaccacattcctcatcccccacattggccttgaccacaaggacagcatcttccacatgataatgcacctctcaggcatgcttctcaccaggga

SEQ ID NO: 24030 - DNA, 163 bp, Homo sapiens
  MAP TO AC022796.3; EXPRESSED IN LUNG, SIGNAL =  10; EXPRESSED IN PLACENTA, SIGNAL = 8.5; EXPRESSED IN FETAL LIVER, SIGNAL = 8.5; EXPRESSED IN HEART, SIGNAL = 8.1; EXPRESSED IN ADULT LIVER, SIGNAL = 8.8; EXPRESSED IN HELA, SIGNAL = 9.3; EXPRESSED IN BRAIN, SIGNAL = 8.8; EXPRESSED IN BONE MARROW, SIGNAL = 9.2; EST_HUMAN HIT: BF310959.1, EVALUE 1.40e-01; SWISSPROT HIT: P94685, EVALUE 5.20e+00; NT HIT: gi6678416, EVALUE 1.50e+00
ggacaagactttggctttgttttggttgtcttctaccgtggtcaaggagtccaaggaaccacaaggttacgggtactcagtgtgcatgcctgcctttctagactatgctctgatcacccaggtctggaattctgccacgtgctccaaatacacttccaagtct

SEQ ID NO: 24031 - DNA, 109 bp, Homo sapiens
  MAP TO AL139352.8; EXPRESSED IN PLACENTA, SIGNAL = 2.7; EXPRESSED IN ADULT LIVER, SIGNAL = 1.5; EXPRESSED IN HELA, SIGNAL = 8.6; EXPRESSED IN FETAL LIVER, SIGNAL = 5.3; EXPRESSED IN BONE MARROW, SIGNAL = 7.6; EXPRESSED IN LUNG, SIGNAL = 0.89; EXPRESSED IN HEART, SIGNAL = 2.9; EXPRESSED IN BRAIN, SIGNAL = 8.6; NT HIT: D10083.1, EVALUE 2.00e-20; EST_HUMAN HIT: R87170.1, EVALUE 3.00e-17
atggaacggactaatggtcttttcaagacacacctcaccaagctcagcctccaacttaaaaaggaggactctgtcaaggatacagcccaaaaactcaacaaccaagcaa

SEQ ID NO: 24032 - DNA, 157 bp, Homo sapiens
  MAP TO AL161450.2; EXPRESSED IN LUNG, SIGNAL = 1.2; EXPRESSED IN PLACENTA, SIGNAL = 1.2; EXPRESSED IN FETAL LIVER, SIGNAL = 1.3; EXPRESSED IN BONE MARROW, SIGNAL = 1.1; EXPRESSED IN HEART, SIGNAL = 1.4; EXPRESSED IN ADULT LIVER, SIGNAL = 1.5; EXPRESSED IN BRAIN, SIGNAL = 1.2; EST_HUMAN HIT: AV656285.1, EVALUE 2.10e+00; NT HIT: AL163204.2, EVALUE 3.60e-01; SWISSPROT HIT: Q04301, EVALUE 1.80e+00
atggcagaatacagctgcaaaagccaggaacttggtaactaagaacctactgctctcaagcaccatctcctggatcacagccgaaactataacaccaaaaatcattaattctcctctctacgtaaccatgtgcaaaaattcaacaaagaccctgtac

SEQ ID NO: 24033 - DNA, 386 bp, Homo sapiens
  MAP TO AC011292.2; EXPRESSED IN ADULT LIVER, SIGNAL = 3.1; EXPRESSED IN PLACENTA, SIGNAL = 3.8; EXPRESSED IN HELA, SIGNAL = 5.9; EXPRESSED IN FETAL LIVER, SIGNAL = 3.7; EXPRESSED IN BRAIN, SIGNAL = 4.6; EXPRESSED IN BONE MARROW, SIGNAL = 3.5; EXPRESSED IN LUNG, SIGNAL = 1.7; EXPRESSED IN HEART, SIGNAL = 3.4; EST_HUMAN HIT: BE064667.1, EVALUE 1.40e+00; NT HIT: AJ230113.1, EVALUE 3.80e+00
actatcaccaccacatcatcactatcaccaacatcatcatcaccattcacatcatcatccccatcaccatcagcagcatcatcacatcaccatgactatcatcacatcaccatgactatcatcacatcactaccatcaccatcatcattacatcaccatcactatcaccatcacataaccaccatcaccaacatcaccatcaccattaccatcaccattatatcatcatcacatcaccatcaacatcatatcaccatcaccatcaccatcaccaccaccattatcaccatttctcccatggcagcaccagccgtggtcaacaggttgaccatgcaacctttaggagagagctcagacatggtcttcccacatatcctcatctaaag

SEQ ID NO: 24034 - DNA, 242 bp, Homo sapiens
  MAP TO AC021498.4; EXPRESSED IN ADULT LIVER, SIGNAL = 1.5; EXPRESSED IN HELA, SIGNAL = 3.1; EXPRESSED IN BRAIN, SIGNAL =   1; EXPRESSED IN LUNG, SIGNAL = 1.5; EXPRESSED IN PLACENTA, SIGNAL = 1.1; EXPRESSED IN FETAL LIVER, SIGNAL =   2; EXPRESSED IN BONE MARROW, SIGNAL = 1.4; EXPRESSED IN HEART, SIGNAL = 1.4; EST_HUMAN HIT: BF376354.1, EVALUE 2.20e-01; SWISSPROT HIT: P35992, EVALUE 6.10e+00; NT HIT: AF033033.2, EVALUE 9.00e+00
gatacaacacaatcatgaatagatcctacaaatacacctttggttctaagtttactttattcttaggatactaccaagagaacctgagtcacagcaacagtggcttctgcatcagcaccattacctgtttattatctaaaacctcagatcccccatccatgaatctctcttcctttgtgaggtcctgtgggggctcacacatcctgtggcccttacatttctcctctgaagctagtgttgag

SEQ ID NO: 24035 - DNA, 184 bp, Homo sapiens
  MAP TO AL121883.13; EXPRESSED IN ADULT LIVER, SIGNAL = 1.1; EXPRESSED IN LUNG, SIGNAL = 1.3; EXPRESSED IN PLACENTA, SIGNAL = 0.75; EXPRESSED IN HEART, SIGNAL = 1.2; EXPRESSED IN FETAL LIVER, SIGNAL =   1; EXPRESSED IN BONE MARROW, SIGNAL = 0.86; EXPRESSED IN BRAIN, SIGNAL = 1.5; NT HIT: gi11419721, EVALUE 1.00e-99; SWISSPROT HIT: P32002, EVALUE 3.00e+00; EST_HUMAN HIT: AV706445.1, EVALUE 2.00e-99
cacttcaccaagatacagattatgaaactaattataaactttactgaaaatccagccatgacaagagagctggtcagttgtaaagtaccatcagaattgatttccctctttaataaagaatgggatagagagattcttcttaatatccttaccctatttgagaatataaatgacaacataaaaa

SEQ ID NO: 24036 - DNA, 171 bp, Homo sapiens
  MAP TO AC016109.3; EXPRESSED IN BONE MARROW, SIGNAL = 2.7; EXPRESSED IN PLACENTA, SIGNAL = 2.5; EXPRESSED IN ADULT LIVER, SIGNAL = 2.4; EXPRESSED IN HELA, SIGNAL = 3.1; EXPRESSED IN BRAIN, SIGNAL = 2.3; EXPRESSED IN LUNG, SIGNAL = 2.5; EXPRESSED IN HEART, SIGNAL =   3; EXPRESSED IN FETAL LIVER, SIGNAL = 2.6; SWISSPROT HIT: P57230, EVALUE 1.00e+00; NT HIT: M74161.1, EVALUE 3.90e-01; EST_HUMAN HIT: AV754819.1, EVALUE 1.50e-01
atgtcaaacactgagctgagcatttacataaaacatagaaagtactgtggtatctattacttgaaagaaacagaattcaatacactatatatccatcattattacaactttaaccaactctttatgttcagagtcaaggactgtaagagaattggggagaaaaagcagcct

SEQ ID NO: 24037 - DNA, 161 bp, Homo sapiens
  MAP TO AL158046.1; EXPRESSED IN PLACENTA, SIGNAL = 1.3; EXPRESSED IN ADULT LIVER, SIGNAL = 1.7; EXPRESSED IN HEART, SIGNAL = 1.5; EXPRESSED IN FETAL LIVER, SIGNAL = 1.5; EXPRESSED IN BONE MARROW, SIGNAL = 3.8; EXPRESSED IN LUNG, SIGNAL = 2.3; EXPRESSED IN BRAIN, SIGNAL = 1.3; SWISSPROT HIT: P35203, EVALUE 6.80e+00; NT HIT: AJ271386.1, EVALUE 3.70e-01
gcagcacgtgctagagctggtgtacacagacgagtgggttcacaccatgcagcttactgtctggggggataaagtgtactccattcaaagaaccacccaagtggaagaacagctgcctctaaatgtccacccactgatgaagggagaacaaaatatgatca

SEQ ID NO: 24038 - DNA, 465 bp, Homo sapiens
  MAP TO AL158049.2; EXPRESSED IN LUNG, SIGNAL = 1.7; EXPRESSED IN PLACENTA, SIGNAL = 1.4; EXPRESSED IN HEART, SIGNAL = 1.6; EXPRESSED IN FETAL LIVER, SIGNAL = 1.6; EXPRESSED IN BRAIN, SIGNAL = 1.4; EXPRESSED IN ADULT LIVER, SIGNAL = 1.9; EXPRESSED IN BONE MARROW, SIGNAL = 3.5; SWISSPROT HIT: Q03214, EVALUE 1.30e+00; NT HIT: D87452.1, EVALUE 3.00e-04; EST_HUMAN HIT: AA344601.1, EVALUE 0.00e+00
tcattctccctcttggatatcctgcaggatcctgatgaggttttccaggccaaaaatatagccagggtctggtccatcgtaggtggtgtgctcattccagtagcccttgtatgtggtatgagcaaagtcaatcatgcggatgtcaaccttggtgagaccaccgggagagctaccgtgggctgcctggggagcctcgtgaggatgcgggctgcctggggctctttctggtggttcctgcccatcatagatgacaaggagagagctggaatagaagcggtatgaactctggctcctaatgacagagaggagggcccggagctggtgcaggatgggctccaggagctccctccggaggtggcttccattatgtaggaactgatagagggcttgtctgaacccctccactgagagttttcttccatagtacttgtctttgcagagaaagtacttcttatctgtttgata

SEQ ID NO: 24039 - DNA, 269 bp, Homo sapiens
  MAP TO AL160492.1; EXPRESSED IN LUNG, SIGNAL = 3.5; EXPRESSED IN ADULT LIVER, SIGNAL = 3.5; EXPRESSED IN FETAL LIVER, SIGNAL = 3.7; EXPRESSED IN BRAIN, SIGNAL = 3.6; EXPRESSED IN HEART, SIGNAL =   4; EXPRESSED IN PLACENTA, SIGNAL = 3.5; EXPRESSED IN HELA, SIGNAL = 4.7; EXPRESSED IN BONE MARROW, SIGNAL = 4.1; NT HIT: gi7661535, EVALUE 2.00e-31; SWISSPROT HIT: P56261, EVALUE 2.00e+00; EST_HUMAN HIT: AI871276.1, EVALUE 4.00e-31
caagatgggcggcaagcactggtgtggaacttccccattgatgtcacctttaaaagcaccaacccctacggctgtgagtctgcaggggccctgtggggtagggtggcagagctttcacacagcacccccaagacagcctctgcctcatccagcccatgactgttcacattcagattgtcacctgggctcttgaagcagccctcaacgttctctctcgccatctgtccctttccctcctcttcttcctcatccccactcacccccttcat

SEQ ID NO: 24040 - DNA, 118 bp, Homo sapiens
  MAP TO AC010135.3; EXPRESSED IN LUNG, SIGNAL = 1.7; EXPRESSED IN ADULT LIVER, SIGNAL = 1.7; EXPRESSED IN FETAL LIVER, SIGNAL = 1.4; EXPRESSED IN BRAIN, SIGNAL = 1.5; EXPRESSED IN HEART, SIGNAL = 1.7; EXPRESSED IN PLACENTA, SIGNAL = 1.6; EXPRESSED IN BONE MARROW, SIGNAL = 1.4; NT HIT: X57147.1, EVALUE 5.00e-12; EST_HUMAN HIT: AW857579.1, EVALUE 8.00e-27; SWISSPROT HIT: P08968, EVALUE 9.30e+00
ctttaggccttgcatttttaacctctgtgtcaaatttgtttcctccaggatcgaggccatcatgctacaaatggtcgtacaaatggaacctcaaatcagctcaaatcacagcttctac

SEQ ID NO: 24041 - DNA, 127 bp, Homo sapiens
  MAP TO AL121579.2; EXPRESSED IN HEART, SIGNAL = 1.3; NT HIT: AF080592.1, EVALUE 2.80e-01; SWISSPROT HIT: P57450, EVALUE 7.00e+00; EST_HUMAN HIT: H44131.1, EVALUE 4.20e-01
atggttgatcaggcacccatacgagattcaaggatctatttgggggagggggttaacaaatctagtatttgttcttatgttcttgccaatgatcatcaacgatacaaaatctgtggcaacttagcag

SEQ ID NO: 24042 - DNA, 290 bp, Homo sapiens; identical to SEQ ID NO: 23917
  MAP TO AC015638.4; EXPRESSED IN LUNG, SIGNAL = 1.7; EXPRESSED IN PLACENTA, SIGNAL = 1.6; EXPRESSED IN ADULT LIVER, SIGNAL = 1.8; EXPRESSED IN HEART, SIGNAL = 1.5; EXPRESSED IN FETAL LIVER, SIGNAL = 1.6; EXPRESSED IN BRAIN, SIGNAL = 1.4; EXPRESSED IN BONE MARROW, SIGNAL = 1.3; EST_HUMAN HIT: AW301652.1, EVALUE 1.70e-02; SWISSPROT HIT: P28926, EVALUE 1.30e+00; NT HIT: AF078779.1, EVALUE 3.00e-40

SEQ ID NO: 24043 - DNA, 192 bp, Homo sapiens
  MAP TO AC021880.2; EXPRESSED IN HELA, SIGNAL = 5.5; EXPRESSED IN LUNG, SIGNAL = 4.1; EXPRESSED IN BRAIN, SIGNAL = 4.4; EXPRESSED IN BONE MARROW, SIGNAL = 4.4; EXPRESSED IN PLACENTA, SIGNAL = 4.1; EXPRESSED IN ADULT LIVER, SIGNAL = 4.3; EXPRESSED IN HEART, SIGNAL = 3.9; EXPRESSED IN FETAL LIVER, SIGNAL = 3.9; NT HIT: U26034.1, EVALUE 7.00e+00; SWISSPROT HIT: P26013, EVALUE 3.40e-01
ttgccatggggtgcaaggtccctggaggaggtggagcagagatgtaggcggtgagcaagcagcaccctgaaatgcaaacccagggactagagcagtggggagacaccacatgggccatgcaaaggagtgacttgtacatggcttcttcaaaaggctgcagtgtggcacagatgagcattgcagaggagaaac

SEQ ID NO: 24044 - DNA, 236 bp, Homo sapiens
  MAP TO AL132654.12; EXPRESSED IN LUNG, SIGNAL = 1.8; EXPRESSED IN PLACENTA, SIGNAL = 1.8; EXPRESSED IN HEART, SIGNAL = 1.6; EXPRESSED IN FETAL LIVER, SIGNAL =   2; EXPRESSED IN BRAIN, SIGNAL = 1.6; EXPRESSED IN BONE MARROW, SIGNAL = 1.7; EXPRESSED IN ADULT LIVER, SIGNAL = 1.6; EXPRESSED IN HELA, SIGNAL = 2.4; EST_HUMAN HIT: AI368246.1, EVALUE 8.40e-01; NT HIT: AB037756.1, EVALUE 1.00e-130
caagattcccgcctgaagtgtctgctccttcaaaaagatgaggtccatccctccttcaacatgtttccgcctccctctccgcctcctcgtggctgcatcatctcttctgaggcttccattgacaatctgtccagtcacaggatggatcaggccagcttgcagaatcccagacaagtccatgccaagggctccctgaagtgaactgatagccccaatcttaggggtgctggcgctca

SEQ ID NO: 24045 - DNA, 109 bp, Homo sapiens
  MAP TO AC008739.5; EXPRESSED IN HEART, SIGNAL = 1.6; EXPRESSED IN BONE MARROW, SIGNAL = 2.2; EXPRESSED IN LUNG, SIGNAL = 1.6; EXPRESSED IN PLACENTA, SIGNAL = 1.7; EXPRESSED IN ADULT LIVER, SIGNAL = 1.7; EXPRESSED IN FETAL LIVER, SIGNAL = 1.9; EXPRESSED IN BRAIN, SIGNAL = 2.2; NT HIT: gi6005975, EVALUE 1.00e-40; EST_HUMAN HIT: AU139909.1, EVALUE 7.00e-55; SWISSPROT HIT: Q03923, EVALUE 1.00e-13
tgtagttctctaacatcacttttctatacaaatcctgctgagcagtgtccaggcattgccactcctccagagaaaattctatggccacatccctaaatgtcaatggccc

SEQ ID NO: 24046 - DNA, 193 bp, Homo sapiens
  MAP TO AC012428.4; EXPRESSED IN PLACENTA, SIGNAL = 1.4; EXPRESSED IN ADULT LIVER, SIGNAL = 1.6; EXPRESSED IN BRAIN, SIGNAL = 1.1; EXPRESSED IN BONE MARROW, SIGNAL =   1; EXPRESSED IN LUNG, SIGNAL = 1.3; EXPRESSED IN HEART, SIGNAL = 1.5; EXPRESSED IN FETAL LIVER, SIGNAL = 0.89; NT HIT: AL163246.2, EVALUE 2.00e-37; EST_HUMAN HIT: BE222256.1, EVALUE 2.00e-38; SWISSPROT HIT: P06163, EVALUE 2.20e+00
gaagcaaacaggaatgttgagagtggcttccgaggagaatcaacatgagtttgcttggcaaccacctcaggggaggccagcactgttgcctcaggcagtacagggtttatgtcctcagacaaaggtggaaaggctgatggtagcatgggtctgggaggggatactgccactactggggatggggaagctgttc

SEQ ID NO: 24047 - DNA, 235 bp, Homo sapiens
  MAP TO AC020906.3; EXPRESSED IN LUNG, SIGNAL = 4.7; EXPRESSED IN PLACENTA, SIGNAL = 4.4; EXPRESSED IN ADULT LIVER, SIGNAL = 3.9; EXPRESSED IN HELA, SIGNAL = 4.1; EXPRESSED IN FETAL LIVER, SIGNAL = 4.6; EXPRESSED IN BRAIN, SIGNAL = 4.3; EXPRESSED IN BONE MARROW, SIGNAL = 4.4; EXPRESSED IN HEART, SIGNAL = 4.6; NT HIT: U35114.1, EVALUE 9.00e-06; SWISSPROT HIT: P98083, EVALUE 1.90e+00; EST_HUMAN HIT: AA809136.1, EVALUE 1.00e-05
cctcccaaagtactgggattgcaggcatgagtccccacgcagtgtataccactcctctttgctccctccgcagggacttttgagtctctagaagtgcccagagcaggcaggggccactggttggcagaagcagtggggctgcaggcccaagtcagcacaggccatgggatggcaggggccggcgcccaaggacatgcggtctcaaaggccacagtgagtgggaacctggatgagg

SEQ ID NO: 24048 - DNA, 129 bp, Homo sapiens
  MAP TO AL136962.6; EXPRESSED IN ADULT LIVER, SIGNAL = 1.9; EXPRESSED IN LUNG, SIGNAL = 0.98; EXPRESSED IN PLACENTA, SIGNAL = 1.4; EXPRESSED IN HELA, SIGNAL = 2.2; EXPRESSED IN FETAL LIVER, SIGNAL = 1.3; EXPRESSED IN BRAIN, SIGNAL = 1.1; EXPRESSED IN BONE MARROW, SIGNAL = 1.3; EXPRESSED IN HEART, SIGNAL = 1.4; NT HIT: AF029308.1, EVALUE 2.00e-11; EST_HUMAN HIT: AL043642.1, EVALUE 3.00e-11
atggataaagaactaaaagaaatcaagaaaacaatatatgaaaaaatagagaatatcaataaagaaacagaaattatttttaaaaagaaccaaatagaaattctggagcttaaagtaaaacaactgaaa

SEQ ID NO: 24049 - DNA, 181 bp, Homo sapiens
  MAP TO AC019281.4; EXPRESSED IN LUNG, SIGNAL = 1.3; EXPRESSED IN PLACENTA, SIGNAL = 1.1; EXPRESSED IN ADULT LIVER, SIGNAL = 5.7; EXPRESSED IN FETAL LIVER, SIGNAL = 1.9; EXPRESSED IN BRAIN, SIGNAL = 1.5; EXPRESSED IN BONE MARROW, SIGNAL = 1.4; EXPRESSED IN HEART, SIGNAL = 2.4; NT HIT: gi11321580, EVALUE 9.00e-98; EST_HUMAN HIT: AA220240.1, EVALUE 2.00e-87; SWISSPROT HIT: O19069, EVALUE 1.00e-19
gccaaagaacagacaggagcaacggcttctgtcatttatgttcctccgccttttgctgctgctgccattaatgaagctattgaggcagaaattcccttggttgtgtgtatcactgaaggaattccccagcaggacatggtacgagtcaagcacaaactgctgcgccaggaaaagacaaggc

SEQ ID NO: 24050 - DNA, 153 bp, Homo sapiens
  MAP TO AC015914.3; EXPRESSED IN BONE MARROW, SIGNAL = 3.8; EXPRESSED IN PLACENTA, SIGNAL = 3.4; EXPRESSED IN ADULT LIVER, SIGNAL = 3.2; EXPRESSED IN HELA, SIGNAL = 3.6; EXPRESSED IN HEART, SIGNAL = 5.6; EXPRESSED IN BRAIN, SIGNAL = 6.1; EXPRESSED IN LUNG, SIGNAL = 4.3; EXPRESSED IN FETAL LIVER, SIGNAL = 4.8; SWISSPROT HIT: P53355, EVALUE 5.00e-17; NT HIT: AB018001.1, EVALUE 4.00e-81; EST_HUMAN HIT: AW603538.1, EVALUE 6.00e-81
cttaagtggagcatcccctttcctgggagacacgaagcaggaaacactggcaaatatcacagcagtgagttacgactttgatgaggaattcttcagccagacgagcgagctggccaaggactttattcggaagcttctggttaaagagacccg

SEQ ID NO: 24051 - DNA, 90 bp, Homo sapiens; identical to SEQ ID NO: 23533
  MAP TO AC013726.3; EXPRESSED IN BONE MARROW, SIGNAL = 7.9; EXPRESSED IN LUNG, SIGNAL = 7.9; EXPRESSED IN ADULT LIVER, SIGNAL = 8.7; EXPRESSED IN HEART, SIGNAL = 7.4; EXPRESSED IN FETAL LIVER, SIGNAL = 6.9; EXPRESSED IN BRAIN, SIGNAL = 6.9; EXPRESSED IN PLACENTA, SIGNAL = 7.7; EXPRESSED IN HELA, SIGNAL =  13; EST_HUMAN HIT: AA278728.1, EVALUE 2.80e-01; NT HIT: X15543.1, EVALUE 4.70e-02

SEQ ID NO: 24052 - DNA, 186 bp, Homo sapiens
  MAP TO AC015599.3; EXPRESSED IN ADULT LIVER, SIGNAL = 3.5; EXPRESSED IN HEART, SIGNAL = 3.2; EXPRESSED IN BRAIN, SIGNAL = 3.5; EXPRESSED IN BONE MARROW, SIGNAL = 3.3; EXPRESSED IN HELA, SIGNAL = 2.5; EXPRESSED IN LUNG, SIGNAL = 3.1; EXPRESSED IN PLACENTA, SIGNAL = 3.9; EXPRESSED IN FETAL LIVER, SIGNAL = 3.4; NT HIT: AB040918.1, EVALUE 1.00e-100; EST_HUMAN HIT: BE733922.1, EVALUE 3.00e-46; SWISSPROT HIT: P13816, EVALUE 5.10e-02
ctggaattgcttcgtgtgcagttaaaaccacacttatgatgggtttcttcgccccagaaagctgtctggcctcctttcctgagatcttctggactttctctgttttctgtgaccgtggtcttttcgaggctttttcccgatcatcttccttacacttcttttctagttcaaggtcagactcgttac

SEQ ID NO: 24053 - DNA, 107 bp, Homo sapiens
  MAP TO AC021115.3; EXPRESSED IN LUNG, SIGNAL = 1.6; EXPRESSED IN ADULT LIVER, SIGNAL = 1.4; EXPRESSED IN FETAL LIVER, SIGNAL =   1; EXPRESSED IN BRAIN, SIGNAL = 1.3; EXPRESSED IN PLACENTA, SIGNAL = 1.5; EXPRESSED IN HEART, SIGNAL = 1.3; EXPRESSED IN BONE MARROW, SIGNAL = 1.3; EST_HUMAN HIT: AA648071.1, EVALUE 9.30e-01; NT HIT: Y10159.1, EVALUE 7.80e-01
gaaacatccctgaaatcctcatgatcatcagggctggcattcctgtagcgcttaccatgtatggggtcttgtctcagggccttacccgcattaacatgtttttcttt

SEQ ID NO: 24054 - DNA, 120 bp, Homo sapiens
  MAP TO AC025812.4; EXPRESSED IN BONE MARROW, SIGNAL = 1.4; EXPRESSED IN LUNG, SIGNAL = 1.7; EXPRESSED IN PLACENTA, SIGNAL = 1.7; EXPRESSED IN ADULT LIVER, SIGNAL = 1.9; EXPRESSED IN HEART, SIGNAL = 1.5; EXPRESSED IN FETAL LIVER, SIGNAL = 1.2; EXPRESSED IN BRAIN, SIGNAL = 1.3; EST_HUMAN HIT: AW195888.1, EVALUE 3.90e-01; SWISSPROT HIT: O08914, EVALUE 5.40e+00; NT HIT: AJ005567.1, EVALUE 1.00e+00
tctgaacactttcatgtaaccaacgcccagatccagaaatacagtattaccaacacctcagagtctacctgccgcagccttccaggtaccctcaagggtaaccaacaacctgacttctag

SEQ ID NO: 24055 - DNA, 156 bp, Homo sapiens
  MAP TO AL121772.12; EXPRESSED IN LUNG, SIGNAL = 1.6; EXPRESSED IN PLACENTA, SIGNAL = 1.2; EXPRESSED IN FETAL LIVER, SIGNAL = 1.2; EXPRESSED IN BRAIN, SIGNAL = 1.4; EXPRESSED IN BONE MARROW, SIGNAL = 1.2; EXPRESSED IN ADULT LIVER, SIGNAL = 1.5; EXPRESSED IN HEART, SIGNAL = 1.3; EST_HUMAN HIT: AA360017.1, EVALUE 6.00e-81; NT HIT: gi11420371, EVALUE 7.00e-58; SWISSPROT HIT: Q10155, EVALUE 5.20e+00
gtgggagtcacctggagcgtgaagggacgtgtctcatccccagtgtgtcggaccctggagacacagccgcagagcagccccttctcatgcatggacctcacctacgtcagcctgctactccaggagttcggctttcccaggagcaaagtgctgaag

SEQ ID NO: 24056 - DNA, 301 bp, Homo sapiens
  MAP TO AL162458.1; EXPRESSED IN LUNG, SIGNAL = 1.6; EXPRESSED IN PLACENTA, SIGNAL = 1.7; EXPRESSED IN ADULT LIVER, SIGNAL = 1.3; EXPRESSED IN HEART, SIGNAL =   2; EXPRESSED IN FETAL LIVER, SIGNAL = 1.8; EXPRESSED IN BRAIN, SIGNAL = 1.9; EXPRESSED IN BONE MARROW, SIGNAL = 1.8; SWISSPROT HIT: Q09573, EVALUE 4.00e-05; NT HIT: AB033002.1, EVALUE 1.00e-48; EST_HUMAN HIT: H84860.1, EVALUE 1.00e-109
ggatcatggctggttctaaccgctctggggacctgagggatgcccagaagtcaatccccactggcaccatcctggccatcgccaccacctctgctgtctgtatcctgcacagctgtgctgggaccaccctcgggggagggcaagagggagggcagctgaacttgctgccttacctgctggtgcaggaagggtggggagggggaggactgaaccgtggggattctcctttatcctctgctgcagacatcagctccgttgttctgtttggggcctgcattgagggggtcgtcctgcgggacaa

SEQ ID NO: 24057 - DNA, 163 bp, Homo sapiens
  MAP TO AC019058.3; EXPRESSED IN PLACENTA, SIGNAL = 2.9; EXPRESSED IN LUNG, SIGNAL = 2.7; EXPRESSED IN HEART, SIGNAL = 3.3; EXPRESSED IN FETAL LIVER, SIGNAL =   3; EXPRESSED IN BONE MARROW, SIGNAL = 3.1; EXPRESSED IN ADULT LIVER, SIGNAL =   3; EXPRESSED IN BRAIN, SIGNAL = 2.9; EST_HUMAN HIT: BE064048.1, EVALUE 2.00e-07; SWISSPROT HIT: Q09779, EVALUE 1.00e+00; NT HIT: L09709.1, EVALUE 7.00e-09
gaacacggatggagctggaagtcatcatccttagcaaacacccaggaacagaaaaccaacgtaaaatcattgtatggaagtactgcactgccatctttgaaaatgcaaacataaattccatgacttcaaaaaatgttactcctgctgacatttcaaagacaat

SEQ ID NO: 24058 - DNA, 114 bp, Homo sapiens
  MAP TO AC021557.3; EXPRESSED IN PLACENTA, SIGNAL = 1.7; EXPRESSED IN ADULT LIVER, SIGNAL = 1.8; EXPRESSED IN HEART, SIGNAL = 1.4; EXPRESSED IN FETAL LIVER, SIGNAL = 1.4; EXPRESSED IN BRAIN, SIGNAL = 1.4; EXPRESSED IN BONE MARROW, SIGNAL = 1.4; EXPRESSED IN LUNG, SIGNAL = 1.9; NT HIT: U65667.1, EVALUE 9.90e-01; EST_HUMAN HIT: BE148438.1, EVALUE 5.70e+00; SWISSPROT HIT: P26388, EVALUE 1.80e+00
ttttgtttcttttatcacaagcatgtaaggaaaggcacaatatgtgtagaaatctccctggtttccatagaatgtccagtcagtcagcactgaatttgaattcgactgtgccat

SEQ ID NO: 24059 - DNA, 263 bp, Homo sapiens
  MAP TO AC013627.3; EXPRESSED IN HEART, SIGNAL = 5.7; EXPRESSED IN FETAL LIVER, SIGNAL =   6; EXPRESSED IN BRAIN, SIGNAL = 6.4; EXPRESSED IN LUNG, SIGNAL = 8.2; EXPRESSED IN HELA, SIGNAL = 6.8; EXPRESSED IN PLACENTA, SIGNAL = 6.8; EXPRESSED IN ADULT LIVER, SIGNAL = 7.1; EXPRESSED IN BONE MARROW, SIGNAL = 7.1; EST_HUMAN HIT: AW160820.1, EVALUE 1.00e-43; NT HIT: AB033071.1, EVALUE 1.00e-48; SWISSPROT HIT: P13654, EVALUE 2.10e-01
gcagtataaagccctggttcactctcaggcaaaagagctgacccagttacgggagaagttacgggaagggagagatgcctcccgctggctgaacaagcatctgaaaaccctcctcactcctgatgaccctgacaagtcccagggtcaggacctccgagagcagctggctgaggggcacaggctggcagagcaccttgttcacaagctgagcccaggtaaggtggccatgggccctgatgacacacagcttcaggcttatgaaa

SEQ ID NO: 24060 - DNA, 98 bp, Homo sapiens
  MAP TO AL133372.2; EXPRESSED IN PLACENTA, SIGNAL = 2.6; EXPRESSED IN ADULT LIVER, SIGNAL = 2.5; EXPRESSED IN HEART, SIGNAL = 2.3; EXPRESSED IN BRAIN, SIGNAL = 2.3; EXPRESSED IN BONE MARROW, SIGNAL = 2.6; EXPRESSED IN HELA, SIGNAL = 2.3; EXPRESSED IN LUNG, SIGNAL = 2.7; EXPRESSED IN FETAL LIVER, SIGNAL = 2.3; EST_HUMAN HIT: AA551527.1, EVALUE 2.00e-27; NT HIT: L11910.1, EVALUE 2.00e-23; SWISSPROT HIT: P08547, EVALUE 5.00e-07
atctgaacagaccaataacaagtaatgagattgaaaccataataaaaattctcccagtaaagaaaagcccaagacctgatggcttcattgctgaattc

SEQ ID NO: 24061 - DNA, 83 bp, Homo sapiens
  MAP TO AC021079.2; EXPRESSED IN LUNG, SIGNAL =   2; EXPRESSED IN HEART, SIGNAL = 1.8; EXPRESSED IN PLACENTA, SIGNAL = 1.9; EXPRESSED IN FETAL LIVER, SIGNAL =   2; EXPRESSED IN BONE MARROW, SIGNAL = 2.1; EXPRESSED IN ADULT LIVER, SIGNAL = 1.8; EXPRESSED IN BRAIN, SIGNAL = 2.4; NT HIT: AE004023.1, EVALUE 2.60e+00; EST_HUMAN HIT: BE907592.1, EVALUE 1.00e+00
ctgggctttctgccactagaattatcatttctgaagactttgcgttctgtagctattgattcattcaagacctgaatctgtat

SEQ ID NO: 24062 - DNA, 262 bp, Homo sapiens
  MAP TO AL050342.42; EXPRESSED IN LUNG, SIGNAL = 0.94; EXPRESSED IN ADULT LIVER, SIGNAL = 0.8; EXPRESSED IN FETAL LIVER, SIGNAL = 1.1; EXPRESSED IN BRAIN, SIGNAL = 1.2; EXPRESSED IN HEART, SIGNAL = 1.2; EXPRESSED IN PLACENTA, SIGNAL = 1.3; EXPRESSED IN BONE MARROW, SIGNAL = 1.2; SWISSPROT HIT: P39941, EVALUE 2.50e+00; NT HIT: gi6679980, EVALUE 1.60e-01; EST_HUMAN HIT: AI623167.1, EVALUE 6.00e-02
tgggaggtagagcagagtgtggtgagccccacccgtccagcaccaaaagtccccttgcagtgtgaagatagaactgagaaagatgtggctcaaacatggcccagtgtgagtcaagagttgtcccctcgttctcacccttcaaggtcagcaggaggaaatggccaaggagctaaggcagctgggccgccaacgatcaggccaatttaagagacgtctatggcaggggtggagcctgagaggggtcccaggctccctgaagcgg

SEQ ID NO: 24063 - DNA, 249 bp, Homo sapiens
  MAP TO AC007000.2; EXPRESSED IN PLACENTA, SIGNAL = 1.8; EXPRESSED IN ADULT LIVER, SIGNAL = 0.99; EXPRESSED IN FETAL LIVER, SIGNAL = 1.3; EXPRESSED IN BRAIN, SIGNAL = 3.2; EXPRESSED IN LUNG, SIGNAL = 1.2; EXPRESSED IN HELA, SIGNAL = 2.6; EXPRESSED IN BONE MARROW, SIGNAL = 2.7; EXPRESSED IN HEART, SIGNAL = 1.3; SWISSPROT HIT: P21997, EVALUE 5.00e+00; NT HIT: U96697.1, EVALUE 6.00e-01; EST_HUMAN HIT: AI760820.1, EVALUE 2.00e-85
ctcctccaactcctcccgggaaacccaagccctgccgctcatggaacagaagaactggaaccgaagtttctggaacagggctatctgagagcggttcttcctggccctcgggttcaagcaacggcataactggaaccgacggttacggaccaagggtatgcgagagcgggtcttcccatacaggaagtagaagatgttttgtttggggtcctcgtcgtcctcctccatgtcattggccaggtagctgag

SEQ ID NO: 24064 - DNA, 187 bp, Homo sapiens
  MAP TO AL121903.13; EXPRESSED IN PLACENTA, SIGNAL = 1.8; EXPRESSED IN ADULT LIVER, SIGNAL = 2.3; EXPRESSED IN HELA, SIGNAL = 2.3; EXPRESSED IN HEART, SIGNAL = 1.7; EXPRESSED IN FETAL LIVER, SIGNAL = 1.8; EXPRESSED IN LUNG, SIGNAL = 1.7; EXPRESSED IN BRAIN, SIGNAL = 1.9; EXPRESSED IN BONE MARROW, SIGNAL = 1.7; SWISSPROT HIT: P40095, EVALUE 2.20e+00; NT HIT: gi11422086, EVALUE 9.00e-92; EST_HUMAN HIT: BE891800.1, EVALUE 2.00e-72
caagacacgctggatgcagatatccacatagagacggaggatcagggcatgtataagtacatgtcttcccagcacctcttcaagctgttggactgtttgcaggaatcccattcattctcaaaggccttcaactccaattacgagcagcggactgtcctgtggcgagcaggtaaggccacacagcaga

SEQ ID NO: 24065 - DNA, 165 bp, Homo sapiens
  MAP TO AC011226.3; EXPRESSED IN BRAIN, SIGNAL = 1.2; EXPRESSED IN PLACENTA, SIGNAL = 1.7; EXPRESSED IN ADULT LIVER, SIGNAL = 1.4; EXPRESSED IN FETAL LIVER, SIGNAL = 1.1; EXPRESSED IN LUNG, SIGNAL = 1.4; EXPRESSED IN HEART, SIGNAL = 1.4; EXPRESSED IN BONE MARROW, SIGNAL = 1.2; NT HIT: AL161595.2, EVALUE 1.50e+00; SWISSPROT HIT: P41001, EVALUE 1.30e+00; EST_HUMAN HIT: W93411.1, EVALUE 1.40e-01
cgtttccacagcagtgttcaggatggccagggggaagagagaaaaaggatctaccatgttaatctcttgcttaaaagtctccagtgataacttttttctaaagcagaggttttcaaactttttcaagcatctgaagcagaatttctcaaccttggtgctatacat

SEQ ID NO: 24066 - DNA, 154 bp, Homo sapiens
  MAP TO AC018730.3; EXPRESSED IN HELA, SIGNAL = 5.3; EXPRESSED IN LUNG, SIGNAL = 6.9; EXPRESSED IN PLACENTA, SIGNAL = 6.8; EXPRESSED IN HEART, SIGNAL = 6.3; EXPRESSED IN ADULT LIVER, SIGNAL = 7.4; EXPRESSED IN FETAL LIVER, SIGNAL = 6.3; EXPRESSED IN BRAIN, SIGNAL = 6.8; EXPRESSED IN BONE MARROW, SIGNAL = 6.5; NT HIT: D87449.1, EVALUE 1.40e+00; EST_HUMAN HIT: AI695189.1, EVALUE 6.00e-47; SWISSPROT HIT: Q02805, EVALUE 3.00e+00
gtcggttggtcatctcagctcctcagggctgctggtctgagggcctgaagttcacccatgtgacctcctgggtgcaggatcctcacggtaggcttgacgttgatttcaataaggaaagcagaagcctctgcgtttgcatcctgaactttgcagc

SEQ ID NO: 24067 - DNA, 139 bp, Homo sapiens
  MAP TO AC022609.2; EXPRESSED IN PLACENTA, SIGNAL = 1.7; EXPRESSED IN ADULT LIVER, SIGNAL = 2.1; EXPRESSED IN FETAL LIVER, SIGNAL = 1.4; EXPRESSED IN BONE MARROW, SIGNAL = 1.6; EXPRESSED IN LUNG, SIGNAL = 1.7; EXPRESSED IN HEART, SIGNAL = 1.5; EXPRESSED IN BRAIN, SIGNAL = 1.4; SWISSPROT HIT: Q99435, EVALUE 1.80e+00; EST_HUMAN HIT: AA846545.1, EVALUE 5.00e-04; NT HIT: M97252.1, EVALUE 2.00e-02
ctccgtgcctaggcaaacctctgagcgcttggtggccagacactgtattctccctttggcactggtgtttcctcctgccatcagaggacctgtcggcagatttgcctgatccagctctactcatcttggcccctgccac

SEQ ID NO: 24068 - DNA, 117 bp, Homo sapiens
  MAP TO AL139819.2; EXPRESSED IN LUNG, SIGNAL = 3.9; EXPRESSED IN ADULT LIVER, SIGNAL = 4.3; EXPRESSED IN HEART, SIGNAL = 2.6; EXPRESSED IN FETAL LIVER, SIGNAL = 4.7; EXPRESSED IN BRAIN, SIGNAL = 4.8; EXPRESSED IN PLACENTA, SIGNAL = 4.7; EXPRESSED IN BONE MARROW, SIGNAL = 4.5; EXPRESSED IN HELA, SIGNAL =   5; NT HIT: AL163213.2, EVALUE 2.00e-23; EST_HUMAN HIT: AA308744.1, EVALUE 1.00e-28; SWISSPROT HIT: P22601, EVALUE 9.30e+00
ccactcccagagctgctggaactctggcccaagactctctgactccttcccagatgttctcggcttagcggctgaaaactgatgctgcccaatcgcctcagaagcctcttggaccat

SEQ ID NO: 24069 - DNA, 224 bp, Homo sapiens
  MAP TO AL139258.2; EXPRESSED IN PLACENTA, SIGNAL = 5.2; EXPRESSED IN ADULT LIVER, SIGNAL = 3.8; EXPRESSED IN HELA, SIGNAL = 7.5; EXPRESSED IN BRAIN, SIGNAL =   5; EXPRESSED IN BONE MARROW, SIGNAL = 5.2; EXPRESSED IN LUNG, SIGNAL = 3.7; EXPRESSED IN HEART, SIGNAL = 7.5; EXPRESSED IN FETAL LIVER, SIGNAL = 3.3; EST_HUMAN HIT: AA134175.1, EVALUE 7.90e-01; SWISSPROT HIT: P30372, EVALUE 7.60e-01
gtcttgtgcagaggacagaggggaccctcatctttcatgtcgcttcccagcaagcccttgtgtgtcctgtgccaattgcagctgaagatatttcatttcctgatatttgccaaatcaccttttacctagttcctgatatttattctgtcaagatggggcacagccatgacccgagagaccagacagacccacacaggcaagaccgattaggcaaagcccagtaa

SEQ ID NO: 24070 - DNA, 232 bp, Homo sapiens
  MAP TO AL137853.3; EXPRESSED IN BONE MARROW, SIGNAL = 2.9; EXPRESSED IN LUNG, SIGNAL =   3; EXPRESSED IN ADULT LIVER, SIGNAL = 3.2; EXPRESSED IN HEART, SIGNAL = 2.8; EXPRESSED IN FETAL LIVER, SIGNAL = 2.3; EXPRESSED IN BRAIN, SIGNAL = 2.7; EXPRESSED IN PLACENTA, SIGNAL = 2.8; EXPRESSED IN HELA, SIGNAL = 2.6; NT HIT: AF055066.1, EVALUE 8.60e+00; SWISSPROT HIT: P43437, EVALUE 5.40e+00; EST_HUMAN HIT: AW999726.1, EVALUE 1.00e-61
gctgttagatccagaattgcatgttctcataacccccagcctgagagagaaaacagagtctgagctaaagtttgaggaggatgagcgatggattatgatggaggctgagggagagtgggaggaagagaaactgtcagacagggaaaagacttttctgatggcagatgagaagaacagcctggcagatatttttgaagaaagagaacaagcaaacacagcagtggtggaggat

SEQ ID NO: 24071 - DNA, 126 bp, Homo sapiens
  MAP TO AL137248.4; EXPRESSED IN PLACENTA, SIGNAL = 0.81; EXPRESSED IN ADULT LIVER, SIGNAL = 1.1; EXPRESSED IN HEART, SIGNAL = 1.3; EXPRESSED IN BRAIN, SIGNAL = 1.1; EXPRESSED IN BONE MARROW, SIGNAL = 1.1; EXPRESSED IN FETAL LIVER, SIGNAL = 1.1; NT HIT: AL163247.2, EVALUE 7.00e-05; EST_HUMAN HIT: AW875651.1, EVALUE 1.00e-16; SWISSPROT HIT: P16827, EVALUE 4.10e+00
tcatgtgccatcagtattatagacttcttctggcctcagatttttatcagtgatgaccctggcaaaatcaacaatgaatttctccactgcttcatgatcagcagatgctttatcactacaaatctt

SEQ ID NO: 24072 - DNA, 152 bp, Homo sapiens
  MAP TO AC008812.4; EXPRESSED IN PLACENTA, SIGNAL = 1.2; EXPRESSED IN ADULT LIVER, SIGNAL = 1.1; EXPRESSED IN HEART, SIGNAL = 1.2; EXPRESSED IN FETAL LIVER, SIGNAL = 1.8; EXPRESSED IN BONE MARROW, SIGNAL = 1.3; EXPRESSED IN LUNG, SIGNAL = 1.3; EXPRESSED IN BRAIN, SIGNAL = 1.2; EST_HUMAN HIT: AV645755.1, EVALUE 2.00e-80; SWISSPROT HIT: P26715, EVALUE 6.00e-07; NT HIT: AF245219.1, EVALUE 1.00e-80
aacgcctgtgccgccactgtcccaaggactggacattcttccaaggaaactgttacttcatgtctaactcccagcggaactggcacgactccgtcaccgcctgccaggaagtgagggcccagctcgtcgtaatcaaaactgctgaggagcag

SEQ ID NO: 24073 - DNA, 195 bp, Homo sapiens
  MAP TO AL138796.2; EXPRESSED IN LUNG, SIGNAL = 1.1; EXPRESSED IN PLACENTA, SIGNAL = 0.77; EXPRESSED IN HEART, SIGNAL = 2.8; EXPRESSED IN FETAL LIVER, SIGNAL =   2; EXPRESSED IN BRAIN, SIGNAL = 1.3; EXPRESSED IN ADULT LIVER, SIGNAL = 1.1; EXPRESSED IN BONE MARROW, SIGNAL = 1.6; NT HIT: AB007923.1, EVALUE 1.00e-106; SWISSPROT HIT: P49574, EVALUE 3.40e-01; EST_HUMAN HIT: AI750447.1, EVALUE 1.00e-106
ttggctttcctgctccctggtgctcacagactgaagcaggccttgaatctccatttcatgttccagcacttgtttatttcgatcacttagaaggtcctgcagcatcctttcctttcgctgtagacgctggcacagctcctctgctatctcactctgccctggtccaagtttgcagagcagtgttgcactaagatc

SEQ ID NO: 24074 - DNA, 173 bp, Homo sapiens
  MAP TO AC011207.3; EXPRESSED IN PLACENTA, SIGNAL =  12; EXPRESSED IN ADULT LIVER, SIGNAL =  13; EXPRESSED IN HELA, SIGNAL =  16; EXPRESSED IN BRAIN, SIGNAL =  12; EXPRESSED IN BONE MARROW, SIGNAL =  14; EXPRESSED IN LUNG, SIGNAL =  12; EXPRESSED IN HEART, SIGNAL =  12; EXPRESSED IN FETAL LIVER, SIGNAL =  14; EST_HUMAN HIT: AA236110.1, EVALUE 1.00e-05; NT HIT: X67204.1, EVALUE 1.00e-04
atttgctgtattatcagtgtctgatgatgttgacaatgttgaagaagaagaaagaagaggagttggaggaggaggaagaaaacatccagagcattcaatttattctagttaaattactaaccagaaagagaatgccctcggaagtctactttataatgctgtttggttctaag

SEQ ID NO: 24075 - DNA, 75 bp, Homo sapiens
  MAP TO AC016535.3; EXPRESSED IN PLACENTA, SIGNAL = 1.4; EXPRESSED IN BRAIN, SIGNAL = 1.4; EXPRESSED IN BONE MARROW, SIGNAL = 1.3; EXPRESSED IN LUNG, SIGNAL = 1.8; EXPRESSED IN ADULT LIVER, SIGNAL = 1.5; EXPRESSED IN HEART, SIGNAL = 1.4; EXPRESSED IN FETAL LIVER, SIGNAL = 1.2; NT HIT: gi6753635, EVALUE 2.30e+00; EST_HUMAN HIT: W02988.1, EVALUE 2.20e-01
actcctgacactcatcccttgatcttttatgactctgatctgagggctatgacagctgaattgctgcaaatccta

SEQ ID NO: 24076 - DNA, 289 bp, Homo sapiens
  MAP TO AL136438.8; EXPRESSED IN LUNG, SIGNAL = 1.3; EXPRESSED IN PLACENTA, SIGNAL = 1.1; EXPRESSED IN FETAL LIVER, SIGNAL = 1.1; EXPRESSED IN BONE MARROW, SIGNAL = 1.2; EXPRESSED IN ADULT LIVER, SIGNAL = 1.3; EXPRESSED IN HEART, SIGNAL = 1.3; EXPRESSED IN BRAIN, SIGNAL = 1.2; SWISSPROT HIT: O62836, EVALUE 4.40e-01; NT HIT: gi7705739, EVALUE 7.00e-01
ctacaccccctcctcacccacattcccactgctctgcttttctccagacaaaacctgcaccgcaaactccctcgcatctggactcccctcggctaacttcagctctatcctgaagaccacctccagtgtcgtctccttcctggcggggtcctctgatgcttctcccatctccgtcaggccctccttcccctctgccagcttcacttccccctcctccactctcttcccatcagaatactcagcccatgcccagaaatcaccatttccaggcctgtcttcctggaaggac

SEQ ID NO: 24077 - DNA, 181 bp, Homo sapiens
  MAP TO AC025738.1; EXPRESSED IN PLACENTA, SIGNAL = 1.6; EXPRESSED IN ADULT LIVER, SIGNAL = 1.6; EXPRESSED IN FETAL LIVER, SIGNAL = 1.5; EXPRESSED IN BRAIN, SIGNAL = 1.6; EXPRESSED IN BONE MARROW, SIGNAL = 1.5; EXPRESSED IN LUNG, SIGNAL = 1.5; EXPRESSED IN HEART, SIGNAL = 1.4; NT HIT: AB037786.1, EVALUE 9.00e-98; EST_HUMAN HIT: BE391216.1, EVALUE 2.50e+00; SWISSPROT HIT: P22146, EVALUE 1.70e+00
ctgttaccccacaaagaattatgtactgcatctttagctgttgtctgcaaggaccccactttaacccgggtattagaggatcctgaggaagcctgggaaggcgagtagtctgagtaagtgcctgaggaaacactgttattcagacagtgagttttgtcaacttcagactcatcagttgatt

SEQ ID NO: 24078 - DNA, 169 bp, Homo sapiens
  MAP TO AC015529.3; EXPRESSED IN LUNG, SIGNAL = 1.1; EXPRESSED IN ADULT LIVER, SIGNAL = 0.99; EXPRESSED IN BRAIN, SIGNAL = 0.96; EXPRESSED IN BONE MARROW, SIGNAL = 1.1; EXPRESSED IN PLACENTA, SIGNAL = 0.92; EXPRESSED IN HEART, SIGNAL = 1.2; EXPRESSED IN FETAL LIVER, SIGNAL = 0.97; EST_HUMAN HIT: N70114.1, EVALUE 2.30e+00; SWISSPROT HIT: P34578, EVALUE 1.30e+00; NT HIT: AF163864.1, EVALUE 1.00e-90
agggtgatggaccagataccctcaaagggcatgaaaggtgaaaaccggtgccattactccctttcagtgttcctgatcttaaaagcagagccattaatccacttctacaagctagacatccagtacccctacttgtcacatccctcttcctccaagtttctggcacagt

SEQ ID NO: 24079 - DNA, 238 bp, Homo sapiens
  MAP TO AL109824.21; EXPRESSED IN LUNG, SIGNAL =  13; EXPRESSED IN HELA, SIGNAL = 6.5; EXPRESSED IN BRAIN, SIGNAL =  16; EXPRESSED IN PLACENTA, SIGNAL = 8.4; EXPRESSED IN ADULT LIVER, SIGNAL =  13; EXPRESSED IN HEART, SIGNAL =  12; EXPRESSED IN FETAL LIVER, SIGNAL =  14; EXPRESSED IN BONE MARROW, SIGNAL =  16; EST_HUMAN HIT: BE694952.1, EVALUE 5.00e-61; NT HIT: gi11420557, EVALUE 5.00e-66; SWISSPROT HIT: Q13094, EVALUE 1.50e+00
tcattgtgcccagagaaccctgggctggaggaggttgaagggctccagaaggcagctggttccagcctggaggaacaggcacctgagttggggcagtaaactggggtcgaattccctgtggctgttgctgctgatgttgctgtgggggtcttgcctgcaactgttgttgctgctgttgctgttgttgctgctgctgctgctgctgctgctgttgttgttgttgctgctgctgctgcag

SEQ ID NO: 24080 - DNA, 139 bp, Homo sapiens
  MAP TO AP001435.1; EXPRESSED IN ADULT LIVER, SIGNAL = 0.86; EXPRESSED IN BONE MARROW, SIGNAL = 0.97; EXPRESSED IN PLACENTA, SIGNAL = 0.72; EXPRESSED IN HEART, SIGNAL = 1.2; EXPRESSED IN FETAL LIVER, SIGNAL = 1.4; EXPRESSED IN BRAIN, SIGNAL =   1; SWISSPROT HIT: P00521, EVALUE 1.20e-01; EST_HUMAN HIT: BF340861.1, EVALUE 6.00e-16; NT HIT: gi11423191, EVALUE 4.00e-16
cgctactggcggattcgggaggtgctgaagcacgccaagcacttccggcgggggagcggggtgcgggggaaattgctgctacaggttggcggtcagagccgggactggagcctttgtgaaatgcaccaaagccggaaac

SEQ ID NO: 24081 - DNA, 555 bp, Homo sapiens
  MAP TO AL117381.9; EXPRESSED IN PLACENTA, SIGNAL = 0.99; EXPRESSED IN FETAL LIVER, SIGNAL = 3.5; EXPRESSED IN LUNG, SIGNAL =   2; EXPRESSED IN BRAIN, SIGNAL = 1.6; EXPRESSED IN BONE MARROW, SIGNAL = 4.7; EXPRESSED IN ADULT LIVER, SIGNAL = 1.7; EXPRESSED IN HEART, SIGNAL = 1.4; SWISSPROT HIT: Q07817, EVALUE 1.00e-106; EST_HUMAN HIT: BE207063.1, EVALUE 0.00e+00; NT HIT: U72398.1, EVALUE 0.00e+00
ccagccgccgttctcctggatccaaggctctaggtggtcattcaggtaagtggccatccaagctgcgatccgactcaccaatacctgcatctccttgtctacgctttccacgcacagtgccccgccgaaggagaaaaaggccacaatgcgaccccagtttaccccatcccggaagagttcattcactacctgttcaaagctctgatatgctgtccctggggtgatgtggagctgggatgtcaggtcactgaatgcccgccggtaccgcagttcaaactcgtcgcctgcctccctcagcgcttgctttactgctgccatggggatcacctcccgggcatccaaactgctgctgtggccagtggctccattcaccgcggggctgtctgccaggtgccaggatgggttgccattgatggcactgggggtctccatctccgattcagtcccttctggggcctcagtcctgttctcttccacatcactaaactgactccagctgtatcctttctgggaaagcttgtaggagagaaagtcaaccaccagctcccggttgct

SEQ ID NO: 24082 - DNA, 213 bp, Homo sapiens
  MAP TO AC019222.3; EXPRESSED IN LUNG, SIGNAL = 1.4; EXPRESSED IN PLACENTA, SIGNAL = 1.7; EXPRESSED IN FETAL LIVER, SIGNAL = 1.7; EXPRESSED IN BONE MARROW, SIGNAL = 1.6; EXPRESSED IN ADULT LIVER, SIGNAL = 1.5; EXPRESSED IN HEART, SIGNAL = 2.3; EXPRESSED IN BRAIN, SIGNAL = 2.2; EST_HUMAN HIT: BE746631.1, EVALUE 1.00e-116; SWISSPROT HIT: P98155, EVALUE 1.00e-35; NT HIT: D16524.1, EVALUE 1.00e-117
tgcctcaattgatgacaaggttggtagacatgttaaaatgatcgacaatgtctataatcctgcagccattgctgttgattgggtgtacaagaccatctactggactgatgcggcttctaagactatttcagtagctaccctagatggaaccaagaggaagttcctgtttaactctgacttgcgagagcctgcctccatagctgtggacccact

SEQ ID NO: 24083 - DNA, 101 bp, Homo sapiens
  MAP TO AC008166.2; EXPRESSED IN ADULT LIVER, SIGNAL = 1.4; EXPRESSED IN PLACENTA, SIGNAL = 1.2; EXPRESSED IN HELA, SIGNAL = 2.6; EXPRESSED IN HEART, SIGNAL = 1.6; EXPRESSED IN BRAIN, SIGNAL = 1.7; EXPRESSED IN BONE MARROW, SIGNAL =   2; EXPRESSED IN LUNG, SIGNAL = 1.2; EXPRESSED IN FETAL LIVER, SIGNAL = 1.9; NT HIT: AL163248.2, EVALUE 1.00e-21; EST_HUMAN HIT: AW303317.1, EVALUE 3.00e-29
gctgcaagctgaggagcaaggagagcctatccaagtcccaaaactgaagaactcagagtccgatgttcaagggcaggaagcatccagcatgggagaaaaat

SEQ ID NO: 24084 - DNA, 144 bp, Homo sapiens
  MAP TO AC010458.2; EXPRESSED IN HEART, SIGNAL =  26; EXPRESSED IN BONE MARROW, SIGNAL = 0.99; EXPRESSED IN ADULT LIVER, SIGNAL =   1; EXPRESSED IN BRAIN, SIGNAL = 1.1; EXPRESSED IN LUNG, SIGNAL = 1.7; EXPRESSED IN PLACENTA, SIGNAL = 0.93; EXPRESSED IN FETAL LIVER, SIGNAL =   1; EST_HUMAN HIT: BF215204.1, EVALUE 4.80e-01; SWISSPROT HIT: P55202, EVALUE 4.60e-01; NT HIT: AL161507.2, EVALUE 1.30e+00
atggactctggaaacctggagatggatgaagaagaattacacctggattggatgtggagagtaaggagaatcagagatgacatcaaaggttccagcttctgcaacctggtagatggaggggtgttctcaggggaggagaacaag

SEQ ID NO: 24085 - DNA, 141 bp, Homo sapiens
  MAP TO AL121890.13; EXPRESSED IN ADULT LIVER, SIGNAL = 2.8; EXPRESSED IN LUNG, SIGNAL = 2.4; EXPRESSED IN PLACENTA, SIGNAL = 1.5; EXPRESSED IN FETAL LIVER, SIGNAL = 2.5; EXPRESSED IN BRAIN, SIGNAL = 2.8; EXPRESSED IN BONE MARROW, SIGNAL = 2.3; EXPRESSED IN HEART, SIGNAL =   2; SWISSPROT HIT: Q00363, EVALUE 3.10e+00; EST_HUMAN HIT: BE967432.1, EVALUE 7.00e-74; NT HIT: gi7661833, EVALUE 6.00e-21
ctagtcatcaaagtctggaatgtcatcataggagtaaccacggtagcctttggatgcatagtaagcgatgcgcaggtggtaaaatccgggtaggaacaccagaatgccaatgatcagcactggaacggcccggtctgcccc

SEQ ID NO: 24086 - DNA, 180 bp, Homo sapiens
  MAP TO AL162390.2; EXPRESSED IN ADULT LIVER, SIGNAL = 1.2; EXPRESSED IN PLACENTA, SIGNAL = 1.1; EXPRESSED IN HEART, SIGNAL = 1.2; EXPRESSED IN BRAIN, SIGNAL = 1.2; EXPRESSED IN BONE MARROW, SIGNAL = 1.4; EXPRESSED IN LUNG, SIGNAL = 1.2; EXPRESSED IN FETAL LIVER, SIGNAL = 1.2; EST_HUMAN HIT: AI968018.1, EVALUE 6.20e-01; SWISSPROT HIT: O13710, EVALUE 7.00e-14; NT HIT: AB011166.1, EVALUE 4.00e-97
ctgattgatttcatcaactactctgaatggacatctatttagctcctgaagtgccatcaagtataacatggtagaaacacttctttcacctccactttgatgatgaggagttaattcatgcagttgagtactacttcgaaatttgactctaattcgaattccatatttatcataatcttc

SEQ ID NO: 24087 - DNA, 153 bp, Homo sapiens
  MAP TO AL133258.13; EXPRESSED IN LUNG, SIGNAL = 2.9; EXPRESSED IN PLACENTA, SIGNAL = 3.7; EXPRESSED IN HELA, SIGNAL = 4.4; EXPRESSED IN HEART, SIGNAL = 3.6; EXPRESSED IN FETAL LIVER, SIGNAL = 2.7; EXPRESSED IN BRAIN, SIGNAL =   3; EXPRESSED IN BONE MARROW, SIGNAL = 2.7; EXPRESSED IN ADULT LIVER, SIGNAL = 3.7; SWISSPROT HIT: P21414, EVALUE 1.00e-12; NT HIT: Z70664.1, EVALUE 3.00e-23
gagctcgggtatcgagtctcagccaagaaggtccagctttgtcttcccacagtgtcctacctaggatacgacataagccaaggaaaaagggcactcaccagtgcccggaaagaagccatcctacgaatccccactcccaccaccaagagacag

SEQ ID NO: 24088 - DNA, 192 bp, Homo sapiens
  MAP TO AC019042.3; EXPRESSED IN ADULT LIVER, SIGNAL = 1.7; EXPRESSED IN FETAL LIVER, SIGNAL = 1.1; EXPRESSED IN BRAIN, SIGNAL = 1.2; EXPRESSED IN LUNG, SIGNAL = 1.4; EXPRESSED IN HEART, SIGNAL = 1.4; EXPRESSED IN PLACENTA, SIGNAL = 1.6; EXPRESSED IN BONE MARROW, SIGNAL = 1.1; SWISSPROT HIT: P08607, EVALUE 6.00e-05; NT HIT: U69273.3, EVALUE 1.80e+00; EST_HUMAN HIT: R44925.1, EVALUE 4.30e-02
gttttgaactctcacactgtgaagatcctggcattccacaatttggatacaagatcagtgaccaaggccactttgctggtagcaccatcatttatggatgcaatccaggctacactctccacggaagtagccttctcaagtgcatgacaggggagagaagggcatgggactatcctctgccttcctgtattg

SEQ ID NO: 24089 - DNA, 266 bp, Homo sapiens
  MAP TO AL161781.2; EXPRESSED IN PLACENTA, SIGNAL = 2.2; EXPRESSED IN ADULT LIVER, SIGNAL = 2.3; EXPRESSED IN BONE MARROW, SIGNAL = 2.6; EXPRESSED IN LUNG, SIGNAL = 2.3; EXPRESSED IN HEART, SIGNAL = 1.9; EXPRESSED IN FETAL LIVER, SIGNAL = 2.3; EXPRESSED IN BRAIN, SIGNAL = 2.8; EST_HUMAN HIT: AW406299.1, EVALUE 2.00e-05; NT HIT: gi11428710, EVALUE 1.00e-94; SWISSPROT HIT: Q02548, EVALUE 8.00e-29
ccacaccccgccagatgcctctgccttcaggaacctggctgggccggtgtggcggtggcaggtgtggtgggcgtgcatcacgaggcgtacctgctcgggcttgatgggctctgtggtggtgaagatgtctgagtagtgctgcctctcaaacacgcggtccagcacctccagctgctgctgtgtgaacaagtctccccgcatctgcttccggaggaagtctctgcccggaagcgagtggccgttcggcaccggagactcctgaatac

SEQ ID NO: 24090 - DNA, 169 bp, Homo sapiens
  MAP TO AC027341.1; EXPRESSED IN LUNG, SIGNAL = 1.6; EXPRESSED IN ADULT LIVER, SIGNAL = 1.9; EXPRESSED IN HELA, SIGNAL = 2.5; EXPRESSED IN BRAIN, SIGNAL = 0.98; EXPRESSED IN PLACENTA, SIGNAL = 1.4; EXPRESSED IN FETAL LIVER, SIGNAL = 1.1; EXPRESSED IN BONE MARROW, SIGNAL = 1.2; EXPRESSED IN HEART, SIGNAL = 1.5; EST_HUMAN HIT: AI914316.1, EVALUE 5.80e-01; NT HIT: gi6755111, EVALUE 9.90e-02
agtaaatctgctcagcagcaaggctaatcttacgttttatatcttctgtgaagtcttctctgcaccccagagcaataagtgggctcctccttctctgaagtttctgagctctctagctagagcttatccatttagtcacatacaacctgctggactgcagacgccgcag

SEQ ID NO: 24091 - DNA, 243 bp, Homo sapiens
  MAP TO AL161781.2; EXPRESSED IN HEART, SIGNAL = 7.5; EXPRESSED IN FETAL LIVER, SIGNAL =  16; EXPRESSED IN BRAIN, SIGNAL = 8.8; EXPRESSED IN BONE MARROW, SIGNAL =  15; EXPRESSED IN ADULT LIVER, SIGNAL =  11; EXPRESSED IN HELA, SIGNAL = 8.8; EXPRESSED IN LUNG, SIGNAL =  13; EXPRESSED IN PLACENTA, SIGNAL =   5; SWISSPROT HIT: P02433, EVALUE 6.00e-33; NT HIT: K03002.1, EVALUE 6.00e-78; EST_HUMAN HIT: F25915.1, EVALUE 4.00e-80
atgtccaacattggttatgggagcaacaaaaagacaaagcacatgctgcccagtagcttacagaagttcctggtccacaacgtcaaggagctggaagtgctgctgaggtgcaacaaatcttactgtgctgagatcgcttacaatgtttcctccaagaaccacaaagcaattgtggaaagagcagcccagctggccatcagactcaccagtcacaaagcaaggctatgcagcaaagaaaatgaa

SEQ ID NO: 24092 - DNA, 120 bp, Homo sapiens
  MAP TO AL135924.5; EXPRESSED IN HELA, SIGNAL = 3.7; EXPRESSED IN LUNG, SIGNAL = 4.2; EXPRESSED IN ADULT LIVER, SIGNAL = 4.5; EXPRESSED IN BONE MARROW, SIGNAL = 3.9; EXPRESSED IN PLACENTA, SIGNAL = 3.7; EXPRESSED IN HEART, SIGNAL = 3.8; EXPRESSED IN FETAL LIVER, SIGNAL = 3.8; EXPRESSED IN BRAIN, SIGNAL = 3.8; SWISSPROT HIT: Q14957, EVALUE 3.10e+00; NT HIT: AJ400821.1, EVALUE 4.10e+00
ttattagaaatgtcataataatcatcatggatataataactgtttacaatgacaattacgggttggaccagtgcatcctccaggcacagattgtggagcagcatgatcctcaccacaact

SEQ ID NO: 24093 - DNA, 192 bp, Homo sapiens
  MAP TO AC016549.4; EXPRESSED IN BONE MARROW, SIGNAL = 4.6; EXPRESSED IN PLACENTA, SIGNAL =   5; EXPRESSED IN ADULT LIVER, SIGNAL = 5.4; EXPRESSED IN FETAL LIVER, SIGNAL = 4.7; EXPRESSED IN BRAIN, SIGNAL = 4.3; EXPRESSED IN LUNG, SIGNAL = 5.4; EXPRESSED IN HELA, SIGNAL = 7.2; EXPRESSED IN HEART, SIGNAL = 4.7; SWISSPROT HIT: O75962, EVALUE 1.00e-31; NT HIT: AF091395.1, EVALUE 1.00e-104; EST_HUMAN HIT: BF335195.1, EVALUE 1.00e-73
aacacatacaccaatgcggataaattactggaagcagcagaacagctggctcagactggggaatgtgaccccgaagagatttatcaggctgcccatcagctggaagaccggattcaagatttcgttcggcgtgttgagcagcgaaagatcctactggacatgtcagtgtcctttcacacccatgtgaaagag

SEQ ID NO: 24094 - DNA, 169 bp, Homo sapiens
  MAP TO AL133227.7; EXPRESSED IN HELA, SIGNAL = 2.4; EXPRESSED IN BONE MARROW, SIGNAL = 1.4; EXPRESSED IN LUNG, SIGNAL = 1.3; EXPRESSED IN PLACENTA, SIGNAL = 1.4; EXPRESSED IN ADULT LIVER, SIGNAL = 1.6; EXPRESSED IN FETAL LIVER, SIGNAL = 1.3; EXPRESSED IN HEART, SIGNAL = 1.7; EXPRESSED IN BRAIN, SIGNAL = 1.5; EST_HUMAN HIT: BF033083.1, EVALUE 2.00e-90; SWISSPROT HIT: P13816, EVALUE 1.70e+00; NT HIT: gi11422109, EVALUE 1.00e-90
cgagttcagccttctgcaggagcatctgggtgagggtccagcgaatgccaccgatgaacgaggcccccagcaccaaggcgaagccctccacgttgaactgtgtggacttgtaggtgaacatgaagagacccccggcgatgaggaggaccaccaggaccagtgccgcgcg

SEQ ID NO: 24095 - DNA, 162 bp, Homo sapiens
  MAP TO AL121903.13; EXPRESSED IN BONE MARROW, SIGNAL = 2.1; EXPRESSED IN LUNG, SIGNAL = 1.9; EXPRESSED IN PLACENTA, SIGNAL =   2; EXPRESSED IN ADULT LIVER, SIGNAL = 1.7; EXPRESSED IN HEART, SIGNAL =   2; EXPRESSED IN FETAL LIVER, SIGNAL = 2.1; EXPRESSED IN BRAIN, SIGNAL = 1.9; SWISSPROT HIT: P55060, EVALUE 2.00e-26; NT HIT: gi11422084, EVALUE 2.00e-86; EST_HUMAN HIT: AW902334.1, EVALUE 3.00e-86
ggattatgcaagttttttgagggacctgtgacaggaatcttctctggttatgttaattccatgctgcaggaatacgcaaaaaatccatctgtcaactggaaacacaaagatgcagccatctacctagtgacatctttggcatcaaaagcccaaacacagaag

SEQ ID NO: 24096 - DNA, 150 bp, Homo sapiens
  MAP TO AL121881.25; EXPRESSED IN BONE MARROW, SIGNAL = 1.2; EXPRESSED IN LUNG, SIGNAL = 1.4; EXPRESSED IN PLACENTA, SIGNAL = 1.4; EXPRESSED IN ADULT LIVER, SIGNAL = 1.7; EXPRESSED IN FETAL LIVER, SIGNAL = 1.3; EXPRESSED IN BRAIN, SIGNAL = 1.2; EXPRESSED IN HEART, SIGNAL = 1.3; SWISSPROT HIT: P54876, EVALUE 9.00e+00; EST_HUMAN HIT: AA372562.1, EVALUE 3.00e-05; NT HIT: AF029365.1, EVALUE 1.30e+00
gcagtggcagtatggtgtaaagagcatctctggaagctggacgagcaagagcagagcagttgtgggtcgctgacctcggtgctgtctcttacaggagaaaggaaaaccagaccaaacttagctgactcccatctgggaagggagcattga

SEQ ID NO: 24097 - DNA, 507 bp, Homo sapiens
  MAP TO AC011815.2; EXPRESSED IN LUNG, SIGNAL = 1.8; EXPRESSED IN PLACENTA, SIGNAL =   2; EXPRESSED IN FETAL LIVER, SIGNAL = 2.1; EXPRESSED IN BRAIN, SIGNAL = 2.3; EXPRESSED IN HEART, SIGNAL = 1.5; EXPRESSED IN ADULT LIVER, SIGNAL = 2.2; EXPRESSED IN HELA, SIGNAL = 2.7; EXPRESSED IN BONE MARROW, SIGNAL = 2.1; NT HIT: M17262.1, EVALUE 5.00e-06; EST_HUMAN HIT: T70393.1, EVALUE 1.00e-102; SWISSPROT HIT: P27918, EVALUE 2.50e-02
gagtgcagagatatccaggttggtccgcagccacaacctgggtggctacagctgcacaaaggaggtgggggatgcaggaagggctcatgcctgctccagcactcctgcctgctttggcactcctgcctgctcccagcctccaagaacacggtctgtagcaaggacttgggtggctgcagttgcacccaggagagcagggctcctgcctgctcctggtctccaagaacacagggaggctcagccagcagccatgacttgggcagctgcagctatgcctggggagctcccacccgccaacttggaaggagctgggctcctgcttgtccccgctccctctggctctgtgaagctcacagcatgggcagagcctcctggctgcagccagcatcttggcagtggccactccagatggtccagatggcccactgttgccatcaacaacactccagcctgggcaacagagtgagagactccatctcaaaaaaagagaaaaaggaaaaggaataa

SEQ ID NO: 24098 - DNA, 320 bp, Homo sapiens
  MAP TO AC019221.3; EXPRESSED IN LUNG, SIGNAL =   1; EXPRESSED IN ADULT LIVER, SIGNAL = 1.2; EXPRESSED IN HEART, SIGNAL = 1.2; EXPRESSED IN BRAIN, SIGNAL = 1.2; EXPRESSED IN PLACENTA, SIGNAL = 1.3; EXPRESSED IN FETAL LIVER, SIGNAL = 1.2; EXPRESSED IN BONE MARROW, SIGNAL = 1.2; EST_HUMAN HIT: AA043738.1, EVALUE 9.00e-51; SWISSPROT HIT: P22276, EVALUE 2.70e+00; NT HIT: X57926.1, EVALUE 7.80e-01
ctgttatcatcatgagaatcctgaattaaaattgagcttccatttctgagcccttgctccctgaacgtcttcctcatgtcttccttggggatggccgtccaaccctccccacctggacatccagcactgttgatgaagatgacacctgctgggattgctaaggctgtgaggacagtgcccacttctgcattagctggaaagacatgtggagattctatcacctgacaacacttttctccatcactgcttgtgtctagatgaagaacatttaaaagtagaggttcgcagtcaataccagtttgaatgtggactccaccaac

SEQ ID NO: 24099 - DNA, 124 bp, Homo sapiens
  MAP TO AL133324.7; EXPRESSED IN PLACENTA, SIGNAL = 7.4; EXPRESSED IN ADULT LIVER, SIGNAL = 8.5; EXPRESSED IN FETAL LIVER, SIGNAL = 8.2; EXPRESSED IN HEART, SIGNAL = 7.8; EXPRESSED IN BRAIN, SIGNAL = 6.8; EXPRESSED IN HELA, SIGNAL = 8.5; EXPRESSED IN LUNG, SIGNAL = 8.3; EXPRESSED IN BONE MARROW, SIGNAL = 7.1; EST_HUMAN HIT: R98930.1, EVALUE 9.00e-64; NT HIT: gi11420555, EVALUE 6.00e-64; SWISSPROT HIT: O68040, EVALUE 2.00e-06
ggaaaatcatgaggcgagtgcttcggaagattgctcagaatgaccatgacctcggggacatgtctactgtggctgacccatctgtcatcagtcacctcttcagccaccgctgcctgaccatcca

SEQ ID NO: 24100 - DNA, 96 bp, Homo sapiens
  MAP TO AC009416.2; EXPRESSED IN LUNG, SIGNAL = 1.1; EXPRESSED IN PLACENTA, SIGNAL = 1.2; EXPRESSED IN ADULT LIVER, SIGNAL = 1.3; EXPRESSED IN FETAL LIVER, SIGNAL = 0.94; EXPRESSED IN BONE MARROW, SIGNAL = 0.78; EXPRESSED IN HEART, SIGNAL = 1.5; EXPRESSED IN BRAIN, SIGNAL =   1; SWISSPROT HIT: P55149, EVALUE 5.50e+00; EST_HUMAN HIT: BF316129.1, EVALUE 1.90e-02
atgaacacacatacaaacatcaaacaacaaaaagacaatctgtggagtaagagaggacgagtggaggtggtggtgagggggacattaaaaacagag

SEQ ID NO: 24101 - DNA, 135 bp, Homo sapiens
  MAP TO AL121673.27; EXPRESSED IN LUNG, SIGNAL =  11; EXPRESSED IN PLACENTA, SIGNAL =  11; EXPRESSED IN ADULT LIVER, SIGNAL = 9.8; EXPRESSED IN HEART, SIGNAL =  10; EXPRESSED IN FETAL LIVER, SIGNAL = 9.9; EXPRESSED IN BRAIN, SIGNAL =  10; EXPRESSED IN BONE MARROW, SIGNAL =  11; EXPRESSED IN HELA, SIGNAL = 3.3; EST_HUMAN HIT: AW859223.1, EVALUE 4.50e-01; SWISSPROT HIT: O83809, EVALUE 2.70e-01; NT HIT: AF066860.1, EVALUE 1.20e+00
ccccttccctcccagcagcttctgggtgccacctccccggcctttcctcaggcagatgttggagcccgagtcagggagactgtgggtggtctgcttgttctccagctccagcagaggggatggtggggtctgcat

SEQ ID NO: 24102 - DNA, 160 bp, Homo sapiens
  MAP TO AC022308.7; EXPRESSED IN PLACENTA, SIGNAL = 2.7; EXPRESSED IN ADULT LIVER, SIGNAL = 2.8; EXPRESSED IN FETAL LIVER, SIGNAL =   2; EXPRESSED IN BONE MARROW, SIGNAL = 2.2; EXPRESSED IN HEART, SIGNAL = 2.2; EXPRESSED IN LUNG, SIGNAL = 2.7; EXPRESSED IN BRAIN, SIGNAL =   2; SWISSPROT HIT: P37928, EVALUE 2.70e-01; EST_HUMAN HIT: R34984.1, EVALUE 8.50e+00; NT HIT: AL161533.2, EVALUE 1.40e+00
atgcctcttacctacaatatggacaaaatgaaaataaatgagcaaaatgtgtgctttaatttaaaattgcctttaactattctgccaaaccaatggaagcttcggattgatgttttacccaggccaatcatcagtaaaaataacaggatgctgtataacg

SEQ ID NO: 24103 - DNA, 123 bp, Homo sapiens
  MAP TO AC018742.2; EXPRESSED IN LUNG, SIGNAL = 2.8; EXPRESSED IN ADULT LIVER, SIGNAL = 2.7; EXPRESSED IN HELA, SIGNAL = 3.9; EXPRESSED IN FETAL LIVER, SIGNAL = 2.3; EXPRESSED IN BRAIN, SIGNAL = 2.3; EXPRESSED IN PLACENTA, SIGNAL = 2.8; EXPRESSED IN HEART, SIGNAL = 2.5; EXPRESSED IN BONE MARROW, SIGNAL = 2.2; SWISSPROT HIT: P22297, EVALUE 2.40e+00; NT HIT: AF115382.1, EVALUE 2.70e-01; EST_HUMAN HIT: AI806220.1, EVALUE 1.00e-04
agttctggaatctgaactctgaaatcaaggtgccggtctggttgttttctggttggtctcttcctggcctgcagatggctggctgccttctagctatgtcctcttgtgacctttcactggtgc

SEQ ID NO: 24104 - DNA, 162 bp, Homo sapiens
  MAP TO AL121889.3; EXPRESSED IN LUNG, SIGNAL =  13; EXPRESSED IN PLACENTA, SIGNAL =  12; EXPRESSED IN HELA, SIGNAL =  20; EXPRESSED IN HEART, SIGNAL =  12; EXPRESSED IN FETAL LIVER, SIGNAL =  12; EXPRESSED IN BONE MARROW, SIGNAL =  11; EXPRESSED IN ADULT LIVER, SIGNAL =  14; EXPRESSED IN BRAIN, SIGNAL =  11; SWISSPROT HIT: P82713, EVALUE 3.00e+00; EST_HUMAN HIT: BE741678.1, EVALUE 2.20e+00; NT HIT: gi7304952, EVALUE 5.80e+00
accctttgtccagaaaattcctgacgtaatggatgggcctcatcatcccgagaaacccagagtcagagtcaggaataagcaggtccttgaggaaatgaggaatgggatgaagaagaatgttcaggagggagagcatggccacaagggtgactgtggcctgcc

SEQ ID NO: 24105 - DNA, 89 bp, Homo sapiens
  MAP TO AC011790.4; EXPRESSED IN PLACENTA, SIGNAL = 1.6; EXPRESSED IN BONE MARROW, SIGNAL = 1.1; EXPRESSED IN LUNG, SIGNAL = 1.6; EXPRESSED IN ADULT LIVER, SIGNAL = 1.2; EXPRESSED IN HEART, SIGNAL = 1.7; EXPRESSED IN FETAL LIVER, SIGNAL = 1.1; EXPRESSED IN BRAIN, SIGNAL = 1.2; SWISSPROT HIT: P18519, EVALUE 3.20e+00; EST_HUMAN HIT: AV725189.1, EVALUE 1.10e+00; NT HIT: M73258.1, EVALUE 1.80e-01
gtttgccataagtgttcttgctgcgaatgggatgagaatggatttggttgtatgtgtggttgcagacaatctacaggctgtgaacaaag

SEQ ID NO: 24106 - DNA, 384 bp, Homo sapiens
  MAP TO AL121988.10; EXPRESSED IN HELA, SIGNAL = 2.6; EXPRESSED IN LUNG, SIGNAL = 3.4; EXPRESSED IN PLACENTA, SIGNAL = 3.1; EXPRESSED IN ADULT LIVER, SIGNAL = 3.2; EXPRESSED IN FETAL LIVER, SIGNAL = 2.8; EXPRESSED IN BRAIN, SIGNAL = 2.8; EXPRESSED IN HEART, SIGNAL =   3; EXPRESSED IN BONE MARROW, SIGNAL = 2.9; NT HIT: AF099731.1, EVALUE 0.00e+00; EST_HUMAN HIT: BE712515.1, EVALUE 0.00e+00; SWISSPROT HIT: O95377, EVALUE 3.00e-73
caggtagatgagctccacgaggttgagcaggatgcagatggcagctgtggccaccatgaagagggtgaaaatgttcttctctgagggcttggagatgaagcagtccactatattgggacatggatctgcgtggcacttgaccacaggagggaggatatatttggggtagaatgagtggaacacatagagaaaggcgatgtccacgctcgccttgaacactaggctgcagacatatgtccaccagagcccaccccgcttcttgccggggttcaggtagaggcgcccactgttctccccatgggcttctcggtgcctcttctcctgaacctcccggtaggccacgtgcatgaccacgagcagtgaggggcatgtcaccaggataag

SEQ ID NO: 24107 - DNA, 111 bp, Homo sapiens
  MAP TO AL121894.14; EXPRESSED IN LUNG, SIGNAL = 1.5; EXPRESSED IN ADULT LIVER, SIGNAL = 1.4; EXPRESSED IN HEART, SIGNAL = 1.5; EXPRESSED IN BRAIN, SIGNAL = 1.5; EXPRESSED IN PLACENTA, SIGNAL = 1.5; EXPRESSED IN FETAL LIVER, SIGNAL = 1.7; EXPRESSED IN BONE MARROW, SIGNAL = 1.5; NT HIT: gi11434344, EVALUE 3.80e+00; EST_HUMAN HIT: BE122701.1, EVALUE 3.60e-01; SWISSPROT HIT: O88969, EVALUE 1.00e-04
gtgacagatagtttggagtactatattgaggtcaaaattgcccgaacaatttgcaagaaaatttcagaagatgaaaactgtgcatttcaagaggatcccaaaatgcaaaag

SEQ ID NO: 24108 - DNA, 345 bp, Homo sapiens
  MAP TO AC010477.4; EXPRESSED IN LUNG, SIGNAL = 9.9; EXPRESSED IN PLACENTA, SIGNAL = 4.4; EXPRESSED IN ADULT LIVER, SIGNAL = 4.5; EXPRESSED IN HEART, SIGNAL =  16; EXPRESSED IN FETAL LIVER, SIGNAL = 5.4; EXPRESSED IN BRAIN, SIGNAL = 6.2; EXPRESSED IN BONE MARROW, SIGNAL = 7.2; SWISSPROT HIT: P53458, EVALUE 2.00e-44; NT HIT: gi11038618, EVALUE 3.00e-71; EST_HUMAN HIT: BE019900.1, EVALUE 8.00e-73
tcaaacatgatctgagtcatcttctctgttggccttggggttcagaggggcctcagtcagcagcaacatgtgctcctccagggccatgcacagctccttgtagaaggtgtgatgccagatcttctccatgtcgtcccagttagtgacgatgccatgctcgatggggtacctcagggtcaggatgccatgcttgctctgggctttgtcattcacgtaggaatccttctggctcatgccccccttcacgtgctggtgccgggggcaccagatgatggaggggaaaacagctcccccagcaaagccagctttgcacatgctagagccattgtcaatgagtgccgccat

SEQ ID NO: 24109 - DNA, 130 bp, Homo sapiens
  MAP TO AC021973.2; EXPRESSED IN LUNG, SIGNAL = 3.5; EXPRESSED IN PLACENTA, SIGNAL = 3.7; EXPRESSED IN ADULT LIVER, SIGNAL = 3.5; EXPRESSED IN HEART, SIGNAL = 2.8; EXPRESSED IN FETAL LIVER, SIGNAL = 3.9; EXPRESSED IN BRAIN, SIGNAL = 3.3; EXPRESSED IN HELA, SIGNAL = 2.5; EXPRESSED IN BONE MARROW, SIGNAL =   4; SWISSPROT HIT: P10267, EVALUE 1.00e-17; NT HIT: AB026898.1, EVALUE 4.00e-34; EST_HUMAN HIT: AW814393.1, EVALUE 6.00e-62
gtgtacccaacagctccgaagagacagcgaccatcgagaacgggccatgatgacgatggcggttttgttgaaaagaaaagggggaaatgtggggaaaagcaagagagatcagattgttactgtgtctgtg

SEQ ID NO: 24110 - DNA, 227 bp, Homo sapiens
  MAP TO AC018672.2; EXPRESSED IN LUNG, SIGNAL = 1.1; EXPRESSED IN PLACENTA, SIGNAL = 1.6; EXPRESSED IN ADULT LIVER, SIGNAL = 1.3; EXPRESSED IN FETAL LIVER, SIGNAL = 1.5; EXPRESSED IN HEART, SIGNAL = 1.6; EXPRESSED IN BRAIN, SIGNAL = 1.5; EXPRESSED IN HELA, SIGNAL = 2.7; EXPRESSED IN BONE MARROW, SIGNAL = 1.4; NT HIT: Y10196.1, EVALUE 1.40e-01; EST_HUMAN HIT: AA736979.1, EVALUE 2.00e-01; SWISSPROT HIT: P19176, EVALUE 5.20e+00
ctgactaaattttggtcaaagaggaagtctttgtcacagtgaaggcagagttctttcaaccacactaatatacttttaacaacgaggcctagagttttactcttcagcaccaggcctggaggtattccgtcagaaatagcatgatgctgttgaatacaagaaactatagtaaggttaagatcttctgatccaatatttgccttttctgactgcatgtgtgagacata

SEQ ID NO: 24111 - DNA, 294 bp, Homo sapiens
  MAP TO AC011218.4; EXPRESSED IN ADULT LIVER, SIGNAL =   1; EXPRESSED IN HEART, SIGNAL = 1.3; EXPRESSED IN BRAIN, SIGNAL = 1.1; EXPRESSED IN FETAL LIVER, SIGNAL = 0.99; EXPRESSED IN PLACENTA, SIGNAL =   1; EXPRESSED IN BONE MARROW, SIGNAL = 0.96; NT HIT: AF213884.1, EVALUE 2.00e-44; EST_HUMAN HIT: AU138590.1, EVALUE 8.00e-51; SWISSPROT HIT: P08548, EVALUE 5.00e-20
atgtgccatataaacagaattaaaaacaaaaataacaagatcatctcaatacatgcagaaaaaggatttgacaaaatccagcatccctttatgcctaaaaccctcagcaaaatcgacatagaaaaagcatttgacaaaatccagaatccctttatgattaaaaccctcagcaaaatcaacatagaagggacataccttaaggtaataaaagctatatatgacaaacacacagccaacattacactgaatggggaaaagttgaaagcattccccctgagaattggaacaagacaa

SEQ ID NO: 24112 - DNA, 216 bp, Homo sapiens
  MAP TO AL158198.3; EXPRESSED IN LUNG, SIGNAL = 4.1; EXPRESSED IN PLACENTA, SIGNAL = 3.8; EXPRESSED IN ADULT LIVER, SIGNAL = 4.7; EXPRESSED IN HEART, SIGNAL = 4.1; EXPRESSED IN FETAL LIVER, SIGNAL = 3.8; EXPRESSED IN BRAIN, SIGNAL = 4.3; EXPRESSED IN HELA, SIGNAL = 2.4; EXPRESSED IN BONE MARROW, SIGNAL = 4.1; SWISSPROT HIT: P08547, EVALUE 2.00e-16; NT HIT: AL163252.2, EVALUE 3.00e-24; EST_HUMAN HIT: AI469176.1, EVALUE 1.00e-21
caatgggcaaaggatctgaatagacctttctcaaaagaagacatacaaatggccagcagatacgtgcagaaatgctcaacatctctaatcatcagaaacatgcacattaaaaccacaatgagacaacacctcacgtgtgttagaatgacaattatcaaaaagatgaaagataacaagtgcttggagagcttgtggagaaaagggaacgccagcaca

SEQ ID NO: 24113 - DNA, 334 bp, Homo sapiens
  MAP TO AL139819.2; EXPRESSED IN HELA, SIGNAL = 4.7; EXPRESSED IN LUNG, SIGNAL =   3; EXPRESSED IN BONE MARROW, SIGNAL = 3.4; EXPRESSED IN PLACENTA, SIGNAL =   4; EXPRESSED IN ADULT LIVER, SIGNAL = 4.3; EXPRESSED IN HEART, SIGNAL = 3.9; EXPRESSED IN FETAL LIVER, SIGNAL = 3.8; EXPRESSED IN BRAIN, SIGNAL = 3.1; SWISSPROT HIT: Q13563, EVALUE 4.00e-21; NT HIT: AF153466.1, EVALUE 0.00e+00; EST_HUMAN HIT: BE838852.1, EVALUE 3.10e-01
atattcaagtacatcagcttcaacaaaaccatgacccagctctcctccacgctggcccgctgtgccaaggacatcctgggcttcgccgtcatgttcttcattgttttcttcgcctatgcccaactcggctacctgcttttcgggacccaagtggaaaactttagcactttcatcaagtgcatgtgtgtgtcctgtccccttcactcctccctggcccctcaccctccagctccacgggtgtatgtatccttggggaagatgggtacgtgcgtgtctgcatgtctgtgttcaaagcatctgtgtgagggtctccagaagccctggtgtgtgtgct

SEQ ID NO: 24114 - DNA, 117 bp, Homo sapiens
  MAP TO AC010397.3; EXPRESSED IN LUNG, SIGNAL = 1.5; EXPRESSED IN PLACENTA, SIGNAL = 0.78; EXPRESSED IN FETAL LIVER, SIGNAL = 0.98; EXPRESSED IN BONE MARROW, SIGNAL = 1.2; EXPRESSED IN ADULT LIVER, SIGNAL = 0.85; EXPRESSED IN HEART, SIGNAL = 1.7; EXPRESSED IN BRAIN, SIGNAL = 0.96; NT HIT: gi11417118, EVALUE 8.00e-60; EST_HUMAN HIT: AU131130.1, EVALUE 1.00e-59
gatctttcctcagaagaacgctttcatgttgaattacactttagtccgggagccaaaggttgtgaagaagacaaaaatttgccatctggctatggatatagaccagcttccagagag

SEQ ID NO: 24115 - DNA, 212 bp, Homo sapiens
  MAP TO AC024196.2; EXPRESSED IN LUNG, SIGNAL = 4.3; EXPRESSED IN PLACENTA, SIGNAL = 4.2; EXPRESSED IN FETAL LIVER, SIGNAL = 5.1; EXPRESSED IN ADULT LIVER, SIGNAL = 4.3; EXPRESSED IN HEART, SIGNAL = 4.5; EXPRESSED IN BRAIN, SIGNAL = 3.7; EXPRESSED IN BONE MARROW, SIGNAL = 3.9; EST_HUMAN HIT: AI684004.1, EVALUE 1.90e-01; SWISSPROT HIT: Q01260, EVALUE 1.50e+00; NT HIT: AF023129.1, EVALUE 1.30e-01
tgcactttgagcaggtttcaggggaagagaggaagcagggagagggcagtcttatcagggatgaggtgggagcctcactagccccactaaagagagttgagaaagaggtcttagcaggggtcacagaaaaccagaagggggagagtgagaccaaggtgacaggacaggccaaggctaacgagattaactatgacaaaagtgacaggaggagg

SEQ ID NO: 24116 - DNA, 103 bp, Homo sapiens
  MAP TO AL135922.4; EXPRESSED IN BONE MARROW, SIGNAL = 1.7; EXPRESSED IN ADULT LIVER, SIGNAL = 1.3; EXPRESSED IN HELA, SIGNAL = 2.9; EXPRESSED IN HEART, SIGNAL = 1.9; EXPRESSED IN LUNG, SIGNAL = 1.3; EXPRESSED IN PLACENTA, SIGNAL = 1.8; EXPRESSED IN FETAL LIVER, SIGNAL = 1.8; EXPRESSED IN BRAIN, SIGNAL = 1.7; SWISSPROT HIT: P21128, EVALUE 4.20e+00; NT HIT: M65235.1, EVALUE 1.00e-03; EST_HUMAN HIT: AA847898.1, EVALUE 6.00e-12
ggaaggtcttcaggggcagtaacactcatggtgctgttgtctcctagaataacaatgcccttttctagaataccccctgaatcaagacctgctctgtggctat

SEQ ID NO: 24117 - DNA, 193 bp, Homo sapiens; identical to SEQ ID NO: 19946
  MAP TO AC007325.51; EXPRESSED IN LUNG, SIGNAL =  21; EXPRESSED IN ADULT LIVER, SIGNAL =  21; EXPRESSED IN BRAIN, SIGNAL =  17; EXPRESSED IN HEART, SIGNAL =  18; EXPRESSED IN HELA, SIGNAL =  17; EXPRESSED IN PLACENTA, SIGNAL =  19; EXPRESSED IN FETAL LIVER, SIGNAL =  16; EXPRESSED IN BONE MARROW, SIGNAL =  18; SWISSPROT HIT: P19440, EVALUE 1.00e-30; EST_HUMAN HIT: AI906419.1, EVALUE 3.00e-80; NT HIT: gi9845492, EVALUE 1.00e-101

SEQ ID NO: 24118 - DNA, 152 bp, Homo sapiens
  MAP TO AL136984.7; EXPRESSED IN HELA, SIGNAL = 2.6; EXPRESSED IN LUNG, SIGNAL = 2.7; EXPRESSED IN PLACENTA, SIGNAL =   3; EXPRESSED IN ADULT LIVER, SIGNAL = 2.7; EXPRESSED IN BONE MARROW, SIGNAL = 2.9; EXPRESSED IN HEART, SIGNAL = 2.9; EXPRESSED IN FETAL LIVER, SIGNAL = 2.7; EXPRESSED IN BRAIN, SIGNAL =   3; EST_HUMAN HIT: AA774719.1, EVALUE 5.00e-04; SWISSPROT HIT: Q05620, EVALUE 4.60e-01; NT HIT: D85606.1, EVALUE 9.00e-05
tcctttaaaatgttagagcatgtctctcctgctccagatcttcccacggtttcccattttactcggagtaaatctccgagacatgctcccacctcagggcctttacacttgctgtctcgtttgcctaggatgcttttctcacagatacccat

SEQ ID NO: 24119 - DNA, 127 bp, Homo sapiens
  MAP TO AC025588.1; EXPRESSED IN HELA, SIGNAL = 7.4; EXPRESSED IN BONE MARROW, SIGNAL = 5.5; EXPRESSED IN PLACENTA, SIGNAL = 5.5; EXPRESSED IN ADULT LIVER, SIGNAL = 6.6; EXPRESSED IN FETAL LIVER, SIGNAL = 5.1; EXPRESSED IN BRAIN, SIGNAL = 5.1; EXPRESSED IN LUNG, SIGNAL = 6.4; EXPRESSED IN HEART, SIGNAL =   6; SWISSPROT HIT: Q02975, EVALUE 4.00e-10; NT HIT: gi11426566, EVALUE 1.00e-65; EST_HUMAN HIT: AI191716.1, EVALUE 1.00e-65
gtgtctgtgacctttgatgatgtggctgtgactttcaccaaggaggagtgggggcagctggacctagctcagcggaccctgtaccaggaggtgatgctggaaaactgtgggctcctggtgtctctgg

SEQ ID NO: 24120 - DNA, 144 bp, Homo sapiens
  MAP TO AC018742.2; EXPRESSED IN ADULT LIVER, SIGNAL = 3.1; EXPRESSED IN HEART, SIGNAL = 2.9; EXPRESSED IN BONE MARROW, SIGNAL = 3.1; EXPRESSED IN LUNG, SIGNAL = 3.3; EXPRESSED IN PLACENTA, SIGNAL = 3.3; EXPRESSED IN FETAL LIVER, SIGNAL = 2.8; EXPRESSED IN BRAIN, SIGNAL = 2.8; NT HIT: AF120982.1, EVALUE 9.00e-05; EST_HUMAN HIT: AA024397.1, EVALUE 1.00e-04; SWISSPROT HIT: O46409, EVALUE 1.10e-02
catattggcctgggcagtaaccaggcctgcagctcctcctctggcaaccactggatctctttcatgagcatctccaactgctgtgttaggtacatgtttagctccatgaggaagggcaccagcttcttctgtatggtgacgcat

SEQ ID NO: 24121 - DNA, 200 bp, Homo sapiens
  MAP TO AL139347.2; EXPRESSED IN LUNG, SIGNAL = 1.1; EXPRESSED IN ADULT LIVER, SIGNAL = 1.3; EXPRESSED IN HEART, SIGNAL =   2; EXPRESSED IN BRAIN, SIGNAL = 0.88; EXPRESSED IN BONE MARROW, SIGNAL = 1.1; EXPRESSED IN PLACENTA, SIGNAL =   1; EXPRESSED IN FETAL LIVER, SIGNAL = 1.3; EST_HUMAN HIT: BF690757.1, EVALUE 3.00e-49; NT HIT: gi4758789, EVALUE 2.00e-52; SWISSPROT HIT: O43920, EVALUE 3.00e-18
caccaattccatgtgcacattctctccattctttttcaaaaggatggtgtcgagcaggaatcttgtagggctgttcagcactttggattgtcaaccacccatctgtgttaaggccaaaccttttctgcacgtccaagaaaggcatggcgttctgatgctcgtgcccttgtctcttctctggccgctgcttcaggacgatt

SEQ ID NO: 24122 - DNA, 140 bp, Homo sapiens
  MAP TO AL136365.3; EXPRESSED IN PLACENTA, SIGNAL = 1.4; EXPRESSED IN ADULT LIVER, SIGNAL = 0.9; EXPRESSED IN BRAIN, SIGNAL = 1.1; EXPRESSED IN BONE MARROW, SIGNAL = 1.2; EXPRESSED IN FETAL LIVER, SIGNAL = 1.2; EXPRESSED IN HEART, SIGNAL = 1.5; NT HIT: X74208.1, EVALUE 8.00e-02; SWISSPROT HIT: P30516, EVALUE 5.30e+00
gtggtcctgctatggaatgccctccacttccctcctagagggaggaaagaaccgaggcaggcagagacaggcacttgtgaggactcagcctttgtaagggattcccgcaaaggccaagaggatccttcaacgtgtgtggg

SEQ ID NO: 24123 - DNA, 234 bp, Homo sapiens
  MAP TO AC011260.4; EXPRESSED IN HELA, SIGNAL = 3.4; EXPRESSED IN HEART, SIGNAL = 2.1; EXPRESSED IN BONE MARROW, SIGNAL = 1.8; EXPRESSED IN LUNG, SIGNAL = 2.2; EXPRESSED IN PLACENTA, SIGNAL = 2.2; EXPRESSED IN ADULT LIVER, SIGNAL = 2.5; EXPRESSED IN FETAL LIVER, SIGNAL = 1.9; EXPRESSED IN BRAIN, SIGNAL = 1.7; SWISSPROT HIT: Q9Z8U7, EVALUE 2.50e+00; EST_HUMAN HIT: BE813654.1, EVALUE 8.30e-01; NT HIT: U20608.1, EVALUE 3.60e-02
aatgtcaaagtgttttctgtggaagaaaaattctactgtgggcaaatgtatgggaagacatttaatggtacttctcaagctgttatccccctactcacaacttgcagcttcccagtgggcaccgtcttgggcatcaacctacctcctggtaaatcagccaagctcagcccctccaaatcttattataaacccatggcctgctgtgtcctttcctctggctgtagaggaggtggg

SEQ ID NO: 24124 - DNA, 181 bp, Homo sapiens
  MAP TO AL162387.2; EXPRESSED IN LUNG, SIGNAL = 2.4; EXPRESSED IN PLACENTA, SIGNAL = 6.3; EXPRESSED IN ADULT LIVER, SIGNAL = 8.2; EXPRESSED IN HELA, SIGNAL = 7.9; EXPRESSED IN HEART, SIGNAL = 4.7; EXPRESSED IN FETAL LIVER, SIGNAL = 4.3; EXPRESSED IN BRAIN, SIGNAL = 4.2; EXPRESSED IN BONE MARROW, SIGNAL = 4.2; SWISSPROT HIT: P37926, EVALUE 5.90e-01; EST_HUMAN HIT: BF036331.1, EVALUE 1.00e-02
cctgcaggcccaggtacaaaccctcagccacaaacagagaccctgtcttgcgcatgtggccaaatgcaggcatccaggccacatgtgtgtgcctgaatgtgtggcacaggcctgcccaggagcacagccaggcacacacatggacagtgtcctggggtagcttcttccgccggccccccat

SEQ ID NO: 24125 - DNA, 94 bp, Homo sapiens
  MAP TO AL136968.3; EXPRESSED IN BRAIN, SIGNAL = 8.4; EXPRESSED IN LUNG, SIGNAL =  11; EXPRESSED IN PLACENTA, SIGNAL = 3.1; EXPRESSED IN ADULT LIVER, SIGNAL = 9.8; EXPRESSED IN HELA, SIGNAL = 6.4; EXPRESSED IN FETAL LIVER, SIGNAL =  17; EXPRESSED IN HEART, SIGNAL = 6.7; EXPRESSED IN BONE MARROW, SIGNAL =  20; EST_HUMAN HIT: AV758634.1, EVALUE 3.00e-32; SWISSPROT HIT: P49207, EVALUE 4.00e-08; NT HIT: gi11437215, EVALUE 4.00e-30
cccgtgcatgtgccttcaacactttcacaacaattttctgctcctcgataaggaaagcgcccttgatcctgtcacagacacatttagcacacat

SEQ ID NO: 24126 - DNA, 153 bp, Homo sapiens
  MAP TO AC025738.1; EXPRESSED IN LUNG, SIGNAL = 1.6; EXPRESSED IN PLACENTA, SIGNAL = 1.6; EXPRESSED IN ADULT LIVER, SIGNAL = 1.9; EXPRESSED IN HEART, SIGNAL = 1.6; EXPRESSED IN FETAL LIVER, SIGNAL = 1.4; EXPRESSED IN BONE MARROW, SIGNAL = 1.7; EXPRESSED IN BRAIN, SIGNAL = 1.8; SWISSPROT HIT: P11369, EVALUE 7.00e-08; NT HIT: AF131205.1, EVALUE 1.00e-06; EST_HUMAN HIT: BE149425.1, EVALUE 4.00e-11
atgggctacagaagaaaaatcgtgatcatatcaatggaagcagaagaagtatttgacaaaattcaacatccattcatgatgaaagtgttcagagaaataggaatagagggaaacttcctctactcaataaagaacatctacaaaaatgtatag

SEQ ID NO: 24127 - DNA, 482 bp, Homo sapiens
  MAP TO AC008103.27; EXPRESSED IN BONE MARROW, SIGNAL = 2.5; EXPRESSED IN LUNG, SIGNAL = 1.3; EXPRESSED IN PLACENTA, SIGNAL = 0.85; EXPRESSED IN ADULT LIVER, SIGNAL = 1.3; EXPRESSED IN BRAIN, SIGNAL = 1.5; EXPRESSED IN HEART, SIGNAL =  12; EXPRESSED IN FETAL LIVER, SIGNAL =   2; NT HIT: gi11417834, EVALUE 0.00e+00; EST_HUMAN HIT: AL042278.1, EVALUE 0.00e+00; SWISSPROT HIT: P52591, EVALUE 6.00e-07
atggactctctgtggggcccaggagccgggagtcacccctttggggtccacaacacccggctgtccccagacttgtgtccagggaagatagtgttgagggccctcaaggagagcggggcagggatgcctgagcaggacaaggaccctagagtccaagagaatcctggtgatcagagaagggtccccgaggtcaccggggatgcaccgtctgcatttcggcccctgcgggacaatagaggcctctctccctttgtgcccgggcccgggcctctgcagacagacctccatgcccagaggtcagaaatcagatataaccagacatcccagacctcctggacgagctcctgcaccaaccgaaatgccatctccagctcctacagctccacgggaggcttgccggggctaaagcggaggagggggccagcctcatcccactgccagctgaccctcagttcctcaaagacagtgagtgaggacaggcc

SEQ ID NO: 24128 - DNA, 138 bp, Homo sapiens
  MAP TO AC011930.3; EXPRESSED IN PLACENTA, SIGNAL = 3.8; EXPRESSED IN LUNG, SIGNAL = 2.7; EXPRESSED IN ADULT LIVER, SIGNAL = 3.1; EXPRESSED IN FETAL LIVER, SIGNAL = 2.9; EXPRESSED IN BRAIN, SIGNAL = 3.8; EXPRESSED IN BONE MARROW, SIGNAL = 3.6; EXPRESSED IN HELA, SIGNAL = 2.6; EXPRESSED IN HEART, SIGNAL = 3.1; SWISSPROT HIT: Q37600, EVALUE 3.10e+00; NT HIT: Z32850.1, EVALUE 1.20e+00
agtcagcaccatgtggatgttgccaaggtttatcacttacaccctccagagtggtggcccaagctgtacctgggcccacttgaccacagcagggagctaaggagctctgtgctggaatgcatggagcagagacttgag

SEQ ID NO: 24129 - DNA, 247 bp, Homo sapiens
  MAP TO AL121935.12; EXPRESSED IN PLACENTA, SIGNAL = 1.7; EXPRESSED IN LUNG, SIGNAL = 2.4; EXPRESSED IN BONE MARROW, SIGNAL = 2.2; EXPRESSED IN BRAIN, SIGNAL = 2.3; EXPRESSED IN FETAL LIVER, SIGNAL = 2.5; EXPRESSED IN HEART, SIGNAL = 2.1; EXPRESSED IN HELA, SIGNAL =   3; EXPRESSED IN ADULT LIVER, SIGNAL = 2.3; SWISSPROT HIT: P25536, EVALUE 1.60e+00; EST_HUMAN HIT: BE544561.1, EVALUE 1.40e-02
gacctatcctctggccacttctgaagtgtcacttttccagcttcagtctgtccttctgctttgtaaacatgagcccaacatcccagcagttccatcggcgtctctgggtttaattacaacctctccatgcaagaccgttcctgcatctcttgctaagccccctctttatgactcaatagtggtaacttccacccccatctctaccaccacgacaacaatcataattacaaagctgccactgtgcacc

SEQ ID NO: 24130 - DNA, 203 bp, Homo sapiens
  MAP TO AC016549.4; EXPRESSED IN PLACENTA, SIGNAL = 2.2; EXPRESSED IN BONE MARROW, SIGNAL = 1.1; EXPRESSED IN LUNG, SIGNAL = 1.6; EXPRESSED IN ADULT LIVER, SIGNAL = 1.4; EXPRESSED IN HEART, SIGNAL = 1.2; EXPRESSED IN BRAIN, SIGNAL = 1.1; EXPRESSED IN FETAL LIVER, SIGNAL = 1.1; SWISSPROT HIT: O75962, EVALUE 2.00e-25; EST_HUMAN HIT: AW860431.1, EVALUE 4.00e-67; NT HIT: gi6005921, EVALUE 8.00e-80
gtctgcagcgtcctcgagagcctggaacaggagtacaagagagaagaagactggtgtggcggggcggataagctgggcccaaactctgagacggaccacgtgacgcccatgatcagcaagcacctggagcagaaggaggcattcctgaaggtaggggcagcgctgcgggacagtgcacccatcagaggcttcctgcctgccag

SEQ ID NO: 24131 - DNA, 116 bp, Homo sapiens
  MAP TO AC012207.5; EXPRESSED IN LUNG, SIGNAL = 1.2; EXPRESSED IN PLACENTA, SIGNAL = 1.2; EXPRESSED IN HEART, SIGNAL = 1.3; EXPRESSED IN BRAIN, SIGNAL = 1.2; EXPRESSED IN BONE MARROW, SIGNAL = 1.2; EXPRESSED IN ADULT LIVER, SIGNAL = 1.6; EXPRESSED IN FETAL LIVER, SIGNAL = 1.1; NT HIT: X16430.1, EVALUE 4.00e+00; EST_HUMAN HIT: AW379465.1, EVALUE 2.00e-15
ccgactgtgagaggaccaagggtgaaagcaaaaagatcaactgggagactcctgaaataatcttgacaatgcctgagggtggcttagaccaaagtagaagcagtgaagataactga

SEQ ID NO: 24132 - DNA, 109 bp, Homo sapiens
  MAP TO AL133293.14; EXPRESSED IN PLACENTA, SIGNAL =   2; EXPRESSED IN HELA, SIGNAL = 3.1; EXPRESSED IN HEART, SIGNAL = 1.8; EXPRESSED IN BONE MARROW, SIGNAL =   2; EXPRESSED IN LUNG, SIGNAL = 1.8; EXPRESSED IN ADULT LIVER, SIGNAL = 1.9; EXPRESSED IN FETAL LIVER, SIGNAL =   2; EXPRESSED IN BRAIN, SIGNAL = 1.7; EST_HUMAN HIT: AA641210.1, EVALUE 1.40e+00; SWISSPROT HIT: P54244, EVALUE 4.20e+00; NT HIT: AJ245365.1, EVALUE 6.00e-02
tgcatttcagacatttgcatttcatgtcagaaaatgtgaattcagcagccgccaggatgaatgccagtcgccaggtgctgagggtgaaggcgagggccggtgtctccag

SEQ ID NO: 24133 - DNA, 235 bp, Homo sapiens
  MAP TO AC015473.3; EXPRESSED IN PLACENTA, SIGNAL = 4.2; EXPRESSED IN FETAL LIVER, SIGNAL = 3.6; EXPRESSED IN BONE MARROW, SIGNAL = 3.7; EXPRESSED IN LUNG, SIGNAL = 4.8; EXPRESSED IN ADULT LIVER, SIGNAL = 4.7; EXPRESSED IN HELA, SIGNAL = 3.6; EXPRESSED IN HEART, SIGNAL = 3.3; EXPRESSED IN BRAIN, SIGNAL =   4; EST_HUMAN HIT: H58041.1, EVALUE 7.00e-60; SWISSPROT HIT: Q07411, EVALUE 2.50e+00
gaatctcaatgtttcttgtaaaagagatgaagtttttctggctcctggtgtacaaggagggcagaggtcaaaacgaggacttctatctcccaaagcttttccttttggaaaccacctgccaccaacacagaacaaagccacagttgtgggagatgaagctaaaaccatgcatgctccatcccagcccattcaatggctttggagcaaatgttctgtctgatcagagattctgcag

SEQ ID NO: 24134 - DNA, 168 bp, Homo sapiens
  MAP TO AL157405.2; EXPRESSED IN BRAIN, SIGNAL = 3.8; EXPRESSED IN PLACENTA, SIGNAL = 3.5; EXPRESSED IN ADULT LIVER, SIGNAL = 5.9; EXPRESSED IN HELA, SIGNAL = 6.1; EXPRESSED IN BONE MARROW, SIGNAL =  15; EXPRESSED IN LUNG, SIGNAL = 8.6; EXPRESSED IN HEART, SIGNAL = 5.6; EXPRESSED IN FETAL LIVER, SIGNAL =  18; EST_HUMAN HIT: AW245676.1, EVALUE 2.00e-53; SWISSPROT HIT: Q95140, EVALUE 9.00e-21; NT HIT: gi11436629, EVALUE 3.00e-51
atggtgccaatgggcaagaacaccatgatgtgcaaggccatccaagggcacctggaaaacaacccagctctggaaaaactgttgcctcatatccagggaaatgtgggctttgcgttcaccaaggaagacctcactaagttcagggacatgctgctgaatagtaaggtg

SEQ ID NO: 24135 - DNA, 139 bp, Homo sapiens
  MAP TO AC008928.5; EXPRESSED IN HEART, SIGNAL = 6.2; EXPRESSED IN PLACENTA, SIGNAL = 6.3; EXPRESSED IN ADULT LIVER, SIGNAL = 6.2; EXPRESSED IN HELA, SIGNAL =   9; EXPRESSED IN BRAIN, SIGNAL = 5.1; EXPRESSED IN BONE MARROW, SIGNAL = 6.3; EXPRESSED IN LUNG, SIGNAL = 6.7; EXPRESSED IN FETAL LIVER, SIGNAL = 6.3; EST_HUMAN HIT: BE350127.1, EVALUE 1.00e-38; SWISSPROT HIT: Q9ZCN6, EVALUE 4.70e-01; NT HIT: U93163.1, EVALUE 1.00e-34
ggtcaggatcatcaatatccctgtcttccacctccacatcttgccccactggaaggtcctcagggacaacgacacgcatggagctgtcatctcctgtgataacaatgccttcttctggatacctcctgaaggacctgca

SEQ ID NO: 24136 - DNA, 242 bp, Homo sapiens
  MAP TO AC007687.16; EXPRESSED IN HEART, SIGNAL = 3.6; EXPRESSED IN PLACENTA, SIGNAL = 3.1; EXPRESSED IN ADULT LIVER, SIGNAL = 3.6; EXPRESSED IN FETAL LIVER, SIGNAL = 3.3; EXPRESSED IN BRAIN, SIGNAL = 3.8; EXPRESSED IN BONE MARROW, SIGNAL = 3.9; EXPRESSED IN LUNG, SIGNAL = 3.5; EXPRESSED IN HELA, SIGNAL = 3.9; EST_HUMAN HIT: AU124629.1, EVALUE 1.00e-102; NT HIT: gi4507848, EVALUE 1.00e-102; SWISSPROT HIT: Q92995, EVALUE 3.00e-31
gctctctggaattctgggatgctgaagatggcctgcatgacagagctgagatagcagctgttgcccaggttcttcagacccgtgtagccaggaccatacattggcttcagtttcgtgcccgactcctggatcacttcccactcactgaccctcagcttgatgtcattgtcctggagcccattctctgtctgagacaaagtcatcgaagaaaaacaactttaaatgtgattcccattcaaagg

SEQ ID NO: 24137 - DNA, 180 bp, Homo sapiens
  MAP TO AF241726.1; EXPRESSED IN ADULT LIVER, SIGNAL = 2.8; EXPRESSED IN LUNG, SIGNAL = 3.1; EXPRESSED IN HELA, SIGNAL =   4; EXPRESSED IN HEART, SIGNAL = 3.8; EXPRESSED IN BRAIN, SIGNAL = 3.7; EXPRESSED IN BONE MARROW, SIGNAL = 3.8; EXPRESSED IN PLACENTA, SIGNAL = 3.3; EXPRESSED IN FETAL LIVER, SIGNAL = 3.5; NT HIT: gi7657670, EVALUE 4.00e-26; EST_HUMAN HIT: AU118634.1, EVALUE 5.00e-26; SWISSPROT HIT: P25976, EVALUE 6.00e-14
acttggtagttttgaacttggagctgtcattgactgtaaagtaatttttcaagcattgtggcaaagtcatcatgtcttcctggtaccagcagtcttggcctttggggatggccattttcaggtctgtggggcagtcagtttttctctttatcctccaggtgtccagctacctcttccatg

SEQ ID NO: 24138 - DNA, 133 bp, Homo sapiens
  MAP TO AL161445.2; EXPRESSED IN BRAIN, SIGNAL =   1; EXPRESSED IN BONE MARROW, SIGNAL = 1.6; EXPRESSED IN LUNG, SIGNAL = 2.3; EXPRESSED IN PLACENTA, SIGNAL = 1.7; EXPRESSED IN ADULT LIVER, SIGNAL = 1.5; EXPRESSED IN HEART, SIGNAL = 1.5; EXPRESSED IN FETAL LIVER, SIGNAL = 1.8; SWISSPROT HIT: P15291, EVALUE 4.00e-19; NT HIT: X13223.1, EVALUE 3.00e-69; EST_HUMAN HIT: H43226.1, EVALUE 4.00e-69
gtttgaccgaattgcacacacaaaggagacaatgctctctgatggtttgaactcactcacctaccaggtgctggatgtacagagatacccattgtatacccaaatcacagtggacatcgggacaccgagctag

SEQ ID NO: 24139 - DNA, 289 bp, Homo sapiens
  MAP TO AL136306.2; EXPRESSED IN HELA, SIGNAL =  11; EXPRESSED IN LUNG, SIGNAL = 4.2; EXPRESSED IN PLACENTA, SIGNAL = 1.3; EXPRESSED IN HEART, SIGNAL = 3.8; EXPRESSED IN FETAL LIVER, SIGNAL =  18; EXPRESSED IN BONE MARROW, SIGNAL =  14; EXPRESSED IN ADULT LIVER, SIGNAL = 2.4; EXPRESSED IN BRAIN, SIGNAL = 6.8; SWISSPROT HIT: P50890, EVALUE 6.00e-45; EST_HUMAN HIT: AW327455.1, EVALUE 1.00e-114; NT HIT: X61156.1, EVALUE 1.00e-112
atggaggaggaggatgtccttaagttccttgcagcaggaatccacttaggtggcaccaaccttgacttccaaatgaaacaatacatttataaaaagaaatgtgacggcgtctatatcataaatctgaagaggacctgggagaagcttctgttggcagcttgtgccattgttgccattgaaaaccctgctgatgtccgcgtcatatcctccaggaatactggccagagggccatactgaagtttgctgctgccactggagccactccaattgctggccgcttcactcctg

SEQ ID NO: 24140 - DNA, 77 bp, Homo sapiens
  MAP TO AC019184.2; EXPRESSED IN LUNG, SIGNAL =  24; EXPRESSED IN ADULT LIVER, SIGNAL =  24; EXPRESSED IN HEART, SIGNAL =  19; EXPRESSED IN BONE MARROW, SIGNAL =  23; EXPRESSED IN BRAIN, SIGNAL =  19; EXPRESSED IN PLACENTA, SIGNAL =  20; EXPRESSED IN HELA, SIGNAL =  26; EXPRESSED IN FETAL LIVER, SIGNAL =  19; NT HIT: AF236117.1, EVALUE 6.10e-01; EST_HUMAN HIT: BE614582.1, EVALUE 9.00e-01
ctgagatttagggatcaggaagctgccatcgtaccttccactttcacccatgaagctaatgaccaaacactggaatg

SEQ ID NO: 24141 - DNA, 124 bp, Homo sapiens
  MAP TO AC022943.4; EXPRESSED IN LUNG, SIGNAL = 1.6; EXPRESSED IN HEART, SIGNAL = 1.8; EXPRESSED IN FETAL LIVER, SIGNAL = 1.8; EXPRESSED IN BONE MARROW, SIGNAL = 1.7; EXPRESSED IN PLACENTA, SIGNAL = 1.6; EXPRESSED IN ADULT LIVER, SIGNAL = 1.7; EXPRESSED IN BRAIN, SIGNAL = 1.7; SWISSPROT HIT: Q95915, EVALUE 8.10e-01; NT HIT: Z99111.1, EVALUE 2.80e-01; EST_HUMAN HIT: AI217868.1, EVALUE 1.00e-41
cccatttgactgatccccaggcaagttgattggtgccaacttaagtaaggagtatctggccagtaactttccataatgctgtcaatcaaggatccagatgctgccaccacggctgttactcttg

SEQ ID NO: 24142 - DNA, 79 bp, Homo sapiens
  MAP TO AC018389.3; EXPRESSED IN LUNG, SIGNAL = 3.3; EXPRESSED IN PLACENTA, SIGNAL = 3.1; EXPRESSED IN HELA, SIGNAL = 4.5; EXPRESSED IN HEART, SIGNAL = 2.7; EXPRESSED IN FETAL LIVER, SIGNAL = 2.9; EXPRESSED IN BRAIN, SIGNAL = 2.4; EXPRESSED IN ADULT LIVER, SIGNAL = 3.7; EXPRESSED IN BONE MARROW, SIGNAL = 2.9; NT HIT: gi9627521, EVALUE 6.30e-01; SWISSPROT HIT: P13846, EVALUE 9.60e+00
acatcatcctacacatggtgggagccacagaaggattgggagcacaggagtgccatcaagcaggtagtatttcgccaag

SEQ ID NO: 24143 - DNA, 243 bp, Homo sapiens
  MAP TO AC018367.3; EXPRESSED IN PLACENTA, SIGNAL = 1.1; EXPRESSED IN FETAL LIVER, SIGNAL = 1.2; EXPRESSED IN ADULT LIVER, SIGNAL = 1.8; EXPRESSED IN HEART, SIGNAL = 1.3; EXPRESSED IN BRAIN, SIGNAL = 1.5; EXPRESSED IN BONE MARROW, SIGNAL = 1.5; SWISSPROT HIT: P32542, EVALUE 1.60e+00; NT HIT: AL163246.2, EVALUE 3.00e-64; EST_HUMAN HIT: AW340174.1, EVALUE 7.00e-60
gattcacgggtccaggaatcaaggggtggaagtggaagtgacaccactcaccatcacccctagtgatcctctagcaaaatttttgcttcttgttcccatgacattacattctgctggcctagaggtcttagttccagagggaggaatgctgccacgaggagactcaacaacaatcccatcaaactggatgttaagattgccacctggacacttcgtgctcttcctacatttaagtcaacaggc

SEQ ID NO: 24144 - DNA, 158 bp, Homo sapiens
  MAP TO AC007326.28; EXPRESSED IN BONE MARROW, SIGNAL =   4; EXPRESSED IN ADULT LIVER, SIGNAL = 3.9; EXPRESSED IN HELA, SIGNAL = 5.1; EXPRESSED IN BRAIN, SIGNAL = 3.7; EXPRESSED IN LUNG, SIGNAL = 4.5; EXPRESSED IN PLACENTA, SIGNAL =   4; EXPRESSED IN HEART, SIGNAL = 3.7; EXPRESSED IN FETAL LIVER, SIGNAL = 4.1; SWISSPROT HIT: O57854, EVALUE 2.30e+00; EST_HUMAN HIT: BF313645.1, EVALUE 1.00e-75; NT HIT: X91348.1, EVALUE 2.00e-73
ttcttgctgtcgacatctttgacaagttcaacttcacgggagccagagtcccatggttcgacgccattcatgaagaattccccagggagctggagtcctccatctccttcccagccaacttcttcaaaccacctgaagaaaaaggtagaaccgcttag

SEQ ID NO: 24145 - DNA, 240 bp, Homo sapiens
  MAP TO AL158091.7; EXPRESSED IN PLACENTA, SIGNAL = 1.9; EXPRESSED IN FETAL LIVER, SIGNAL = 1.5; EXPRESSED IN ADULT LIVER, SIGNAL =   2; EXPRESSED IN HEART, SIGNAL = 1.9; EXPRESSED IN BONE MARROW, SIGNAL = 1.8; EXPRESSED IN BRAIN, SIGNAL = 1.8; EXPRESSED IN LUNG, SIGNAL = 1.7; NT HIT: AB014538.1, EVALUE 5.70e-01; EST_HUMAN HIT: AI479569.1, EVALUE 1.00e-106; SWISSPROT HIT: P34420, EVALUE 7.90e-02
ctagaactcagtcatcttcttgtgggtgtctgccttcctctgctcctgctgcaggccggcttcctgagcccggagctgccccagctggcgctgggctcctgccagcttctcctgcagctgggctgacgccacgctatgcctgcggaggggctcactagtcagcgtggggtcctgggccatgccaccaaccccagtctgccgtacccactgcctgtgtgcccgctgcccgtcctccaacat

SEQ ID NO: 24146 - DNA, 347 bp, Homo sapiens
  MAP TO AC026407.1; EXPRESSED IN HEART, SIGNAL = 1.3; EXPRESSED IN ADULT LIVER, SIGNAL = 1.9; EXPRESSED IN BRAIN, SIGNAL = 1.3; EXPRESSED IN BONE MARROW, SIGNAL = 2.4; EXPRESSED IN LUNG, SIGNAL = 1.7; EXPRESSED IN PLACENTA, SIGNAL = 1.3; EXPRESSED IN FETAL LIVER, SIGNAL = 2.2; NT HIT: gi11417258, EVALUE 0.00e+00; SWISSPROT HIT: P29285, EVALUE 9.20e+00; EST_HUMAN HIT: AI088043.1, EVALUE 0.00e+00
ttatttgctaaaattggcgaaatttgcaaaggcatcttgcttgggttgcacagttccagaagtcatggctatgttgggcatgcccattcccattgtgcctgtcaagcccatcccagcagcggacatccctatgttcatgttcatgcccatcatgctctggttcatcatcggagtatttccaagaggggccattcccatggtgccagtcatcacattgggcatgctcataggcatgggtccccctatcaaagcattagtttggggccggacaggaagcatgttcgatggagaactgaggttcacagctccaaaactttgagtcatcacattcataggctgctgcatat

SEQ ID NO: 24147 - DNA, 171 bp, Homo sapiens
  MAP TO AC021076.2; EXPRESSED IN LUNG, SIGNAL = 3.2; EXPRESSED IN ADULT LIVER, SIGNAL = 2.7; EXPRESSED IN BRAIN, SIGNAL =   3; EXPRESSED IN HEART, SIGNAL = 2.7; EXPRESSED IN PLACENTA, SIGNAL = 3.1; EXPRESSED IN FETAL LIVER, SIGNAL = 2.7; EXPRESSED IN BONE MARROW, SIGNAL = 2.6; NT HIT: AE001501.1, EVALUE 1.00e-01; SWISSPROT HIT: P32578, EVALUE 1.30e+00
attttaaatgaaactaaaacattttttatgaacttcaacactatcgtgggcccttgcactgtgcctactctgcttaatggagatgttgaccttggggccgagcgggtggagacgggacatcaacagcccattgccagcatggccatcaaggcaatgtgtgctggttggaaa

SEQ ID NO: 24148 - DNA, 146 bp, Homo sapiens
  MAP TO AL160281.2; EXPRESSED IN LUNG, SIGNAL = 2.1; EXPRESSED IN HEART, SIGNAL = 1.9; EXPRESSED IN FETAL LIVER, SIGNAL = 1.9; EXPRESSED IN BONE MARROW, SIGNAL = 2.2; EXPRESSED IN PLACENTA, SIGNAL =   2; EXPRESSED IN ADULT LIVER, SIGNAL = 1.5; EXPRESSED IN BRAIN, SIGNAL = 1.9; NT HIT: AL161595.2, EVALUE 8.30e-02; SWISSPROT HIT: Q92935, EVALUE 5.30e+00; EST_HUMAN HIT: BE671266.1, EVALUE 1.90e+00
cattcatcaaagccaacaacaacctctgtgtcataaaatcaagaaccaattttccatcctcatatgaattgatgtctaatttggacaagtcctccattaaaacacttgttggaaacactgttctctatgagccccttgctcacctg

SEQ ID NO: 24149 - DNA, 105 bp, Homo sapiens
  MAP TO AL122008.9; EXPRESSED IN PLACENTA, SIGNAL = 2.8; EXPRESSED IN ADULT LIVER, SIGNAL = 2.5; EXPRESSED IN HELA, SIGNAL = 3.2; EXPRESSED IN BRAIN, SIGNAL = 2.8; EXPRESSED IN BONE MARROW, SIGNAL = 2.6; EXPRESSED IN LUNG, SIGNAL = 2.8; EXPRESSED IN HEART, SIGNAL = 2.8; EXPRESSED IN FETAL LIVER, SIGNAL = 2.9; SWISSPROT HIT: Q47623, EVALUE 9.40e+00; NT HIT: X76498.1, EVALUE 8.90e-01; EST_HUMAN HIT: BF376745.1, EVALUE 3.30e-01
tttccatgtggtttttcatcgagtcaagactagtaagccagccgataggcacattgaaacttaaaaatctcaccacatttagcaaaggatcatctgcacagagac

SEQ ID NO: 24150 - DNA, 82 bp, Homo sapiens
  MAP TO AL162471.1; EXPRESSED IN PLACENTA, SIGNAL = 3.6; EXPRESSED IN HELA, SIGNAL = 5.6; EXPRESSED IN HEART, SIGNAL =   3; EXPRESSED IN BONE MARROW, SIGNAL = 3.3; EXPRESSED IN LUNG, SIGNAL = 3.1; EXPRESSED IN ADULT LIVER, SIGNAL = 4.7; EXPRESSED IN FETAL LIVER, SIGNAL = 3.7; EXPRESSED IN BRAIN, SIGNAL =   3; EST_HUMAN HIT: T07095.1, EVALUE 7.00e-05
cccagtcatctcatttaatcttaagtatctctttaaaggaccggtttccacaaaaacacagtcacattctggggtactgaag

SEQ ID NO: 24151 - DNA, 160 bp, Homo sapiens
  MAP TO AC008269.3; EXPRESSED IN PLACENTA, SIGNAL =   7; EXPRESSED IN ADULT LIVER, SIGNAL = 9.1; EXPRESSED IN HELA, SIGNAL =  10; EXPRESSED IN BONE MARROW, SIGNAL = 8.6; EXPRESSED IN LUNG, SIGNAL = 7.1; EXPRESSED IN HEART, SIGNAL = 8.2; EXPRESSED IN FETAL LIVER, SIGNAL = 8.5; EXPRESSED IN BRAIN, SIGNAL = 7.3; NT HIT: D10548.1, EVALUE 6.00e-03; EST_HUMAN HIT: AW948920.1, EVALUE 2.20e+00; SWISSPROT HIT: Q53245, EVALUE 3.10e-02
tgggtaaaaagagaatttgtggcaattcttaaaaacttgaccaccacaggaagacaatttggaggcattttggctgcacacagtatagccactacactgaaatactggtaccatggctcaccacctggggagattgtatctttaggaatattgagtgaag

SEQ ID NO: 24152 - DNA, 195 bp, Homo sapiens
  MAP TO AC010397.3; EXPRESSED IN PLACENTA, SIGNAL = 2.1; EXPRESSED IN ADULT LIVER, SIGNAL = 2.1; EXPRESSED IN HELA, SIGNAL = 3.4; EXPRESSED IN HEART, SIGNAL = 2.4; EXPRESSED IN BRAIN, SIGNAL = 2.2; EXPRESSED IN BONE MARROW, SIGNAL =   3; EXPRESSED IN LUNG, SIGNAL = 2.6; EXPRESSED IN FETAL LIVER, SIGNAL = 2.6; NT HIT: M31887.1, EVALUE 1.80e+00; SWISSPROT HIT: Q28642, EVALUE 9.90e-01
atggatgatccagggtgttattttgaggatcaggtagctctggccgtgaccagtaaaggtatggaagagatgattatcccaggcagtagtgttcatgatagtctcaagcagtgtggtaagactagaaaaggtgtaaagaggtctccaacaacagcagtggcaaacgggagtttctgtggcttcattagacaagag

SEQ ID NO: 24153 - DNA, 107 bp, Homo sapiens
  MAP TO AC022918.2; EXPRESSED IN PLACENTA, SIGNAL = 5.4; EXPRESSED IN ADULT LIVER, SIGNAL = 5.6; EXPRESSED IN BRAIN, SIGNAL =   5; EXPRESSED IN BONE MARROW, SIGNAL = 6.2; EXPRESSED IN LUNG, SIGNAL = 5.9; EXPRESSED IN HELA, SIGNAL = 4.4; EXPRESSED IN HEART, SIGNAL = 4.4; EXPRESSED IN FETAL LIVER, SIGNAL = 4.4; NT HIT: AE001278.1, EVALUE 2.00e-01; EST_HUMAN HIT: AI207614.1, EVALUE 9.30e-01
cttgagcaccagtaatatagaaactttccatattggctcttgcctttcttgttatccgaattctgtatatattcttcttgtctttcaaaaagctttttctcattcat

SEQ ID NO: 24154 - DNA, 122 bp, Homo sapiens
  MAP TO AC024575.1; EXPRESSED IN PLACENTA, SIGNAL =   3; EXPRESSED IN ADULT LIVER, SIGNAL = 3.4; EXPRESSED IN FETAL LIVER, SIGNAL =   3; EXPRESSED IN BRAIN, SIGNAL = 3.5; EXPRESSED IN BONE MARROW, SIGNAL = 3.4; EXPRESSED IN LUNG, SIGNAL = 2.6; EXPRESSED IN HELA, SIGNAL = 3.5; EXPRESSED IN HEART, SIGNAL = 2.8; NT HIT: U92541.1, EVALUE 2.70e-01; SWISSPROT HIT: P53631, EVALUE 2.40e+00; EST_HUMAN HIT: AA465170.1, EVALUE 1.00e-62
atcctgaccaagatgaagcagcagggtcatgagacagccgcctgtccggagactgaagagataccgcagggagccagtggctgctggaaggatgacctccagaaggaactgagtgatatatg

SEQ ID NO: 24155 - DNA, 323 bp, Homo sapiens
  MAP TO AL121673.27; EXPRESSED IN LUNG, SIGNAL = 3.9; EXPRESSED IN ADULT LIVER, SIGNAL = 3.5; EXPRESSED IN BRAIN, SIGNAL = 3.5; EXPRESSED IN BONE MARROW, SIGNAL = 3.3; EXPRESSED IN PLACENTA, SIGNAL = 3.3; EXPRESSED IN HELA, SIGNAL = 3.2; EXPRESSED IN HEART, SIGNAL = 3.1; EXPRESSED IN FETAL LIVER, SIGNAL = 2.6; NT HIT: AE000890.1, EVALUE 2.00e-01; SWISSPROT HIT: P24821, EVALUE 2.00e-03
gaaagcacatgcccgctgtgtcctgctgcattgctgggcagtgtccactgcacgtcgctcgctgcattgctgggcagtgtccgcggcatgtcgctctctgcattgctgggcagtgtctactgcacgccgcttgctgcattgctgggcagtgtctactgcacgccgctcgctgcattgctggggagtgtccgctgcatgtcgctcgctgcattgctgggcagtgtccgctgcacgccgctcgttgcattgctgggcagtgtctactgcacggtggacgctcctgcactcatggatgctcaggctgcttcccgttggacgcgatt

SEQ ID NO: 24156 - DNA, 264 bp, Homo sapiens
  MAP TO AL121897.15; EXPRESSED IN PLACENTA, SIGNAL = 1.9; EXPRESSED IN ADULT LIVER, SIGNAL = 1.9; EXPRESSED IN BRAIN, SIGNAL = 1.4; EXPRESSED IN BONE MARROW, SIGNAL = 1.5; EXPRESSED IN LUNG, SIGNAL = 1.4; EXPRESSED IN HELA, SIGNAL = 2.5; EXPRESSED IN HEART, SIGNAL = 1.5; EXPRESSED IN FETAL LIVER, SIGNAL = 1.9; SWISSPROT HIT: O21403, EVALUE 5.50e+00; EST_HUMAN HIT: BE900549.1, EVALUE 0.00e+00; NT HIT: D83784.1, EVALUE 0.00e+00
ctgtggccccaggtgggttacacgggggcaggttgagtggaagaaagcccagtaggtgggagaagtccacattagcagcgcagagggcctcagagaggttggcggggctcttggcaagcagtgcttcatctaggagggccgcagctgccgccggctgaggtgaggcgggctggggttcagcggatgagagagacaggcttccaggaagctccgccagaaaactatccacctccactttgggcaatttgtcgggcaagtatgagg

SEQ ID NO: 24157 - DNA, 91 bp, Homo sapiens
  MAP TO AC019223.2; EXPRESSED IN PLACENTA, SIGNAL = 3.2; EXPRESSED IN ADULT LIVER, SIGNAL = 3.6; EXPRESSED IN HELA, SIGNAL = 2.8; EXPRESSED IN BRAIN, SIGNAL = 3.7; EXPRESSED IN BONE MARROW, SIGNAL = 3.1; EXPRESSED IN LUNG, SIGNAL = 4.6; EXPRESSED IN HEART, SIGNAL = 3.5; EXPRESSED IN FETAL LIVER, SIGNAL = 4.6; EST_HUMAN HIT: AA219316.1, EVALUE 8.00e-14; NT HIT: AL163267.2, EVALUE 8.00e-07
atgaatccaaaccaatatgaaatctttgagatgccagataaagaattcaaaatgttgattatgaagccactcaaggagttacaagagaaag

SEQ ID NO: 24158 - DNA, 116 bp, Homo sapiens
  MAP TO AC015599.3; EXPRESSED IN PLACENTA, SIGNAL = 4.3; EXPRESSED IN FETAL LIVER, SIGNAL =   4; EXPRESSED IN HELA, SIGNAL = 7.4; EXPRESSED IN HEART, SIGNAL = 4.1; EXPRESSED IN BONE MARROW, SIGNAL =   6; EXPRESSED IN LUNG, SIGNAL = 4.3; EXPRESSED IN ADULT LIVER, SIGNAL = 5.5; EXPRESSED IN BRAIN, SIGNAL = 3.6; EST_HUMAN HIT: T95413.1, EVALUE 3.80e-01; SWISSPROT HIT: O83728, EVALUE 2.40e+00
ctaacgtaccactgcatctattaagacctcaaacactacctttactcctccactgtccaattcatcaatcttttcaccactgttgcccagaagagctaaaccagcaactgcaatgt

SEQ ID NO: 24159 - DNA, 79 bp, Homo sapiens
  MAP TO AC013635.3; EXPRESSED IN PLACENTA, SIGNAL = 8.4; EXPRESSED IN ADULT LIVER, SIGNAL = 6.7; EXPRESSED IN HEART, SIGNAL = 5.7; EXPRESSED IN BRAIN, SIGNAL =   7; EXPRESSED IN BONE MARROW, SIGNAL = 7.6; EXPRESSED IN LUNG, SIGNAL = 7.9; EXPRESSED IN HELA, SIGNAL =   6; EXPRESSED IN FETAL LIVER, SIGNAL = 6.8; SWISSPROT HIT: Q60935, EVALUE 3.30e+00; EST_HUMAN HIT: AI693515.1, EVALUE 2.40e-01; NT HIT: AJ006345.1, EVALUE 2.50e+00
ggtggtggtcatttccatcattcagatgggcagaccgaaacccaggtggggaaggggttgtctgagaccacagagctca

SEQ ID NO: 24160 - DNA, 175 bp, Homo sapiens
  MAP TO AC013726.3; EXPRESSED IN ADULT LIVER, SIGNAL = 1.4; EXPRESSED IN HEART, SIGNAL = 1.2; EXPRESSED IN FETAL LIVER, SIGNAL = 1.4; EXPRESSED IN BRAIN, SIGNAL = 1.2; EXPRESSED IN BONE MARROW, SIGNAL = 1.3; EXPRESSED IN LUNG, SIGNAL = 1.4; EXPRESSED IN PLACENTA, SIGNAL = 1.2; SWISSPROT HIT: P19137, EVALUE 1.70e+00; NT HIT: gi11432020, EVALUE 2.60e-02
agtgatggacctcaccggcacatgggtgctgggactgtggctgtgcttggtggctgtgctgctgcaggtgccgtgccgctcctggcagcacagggccttacttctcatgtcacaggtgtcacaaatggtgtggcctgcaggagtgacctggccaaggccctgccgcttgtcagat

SEQ ID NO: 24161 - DNA, 99 bp, Homo sapiens
  MAP TO AC009301.3; EXPRESSED IN PLACENTA, SIGNAL = 0.9; EXPRESSED IN HEART, SIGNAL = 1.3; EXPRESSED IN BRAIN, SIGNAL = 1.1; EXPRESSED IN LUNG, SIGNAL = 1.2; EXPRESSED IN FETAL LIVER, SIGNAL = 1.1; EXPRESSED IN ADULT LIVER, SIGNAL = 1.1; EXPRESSED IN BONE MARROW, SIGNAL = 1.2; EST_HUMAN HIT: AA469354.1, EVALUE 7.80e-02
gtgcccagcgctgtactaggagcaccagacacatctaactacgtgccaggcactattctatatgtcacatgtgtccactcagtcactcctcacattcct

SEQ ID NO: 24162 - DNA, 89 bp, Homo sapiens
  MAP TO AC024575.1; EXPRESSED IN ADULT LIVER, SIGNAL = 4.5; EXPRESSED IN BRAIN, SIGNAL = 4.4; EXPRESSED IN LUNG, SIGNAL = 3.8; EXPRESSED IN HELA, SIGNAL =   5; EXPRESSED IN HEART, SIGNAL = 4.5; EXPRESSED IN PLACENTA, SIGNAL = 4.1; EXPRESSED IN FETAL LIVER, SIGNAL = 3.7; EXPRESSED IN BONE MARROW, SIGNAL = 4.2; EST_HUMAN HIT: AA465288.1, EVALUE 5.00e-43; NT HIT: M13386.1, EVALUE 7.30e-01
ccaagaccattgtgatgattcccgactcccagaagctcctgcgatgtgaacttgagtcactcaagagccagttacaggcccagaccaag

SEQ ID NO: 24163 - DNA, 176 bp, Homo sapiens
  MAP TO AL121897.15; EXPRESSED IN PLACENTA, SIGNAL =   2; EXPRESSED IN HELA, SIGNAL = 2.6; EXPRESSED IN BONE MARROW, SIGNAL =   2; EXPRESSED IN HEART, SIGNAL = 1.7; EXPRESSED IN FETAL LIVER, SIGNAL = 1.9; EXPRESSED IN LUNG, SIGNAL =   2; EXPRESSED IN ADULT LIVER, SIGNAL = 2.2; EXPRESSED IN BRAIN, SIGNAL =   2; NT HIT: gi11420944, EVALUE 8.00e-95; SWISSPROT HIT: P32802, EVALUE 3.00e-05; EST_HUMAN HIT: AI739102.1, EVALUE 1.00e-94
gtgccctttcccaccatggtggctctgctgtgcatgtggttcgggatctccctgcccctcgtctacttgggctactacttcggcttccgaaagcagccatatgacaaccctgtgcgcaccaaccagattccccggcagatccccgagcagcggtggtacatgaaccgatttgtggg

SEQ ID NO: 24164 - DNA, 224 bp, Homo sapiens
  MAP TO AL138796.2; EXPRESSED IN BONE MARROW, SIGNAL =   2; EXPRESSED IN PLACENTA, SIGNAL = 2.1; EXPRESSED IN ADULT LIVER, SIGNAL = 1.5; EXPRESSED IN HELA, SIGNAL = 3.5; EXPRESSED IN BRAIN, SIGNAL = 2.4; EXPRESSED IN LUNG, SIGNAL = 1.6; EXPRESSED IN HEART, SIGNAL = 4.1; EXPRESSED IN FETAL LIVER, SIGNAL =   2; NT HIT: AB007923.1, EVALUE 1.00e-123; EST_HUMAN HIT: BE933024.1, EVALUE 4.00e-83; SWISSPROT HIT: P54259, EVALUE 2.90e+00
gctcagcagggagctgcaggagaaggagaaagtgattgaagtcctgcaggccaagctggatgctcggtccctcacaccctccagcagccatgccttgtctgactcccaccgctctcccagcagcacctctttcctgtctgatgaactggaagcctgctctgacatggacatagtcagcgagtacacacactatgaagagaagaaagcttctcccagtcactcag

SEQ ID NO: 24165 - DNA, 135 bp, Homo sapiens
  MAP TO AC024038.3; EXPRESSED IN BRAIN, SIGNAL = 1.5; EXPRESSED IN BONE MARROW, SIGNAL = 1.4; EXPRESSED IN LUNG, SIGNAL = 1.2; EXPRESSED IN PLACENTA, SIGNAL = 1.1; EXPRESSED IN ADULT LIVER, SIGNAL = 1.5; EXPRESSED IN HEART, SIGNAL = 1.3; EXPRESSED IN FETAL LIVER, SIGNAL = 1.2; NT HIT: AJ131016.1, EVALUE 7.60e-02; SWISSPROT HIT: P27048, EVALUE 2.40e+00; EST_HUMAN HIT: U54606.1, EVALUE 7.00e+00
tcaaatggtccagcaggactgatgagactggagttcctctccctggctgcaatggttgagattgtcattactatccaggagtcctgggtgattctggaggttgaagggaggaaggtggacctcttcctcgacaat

SEQ ID NO: 24166 - DNA, 215 bp, Homo sapiens
  MAP TO AC022262.3; EXPRESSED IN ADULT LIVER, SIGNAL = 2.3; EXPRESSED IN HEART, SIGNAL = 2.4; EXPRESSED IN BONE MARROW, SIGNAL = 2.6; EXPRESSED IN BRAIN, SIGNAL =   3; EXPRESSED IN LUNG, SIGNAL = 2.4; EXPRESSED IN PLACENTA, SIGNAL = 2.3; EXPRESSED IN FETAL LIVER, SIGNAL = 2.5; NT HIT: U49263.1, EVALUE 1.30e-01; SWISSPROT HIT: Q36082, EVALUE 3.60e-02; EST_HUMAN HIT: M78984.1, EVALUE 3.00e-74
tcaggtacctgttccatgatgccatggaagatgctcttgaaagtcacttccacgctgctagctcttccatatggctcttctgtcccagcagctggtcctcctctgttttcatgctcacctctcctggcttctgtggcaacatcctgggccttggctactcttctgctgttctcaccttgtctccttggcacttctcctgctcaccctttaagtgc

SEQ ID NO: 24167 - DNA, 143 bp, Homo sapiens
  MAP TO AL118520.12; EXPRESSED IN PLACENTA, SIGNAL = 1.1; EXPRESSED IN FETAL LIVER, SIGNAL = 1.4; EXPRESSED IN BRAIN, SIGNAL = 1.5; EXPRESSED IN BONE MARROW, SIGNAL = 1.4; EXPRESSED IN LUNG, SIGNAL = 1.2; EXPRESSED IN ADULT LIVER, SIGNAL = 1.2; EXPRESSED IN HEART, SIGNAL = 1.2; NT HIT: AJ277661.1, EVALUE 1.30e+00; EST_HUMAN HIT: BF690254.1, EVALUE 5.00e-75; SWISSPROT HIT: P41733, EVALUE 3.00e-05
ctgcccaacgttgaaggtcagtgtgatggcataaaagaaattagagttggcacttcctgcataaatccagaggtgccacaggacagggaagagcagggaacagacgatgatgatgcaggtgaggacaaagatgtttctcagga

SEQ ID NO: 24168 - DNA, 89 bp, Homo sapiens
  MAP TO AC021288.3; EXPRESSED IN HEART, SIGNAL = 1.2; EXPRESSED IN FETAL LIVER, SIGNAL = 1.4; EXPRESSED IN BONE MARROW, SIGNAL = 1.4; EXPRESSED IN LUNG, SIGNAL = 1.6; EXPRESSED IN PLACENTA, SIGNAL = 1.5; EXPRESSED IN ADULT LIVER, SIGNAL = 1.8; EXPRESSED IN BRAIN, SIGNAL = 1.2; EST_HUMAN HIT: AW613379.1, EVALUE 1.10e+00; NT HIT: gi9626232, EVALUE 1.80e-01
atggaggagatgaaactgactggattttgtcccatgatcaaggtttttgacatgaagtctaacctcagcaagattcacagcaaacagac

SEQ ID NO: 24169 - DNA, 104 bp, Homo sapiens
  MAP TO AL158150.2; EXPRESSED IN LUNG, SIGNAL = 4.9; EXPRESSED IN PLACENTA, SIGNAL = 4.3; EXPRESSED IN ADULT LIVER, SIGNAL = 4.2; EXPRESSED IN HEART, SIGNAL =   4; EXPRESSED IN BRAIN, SIGNAL = 3.9; EXPRESSED IN FETAL LIVER, SIGNAL = 3.7; EXPRESSED IN BONE MARROW, SIGNAL = 4.4; NT HIT: M89643.1, EVALUE 2.20e-01; EST_HUMAN HIT: BE972522.1, EVALUE 3.30e-01; SWISSPROT HIT: P23615, EVALUE 1.90e+00
ctataagacaagttcccaaaatctgtgtctccagctcttatttctaactggcttccatctttatcatcctgatggattttttcatcttggggttccatcacaac

SEQ ID NO: 24170 - DNA, 223 bp, Homo sapiens
  MAP TO AL139008.3; EXPRESSED IN LUNG, SIGNAL = 6.1; EXPRESSED IN PLACENTA, SIGNAL = 5.3; EXPRESSED IN ADULT LIVER, SIGNAL = 6.1; EXPRESSED IN FETAL LIVER, SIGNAL = 7.8; EXPRESSED IN BRAIN, SIGNAL = 6.1; EXPRESSED IN BONE MARROW, SIGNAL = 8.1; EXPRESSED IN HELA, SIGNAL =  12; EXPRESSED IN HEART, SIGNAL = 6.5; SWISSPROT HIT: Q44767, EVALUE 1.30e+00; NT HIT: AL163204.2, EVALUE 2.00e-74; EST_HUMAN HIT: BE855441.1, EVALUE 4.00e-46
ctcagtcaaggagttcttgcagttatttgaagtctgtgggtttgaagtaggaattcttatggccattttgggaatatattttctgttgagttctatactattaagattttcaacacaaggtaactctgggtctggcctcataggaagagtgctgagaaaatattccatccgctctttctccataaagagcttggtgctgatcacagctattttcttatccgat

SEQ ID NO: 24171 - DNA, 136 bp, Homo sapiens
  MAP TO AC027279.1; EXPRESSED IN PLACENTA, SIGNAL = 1.4; EXPRESSED IN ADULT LIVER, SIGNAL = 1.7; EXPRESSED IN HELA, SIGNAL = 2.3; EXPRESSED IN FETAL LIVER, SIGNAL = 1.9; EXPRESSED IN BRAIN, SIGNAL = 2.3; EXPRESSED IN HEART, SIGNAL = 2.6; EXPRESSED IN BONE MARROW, SIGNAL = 2.6; NT HIT: AL163252.2, EVALUE 1.00e-31; EST_HUMAN HIT: AU124571.1, EVALUE 5.00e-44; SWISSPROT HIT: Q01522, EVALUE 1.80e+00
atgtgggaaagtttggagcttcctagagacttgttgaatggctttgcccaaaatgctgatagcaatatggacaataatgtccaggctgaggtggtctcagatggagatgaggagctcgttgggaattggagcacag

SEQ ID NO: 24172 - DNA, 144 bp, Homo sapiens
  MAP TO U82670.2; EXPRESSED IN PLACENTA, SIGNAL = 0.88; EXPRESSED IN HEART, SIGNAL = 1.2; EXPRESSED IN BONE MARROW, SIGNAL = 0.85; EXPRESSED IN LUNG, SIGNAL =   1; EXPRESSED IN ADULT LIVER, SIGNAL = 0.83; EXPRESSED IN FETAL LIVER, SIGNAL = 1.2; EXPRESSED IN BRAIN, SIGNAL = 0.86; SWISSPROT HIT: P51786, EVALUE 3.00e-04; EST_HUMAN HIT: AA994388.1, EVALUE 1.20e-01; NT HIT: gi11419630, EVALUE 1.00e-59
atggaaagactgatgagccctgggaattctttcaggatttggtgacatttgatgatgtggcatggtacctcaccacaagggagtggtttaagctggaccctgaacagagggcactggaatattatgggaacgtgacctctgtgg

SEQ ID NO: 24173 - DNA, 112 bp, Homo sapiens
  MAP TO AL121908.7; EXPRESSED IN BONE MARROW, SIGNAL = 1.3; EXPRESSED IN LUNG, SIGNAL = 1.4; EXPRESSED IN PLACENTA, SIGNAL = 1.2; EXPRESSED IN ADULT LIVER, SIGNAL = 1.3; EXPRESSED IN FETAL LIVER, SIGNAL = 1.1; EXPRESSED IN HEART, SIGNAL = 1.2; EXPRESSED IN BRAIN, SIGNAL = 1.6; NT HIT: gi6677898, EVALUE 6.20e-02; SWISSPROT HIT: O09029, EVALUE 1.40e+00
agttgccacacagtacccagagccaccagttcctctcctggttgctgtgtggctgagactgaccctggatcatgaggcatcctgctgcccagcccatcatttccatctggtc

SEQ ID NO: 24174 - DNA, 116 bp, Homo sapiens
  MAP TO AL137248.4; EXPRESSED IN LUNG, SIGNAL = 1.6; EXPRESSED IN PLACENTA, SIGNAL = 1.6; EXPRESSED IN ADULT LIVER, SIGNAL = 1.4; EXPRESSED IN FETAL LIVER, SIGNAL = 1.3; EXPRESSED IN BRAIN, SIGNAL = 1.7; EXPRESSED IN BONE MARROW, SIGNAL = 1.2; EXPRESSED IN HEART, SIGNAL = 1.3; NT HIT: gi6753429, EVALUE 1.00e+00
cttcctgccagaaaccagaggaatcatgctgccagaatgtaggctgtcagccccatagttcacaaatgtgagagaggcactgtgattgtcgctttgctgtgggttgcaaatctggg

SEQ ID NO: 24175 - DNA, 329 bp, Homo sapiens
  MAP TO AC025139.2; EXPRESSED IN LUNG, SIGNAL =   8; EXPRESSED IN PLACENTA, SIGNAL = 5.9; EXPRESSED IN ADULT LIVER, SIGNAL = 9.3; EXPRESSED IN HEART, SIGNAL = 4.9; EXPRESSED IN FETAL LIVER, SIGNAL =  20; EXPRESSED IN BRAIN, SIGNAL = 7.3; EXPRESSED IN HELA, SIGNAL =  15; EXPRESSED IN BONE MARROW, SIGNAL =  22; SWISSPROT HIT: P52859, EVALUE 3.00e-40; NT HIT: gi11418526, EVALUE 0.00e+00; EST_HUMAN HIT: BE255829.1, EVALUE 0.00e+00
agcaatgacaacaagaagctgacagccaggtgaatgttatccacaagctcatcgtctgtcatcttcacgtgaccaacagctacagccagatataacaccttcttcatttggaacttgattgtgaacttcacctcatccactttggccaccatgttttcgttgtgtgtgagcagggaagggaactttcctgccttatttagatctgggccgaggattcgtggaatctgcttgatcagagactctgaggccaaaaacgcatcatacttctcggccagcttcttgaccagttttttattcttgttgagttttttcagcgtctcagtgtccat

SEQ ID NO: 24176 - DNA, 270 bp, Homo sapiens
  MAP TO AC013726.3; EXPRESSED IN LUNG, SIGNAL = 1.4; EXPRESSED IN PLACENTA, SIGNAL = 1.4; EXPRESSED IN ADULT LIVER, SIGNAL = 1.1; EXPRESSED IN FETAL LIVER, SIGNAL = 3.6; EXPRESSED IN BRAIN, SIGNAL = 2.6; EXPRESSED IN BONE MARROW, SIGNAL = 2.5; EXPRESSED IN HEART, SIGNAL = 1.4; SWISSPROT HIT: P10272, EVALUE 9.00e-16; NT HIT: AF149773.1, EVALUE 2.00e-71; EST_HUMAN HIT: F06604.1, EVALUE 1.00e-109
cttatcagcataagcattgtcctgagcgatgggatctgatgccttttgatggcccttgcagtgtatgactccagcttcctttggaagtaaagcggccttgagaagagtttttattaaagaggcattaatgatggaggacccttgtgtggtgaggaaacttttcagcccataaaacatcatggtggtgcaggatatggggtcagtataaatattgacgtgtagtccctttgcaagagtgagggctcgaattaaggcaatgagttcggcttc

SEQ ID NO: 24177 - DNA, 325 bp, Homo sapiens
  MAP TO AL139248.2; EXPRESSED IN PLACENTA, SIGNAL = 1.4; EXPRESSED IN HEART, SIGNAL = 1.4; EXPRESSED IN FETAL LIVER, SIGNAL = 1.4; EXPRESSED IN BONE MARROW, SIGNAL = 1.4; EXPRESSED IN LUNG, SIGNAL = 1.4; EXPRESSED IN ADULT LIVER, SIGNAL = 1.7; EXPRESSED IN BRAIN, SIGNAL = 1.1; NT HIT: gi11426569, EVALUE 0.00e+00; SWISSPROT HIT: P32945, EVALUE 8.20e+00; EST_HUMAN HIT: BE781382.1, EVALUE 0.00e+00
actgaatctctgctccctcttcttgcttcttctcttgaactacagattgttttttctttggtaccaggccagatgagaggtctttctccatcatttcaggcttctgttcttccttttgatcgaaaagctgatctcccttttctctttgcttcttatcagccttcttttcctcaccttcacctttgatgagctgtttccagagagctggttcttgattcttgtcaagtaccttgaatggatttctcagccagttggaagaatgatgaaatgtctcagatgcatgctgagacttattggatacagaatgttctttggaatcaggatc

SEQ ID NO: 24178 - DNA, 396 bp, Homo sapiens
  MAP TO AL133293.14; EXPRESSED IN PLACENTA, SIGNAL = 5.5; EXPRESSED IN HEART, SIGNAL = 7.2; EXPRESSED IN FETAL LIVER, SIGNAL =  30; EXPRESSED IN BONE MARROW, SIGNAL =  31; EXPRESSED IN LUNG, SIGNAL =  15; EXPRESSED IN ADULT LIVER, SIGNAL =  15; EXPRESSED IN BRAIN, SIGNAL =  13; EXPRESSED IN HELA, SIGNAL =  25; NT HIT: gi4506660, EVALUE 0.00e+00; EST_HUMAN HIT: AW163779.1, EVALUE 0.00e+00; SWISSPROT HIT: P12970, EVALUE 3.00e-51
gtctcttagtggagatgtcccctttgccagcagttttctcctcggcctgggccaagagcctctgcttcttctcttgctttgtctctggtctgtacttgtgggccagctcaagcagctgagtagcagtttggcggtccagggcctgggtgaactggttaattgcaggaggcactttcagccgtttatagaggaaggctctctgatgctgcaacttgatatagcggggccatttcacaaaacgggtgaggtctcttttgggctggatgtcctgtccaacaccaaaattcttaggccttttctcaaacaggggattcaccactttcttggcctcctgcttcttcacgacagcaggggctggagccaccttcatcccccggccttctttcctttcggcat

SEQ ID NO: 24179 - DNA, 147 bp, Homo sapiens
  MAP TO AC024495.2; EXPRESSED IN LUNG, SIGNAL = 1.5; EXPRESSED IN PLACENTA, SIGNAL = 1.4; EXPRESSED IN FETAL LIVER, SIGNAL = 1.7; EXPRESSED IN BONE MARROW, SIGNAL = 1.7; EXPRESSED IN ADULT LIVER, SIGNAL = 1.5; EXPRESSED IN HEART, SIGNAL = 1.8; EXPRESSED IN BRAIN, SIGNAL = 1.4; SWISSPROT HIT: P38894, EVALUE 2.30e+00; EST_HUMAN HIT: BE350127.1, EVALUE 2.00e-31; NT HIT: AF223391.1, EVALUE 3.00e-35
ctacacggggtcaggatcatcaatatcactgccttccaccttcatatcttgtcccactggaagttcttcaggagcaataacatgcatagagctgtcgtctcctatgataacaatgccttcttctggaacacctcccaaaggatgtgc

SEQ ID NO: 24180 - DNA, 226 bp, Homo sapiens
  MAP TO AL162390.2; EXPRESSED IN HELA, SIGNAL = 2.6; EXPRESSED IN BRAIN, SIGNAL = 2.3; EXPRESSED IN LUNG, SIGNAL = 4.5; EXPRESSED IN PLACENTA, SIGNAL = 1.7; EXPRESSED IN ADULT LIVER, SIGNAL = 2.8; EXPRESSED IN FETAL LIVER, SIGNAL = 2.5; EXPRESSED IN HEART, SIGNAL = 2.4; EXPRESSED IN BONE MARROW, SIGNAL = 1.8; SWISSPROT HIT: Q13886, EVALUE 5.00e-42; EST_HUMAN HIT: AV645633.1, EVALUE 1.00e-124; NT HIT: gi11429354, EVALUE 1.00e-124
gtgaacggccctttccctgcacgtggccagactgccttaaaaagttctcccgctcagacgagctgacccgccactaccggacccacactggggaaaagcagttccgctgtccgctgtgtgagaagcgcttcatgaggagtgaccacctcacaaagcacgcccggcggcacaccgagttccaccccagcatgatcaagcgatcgaaaaaggcgctggccaacgcttt

SEQ ID NO: 24181 - DNA, 133 bp, Homo sapiens
  MAP TO AL122000.10; EXPRESSED IN LUNG, SIGNAL = 2.7; EXPRESSED IN ADULT LIVER, SIGNAL = 2.5; EXPRESSED IN FETAL LIVER, SIGNAL = 2.2; EXPRESSED IN BRAIN, SIGNAL =   2; EXPRESSED IN BONE MARROW, SIGNAL = 2.1; EXPRESSED IN HELA, SIGNAL =   3; EXPRESSED IN PLACENTA, SIGNAL = 2.3; EXPRESSED IN HEART, SIGNAL = 2.1; SWISSPROT HIT: Q61398, EVALUE 1.40e+00; EST_HUMAN HIT: BF085149.1, EVALUE 1.10e-01
ctcctttggaaatttcagaaacagccgttgttctggcaaggaaatgagttcaaaagcaatgaagaacaccaatcccactgccatccccaccatcacacacaaatgtgtgcttgtatgtgcctgcacgtatatg

SEQ ID NO: 24182 - DNA, 134 bp, Homo sapiens
  MAP TO AL161426.2; EXPRESSED IN LUNG, SIGNAL = 2.9; EXPRESSED IN ADULT LIVER, SIGNAL = 3.6; EXPRESSED IN BONE MARROW, SIGNAL =   3; EXPRESSED IN PLACENTA, SIGNAL = 3.1; EXPRESSED IN FETAL LIVER, SIGNAL =   3; EXPRESSED IN BRAIN, SIGNAL = 3.3; EXPRESSED IN HEART, SIGNAL = 3.3; NT HIT: AJ250235.1, EVALUE 3.00e-13; SWISSPROT HIT: Q63514, EVALUE 2.40e+00; EST_HUMAN HIT: AI472167.1, EVALUE 9.00e-18
agcatccctaatccgaaaacccgaaatccaaaatgctccaataagcctttcctttgaatgttatgttggtactcaaaatgtttcagattttggagcatttcatatttcagattttcatatttgggatgctcaac

SEQ ID NO: 24183 - DNA, 183 bp, Homo sapiens
  MAP TO AL136112.9; EXPRESSED IN PLACENTA, SIGNAL = 1.2; EXPRESSED IN HEART, SIGNAL = 1.4; EXPRESSED IN BONE MARROW, SIGNAL = 1.5; EXPRESSED IN LUNG, SIGNAL = 1.2; EXPRESSED IN ADULT LIVER, SIGNAL = 1.6; EXPRESSED IN FETAL LIVER, SIGNAL = 1.4; EXPRESSED IN BRAIN, SIGNAL = 1.4; SWISSPROT HIT: P55995, EVALUE 2.30e+00; NT HIT: M19364.1, EVALUE 2.70e-02; EST_HUMAN HIT: AI147427.1, EVALUE 1.00e-73
ataatggaatctgaaaatatggattctgaaaatatgaagacagaaaatatggaatctcaaaatgtagactttgagagtgtttcttcagttacagctctggaagccctctctaagctacttaatcctgaagaagaggatgattctgactatggacaggtggtcatatacttaacagttgaatta

SEQ ID NO: 24184 - DNA, 219 bp, Homo sapiens
  MAP TO AC022392.3; EXPRESSED IN PLACENTA, SIGNAL = 4.7; EXPRESSED IN ADULT LIVER, SIGNAL = 4.8; EXPRESSED IN HELA, SIGNAL =   6; EXPRESSED IN BRAIN, SIGNAL = 5.3; EXPRESSED IN BONE MARROW, SIGNAL = 4.1; EXPRESSED IN LUNG, SIGNAL =   5; EXPRESSED IN HEART, SIGNAL = 4.5; EXPRESSED IN FETAL LIVER, SIGNAL = 4.6; NT HIT: gi7662035, EVALUE 1.00e-120; EST_HUMAN HIT: BE392102.1, EVALUE 1.00e-120; SWISSPROT HIT: P24054, EVALUE 3.00e-05
tctccctccagaagcagaagcaccactcagcagtagagacccggccatccttgtaggtgtcacaggagttgaagaagggacggatgcagacctcgtacttgtccaggttgatggcggccagctccgtctggtccaggaagaggtcagcactggtgtccagcttggagaacatccagccaatggagtccttgcagctggcccccaggctcttgtccagcc

SEQ ID NO: 24185 - DNA, 359 bp, Homo sapiens
  MAP TO AC012200.5; EXPRESSED IN HELA, SIGNAL =  31; EXPRESSED IN LUNG, SIGNAL =  37; EXPRESSED IN BONE MARROW, SIGNAL =  32; EXPRESSED IN BRAIN, SIGNAL =  15; EXPRESSED IN FETAL LIVER, SIGNAL =  40; EXPRESSED IN HEART, SIGNAL =  12; EXPRESSED IN ADULT LIVER, SIGNAL =  42; EXPRESSED IN PLACENTA, SIGNAL =  17; NT HIT: U09823.1, EVALUE 1.00e-123; EST_HUMAN HIT: BF684061.1, EVALUE 1.00e-118; SWISSPROT HIT: Q90835, EVALUE 2.00e-56
tcaatgttacaactgaaataaagtctgttgaaatgcaccatgaagctttgagtgaagctcttcctggggacagcatgggcttcaatatcaagaatgtgtctgtcaaagatgttcgttgtggcaatgttgttggtgacagcaaaaatgacccaccaatggaagcagctggcttcactgctcaggtgattatcctgaaccatccaggccaaatccctgttggcagtgcccctgtactggattgtcacacagctcaccttacttgcaagtttgctgaactgaaggaaaagactgattgccattccggtaagaagctggaaaatggccctaaattcttgaaatctggtgatgctgccatttgt

SEQ ID NO: 24186 - DNA, 124 bp, Homo sapiens
  MAP TO AC026437.1; EXPRESSED IN LUNG, SIGNAL = 1.7; EXPRESSED IN PLACENTA, SIGNAL = 1.7; EXPRESSED IN ADULT LIVER, SIGNAL = 1.7; EXPRESSED IN FETAL LIVER, SIGNAL =   2; EXPRESSED IN BRAIN, SIGNAL = 2.1; EXPRESSED IN BONE MARROW, SIGNAL = 1.8; EXPRESSED IN HEART, SIGNAL = 2.1; NT HIT: AF274753.1, EVALUE 6.00e-64; EST_HUMAN HIT: AW170131.1, EVALUE 6.00e-62
tcacagtgagggcgcatctcaccgggtggctgatgacactgaagaaaaccttcgtccttgcccccagctctgtgctgcggatcatcgtcctcatcgccagcctcgtggtcctaccctacctggg

SEQ ID NO: 24187 - DNA, 177 bp, Homo sapiens
  MAP TO AP001433.1; EXPRESSED IN HELA, SIGNAL = 2.6; EXPRESSED IN LUNG, SIGNAL = 2.2; EXPRESSED IN ADULT LIVER, SIGNAL = 2.1; EXPRESSED IN HEART, SIGNAL = 1.8; EXPRESSED IN BRAIN, SIGNAL = 1.6; EXPRESSED IN BONE MARROW, SIGNAL =   2; EXPRESSED IN PLACENTA, SIGNAL = 1.9; EXPRESSED IN FETAL LIVER, SIGNAL = 2.1; NT HIT: M76729.1, EVALUE 1.00e-01; SWISSPROT HIT: P37596, EVALUE 2.30e+00; EST_HUMAN HIT: BE253101.1, EVALUE 1.50e-01
gctgctggttcttcactgaaccaggagcccgacctttcacatacttttgtgcagcttttgctaaaggaacagacctggccggagctggacagtgaggccagggttgcattcaaatggaatgaccagctggacattggtccctgcctactggcaactggggagaatgagcaagaaaag

SEQ ID NO: 24188 - DNA, 102 bp, Homo sapiens
  MAP TO AL121920.7; EXPRESSED IN LUNG, SIGNAL = 2.6; EXPRESSED IN PLACENTA, SIGNAL = 2.8; EXPRESSED IN ADULT LIVER, SIGNAL = 3.7; EXPRESSED IN BRAIN, SIGNAL = 3.6; EXPRESSED IN BONE MARROW, SIGNAL = 3.5; EXPRESSED IN FETAL LIVER, SIGNAL = 3.7; EXPRESSED IN HELA, SIGNAL = 4.3; EXPRESSED IN HEART, SIGNAL = 2.9; NT HIT: AL163248.2, EVALUE 2.00e-29; EST_HUMAN HIT: AI052242.1, EVALUE 3.00e-29
atgcttcctgcccttggacatcggactccaggttcttcagttttggaactcagactggctttccttgctccgcagcctgcagatggcctattgtgggacctt

SEQ ID NO: 24189 - DNA, 311 bp, Homo sapiens
  MAP TO AC008688.4; EXPRESSED IN LUNG, SIGNAL = 3.7; EXPRESSED IN ADULT LIVER, SIGNAL = 3.4; EXPRESSED IN FETAL LIVER, SIGNAL =   3; EXPRESSED IN BRAIN, SIGNAL =   3; EXPRESSED IN BONE MARROW, SIGNAL = 3.1; EXPRESSED IN PLACENTA, SIGNAL = 3.4; EXPRESSED IN HEART, SIGNAL = 2.9; NT HIT: gi11416801, EVALUE 0.00e+00; EST_HUMAN HIT: BE263191.1, EVALUE 0.00e+00; SWISSPROT HIT: P38810, EVALUE 1.80e-01
ggaatgatcatttacgtccctaatccgtagctccgcctgaaaaaactgcaagggattttctagtaacacctggaaaggtaggacacagggctctgtggggccgcacagctcctcccggtccaatttctcatttaacaacaaatccccggtctgcctatcgaactgcaaatgcattttttttcctttggaaacgaccctggcccccctcacagcaagttctcctatctccagccccaggtcttttaacaaattggccacaaaggagccactctccgtttcctcggccactgaatagtgcctaggctggcaac

SEQ ID NO: 24190 - DNA, 256 bp, Homo sapiens
  MAP TO AL109614.27; EXPRESSED IN PLACENTA, SIGNAL = 2.6; EXPRESSED IN HEART, SIGNAL = 2.6; EXPRESSED IN BONE MARROW, SIGNAL = 2.2; EXPRESSED IN LUNG, SIGNAL = 2.8; EXPRESSED IN ADULT LIVER, SIGNAL = 3.9; EXPRESSED IN FETAL LIVER, SIGNAL = 2.4; EXPRESSED IN BRAIN, SIGNAL = 2.6; EXPRESSED IN HELA, SIGNAL = 3.5; SWISSPROT HIT: P23500, EVALUE 5.20e+00; NT HIT: M24461.1, EVALUE 6.20e-01; EST_HUMAN HIT: AI686126.1, EVALUE 9.20e-01
gctcttcaggaggcagtagataaatggtccagctttcctggggctcaggaagaggtgggagttgaggtcctgaatcaaaaactctgattggctctttgtgacatcatagaaatggggagtagtgtagtaaaagaagcctttgaccataaaaatatggaaggtaacttgtccaaaccagtttttcatgttgaacttgctgtcccaggtgagcttgctagaattgaattctttcaaactaagctctttggacttttaa

SEQ ID NO: 24191 - DNA, 103 bp, Homo sapiens
  MAP TO AC012611.4; EXPRESSED IN ADULT LIVER, SIGNAL = 3.1; EXPRESSED IN PLACENTA, SIGNAL = 2.9; EXPRESSED IN HELA, SIGNAL = 3.8; EXPRESSED IN FETAL LIVER, SIGNAL = 3.2; EXPRESSED IN BRAIN, SIGNAL = 2.6; EXPRESSED IN BONE MARROW, SIGNAL = 2.8; EXPRESSED IN LUNG, SIGNAL = 3.2; EXPRESSED IN HEART, SIGNAL = 3.3; NT HIT: AF230878.1, EVALUE 8.70e-01; SWISSPROT HIT: P98088, EVALUE 5.50e+00; EST_HUMAN HIT: N69866.1, EVALUE 3.30e-01
atgttccacaagagccaaagctgcgagatcctcaggcaacagctgcgaagaataagcactcactgtccaaaattcttcccaaaccaactgattggtagtgaag

SEQ ID NO: 24192 - DNA, 146 bp, Homo sapiens
  MAP TO AL121585.13; EXPRESSED IN LUNG, SIGNAL = 2.8; EXPRESSED IN PLACENTA, SIGNAL = 2.6; EXPRESSED IN ADULT LIVER, SIGNAL = 3.7; EXPRESSED IN HEART, SIGNAL = 2.6; EXPRESSED IN BRAIN, SIGNAL = 2.5; EXPRESSED IN BONE MARROW, SIGNAL =   3; EXPRESSED IN FETAL LIVER, SIGNAL = 3.5; EXPRESSED IN HELA, SIGNAL = 4.1; NT HIT: gi11421928, EVALUE 5.00e-77; SWISSPROT HIT: Q9Y5X3, EVALUE 1.00e-21; EST_HUMAN HIT: BE091956.1, EVALUE 8.00e-77
cttcttttgcagattcggaaagttgttcaaatttctggcagcactcctgctggtgtgcctcagccaacttgacgtctttgctctttaaccgggccttatccagagctttgtttgagttctcatagtcaatgagggctttggtgcgt

SEQ ID NO: 24193 - DNA, 111 bp, Homo sapiens
  MAP TO AL162263.1; EXPRESSED IN HEART, SIGNAL = 2.1; EXPRESSED IN BRAIN, SIGNAL = 1.5; EXPRESSED IN LUNG, SIGNAL = 1.7; EXPRESSED IN PLACENTA, SIGNAL = 1.6; EXPRESSED IN ADULT LIVER, SIGNAL = 1.4; EXPRESSED IN FETAL LIVER, SIGNAL = 1.6; EXPRESSED IN BONE MARROW, SIGNAL = 1.6; NT HIT: D44606.1, EVALUE 1.50e-02; EST_HUMAN HIT: BE676486.1, EVALUE 3.60e-01
tttctcaatggaagttgtattcaccattccttcctgtcttctttcttgagtcagtgccagcaagcactgttcatagaaatcagatactcctaccagtgctccctggtccag

SEQ ID NO: 24194 - DNA, 199 bp, Homo sapiens
  MAP TO AL121946.11; EXPRESSED IN HELA, SIGNAL =   4; EXPRESSED IN HEART, SIGNAL = 1.5; EXPRESSED IN BONE MARROW, SIGNAL = 1.7; EXPRESSED IN LUNG, SIGNAL = 1.9; EXPRESSED IN PLACENTA, SIGNAL = 1.3; EXPRESSED IN ADULT LIVER, SIGNAL = 2.2; EXPRESSED IN BRAIN, SIGNAL = 2.9; EXPRESSED IN FETAL LIVER, SIGNAL = 2.7; NT HIT: X77961.1, EVALUE 1.20e-01; SWISSPROT HIT: P36150, EVALUE 1.70e+00; EST_HUMAN HIT: BE513016.1, EVALUE 1.80e-01
ttaagatagaggtctgtatcctgcacagtttccacagtgacaatctcttccatcggtttggcacctttaacacctgttccactgatgatgacaacttcatccccagggttccagtccacagcatcttctaaagccagcactgtgtctagggcatgggcagttgctctaagacaggtgacaattacttctggtagtgaac

SEQ ID NO: 24195 - DNA, 116 bp, Homo sapiens
  MAP TO AC008431.2; EXPRESSED IN HEART, SIGNAL =   2; EXPRESSED IN BONE MARROW, SIGNAL =   2; EXPRESSED IN LUNG, SIGNAL =   2; EXPRESSED IN PLACENTA, SIGNAL = 2.4; EXPRESSED IN ADULT LIVER, SIGNAL = 1.6; EXPRESSED IN FETAL LIVER, SIGNAL = 2.1; EXPRESSED IN BRAIN, SIGNAL = 2.1; NT HIT: AF085164.1, EVALUE 2.50e-01; SWISSPROT HIT: P13682, EVALUE 9.30e+00
tcagcgcctgccgcggccttctctccttgagtcgctcttgttctctaaggcttgctggcccccagggccattgttcttccagacggcggctggaataggctgcagcttcggcatcc

SEQ ID NO: 24196 - DNA, 171 bp, Homo sapiens
  MAP TO AC022995.2; EXPRESSED IN PLACENTA, SIGNAL =   5; EXPRESSED IN BONE MARROW, SIGNAL =   4; EXPRESSED IN ADULT LIVER, SIGNAL = 4.3; EXPRESSED IN HEART, SIGNAL = 3.1; EXPRESSED IN BRAIN, SIGNAL = 4.1; EXPRESSED IN LUNG, SIGNAL = 4.6; EXPRESSED IN HELA, SIGNAL =   4; EXPRESSED IN FETAL LIVER, SIGNAL =   4; EST_HUMAN HIT: BE044076.1, EVALUE 1.00e-26; NT HIT: U93163.1, EVALUE 9.00e-27; SWISSPROT HIT: P71017, EVALUE 3.00e+00
acaaggtcaagatcctcaatatcactgtcttccacctccacatcttgtcccattaaagggtcttcaggggcaatatcacccaaggaactgtcatctcctatgataacaacgcctacttcaggaataccccctgaagaacctgcctgttttacacttagctttttttgcaaa

SEQ ID NO: 24197 - DNA, 179 bp, Homo sapiens
  MAP TO AC022392.3; EXPRESSED IN ADULT LIVER, SIGNAL = 4.4; EXPRESSED IN BRAIN, SIGNAL = 2.9; EXPRESSED IN LUNG, SIGNAL = 4.4; EXPRESSED IN HEART, SIGNAL =   3; EXPRESSED IN BONE MARROW, SIGNAL = 4.5; EXPRESSED IN PLACENTA, SIGNAL = 3.5; EXPRESSED IN HELA, SIGNAL = 3.1; EXPRESSED IN FETAL LIVER, SIGNAL = 3.7; EST_HUMAN HIT: BF035327.1, EVALUE 3.00e-27; SWISSPROT HIT: P34473, EVALUE 3.90e+00; NT HIT: AF181897.1, EVALUE 2.00e-24
gaaagctgagagagacaaggaagctgcagaaaatttggaagctgctagcgttggttggttcatgaggtttaaggaaagaagacatctccataacataaaagtgcaaggtaaagcaggaagtgctgatggagaattggcagcaagttatcccaaggatctagctaagatcactgacgaag

SEQ ID NO: 24198 - DNA, 355 bp, Homo sapiens
  MAP TO AL161781.2; EXPRESSED IN LUNG, SIGNAL =  14; EXPRESSED IN ADULT LIVER, SIGNAL =  17; EXPRESSED IN HEART, SIGNAL =  13; EXPRESSED IN FETAL LIVER, SIGNAL =  14; EXPRESSED IN BRAIN, SIGNAL =  13; EXPRESSED IN BONE MARROW, SIGNAL =  16; EXPRESSED IN PLACENTA, SIGNAL =  15; EXPRESSED IN HELA, SIGNAL =  23; EST_HUMAN HIT: W93595.1, EVALUE 5.10e+00; NT HIT: gi11418134, EVALUE 2.20e-01; SWISSPROT HIT: P48634, EVALUE 2.20e-01
gaaagtgttcagctttgagttctctacaccaagatgcacacatatacctccccctaaaggaacagcacgcaggaaactctgcagtgctccatcaggaagcgactccctgaggagtgctccgtcaggatgcagtgctccatcaggaagcgactccctgaggagtgctctgtcaggatgcagtgctccatcaggaagcgactccctgaggagtgctccgtcaggatgcagtgctccatcaggaagtgactccctgaggctcgcagaggggccatggcccagctgcccctgagcttcaggaactccgcaatgccaagcagcgctgcctcgagcatttccgtgtgtttctcccggtgca

SEQ ID NO: 24199 - DNA, 156 bp, Homo sapiens
  MAP TO AL078591.18; EXPRESSED IN LUNG, SIGNAL = 1.8; EXPRESSED IN BONE MARROW, SIGNAL = 1.6; EXPRESSED IN HEART, SIGNAL = 1.7; EXPRESSED IN PLACENTA, SIGNAL = 1.9; EXPRESSED IN ADULT LIVER, SIGNAL =   2; EXPRESSED IN FETAL LIVER, SIGNAL = 2.2; EXPRESSED IN BRAIN, SIGNAL = 1.8; EST_HUMAN HIT: BE156197.1, EVALUE 2.00e-09; SWISSPROT HIT: O61305, EVALUE 5.20e+00; NT HIT: AF196864.1, EVALUE 2.00e-12
tgggacttggaagagtgaatacaagggaaactaacatgaacaggaagctcatgctgcttgctatgctgtgcataatcaaaccttttgtctttgacccaagagtcttgtgtcttctgccaacatatatgaaactgtggcagactagcttgttaggtt

SEQ ID NO: 24200 - DNA, 393 bp, Homo sapiens
  MAP TO AL139389.3; EXPRESSED IN ADULT LIVER, SIGNAL = 1.9; EXPRESSED IN FETAL LIVER, SIGNAL = 2.4; EXPRESSED IN BRAIN, SIGNAL = 1.6; EXPRESSED IN LUNG, SIGNAL = 1.8; EXPRESSED IN PLACENTA, SIGNAL = 1.9; EXPRESSED IN HEART, SIGNAL = 2.7; EXPRESSED IN BONE MARROW, SIGNAL = 1.8; SWISSPROT HIT: Q01320, EVALUE 5.00e+00; NT HIT: AF180736.1, EVALUE 9.70e-01; EST_HUMAN HIT: BF348013.1, EVALUE 0.00e+00
ctgcccatgcttttgctgaggggccatcccatgaagcatttcaggatgtgatgaggtcttgagatcagtcccctgtgttttgggacgcactacatcagagaccagactggacgagatagctagagacttgggccggacagctgcggtgccaatcccccctggggggccttgttcaacttttctgcttgcagcctcatcttccccttcggagtccacaataaggacatattcagctttgaagaggtcactttgctgcatcccttgaagtttgtttgcttcgaattccctttcttgtaaaatcgttccactgacctctgaaggacaagtcaatttcgcttggtctctctcttgttggctcccagcattcaaggtcaagtagtcattggatttaga

SEQ ID NO: 24201 - DNA, 185 bp, Homo sapiens
  MAP TO AL161747.1; EXPRESSED IN ADULT LIVER, SIGNAL = 1.7; EXPRESSED IN HEART, SIGNAL = 1.5; EXPRESSED IN BONE MARROW, SIGNAL = 2.4; EXPRESSED IN LUNG, SIGNAL = 1.9; EXPRESSED IN BRAIN, SIGNAL = 2.8; EXPRESSED IN PLACENTA, SIGNAL = 1.6; EXPRESSED IN FETAL LIVER, SIGNAL =   2; NT HIT: AB046784.1, EVALUE 1.00e-100; EST_HUMAN HIT: AI972388.1, EVALUE 1.00e-100
tcagtcatcagcatcttcactggagtctgagttagctggcatcataggatcatcaatgagtgagaagtccctttctgagctatcatagccctgagataagtcatcatcatcttcttcatcctcatcgtcatcctcctcaggttgcagtggtggcaaccgcaaggtagtaccagaggcggtagtca

SEQ ID NO: 24202 - DNA, 103 bp, Homo sapiens
  MAP TO AC021677.3; EXPRESSED IN PLACENTA, SIGNAL = 1.8; EXPRESSED IN FETAL LIVER, SIGNAL = 1.5; EXPRESSED IN BONE MARROW, SIGNAL = 1.4; EXPRESSED IN HEART, SIGNAL = 1.7; EXPRESSED IN HELA, SIGNAL = 2.7; EXPRESSED IN LUNG, SIGNAL = 1.8; EXPRESSED IN ADULT LIVER, SIGNAL = 2.1; EXPRESSED IN BRAIN, SIGNAL = 1.5; SWISSPROT HIT: Q03351, EVALUE 7.30e-02; NT HIT: S76475.1, EVALUE 2.00e-51; EST_HUMAN HIT: AI917078.1, EVALUE 2.00e-51
ccttcattccaaatttggaccgtcgaccatatttgttgatcatgacgaagagaaccaccaacaggacacaggcaaaagcagcaagtccaactgctatggatac

SEQ ID NO: 24203 - DNA, 99 bp, Homo sapiens
  MAP TO AC021677.3; EXPRESSED IN ADULT LIVER, SIGNAL = 2.9; EXPRESSED IN BRAIN, SIGNAL = 2.3; EXPRESSED IN LUNG, SIGNAL = 2.8; EXPRESSED IN PLACENTA, SIGNAL = 2.7; EXPRESSED IN HELA, SIGNAL = 4.7; EXPRESSED IN BONE MARROW, SIGNAL = 2.8; EXPRESSED IN HEART, SIGNAL = 2.4; EXPRESSED IN FETAL LIVER, SIGNAL =   3; NT HIT: X97378.1, EVALUE 2.10e-01; EST_HUMAN HIT: AA775971.1, EVALUE 1.20e+00; SWISSPROT HIT: P23900, EVALUE 4.20e+00
aatgacacttcgcatgcactgggaccttccagataaggaaacccaaactctgtctggtcacggaccccttcattttgatgatgtttcagggagttcagc

SEQ ID NO: 24204 - DNA, 141 bp, Homo sapiens
  MAP TO AC011159.3; EXPRESSED IN PLACENTA, SIGNAL =   5; EXPRESSED IN ADULT LIVER, SIGNAL = 5.2; EXPRESSED IN FETAL LIVER, SIGNAL = 4.5; EXPRESSED IN BRAIN, SIGNAL = 5.2; EXPRESSED IN BONE MARROW, SIGNAL = 4.9; EXPRESSED IN LUNG, SIGNAL = 5.3; EXPRESSED IN HELA, SIGNAL = 3.3; EXPRESSED IN HEART, SIGNAL = 5.4; EST_HUMAN HIT: AU125430.1, EVALUE 1.90e+00; NT HIT: AF042084.1, EVALUE 1.30e+00; SWISSPROT HIT: P50201, EVALUE 5.30e+00
ctggctcctatttcatacaactccatgaagcccagcacattagcaatagagcgaattgcaattatagtactctgccccattcccaggacactttcattcacaatggcatttgtcctgtgagatcccactttccctacagtc

SEQ ID NO: 24205 - DNA, 114 bp, Homo sapiens
  MAP TO AC013626.3; EXPRESSED IN ADULT LIVER, SIGNAL =  23; EXPRESSED IN HELA, SIGNAL =  30; EXPRESSED IN BRAIN, SIGNAL =  16; EXPRESSED IN LUNG, SIGNAL =  19; EXPRESSED IN PLACENTA, SIGNAL =  17; EXPRESSED IN FETAL LIVER, SIGNAL =  16; EXPRESSED IN HEART, SIGNAL =  16; EXPRESSED IN BONE MARROW, SIGNAL =  16; SWISSPROT HIT: P34092, EVALUE 3.20e+00; NT HIT: U89651.2, EVALUE 2.50e-01
gtgtgcggaaaaacacggcttctgctggagatggaaaaaggactctggggaggacaagatgcctcatgtcaaagcaacaaggttccagtgaagagctgcaggcctcagaggcag

SEQ ID NO: 24206 - DNA, 121 bp, Homo sapiens
  MAP TO AC018761.2; EXPRESSED IN ADULT LIVER, SIGNAL = 6.7; EXPRESSED IN BRAIN, SIGNAL = 6.4; EXPRESSED IN BONE MARROW, SIGNAL = 8.1; EXPRESSED IN LUNG, SIGNAL = 7.7; EXPRESSED IN HELA, SIGNAL = 4.8; EXPRESSED IN PLACENTA, SIGNAL =  13; EXPRESSED IN HEART, SIGNAL = 6.2; EXPRESSED IN FETAL LIVER, SIGNAL = 5.8; EST_HUMAN HIT: AW410687.1, EVALUE 5.00e-62; SWISSPROT HIT: P25387, EVALUE 1.00e-03
tggatggcaattactgcctgacgtgcggcagtgacaagacgctgaagctgtggaacccgcttcgggggacgctgctgcggacgtacagcggccacggctacgaggtgctggatgcggccgg

SEQ ID NO: 24207 - DNA, 400 bp, Homo sapiens
  MAP TO AL157381.7; EXPRESSED IN HELA, SIGNAL = 2.6; EXPRESSED IN LUNG, SIGNAL = 1.5; EXPRESSED IN ADULT LIVER, SIGNAL = 1.7; EXPRESSED IN FETAL LIVER, SIGNAL = 1.8; EXPRESSED IN BRAIN, SIGNAL = 1.7; EXPRESSED IN BONE MARROW, SIGNAL =   2; EXPRESSED IN PLACENTA, SIGNAL = 1.7; EXPRESSED IN HEART, SIGNAL = 1.7; SWISSPROT HIT: O02754, EVALUE 6.00e-01; EST_HUMAN HIT: AW340174.1, EVALUE 1.00e-99; NT HIT: AL163246.2, EVALUE 1.00e-86
ggctggggcaaagttctccagaaggccatgtatgctctgaatcagcatccaatatatgttactgtttttcccattgccaggattcataagtcctggaatcaaggggtggaagtagaagtggcatcactcaccatcacccctagtgatccactagcaaaatttttgctttccgttcccacaacattacattctcctggcctagaggtcttagttccagctggaggaatgctgccaccaggagacacaacaatcccattgaactggaagttaatattgccacctggacactttgggctcctcctacctttaagtcaacaggctaagaaggcagttacagtgttggctagggtgattgacccagactatcaggatgaaatcagtctactactccacaatggag

SEQ ID NO: 24208 - DNA, 239 bp, Homo sapiens
  MAP TO AC009410.3; EXPRESSED IN ADULT LIVER, SIGNAL = 0.69; EXPRESSED IN BRAIN, SIGNAL = 0.85; EXPRESSED IN LUNG, SIGNAL = 1.2; EXPRESSED IN HEART, SIGNAL = 1.3; EXPRESSED IN PLACENTA, SIGNAL = 1.8; EXPRESSED IN FETAL LIVER, SIGNAL = 1.1; EXPRESSED IN BONE MARROW, SIGNAL = 1.1; SWISSPROT HIT: Q49460, EVALUE 1.50e+00; EST_HUMAN HIT: T94149.1, EVALUE 6.00e-05; NT HIT: AJ276505.1, EVALUE 8.90e+00
ctgtttcactacattaatgataacatactaacctctgagtctcttacggacctggagactgtcctacgaatcgtcttggacagcctgaaggacaaggaatggaaagtcaacctcaagaagaaacaggggcccagcatagagatcaaattcttgagagtttcctggttaagatgcaaaacctactcggagctgtcattgataagacagcacagcagcccatttcccagacagtaaagcaa

SEQ ID NO: 24209 - DNA, 93 bp, Homo sapiens
  MAP TO AC022562.3; EXPRESSED IN ADULT LIVER, SIGNAL = 0.99; EXPRESSED IN BONE MARROW, SIGNAL =   1; EXPRESSED IN HEART, SIGNAL = 1.3; EXPRESSED IN LUNG, SIGNAL = 1.1; EXPRESSED IN PLACENTA, SIGNAL = 0.99; EXPRESSED IN FETAL LIVER, SIGNAL = 0.96; EXPRESSED IN BRAIN, SIGNAL = 1.2; SWISSPROT HIT: P22544, EVALUE 9.50e+00; EST_HUMAN HIT: AA024427.1, EVALUE 4.50e+00; NT HIT: AB002297.1, EVALUE 1.00e-45
cgcctcctgagcgtgcgatttgctcatgatggtgagcagagtctgcaagagcacgtccaggaggctctccaccatcatctctacttcctccat

SEQ ID NO: 24210 - DNA, 238 bp, Homo sapiens
  MAP TO AC025313.2; EXPRESSED IN HEART, SIGNAL = 7.2; EXPRESSED IN BONE MARROW, SIGNAL = 8.4; EXPRESSED IN ADULT LIVER, SIGNAL = 7.1; EXPRESSED IN BRAIN, SIGNAL = 7.6; EXPRESSED IN HELA, SIGNAL =   6; EXPRESSED IN LUNG, SIGNAL = 7.3; EXPRESSED IN PLACENTA, SIGNAL = 6.8; EXPRESSED IN FETAL LIVER, SIGNAL = 7.3; EST_HUMAN HIT: T08169.1, EVALUE 6.00e-05; NT HIT: AF202635.1, EVALUE 4.00e-05; SWISSPROT HIT: Q07337, EVALUE 1.50e+00
aaagactgtatctacaatatctttcattattttcttgattggctgtcataagttctgtgaagtcatgcataacatctggacacaattttctccagtaggaatttctcatttttgccttgacagcttgcacagccttttctataacaacaatggcattttcaatgatgtaatccttccagacattggttatgttctctcctttggggttctcttccatagcattgacaatccttttcat

SEQ ID NO: 24211 - DNA, 149 bp, Homo sapiens
  MAP TO AC010910.6; EXPRESSED IN HEART, SIGNAL = 2.3; EXPRESSED IN FETAL LIVER, SIGNAL = 2.1; EXPRESSED IN BRAIN, SIGNAL = 2.6; EXPRESSED IN LUNG, SIGNAL = 2.7; EXPRESSED IN HELA, SIGNAL = 2.2; EXPRESSED IN PLACENTA, SIGNAL = 2.5; EXPRESSED IN ADULT LIVER, SIGNAL = 2.7; EXPRESSED IN BONE MARROW, SIGNAL = 2.2; SWISSPROT HIT: Q9ZE07, EVALUE 6.90e+00; NT HIT: X72019.1, EVALUE 1.30e+00
ttctgatgctgagtttgagccagaactcttcaggacaccatatgaaaaacggctttctttctcaagtatggattgcatgttgatgtccacgatgtgtttatttgcctcaagtatgttttggatgatgatgtccagatagagaaatagaa

SEQ ID NO: 24212 - DNA, 280 bp, Homo sapiens
  MAP TO AC019233.3; EXPRESSED IN LUNG, SIGNAL = 5.5; EXPRESSED IN PLACENTA, SIGNAL = 4.5; EXPRESSED IN HEART, SIGNAL =   4; EXPRESSED IN FETAL LIVER, SIGNAL = 4.5; EXPRESSED IN BONE MARROW, SIGNAL = 4.1; EXPRESSED IN ADULT LIVER, SIGNAL = 5.1; EXPRESSED IN HELA, SIGNAL = 6.7; EXPRESSED IN BRAIN, SIGNAL = 4.3; SWISSPROT HIT: P76273, EVALUE 4.00e-04; NT HIT: gi11545784, EVALUE 0.00e+00; EST_HUMAN HIT: C06158.1, EVALUE 0.00e+00
gtctgcaattaaggccttacgtcctggagggatacttgtatactctacatgcacgctttccaaggcagaaaatcaagatgtgatcagtgaaattttaaactcccacggtaacatcatgcctatggacattaaaggaatagcaaggacttgctcccacgacttcacatttgctcccactggccaggaatgtgggctcttagtgattccagataagggcaaagcctggggcccaatgtatgtagccaaattgaagaaatcatggagcacaggaaaatggtga

SEQ ID NO: 24213 - DNA, 169 bp, Homo sapiens
  MAP TO AC024575.1; EXPRESSED IN LUNG, SIGNAL = 6.3; EXPRESSED IN HELA, SIGNAL = 4.1; EXPRESSED IN HEART, SIGNAL =   5; EXPRESSED IN PLACENTA, SIGNAL = 5.7; EXPRESSED IN FETAL LIVER, SIGNAL = 4.6; EXPRESSED IN ADULT LIVER, SIGNAL =   6; EXPRESSED IN BRAIN, SIGNAL =   5; EXPRESSED IN BONE MARROW, SIGNAL = 5.6; NT HIT: U50321.1, EVALUE 2.00e-77; SWISSPROT HIT: P14314, EVALUE 6.00e-10; EST_HUMAN HIT: BE792818.1, EVALUE 3.00e-67
aaaaagctcattgagctacaggctgggaagaagtctctggaagaccaggtggagatgctgcggacagtgaaggaggaagctgagaagccagagagagaggccaaagagcagcaccagaagctgtgggaaggtatggcagaaatggccaaggactcaccttcagtcctgg

SEQ ID NO: 24214 - DNA, 411 bp, Homo sapiens
  MAP TO AL139248.2; EXPRESSED IN LUNG, SIGNAL = 2.4; EXPRESSED IN ADULT LIVER, SIGNAL = 2.8; EXPRESSED IN FETAL LIVER, SIGNAL = 2.7; EXPRESSED IN BRAIN, SIGNAL = 2.6; EXPRESSED IN HEART, SIGNAL = 3.2; EXPRESSED IN PLACENTA, SIGNAL = 3.4; EXPRESSED IN HELA, SIGNAL = 5.3; EXPRESSED IN BONE MARROW, SIGNAL = 2.9; NT HIT: gi11426572, EVALUE 0.00e+00; SWISSPROT HIT: Q62786, EVALUE 2.00e-05; EST_HUMAN HIT: BE746215.1, EVALUE 0.00e+00
ctgtgggcttgagtttcaattctgttagtcctgacttcttttctccaagcttgtgccaagtgccatttgtagacaggagccattcctccacagcacagtgatatttgccccgatcgctgtcttccacattcagaatgtgcagctgaaataagtcttgggaaaccttctcagtatgaaatttttgttttctctgtggggtgtgaaactcatccccagtttttataacattggtttggtccatctccaggatctttagccaagaggcattagtggaaacaggagaaaaataccaaataatggctaactgaaggtttccattggaccgggacaagatgctacattctatatcagtgttggagttgatggagagctcttggacttgactccttgaattcacttttagcttgctct

SEQ ID NO: 24215 - DNA, 98 bp, Homo sapiens
  MAP TO AL096863.10; EXPRESSED IN PLACENTA, SIGNAL = 1.3; EXPRESSED IN FETAL LIVER, SIGNAL = 1.5; EXPRESSED IN BRAIN, SIGNAL = 0.87; EXPRESSED IN ADULT LIVER, SIGNAL = 1.2; EXPRESSED IN HEART, SIGNAL = 1.2; EXPRESSED IN LUNG, SIGNAL =   2; EXPRESSED IN BONE MARROW, SIGNAL = 1.9; NT HIT: M36383.1, EVALUE 3.20e+00
tcagaattctggacaatttgaagatactatgtttgattgtaaaaaataaacaagtgtcttctcatacactactgagaggaatgaaactgataacactt

SEQ ID NO: 24216 - DNA, 153 bp, Homo sapiens
  MAP TO AC010802.4; EXPRESSED IN LUNG, SIGNAL = 1.7; EXPRESSED IN ADULT LIVER, SIGNAL = 1.8; EXPRESSED IN FETAL LIVER, SIGNAL =   2; EXPRESSED IN BRAIN, SIGNAL = 1.9; EXPRESSED IN BONE MARROW, SIGNAL = 2.2; EXPRESSED IN PLACENTA, SIGNAL = 1.5; EXPRESSED IN HELA, SIGNAL = 2.6; EXPRESSED IN HEART, SIGNAL = 1.6; NT HIT: AL163246.2, EVALUE 3.00e-29; EST_HUMAN HIT: AV730071.1, EVALUE 1.00e-23
atgcccaatgggtccatgaacaaagtggccatgatggcagggacggagattaagcctgagctcagcaacgtggacttccactcaccaaggctgacctggctacggccagtgctgagcacccaatttgccagcagcagcacagaccaacactga

SEQ ID NO: 24217 - DNA, 133 bp, Homo sapiens
  MAP TO AC011666.18; EXPRESSED IN PLACENTA, SIGNAL = 3.1; EXPRESSED IN ADULT LIVER, SIGNAL = 3.9; EXPRESSED IN HELA, SIGNAL = 3.6; EXPRESSED IN FETAL LIVER, SIGNAL = 8.9; EXPRESSED IN BRAIN, SIGNAL =   2; EXPRESSED IN LUNG, SIGNAL = 2.6; EXPRESSED IN HEART, SIGNAL = 2.2; EXPRESSED IN BONE MARROW, SIGNAL =  59; SWISSPROT HIT: P06702, EVALUE 5.00e-20; EST_HUMAN HIT: AI952029.1, EVALUE 4.00e-69; NT HIT: X06233.1, EVALUE 3.00e-69
cttgagaaaattttgcagatcttttcgcaccagctctttgaattccccctggttcagggtgtctgggtgccccagcttcacagagtattggtggaaggtgttgatgatggtctctatgttgcgttccagctgc

SEQ ID NO: 24218 - DNA, 75 bp, Homo sapiens
  MAP TO AC013746.4; EXPRESSED IN PLACENTA, SIGNAL = 3.8; EXPRESSED IN ADULT LIVER, SIGNAL =   5; EXPRESSED IN BRAIN, SIGNAL = 2.7; EXPRESSED IN BONE MARROW, SIGNAL = 5.6; EXPRESSED IN LUNG, SIGNAL = 5.7; EXPRESSED IN HELA, SIGNAL = 5.8; EXPRESSED IN HEART, SIGNAL = 3.6; EXPRESSED IN FETAL LIVER, SIGNAL = 4.8
agcttgctttcatcttcctcttcttcttcttcttcttcttcttcttcttcttcttttcttcctcctcctcctcct

SEQ ID NO: 24219 - DNA, 191 bp, Homo sapiens
  MAP TO AL162311.1; EXPRESSED IN HELA, SIGNAL = 4.8; EXPRESSED IN BRAIN, SIGNAL =   3; EXPRESSED IN BONE MARROW, SIGNAL = 2.9; EXPRESSED IN FETAL LIVER, SIGNAL = 4.5; EXPRESSED IN HEART, SIGNAL = 2.5; EXPRESSED IN ADULT LIVER, SIGNAL = 2.7; EXPRESSED IN PLACENTA, SIGNAL = 2.8; EXPRESSED IN LUNG, SIGNAL = 2.4; SWISSPROT HIT: P13662, EVALUE 2.00e-23; NT HIT: gi5031984, EVALUE 1.00e-84; EST_HUMAN HIT: BE784066.1, EVALUE 2.00e-84
gaacatctggtggaaccccatgatggcggtcttcatccgccttaagctggcccacaaccatgctgatgatgcagctatgcggcgtgagctgatggtcctgcgcggtgatgctgtgctggattttctggaaccgaaggctagacaacttctccacaatggcagctttcccctggaactgttgtccttcccac

SEQ ID NO: 24220 - DNA, 223 bp, Homo sapiens
  MAP TO AC021308.3; EXPRESSED IN PLACENTA, SIGNAL = 2.2; EXPRESSED IN ADULT LIVER, SIGNAL = 2.2; EXPRESSED IN FETAL LIVER, SIGNAL = 1.7; EXPRESSED IN BONE MARROW, SIGNAL =   2; EXPRESSED IN HEART, SIGNAL = 1.8; EXPRESSED IN BRAIN, SIGNAL = 1.9; EXPRESSED IN LUNG, SIGNAL = 2.1; SWISSPROT HIT: P34678, EVALUE 5.00e-10; NT HIT: gi11417240, EVALUE 2.00e-06; EST_HUMAN HIT: BE273893.1, EVALUE 3.00e-06
aacctgaagcgggtagctgagacctggatggatgaatttgccgagtacatttaccagcggcggccggagtacaggcatctctccacgggggacatctctgcccagaaggagctgcgcaagcagctcaagtgcaaggacttcaaatggttcatggctgctgtggcctgggacgtgcctaaatactaccctccagtggagcccccgcctgctgcctggggggagg

SEQ ID NO: 24221 - DNA, 182 bp, Homo sapiens
  MAP TO AL121575.24; EXPRESSED IN LUNG, SIGNAL = 2.2; EXPRESSED IN ADULT LIVER, SIGNAL = 1.5; EXPRESSED IN FETAL LIVER, SIGNAL = 3.9; EXPRESSED IN BRAIN, SIGNAL = 1.5; EXPRESSED IN BONE MARROW, SIGNAL = 2.7; EXPRESSED IN PLACENTA, SIGNAL = 1.6; EXPRESSED IN HEART, SIGNAL = 1.5; NT HIT: X12664.1, EVALUE 2.00e-98; SWISSPROT HIT: P05089, EVALUE 8.00e-28; EST_HUMAN HIT: AV650822.1, EVALUE 3.00e-98
agtgtgatgtgaaggattatggggacctgccctttgctgacatccctaatgacagtccctttcaaattgtgaagaatccaaggtctgtgggaaaagcaagcgagcagctggctggcaaggtggcagaagtcaagaagaacggaagaatcagcctggtgctgggcggagaccacaggtcttgt

SEQ ID NO: 24222 - DNA, 104 bp, Homo sapiens
  MAP TO AL133293.14; EXPRESSED IN PLACENTA, SIGNAL = 1.1; EXPRESSED IN ADULT LIVER, SIGNAL = 1.3; EXPRESSED IN HEART, SIGNAL = 1.4; EXPRESSED IN BRAIN, SIGNAL = 1.4; EXPRESSED IN BONE MARROW, SIGNAL = 1.6; EXPRESSED IN LUNG, SIGNAL = 1.4; EXPRESSED IN FETAL LIVER, SIGNAL = 1.5; SWISSPROT HIT: O62732, EVALUE 4.20e+00; NT HIT: X95316.1, EVALUE 8.80e-01; EST_HUMAN HIT: AW583503.1, EVALUE 8.30e-02
gatgccacgaggctcccacaggctcacctgcctgcctgtctcttgggggctttcaacatcagccacagccaagtgggacaactgctgggggccccaggcatgat

SEQ ID NO: 24223 - DNA, 358 bp, Homo sapiens
  MAP TO AC022045.2; EXPRESSED IN PLACENTA, SIGNAL =   2; EXPRESSED IN ADULT LIVER, SIGNAL = 2.2; EXPRESSED IN FETAL LIVER, SIGNAL = 2.9; EXPRESSED IN BRAIN, SIGNAL = 2.1; EXPRESSED IN LUNG, SIGNAL = 2.6; EXPRESSED IN HEART, SIGNAL = 1.9; EXPRESSED IN BONE MARROW, SIGNAL = 1.8; NT HIT: gi11437282, EVALUE 0.00e+00; EST_HUMAN HIT: BE008547.1, EVALUE 2.00e-52; SWISSPROT HIT: O94956, EVALUE 4.00e-31
tcttccccagggtgctgctgcagaccctacgccaccccatcttcctgctggtggtcctgtcccaggtatgcttgtcatccatggctgcgggcatggccaccttcctgcccaagttcctggagcgccagttttccatcacagcctcctacgccaacctgctcatcggctgcctctccttcccttcggtcatcgtgggcatcgtggtgggtggcgtcctggtcaagcggctccacctgggccctgtgggatgcggtgccctttgcctgctggggatgctgctgtgcctcttcttcagcctgccgctcttctttatcggctgctccagccaccagattgcgggcatcacacaccagaccag

SEQ ID NO: 24224 - DNA, 100 bp, Homo sapiens
  MAP TO AC013291.4; EXPRESSED IN HELA, SIGNAL = 2.2; EXPRESSED IN LUNG, SIGNAL =   2; EXPRESSED IN BRAIN, SIGNAL = 1.7; EXPRESSED IN BONE MARROW, SIGNAL = 1.8; EXPRESSED IN PLACENTA, SIGNAL = 1.9; EXPRESSED IN ADULT LIVER, SIGNAL = 1.9; EXPRESSED IN FETAL LIVER, SIGNAL = 1.7; EXPRESSED IN HEART, SIGNAL = 1.9; NT HIT: gi11427428, EVALUE 6.00e-48; EST_HUMAN HIT: AU135853.1, EVALUE 2.00e-36
attacatttgacaacaaggcccatagtggaagaattaaaataagtttagataatgacatttccatcagagaatgtaaagactggcatgtatctggatcaa

SEQ ID NO: 24225 - DNA, 117 bp, Homo sapiens
  MAP TO AC026236.4; EXPRESSED IN PLACENTA, SIGNAL = 1.5; EXPRESSED IN ADULT LIVER, SIGNAL = 2.2; EXPRESSED IN HEART, SIGNAL = 1.5; EXPRESSED IN FETAL LIVER, SIGNAL = 1.3; EXPRESSED IN BRAIN, SIGNAL = 1.3; EXPRESSED IN BONE MARROW, SIGNAL = 1.3; EXPRESSED IN LUNG, SIGNAL = 0.86; SWISSPROT HIT: Q17334, EVALUE 3.20e+00; EST_HUMAN HIT: AV687898.1, EVALUE 9.60e-02
cggggcagccacagccacagcatggagcactgggaaggagtaaggctctaggactacaggatggcagtgtttggccttggaacagtgttgggaaggccatgaggagggtgaccgcat

SEQ ID NO: 24226 - DNA, 120 bp, Homo sapiens
  MAP TO AC008474.4; EXPRESSED IN LUNG, SIGNAL = 1.6; EXPRESSED IN PLACENTA, SIGNAL = 1.6; EXPRESSED IN ADULT LIVER, SIGNAL = 1.7; EXPRESSED IN HEART, SIGNAL = 1.4; EXPRESSED IN FETAL LIVER, SIGNAL = 1.4; EXPRESSED IN BONE MARROW, SIGNAL = 1.8; EXPRESSED IN BRAIN, SIGNAL = 1.5; NT HIT: U32696.1, EVALUE 4.10e+00; EST_HUMAN HIT: AI937337.1, EVALUE 3.90e-01
ggaaccattgcaaacactgataatgtggctagaattgacaagaatgtctcccatgtaacctttaaccaccgtcagatttattttgacaaacatttttcccatacaagcaatgaaaataat

SEQ ID NO: 24227 - DNA, 95 bp, Homo sapiens
  MAP TO AC008928.5; EXPRESSED IN PLACENTA, SIGNAL = 3.2; EXPRESSED IN HELA, SIGNAL = 4.6; EXPRESSED IN LUNG, SIGNAL = 4.7; EXPRESSED IN ADULT LIVER, SIGNAL = 4.4; EXPRESSED IN HEART, SIGNAL = 4.8; EXPRESSED IN BRAIN, SIGNAL =   4; EXPRESSED IN BONE MARROW, SIGNAL = 4.3; EXPRESSED IN FETAL LIVER, SIGNAL = 4.6; SWISSPROT HIT: P12822, EVALUE 5.50e+00; NT HIT: U01912.1, EVALUE 7.90e-01
acatagaaggtactcaatacatccttgtccagttgaagaaaatatccattctttgttgtagtttggtgttcttggctgaactcagtaggattgac

SEQ ID NO: 24228 - DNA, 202 bp, Homo sapiens
  MAP TO AC022470.3; EXPRESSED IN HELA, SIGNAL = 3.8; EXPRESSED IN HEART, SIGNAL = 2.9; EXPRESSED IN LUNG, SIGNAL = 3.1; EXPRESSED IN PLACENTA, SIGNAL = 2.5; EXPRESSED IN ADULT LIVER, SIGNAL = 2.9; EXPRESSED IN BRAIN, SIGNAL = 2.4; EXPRESSED IN FETAL LIVER, SIGNAL = 2.9; EXPRESSED IN BONE MARROW, SIGNAL = 3.3; NT HIT: gi4557514, EVALUE 1.00e-69; EST_HUMAN HIT: AW838394.1, EVALUE 1.00e-110; SWISSPROT HIT: P34653, EVALUE 5.00e+00
tgtgggcagacctgctccggcctcatgatcacagcctccttctgcgagctccttcccaccgccactcaccttgatgggtgtgaggtgctggaagtgacggtgagggtgcgggatcaggcccagggggcagtcccactgggaagcagagtaaactcggatctcgctcttctggtccgtggtcaggagccgggctccatcggga

SEQ ID NO: 24229 - DNA, 166 bp, Homo sapiens
  MAP TO AC007325.51; EXPRESSED IN PLACENTA, SIGNAL = 2.8; EXPRESSED IN HELA, SIGNAL = 2.9; EXPRESSED IN ADULT LIVER, SIGNAL = 3.1; EXPRESSED IN FETAL LIVER, SIGNAL = 3.1; EXPRESSED IN BRAIN, SIGNAL =   3; EXPRESSED IN BONE MARROW, SIGNAL = 2.7; EXPRESSED IN LUNG, SIGNAL = 2.9; EXPRESSED IN HEART, SIGNAL = 2.9; SWISSPROT HIT: P11274, EVALUE 5.00e-25; EST_HUMAN HIT: AL043314.2, EVALUE 1.00e-88; NT HIT: U07000.1, EVALUE 6.00e-77
ctgggacatgacctccaaggaccagctgtcagtcatggtgatgggctggctggggttggcagggagcttgctctccttctcggagggccggagcagcgtggggccaaacaccgtgccaaggttgtgcagggacatcttattgactgcctccttctctgccatcctg

SEQ ID NO: 24230 - DNA, 293 bp, Homo sapiens
  MAP TO AF241726.1; EXPRESSED IN LUNG, SIGNAL = 6.2; EXPRESSED IN ADULT LIVER, SIGNAL = 9.6; EXPRESSED IN HELA, SIGNAL = 3.7; EXPRESSED IN HEART, SIGNAL = 2.9; EXPRESSED IN FETAL LIVER, SIGNAL =  15; EXPRESSED IN BRAIN, SIGNAL = 3.7; EXPRESSED IN BONE MARROW, SIGNAL = 4.7; EXPRESSED IN PLACENTA, SIGNAL = 2.6; SWISSPROT HIT: P02791, EVALUE 2.00e-26; EST_HUMAN HIT: AI146413.1, EVALUE 3.00e-22; NT HIT: D14523.1, EVALUE 3.00e-31
gtccttgagccttctgaagagatactccaccagcccggcctggcggctggccagcctgcagaggttggtcaagtagttgcccatcttcttgatgagtttcacctctcggtctaggaagtgcttttccagaaaatcacagaaattgggatctgtgttggcagaacctagggcatgcagatccaaaaaggcctggttcaggctcttctccagggccagggcggcttccatggcggccaggctgccactccactcatctcagagcagcttctgctcatcttggaagaggccgcagc

SEQ ID NO: 24231 - DNA, 172 bp, Homo sapiens
  MAP TO AC024248.3; EXPRESSED IN PLACENTA, SIGNAL = 4.7; EXPRESSED IN HEART, SIGNAL = 4.5; EXPRESSED IN FETAL LIVER, SIGNAL = 3.9; EXPRESSED IN BONE MARROW, SIGNAL = 4.5; EXPRESSED IN LUNG, SIGNAL = 3.9; EXPRESSED IN ADULT LIVER, SIGNAL = 4.7; EXPRESSED IN BRAIN, SIGNAL = 5.3; NT HIT: AL163282.2, EVALUE 1.00e-38; SWISSPROT HIT: P32629, EVALUE 4.50e-01; EST_HUMAN HIT: BF304683.1, EVALUE 1.00e-48
ctttgccccagttcccaagaagttcttcatctccatctgagaccacctctgcccagaccttattgttcacatcactgtcagcatttttgtcaaagccattccataagtctctaggaagttccaaactttcccacattttcctgttgtcttctgagccctccaaaacctcttc

SEQ ID NO: 24232 - DNA, 186 bp, Homo sapiens
  MAP TO AL139250.2; EXPRESSED IN HELA, SIGNAL = 2.6; EXPRESSED IN HEART, SIGNAL = 1.7; EXPRESSED IN LUNG, SIGNAL = 2.3; EXPRESSED IN PLACENTA, SIGNAL = 2.2; EXPRESSED IN ADULT LIVER, SIGNAL = 2.4; EXPRESSED IN BRAIN, SIGNAL = 2.1; EXPRESSED IN FETAL LIVER, SIGNAL = 2.8; EXPRESSED IN BONE MARROW, SIGNAL = 2.3; NT HIT: AB046846.1, EVALUE 1.00e-100; SWISSPROT HIT: P49499, EVALUE 5.80e-01; EST_HUMAN HIT: AW854568.1, EVALUE 1.00e-14
cagtgacagggatggagtccaagtggatcagtggggggtctgtgtccctctcaggagcaaggctggggacgcccagggctgcgctggtgtcctcttcatcatcactgtcatcaaactcaaacgcctctcctgggtcgtcctctgcctcagaggaggggcctgggactcctggaaccagctgatctc

SEQ ID NO: 24233 - DNA, 132 bp, Homo sapiens
  MAP TO AC022206.2; EXPRESSED IN HEART, SIGNAL = 5.9; EXPRESSED IN BRAIN, SIGNAL = 5.5; EXPRESSED IN BONE MARROW, SIGNAL = 8.7; EXPRESSED IN PLACENTA, SIGNAL = 2.2; EXPRESSED IN ADULT LIVER, SIGNAL = 4.9; EXPRESSED IN HELA, SIGNAL = 4.4; EXPRESSED IN FETAL LIVER, SIGNAL =  11; EXPRESSED IN LUNG, SIGNAL = 3.6; EST_HUMAN HIT: AW972305.1, EVALUE 2.00e-28; NT HIT: gi11437211, EVALUE 6.00e-24; SWISSPROT HIT: P49171, EVALUE 1.00e-12
atgactaagaaaaggaagaacaacagtcatgccaaaaagggctgcagccacatgcagcctatttgctgcacgaactgtgcccagcgcgtgcccaaagacaaggccattaagaaatttgtattcaaaacatag

SEQ ID NO: 24234 - DNA, 174 bp, Homo sapiens
  MAP TO AP001442.1; EXPRESSED IN ADULT LIVER, SIGNAL = 4.9; EXPRESSED IN HELA, SIGNAL = 4.7; EXPRESSED IN LUNG, SIGNAL = 5.4; EXPRESSED IN PLACENTA, SIGNAL = 3.9; EXPRESSED IN HEART, SIGNAL = 4.5; EXPRESSED IN FETAL LIVER, SIGNAL = 4.3; EXPRESSED IN BRAIN, SIGNAL = 8.3; EXPRESSED IN BONE MARROW, SIGNAL = 4.1; SWISSPROT HIT: P08592, EVALUE 1.00e-24; NT HIT: X13474.1, EVALUE 1.00e-93; EST_HUMAN HIT: AU124116.1, EVALUE 3.00e-86
gacctacccgaggaggaacagcctgcagagcggtgatgtagttctccagggccaggcggcggcggtcattgagcatggcttccactctggccatgtgtgtctccaccagctgctgtctctcgttggctgcttcctgttccaaagattccactttctcctggaaatgctgccatc

SEQ ID NO: 24235 - DNA, 246 bp, Homo sapiens
  MAP TO AC024196.2; EXPRESSED IN BRAIN, SIGNAL = 2.6; EXPRESSED IN LUNG, SIGNAL = 2.9; EXPRESSED IN ADULT LIVER, SIGNAL = 2.7; EXPRESSED IN HELA, SIGNAL = 3.1; EXPRESSED IN PLACENTA, SIGNAL = 2.5; EXPRESSED IN HEART, SIGNAL = 2.6; EXPRESSED IN FETAL LIVER, SIGNAL = 2.4; EXPRESSED IN BONE MARROW, SIGNAL = 2.6; EST_HUMAN HIT: BE736149.1, EVALUE 1.00e-27; NT HIT: AF019084.1, EVALUE 0.00e+00; SWISSPROT HIT: P35908, EVALUE 3.00e-24
cttactgtacactttccagctgggggtgcaacccagctcatggcagggagctgtggctcttcctacattccctctacttgccttgctgtggtacagggcctccgcttcttccttgctcctctgggcgatctcctcatactgggccttgacctcggcgatgatgctatccaagtccaggttgcggctgttgtccatggagaggatgacgttggtgtcagtgacactctgatgtatctgggatatctc

SEQ ID NO: 24236 - DNA, 85 bp, Homo sapiens
  MAP TO AC027273.2; EXPRESSED IN HEART, SIGNAL = 7.4; EXPRESSED IN BRAIN, SIGNAL = 7.9; EXPRESSED IN BONE MARROW, SIGNAL = 8.2; EXPRESSED IN FETAL LIVER, SIGNAL = 7.7; EXPRESSED IN HELA, SIGNAL =  11; EXPRESSED IN ADULT LIVER, SIGNAL =  11; EXPRESSED IN PLACENTA, SIGNAL =   9; EXPRESSED IN LUNG, SIGNAL =  10; EST_HUMAN HIT: W05170.1, EVALUE 1.00e+00; NT HIT: AP001508.1, EVALUE 1.70e-01
gaaaataaaatctaagtcagagaacaggcatcaggttgagaacctccctgagagtaatgtcaacataaaggaaagcaaaaactaa

SEQ ID NO: 24237 - DNA, 221 bp, Homo sapiens
  MAP TO AC025011.2; EXPRESSED IN BRAIN, SIGNAL =  10; EXPRESSED IN BONE MARROW, SIGNAL = 7.8; EXPRESSED IN LUNG, SIGNAL =   7; EXPRESSED IN PLACENTA, SIGNAL = 7.4; EXPRESSED IN ADULT LIVER, SIGNAL = 9.3; EXPRESSED IN HELA, SIGNAL = 9.4; EXPRESSED IN FETAL LIVER, SIGNAL = 7.2; EXPRESSED IN HEART, SIGNAL = 6.1; SWISSPROT HIT: P41242, EVALUE 1.90e-01; NT HIT: AF222742.1, EVALUE 1.00e-72; EST_HUMAN HIT: BF337363.1, EVALUE 2.00e-72
tgtgtcatgatggcaaaactgatccaggaccccatctggtaggtgtagttggggcaggacaccagcaggaaaagccacgtgaaagggttcttggtgaggtatgggatcttctgggtgttggactcagcgggccgccggtcccacagggccatgtggatggagaagtcgccaagcacaggcagatcacaaagatggcgagtgccagtttcacctgctgagct

SEQ ID NO: 24238 - DNA, 175 bp, Homo sapiens
  MAP TO AC013626.3; EXPRESSED IN PLACENTA, SIGNAL = 7.3; EXPRESSED IN FETAL LIVER, SIGNAL = 7.2; EXPRESSED IN HEART, SIGNAL = 4.4; EXPRESSED IN BRAIN, SIGNAL = 5.2; EXPRESSED IN BONE MARROW, SIGNAL = 4.4; EXPRESSED IN HELA, SIGNAL =   4; EXPRESSED IN ADULT LIVER, SIGNAL = 5.1; EXPRESSED IN LUNG, SIGNAL = 5.1; SWISSPROT HIT: P46976, EVALUE 2.00e-28; NT HIT: AF087942.1, EVALUE 3.00e-94; EST_HUMAN HIT: AU134352.1, EVALUE 5.00e-94
cagagtatctgcatccatgaatacacattttgaatactgtgtaagcgaccagcagtggagctttgtcagcgtgacacccaactctggcctcttcattaaggttagatgagcagaatcgccactgtccaagacatctaccatgatgacttcatcaaagactgtctctaaaactttt

SEQ ID NO: 24239 - DNA, 125 bp, Homo sapiens
  MAP TO AC019233.3; EXPRESSED IN BONE MARROW, SIGNAL = 1.2; EXPRESSED IN LUNG, SIGNAL = 1.3; EXPRESSED IN HEART, SIGNAL = 1.2; EXPRESSED IN PLACENTA, SIGNAL = 1.3; EXPRESSED IN ADULT LIVER, SIGNAL = 1.6; EXPRESSED IN HELA, SIGNAL = 2.2; EXPRESSED IN FETAL LIVER, SIGNAL = 1.3; EXPRESSED IN BRAIN, SIGNAL = 1.2; SWISSPROT HIT: Q10984, EVALUE 9.20e+00; EST_HUMAN HIT: BF529488.1, EVALUE 1.00e-01; NT HIT: K02901.1, EVALUE 7.00e-02
atgttgtctgtatcagaagtaggaaaaaaacagagccctggagacctgttgcaagatgaggagcaccaggtcatagtggtggcattgaggatgaaaatgtcactgctttttattcccatagtttg

SEQ ID NO: 24240 - DNA, 195 bp, Homo sapiens
  MAP TO AC022045.2; EXPRESSED IN HEART, SIGNAL = 8.5; EXPRESSED IN BONE MARROW, SIGNAL = 6.9; EXPRESSED IN BRAIN, SIGNAL = 8.6; EXPRESSED IN FETAL LIVER, SIGNAL =   8; EXPRESSED IN HELA, SIGNAL =  11; EXPRESSED IN ADULT LIVER, SIGNAL =  11; EXPRESSED IN PLACENTA, SIGNAL = 9.2; EXPRESSED IN LUNG, SIGNAL = 8.4; NT HIT: AL161595.2, EVALUE 7.10e+00
tcatccaagaggagcagtgacagtgggagtgaagattgactggattggtgtgttggtgttttgggtaacattggtggtgatgatggcagtggcgatggagatgaggctggtgatactgatcttggtgaagacagtggtagtgatgatgatgttagagacagtgataatgatattgatgattctgatcatcatcat

SEQ ID NO: 24241 - DNA, 144 bp, Homo sapiens
  MAP TO AC021855.3; EXPRESSED IN PLACENTA, SIGNAL = 4.9; EXPRESSED IN FETAL LIVER, SIGNAL =   5; EXPRESSED IN HEART, SIGNAL = 5.3; EXPRESSED IN BONE MARROW, SIGNAL = 5.4; EXPRESSED IN BRAIN, SIGNAL = 5.4; EXPRESSED IN HELA, SIGNAL = 8.4; EXPRESSED IN ADULT LIVER, SIGNAL = 6.2; EXPRESSED IN LUNG, SIGNAL = 5.3; SWISSPROT HIT: P14417, EVALUE 2.30e+00; NT HIT: X04197.1, EVALUE 8.20e-02
ggccctgtcatccccatggctattaatgagcccatgtctgtgactacctctcctactatcattcctgttctttacaggacacccaccactgaacttcctagtggtgctgttgcccctctcaggagtgaattcctgatgaccctg

SEQ ID NO: 24242 - DNA, 227 bp, Homo sapiens
  MAP TO AF241729.1; EXPRESSED IN LUNG, SIGNAL = 2.4; EXPRESSED IN PLACENTA, SIGNAL = 2.8; EXPRESSED IN FETAL LIVER, SIGNAL = 3.1; EXPRESSED IN BONE MARROW, SIGNAL = 2.6; EXPRESSED IN ADULT LIVER, SIGNAL = 2.4; EXPRESSED IN HELA, SIGNAL = 2.3; EXPRESSED IN HEART, SIGNAL = 2.4; EXPRESSED IN BRAIN, SIGNAL = 2.7; SWISSPROT HIT: P89105, EVALUE 1.00e+00; EST_HUMAN HIT: N69653.1, EVALUE 9.00e-13; NT HIT: AJ244053.1, EVALUE 5.40e-01
tgagaggggccacactcaaaagcaaaccagagctacttctaaagttagtgactaggatggatgagcgactcaaaagagaacatgaagaatggctacaggaactggggataactgacttgaagaacagtagacttaaggagaccatatctaccttcaaacatctgatggtgtgcttcatggccttctgtagagctccaaaagatagaagaacactggagaacggaaaa

SEQ ID NO: 24243 - DNA, 236 bp, Homo sapiens
  MAP TO AC016706.2; EXPRESSED IN PLACENTA, SIGNAL = 2.1; EXPRESSED IN ADULT LIVER, SIGNAL = 2.9; EXPRESSED IN HELA, SIGNAL = 3.1; EXPRESSED IN FETAL LIVER, SIGNAL = 1.8; EXPRESSED IN BRAIN, SIGNAL =   2; EXPRESSED IN LUNG, SIGNAL = 2.2; EXPRESSED IN HEART, SIGNAL = 1.9; EXPRESSED IN BONE MARROW, SIGNAL = 1.9; NT HIT: AF009660.1, EVALUE 7.00e-22; EST_HUMAN HIT: AW854023.1, EVALUE 2.00e-17
tgcataacagatgtgacctttactctggttcccagcaagttccttatttccatcggaaacctcatcatcctggccttcactgtccacatctcttatcagctatcttggttacaaccatgtaaccaatctctacaaagttccaaactttccctcatcttcttctcttcttctgagcccaccaaattcttcaaacttctgcccactacccagttccaaagccacttctacatcttcag

SEQ ID NO: 24244 - DNA, 296 bp, Homo sapiens
  MAP TO AC018583.3; EXPRESSED IN ADULT LIVER, SIGNAL = 7.1; EXPRESSED IN HELA, SIGNAL = 8.5; EXPRESSED IN BRAIN, SIGNAL = 5.7; EXPRESSED IN LUNG, SIGNAL = 5.9; EXPRESSED IN HEART, SIGNAL = 5.2; EXPRESSED IN PLACENTA, SIGNAL = 4.9; EXPRESSED IN FETAL LIVER, SIGNAL = 5.2; EXPRESSED IN BONE MARROW, SIGNAL = 5.8; SWISSPROT HIT: Q58025, EVALUE 1.40e+00; NT HIT: AL163303.2, EVALUE 4.00e-33; EST_HUMAN HIT: BE165980.1, EVALUE 2.00e-51
ctgccatagatagtgatttctctcaagaatctgggcaaagtaagttgaaaaccttctggggaagattcaccattctagatgacagtaagaaaatttgtgattcattggaagaggtcaagataactacactaacaagagtttggaataagttgattccagccctcatagatgactttgagtggttcaagacttcagtagagggagtagctgcagatgtagtggaaatagtaagagtactagaattagaaatgaagcctgaagatgtgactgaattgctgcaatctcatgttaaaatt

SEQ ID NO: 24245 - DNA, 96 bp, Homo sapiens
  MAP TO AC022038.2; EXPRESSED IN LUNG, SIGNAL =   2; EXPRESSED IN HELA, SIGNAL = 2.5; EXPRESSED IN PLACENTA, SIGNAL = 2.1; EXPRESSED IN ADULT LIVER, SIGNAL = 1.9; EXPRESSED IN HEART, SIGNAL = 1.8; EXPRESSED IN FETAL LIVER, SIGNAL = 1.9; EXPRESSED IN BRAIN, SIGNAL = 1.8; EXPRESSED IN BONE MARROW, SIGNAL = 1.7; EST_HUMAN HIT: D11745.1, EVALUE 1.20e+00
ttattttttaaagtttattttatctataaaatacatgctttcattaaatgcatcattacttttatgatccttgtaatcaatctcctttttcccctt

SEQ ID NO: 24246 - DNA, 124 bp, Homo sapiens
  MAP TO AC023032.2; EXPRESSED IN LUNG, SIGNAL = 1.9; EXPRESSED IN ADULT LIVER, SIGNAL =   2; EXPRESSED IN HELA, SIGNAL = 2.5; EXPRESSED IN HEART, SIGNAL = 1.9; EXPRESSED IN BRAIN, SIGNAL = 1.7; EXPRESSED IN PLACENTA, SIGNAL = 2.1; EXPRESSED IN FETAL LIVER, SIGNAL =   2; EXPRESSED IN BONE MARROW, SIGNAL = 1.8; SWISSPROT HIT: P54569, EVALUE 7.10e+00; EST_HUMAN HIT: AW104329.1, EVALUE 7.00e-03; NT HIT: AF011400.1, EVALUE 1.00e-03
ttaccaaaaaggcaaagaaaaaccttcttcagagtgactacttctctttatgggaagtccatataaataagttggaggtcaaacttgatgaaaaaatgcttgaatttaatcagaaacaggaagg

SEQ ID NO: 24247 - DNA, 230 bp, Homo sapiens
  MAP TO AC011929.3; EXPRESSED IN LUNG, SIGNAL = 8.4; EXPRESSED IN PLACENTA, SIGNAL = 7.8; EXPRESSED IN ADULT LIVER, SIGNAL = 7.4; EXPRESSED IN HELA, SIGNAL = 9.5; EXPRESSED IN HEART, SIGNAL = 7.8; EXPRESSED IN FETAL LIVER, SIGNAL = 8.2; EXPRESSED IN BRAIN, SIGNAL = 7.6; EXPRESSED IN BONE MARROW, SIGNAL = 8.1; SWISSPROT HIT: Q07343, EVALUE 2.00e-06; EST_HUMAN HIT: AI767133.1, EVALUE 1.00e-124
gcctctgaggaaacactacattccagtaatgaagaggaagaccctttccgcggaatggaaccctatcttgtccggagactttcatgtcgcaatattcagcttccccctctcgccttcagacagttggaacaagctgacttgaaaagtgaatcagagaacattcaacgaccaaccagcctccccctgaagattctgccgctgattgctatcacttctgcagaatccagtgg

SEQ ID NO: 24248 - DNA, 150 bp, Homo sapiens
  MAP TO AC022943.4; EXPRESSED IN PLACENTA, SIGNAL = 4.8; EXPRESSED IN HEART, SIGNAL = 4.7; EXPRESSED IN FETAL LIVER, SIGNAL = 4.4; EXPRESSED IN BONE MARROW, SIGNAL = 4.5; EXPRESSED IN LUNG, SIGNAL = 4.8; EXPRESSED IN ADULT LIVER, SIGNAL = 4.4; EXPRESSED IN HELA, SIGNAL = 5.6; EXPRESSED IN BRAIN, SIGNAL = 4.1; EST_HUMAN HIT: AW270938.1, EVALUE 5.00e-04; SWISSPROT HIT: P04025, EVALUE 2.30e+00
ggaggcccaggtccacagccttcacttgggcagctacagccgcacctggtgctgctgtctgctcctgtctcccgctggctccttggaacatgcagccctggccacgtccccttgcagcctggggcaagggctccaggtcctcgctgtgcc

SEQ ID NO: 24249 - DNA, 86 bp, Homo sapiens
  MAP TO AC011859.4; EXPRESSED IN LUNG, SIGNAL = 2.2; EXPRESSED IN ADULT LIVER, SIGNAL = 1.9; EXPRESSED IN HELA, SIGNAL = 2.2; EXPRESSED IN HEART, SIGNAL =   2; EXPRESSED IN BRAIN, SIGNAL = 1.8; EXPRESSED IN PLACENTA, SIGNAL = 1.8; EXPRESSED IN FETAL LIVER, SIGNAL = 2.1; EXPRESSED IN BONE MARROW, SIGNAL = 1.9; EST_HUMAN HIT: AV689554.1, EVALUE 1.00e+00
ctttctagatactgtgtctgcattgtttttacaatctgaaaagtagagtgtcatagaatgttcctcatctgcattttccatgaagg

SEQ ID NO: 24250 - DNA, 92 bp, Homo sapiens
  MAP TO AC021824.2; EXPRESSED IN LUNG, SIGNAL = 2.3; EXPRESSED IN PLACENTA, SIGNAL = 2.2; EXPRESSED IN ADULT LIVER, SIGNAL = 2.4; EXPRESSED IN HELA, SIGNAL = 2.6; EXPRESSED IN HEART, SIGNAL =   2; EXPRESSED IN FETAL LIVER, SIGNAL = 2.3; EXPRESSED IN BRAIN, SIGNAL = 2.3; EXPRESSED IN BONE MARROW, SIGNAL =   2; EST_HUMAN HIT: AV712452.1, EVALUE 7.20e-02
ctataggaggaagtataaaaggtgatcaaaattttcttctttagaattgtctttctccaaaatgtcctgtgacttatttgttttcttcatca

SEQ ID NO: 24251 - DNA, 117 bp, Homo sapiens
  MAP TO AC018535.3; EXPRESSED IN LUNG, SIGNAL = 1.4; EXPRESSED IN ADULT LIVER, SIGNAL = 1.3; EXPRESSED IN BRAIN, SIGNAL = 1.4; EXPRESSED IN PLACENTA, SIGNAL = 1.3; EXPRESSED IN HEART, SIGNAL = 1.2; EXPRESSED IN FETAL LIVER, SIGNAL = 1.3; EXPRESSED IN BONE MARROW, SIGNAL = 1.2; NT HIT: U44952.1, EVALUE 1.00e+00; SWISSPROT HIT: Q04533, EVALUE 7.10e+00
caacctaacatttccattcctgtggctacaaccttggctctggccaccatcacgtctgaagtaatctttgcagtcaccctgactgtcctcctctccttcaagcttgccctcgtctag

SEQ ID NO: 24252 - DNA, 100 bp, Homo sapiens
  MAP TO AC018530.4; EXPRESSED IN LUNG, SIGNAL = 1.2; EXPRESSED IN PLACENTA, SIGNAL =   1; EXPRESSED IN ADULT LIVER, SIGNAL = 0.97; EXPRESSED IN HEART, SIGNAL = 1.2; EXPRESSED IN FETAL LIVER, SIGNAL = 1.6; EXPRESSED IN BRAIN, SIGNAL = 1.1; EXPRESSED IN BONE MARROW, SIGNAL = 1.3; NT HIT: AB036529.1, EVALUE 2.10e-01; EST_HUMAN HIT: BE067111.1, EVALUE 4.90e+00; SWISSPROT HIT: Q9ZDL6, EVALUE 2.50e+00
atgaagttctggagttcacagacatttaaagattggaaagatgaaggtgacccagcaaaagatactgagaagaaacagcaagtgaggaaaggaaaaccaa

SEQ ID NO: 24253 - DNA, 318 bp, Homo sapiens
  MAP TO AC013751.3; EXPRESSED IN HEART, SIGNAL = 1.5; EXPRESSED IN LUNG, SIGNAL = 1.3; EXPRESSED IN ADULT LIVER, SIGNAL = 1.2; EXPRESSED IN BRAIN, SIGNAL = 0.94; EXPRESSED IN PLACENTA, SIGNAL = 1.1; EXPRESSED IN FETAL LIVER, SIGNAL = 1.3; EXPRESSED IN BONE MARROW, SIGNAL = 1.9; SWISSPROT HIT: O75131, EVALUE 9.00e-39; EST_HUMAN HIT: BE082977.1, EVALUE 0.00e+00; NT HIT: gi4503014, EVALUE 0.00e+00
ctaatcaactgcctggttgtagatgggcaaaggtctgtgttcagtcactttagtgtttgagtagggaggagtggtactcacattctggaactgtctgaaaggcacaaactggacaatatctctgatggccacttcgcccaatggggagcggagacttccaccatcaccatccagaaactccatggcgctgaagtcagcacctccaactccaacaattatgatggacataggcagcctggaggcattaactatagcttgtctggtttcatcaaggtctgtgatcacaccatcagtaataatcaaaagcacaaaatattg

SEQ ID NO: 24254 - DNA, 173 bp, Homo sapiens
  MAP TO AL133352.10; EXPRESSED IN ADULT LIVER, SIGNAL = 2.3; EXPRESSED IN BRAIN, SIGNAL = 2.2; EXPRESSED IN BONE MARROW, SIGNAL = 2.1; EXPRESSED IN LUNG, SIGNAL = 2.3; EXPRESSED IN HELA, SIGNAL = 2.2; EXPRESSED IN PLACENTA, SIGNAL =   2; EXPRESSED IN HEART, SIGNAL = 2.1; EXPRESSED IN FETAL LIVER, SIGNAL = 2.3; SWISSPROT HIT: Q28640, EVALUE 5.90e-01; EST_HUMAN HIT: AA290916.1, EVALUE 1.00e-35; NT HIT: AF274863.1, EVALUE 5.00e-93
ttagaccagcagcttatgagcgatgatgaggacagccttcaggataggcatgaagctggacacctcgctgaagctgctacagcccgccacctgggcatgcactgcaaggccctgctcaaagcttcctgcatccacacatcgggcaacctcatggagcccagccacgacatgag

SEQ ID NO: 24255 - DNA, 250 bp, Homo sapiens
  MAP TO AC015807.3; EXPRESSED IN LUNG, SIGNAL = 1.5; EXPRESSED IN PLACENTA, SIGNAL = 1.5; EXPRESSED IN FETAL LIVER, SIGNAL = 1.3; EXPRESSED IN HEART, SIGNAL = 2.2; EXPRESSED IN ADULT LIVER, SIGNAL = 1.6; EXPRESSED IN BRAIN, SIGNAL = 1.4; EXPRESSED IN BONE MARROW, SIGNAL = 1.3; SWISSPROT HIT: P35573, EVALUE 5.00e-01
gaaactaatgaaagagtacattttgctgtctcatctcctctgtttgatggatttggctctacacagaggccagagtctacttggattgcttttgaatttgcccttgcatcaactgaactctctagactactctctctgccacaggaaaaaaaaaatgttcttactatgaataataaactcttacatgaagtaactctaaagaaagtagattggaaaataaagaccgagctaaataaaaatgtcataatag

SEQ ID NO: 24256 - DNA, 99 bp, Homo sapiens
  MAP TO AC016429.4; EXPRESSED IN HELA, SIGNAL =   4; EXPRESSED IN HEART, SIGNAL = 2.9; EXPRESSED IN LUNG, SIGNAL = 3.3; EXPRESSED IN PLACENTA, SIGNAL =   3; EXPRESSED IN ADULT LIVER, SIGNAL = 3.5; EXPRESSED IN BRAIN, SIGNAL = 2.9; EXPRESSED IN FETAL LIVER, SIGNAL = 3.3; EXPRESSED IN BONE MARROW, SIGNAL = 2.8; SWISSPROT HIT: gi462313, EVALUE 1.90e+00; EST_HUMAN HIT: AW970693.1, EVALUE 8.00e-08; NT HIT: AL163248.2, EVALUE 9.00e-07
ctctccaccactcactcgctgcccgtcactccccttcccaacctctggtaaccacccttctactgtgtccatgagttcaattgtatttatttttagatc

SEQ ID NO: 24257 - DNA, 108 bp, Homo sapiens
  MAP TO AC011938.3; EXPRESSED IN ADULT LIVER, SIGNAL =   4; EXPRESSED IN HEART, SIGNAL = 3.6; EXPRESSED IN FETAL LIVER, SIGNAL = 3.3; EXPRESSED IN BRAIN, SIGNAL = 4.1; EXPRESSED IN BONE MARROW, SIGNAL =   4; EXPRESSED IN LUNG, SIGNAL = 4.2; EXPRESSED IN PLACENTA, SIGNAL =   4; EXPRESSED IN HELA, SIGNAL =   4; SWISSPROT HIT: P16960, EVALUE 2.00e-08; NT HIT: AB001025.1, EVALUE 2.00e-54; EST_HUMAN HIT: BF243646.1, EVALUE 1.40e+00
cccttcgccgccattttcacctgtgttggcaagcatttcctgcagggctctgacagatagggactgttccagcacaaaattgcagacgcagagatctggaggaatgta

SEQ ID NO: 24258 - DNA, 147 bp, Homo sapiens
  MAP TO AC012207.5; EXPRESSED IN BONE MARROW, SIGNAL = 2.6; EXPRESSED IN ADULT LIVER, SIGNAL = 2.3; EXPRESSED IN HEART, SIGNAL = 1.8; EXPRESSED IN FETAL LIVER, SIGNAL = 2.4; EXPRESSED IN BRAIN, SIGNAL = 2.6; EXPRESSED IN LUNG, SIGNAL = 2.5; EXPRESSED IN PLACENTA, SIGNAL = 2.5; NT HIT: AJ243213.1, EVALUE 2.10e-02; EST_HUMAN HIT: BE044555.1, EVALUE 2.00e+00; SWISSPROT HIT: P47479, EVALUE 5.30e+00
cttagcatctttaacaagtgtcgtgaataattttttctttaacaaatcaagaaaggtgacacttttaatacggggaaggttgattaaaaaggcagatttattttcaggtatctgccttgaaatggtgtcattaacatgatcttgaaa

SEQ ID NO: 24259 - DNA, 373 bp, Homo sapiens
  MAP TO AC015474.3; EXPRESSED IN LUNG, SIGNAL = 4.6; EXPRESSED IN ADULT LIVER, SIGNAL = 3.2; EXPRESSED IN HELA, SIGNAL = 2.8; EXPRESSED IN HEART, SIGNAL = 2.8; EXPRESSED IN BRAIN, SIGNAL = 2.9; EXPRESSED IN PLACENTA, SIGNAL = 2.9; EXPRESSED IN FETAL LIVER, SIGNAL = 3.7; EXPRESSED IN BONE MARROW, SIGNAL = 6.7; EST_HUMAN HIT: BE818183.1, EVALUE 1.00e-87; NT HIT: gi4758017, EVALUE 4.00e-86; SWISSPROT HIT: Q99439, EVALUE 2.00e-39
aagaggcatctgtgtgaccccaagaatcacatcctgcccccccatggaccactcgatcattggcctccagatgggtacaaataactgtgccagccaggtgagcatgacagctcctgggacgcggcagcacatctgtgacaccaagctgggaaccgacaagtgtggtaattcctccatgtccctgcagatgggctacacccagggtaccaaccatagtagccaggtctttggcctgggccagcatatatgtgaccccaagtactgcctgccaggcacagtggctgacggggctcccttgggtgctggcaactgcctgggcccaggagaggtccctgaatatcccccttactaccaggaggaggctggctactga

SEQ ID NO: 24260 - DNA, 195 bp, Homo sapiens
  MAP TO AC016498.4; EXPRESSED IN HELA, SIGNAL =   8; EXPRESSED IN LUNG, SIGNAL = 5.5; EXPRESSED IN ADULT LIVER, SIGNAL = 5.7; EXPRESSED IN BRAIN, SIGNAL = 6.3; EXPRESSED IN BONE MARROW, SIGNAL = 4.9; EXPRESSED IN PLACENTA, SIGNAL = 4.8; EXPRESSED IN FETAL LIVER, SIGNAL = 5.3; EXPRESSED IN HEART, SIGNAL =   5; NT HIT: D63394.1, EVALUE 4.60e-01; EST_HUMAN HIT: AA309774.1, EVALUE 2.00e-59; SWISSPROT HIT: Q19673, EVALUE 2.90e+00
tgccactactgcgctttcgatgcagaataattcagtatttggcgacttgaagtcggacgagatggagctgctctactcagcctacggagatgagacaggcgtgcagtgtgcgctgaggcaagtgtcggccccggggagcccttggctgctgtgcagcttgagctgtgccctggtgtgggacgtggagtcccacat

SEQ ID NO: 24261 - DNA, 84 bp, Homo sapiens
  MAP TO AC010769.3; EXPRESSED IN HELA, SIGNAL = 3.2; EXPRESSED IN LUNG, SIGNAL = 1.8; EXPRESSED IN PLACENTA, SIGNAL = 1.1; EXPRESSED IN ADULT LIVER, SIGNAL = 1.7; EXPRESSED IN HEART, SIGNAL = 1.5; EXPRESSED IN BRAIN, SIGNAL = 1.5; EXPRESSED IN FETAL LIVER, SIGNAL = 2.1; EXPRESSED IN BONE MARROW, SIGNAL = 1.7; NT HIT: AB037766.1, EVALUE 6.80e-01; EST_HUMAN HIT: AA594082.1, EVALUE 4.00e+00
ctgatatcgcagataaccaggaaattccacttcctctttcagatgtgtgcgtgatatgtccctattcattggttcaccttcccc

SEQ ID NO: 24262 - DNA, 90 bp, Homo sapiens
  MAP TO AL158091.7; EXPRESSED IN ADULT LIVER, SIGNAL = 2.5; EXPRESSED IN HELA, SIGNAL = 3.6; EXPRESSED IN BRAIN, SIGNAL = 2.5; EXPRESSED IN LUNG, SIGNAL = 2.7; EXPRESSED IN BONE MARROW, SIGNAL = 2.6; EXPRESSED IN PLACENTA, SIGNAL = 2.5; EXPRESSED IN HEART, SIGNAL = 2.5; EXPRESSED IN FETAL LIVER, SIGNAL = 2.7; EST_HUMAN HIT: BF035529.1, EVALUE 1.10e+00; NT HIT: AB031013.1, EVALUE 1.20e-02
ttttgaggtacactgcaaggggccctttgtagagctggacaagggcgctggggtgagagccactggcgccatccacgctgcccctgccag

SEQ ID NO: 24263 - DNA, 231 bp, Homo sapiens
  MAP TO AL133352.10; EXPRESSED IN PLACENTA, SIGNAL = 3.7; EXPRESSED IN ADULT LIVER, SIGNAL = 4.3; EXPRESSED IN HELA, SIGNAL = 4.4; EXPRESSED IN BRAIN, SIGNAL = 4.2; EXPRESSED IN BONE MARROW, SIGNAL = 4.6; EXPRESSED IN LUNG, SIGNAL = 4.4; EXPRESSED IN HEART, SIGNAL =   5; EXPRESSED IN FETAL LIVER, SIGNAL =   5; NT HIT: AF274863.1, EVALUE 1.00e-127; SWISSPROT HIT: P43834, EVALUE 2.10e-01; EST_HUMAN HIT: AL042767.1, EVALUE 1.00e-49
cttcaggaactgccacagcatcttttcactttgcagtaaagcttgctggctcttgttctgacagtaattcagtagatttcctgatcccaaggcctcctgcagctcagctgatcgcatcaggaattcagattctgtggtgacttgactgatgaagactaggcgggggcaaggctgtggcaccagatgggcaggggtgctggggaggccaaaagtaaccagcttccctccaaa

SEQ ID NO: 24264 - DNA, 368 bp, Homo sapiens
  MAP TO AC019276.3; EXPRESSED IN BONE MARROW, SIGNAL = 2.7; EXPRESSED IN PLACENTA, SIGNAL = 1.7; EXPRESSED IN ADULT LIVER, SIGNAL = 2.1; EXPRESSED IN HEART, SIGNAL = 1.8; EXPRESSED IN FETAL LIVER, SIGNAL = 1.9; EXPRESSED IN BRAIN, SIGNAL = 1.7; EXPRESSED IN LUNG, SIGNAL = 2.4; SWISSPROT HIT: Q14153, EVALUE 5.00e-46; EST_HUMAN HIT: AW500293.1, EVALUE 0.00e+00; NT HIT: gi11432547, EVALUE 0.00e+00
ctgtgccatcttggcaaggtctagagaaggcctctgctcttgcacttcttcagggcgccgccttttaacaccgaccttcttgtcgttaaggacacacggctgggagcggctgcgggaaaggccgctggagcgtctcgccagctctggtgttgaggcaggtgtgctgttggctgagggaggacagtattccacaaaggaaaactgctcatgtgagcaagagagggaccgctgcaggtccagccggcctcctcccacggggtgcaggtcagggctccaggtgtcacctgcctgtccacacggggctgagcctggcaccccttggcagggctgccctccaaatcggtggtggagtcctgcctggtcgcagg

SEQ ID NO: 24265 - DNA, 93 bp, Homo sapiens
  MAP TO AL132793.24; EXPRESSED IN LUNG, SIGNAL = 2.1; EXPRESSED IN HEART, SIGNAL = 2.5; EXPRESSED IN BONE MARROW, SIGNAL =   2; EXPRESSED IN FETAL LIVER, SIGNAL = 2.4; EXPRESSED IN PLACENTA, SIGNAL = 2.2; EXPRESSED IN ADULT LIVER, SIGNAL = 2.3; EXPRESSED IN BRAIN, SIGNAL = 2.4; EST_HUMAN HIT: AA897543.1, EVALUE 1.80e-02; NT HIT: gi5835694, EVALUE 7.70e-01
gactgctttttgttttcctcaagaatgatcttgttttccttctcattcatatcattattattttatttattcctatgtacccaattaacatca

SEQ ID NO: 24266 - DNA, 101 bp, Homo sapiens
  MAP TO AC010802.4; EXPRESSED IN LUNG, SIGNAL = 1.6; EXPRESSED IN PLACENTA, SIGNAL = 1.5; EXPRESSED IN HEART, SIGNAL = 1.4; EXPRESSED IN FETAL LIVER, SIGNAL = 1.6; EXPRESSED IN ADULT LIVER, SIGNAL = 1.6; EXPRESSED IN BRAIN, SIGNAL = 1.4; EXPRESSED IN BONE MARROW, SIGNAL = 1.4; NT HIT: AB037203.1, EVALUE 9.00e-04; EST_HUMAN HIT: AI683049.1, EVALUE 3.20e-01
tctcttgatcttggttcttagatcccctgctctgctctgctctgctctatctgcctcagggattgttacattctccttgcctatggccaccacccagcgcc

SEQ ID NO: 24267 - DNA, 221 bp, Homo sapiens
  MAP TO AC015999.3; EXPRESSED IN ADULT LIVER, SIGNAL = 1.6; EXPRESSED IN LUNG, SIGNAL = 1.6; EXPRESSED IN PLACENTA, SIGNAL = 1.1; EXPRESSED IN HEART, SIGNAL = 1.8; EXPRESSED IN FETAL LIVER, SIGNAL = 2.2; EXPRESSED IN BRAIN, SIGNAL = 1.9; EXPRESSED IN BONE MARROW, SIGNAL = 1.9; NT HIT: gi10863876, EVALUE 1.00e-04; SWISSPROT HIT: P98061, EVALUE 3.70e+00; EST_HUMAN HIT: AA143025.1, EVALUE 2.00e-04
ctcttgtaggtagcaagggcaccagcagctgttacatctcaagggcctgttcactgtaatgacctctcgacctgagttatctgtgatcctcagggtgcaagatcgcagagtggaacagaaagtacgattgaagcagatgctttcctccactgcaaagtaaattctttgtcccaagctgtttttaatctcatatttgttggaggtctcagtaccaagtatca

SEQ ID NO: 24268 - DNA, 363 bp, Homo sapiens
  MAP TO AL139008.3; EXPRESSED IN LUNG, SIGNAL = 1.6; EXPRESSED IN HEART, SIGNAL = 1.2; EXPRESSED IN PLACENTA, SIGNAL = 1.9; EXPRESSED IN FETAL LIVER, SIGNAL = 1.7; EXPRESSED IN ADULT LIVER, SIGNAL = 1.5; EXPRESSED IN BRAIN, SIGNAL = 1.5; EXPRESSED IN BONE MARROW, SIGNAL = 1.4; SWISSPROT HIT: P01734, EVALUE 8.00e-33; NT HIT: AF029308.1, EVALUE 0.00e+00; EST_HUMAN HIT: AL045956.1, EVALUE 8.50e-02
gctgttttcatgccaaagtcacacagactccaggatatttggtcaaaggaaaaggaaggaaaacaaagatgtattgtacccccaaaaacggacatacttttgtttgttggtatcagcagaatcagaataaagagtttatgtttttgatttcctttcagaatgaacaagttcttcaagaaatggagatgcacaagaagcgattctcatctcaatgccccaagaacccaccctgcagcctggcaatcctgtcctcggaaccgggagacaccgcactgtatctctgtgccaccagtccgtccacagcactgaaatgtcagttcctgttagcacacaaacttgccacagacccagctcaggaagcag

SEQ ID NO: 24269 - DNA, 186 bp, Homo sapiens
  MAP TO AL121582.14; EXPRESSED IN ADULT LIVER, SIGNAL = 2.2; EXPRESSED IN FETAL LIVER, SIGNAL = 1.9; EXPRESSED IN PLACENTA, SIGNAL = 1.8; EXPRESSED IN HEART, SIGNAL = 1.7; EXPRESSED IN BRAIN, SIGNAL = 2.1; EXPRESSED IN BONE MARROW, SIGNAL = 2.1; EXPRESSED IN LUNG, SIGNAL = 1.8; EST_HUMAN HIT: BF375171.1, EVALUE 1.60e-01; SWISSPROT HIT: Q27355, EVALUE 3.90e+00
gaccaggtggccaggcagcagcactccccaccaatgcagacaggttaggttttcagtctgtgcttggtgcatctctagggggttaatgaagccttcccgtcgaagccgctgtgatgagaggacaggcaggactcctgctccctccccacctgctctgagttctaatccgagcagctcttcttctgt

SEQ ID NO: 24270 - DNA, 80 bp, Homo sapiens
  MAP TO AL139340.3; EXPRESSED IN PLACENTA, SIGNAL =   2; EXPRESSED IN HELA, SIGNAL = 3.1; EXPRESSED IN HEART, SIGNAL = 1.9; EXPRESSED IN FETAL LIVER, SIGNAL = 1.9; EXPRESSED IN ADULT LIVER, SIGNAL = 2.2; EXPRESSED IN BRAIN, SIGNAL = 1.7; EXPRESSED IN BONE MARROW, SIGNAL =   2; EXPRESSED IN LUNG, SIGNAL = 2.2; NT HIT: Z49501.1, EVALUE 1.60e-01; EST_HUMAN HIT: AW173136.1, EVALUE 2.40e-01
gaccattgtgaagaagaaaggagctgatgtatgtgaaatacttagcataggccctgttgtgcagcaggcactcaataaac

SEQ ID NO: 24271 - DNA, 102 bp, Homo sapiens
  MAP TO AC011111.3; EXPRESSED IN PLACENTA, SIGNAL = 0.76; EXPRESSED IN HEART, SIGNAL = 1.3; EXPRESSED IN BRAIN, SIGNAL = 0.6; EXPRESSED IN ADULT LIVER, SIGNAL = 0.61; EXPRESSED IN FETAL LIVER, SIGNAL = 0.61; EXPRESSED IN BONE MARROW, SIGNAL = 0.63; SWISSPROT HIT: Q22021, EVALUE 1.90e+00; NT HIT: gi10947034, EVALUE 5.50e-02; EST_HUMAN HIT: N44595.1, EVALUE 8.10e-02
atgctgcacgttctggagagcaaagagaaaagcaactcccagcaaatttttttctcattttatgacaaatcagtttttctcatggtcgaagtcattggcaag

SEQ ID NO: 24272 - DNA, 82 bp, Homo sapiens
  MAP TO AC022904.3; EXPRESSED IN PLACENTA, SIGNAL = 2.8; EXPRESSED IN ADULT LIVER, SIGNAL = 2.9; EXPRESSED IN HELA, SIGNAL = 2.9; EXPRESSED IN HEART, SIGNAL =   3; EXPRESSED IN BRAIN, SIGNAL = 2.8; EXPRESSED IN BONE MARROW, SIGNAL = 3.1; EXPRESSED IN LUNG, SIGNAL = 3.5; EXPRESSED IN FETAL LIVER, SIGNAL =   3; NT HIT: AL161540.2, EVALUE 2.60e+00
gagctgttcatttgctcatccagcaacttaaagagcacccagaatacactagacaataaagacggagcaattaccaggacag

SEQ ID NO: 24273 - DNA, 137 bp, Homo sapiens
  MAP TO AC009924.4; EXPRESSED IN ADULT LIVER, SIGNAL = 2.1; EXPRESSED IN FETAL LIVER, SIGNAL = 2.2; EXPRESSED IN PLACENTA, SIGNAL = 2.1; EXPRESSED IN BRAIN, SIGNAL = 2.5; EXPRESSED IN BONE MARROW, SIGNAL = 2.3; EXPRESSED IN LUNG, SIGNAL = 1.9; EXPRESSED IN HEART, SIGNAL = 1.9; SWISSPROT HIT: Q02952, EVALUE 5.30e+00; NT HIT: AL161512.2, EVALUE 3.10e-01; EST_HUMAN HIT: AW875979.1, EVALUE 2.90e-02
ttatttttctctctcatattgtagtctggggttgttccaggtttttgagtagtgacttaggaacctgggtttcttccaccttgttcctgggtcatttccttcagagacgtactttttatacctgtagccggctgcag

SEQ ID NO: 24274 - DNA, 118 bp, Homo sapiens
  MAP TO AC021237.3; EXPRESSED IN BRAIN, SIGNAL = 0.47; EXPRESSED IN BONE MARROW, SIGNAL = 0.42; EXPRESSED IN HEART, SIGNAL = 3.8; SWISSPROT HIT: P10286, EVALUE 5.40e+00; EST_HUMAN HIT: BF102612.1, EVALUE 3.00e-60
ctgcgtcaagctccagctggtaacaaggcagcggctcaagagagagcttgtaaccctcgaagcggggatccaacagaggtctcttcacccgtagggagcaattagccgccacctccat

SEQ ID NO: 24275 - DNA, 118 bp, Homo sapiens
  MAP TO AL138702.3; EXPRESSED IN PLACENTA, SIGNAL = 3.6; EXPRESSED IN ADULT LIVER, SIGNAL = 3.5; EXPRESSED IN FETAL LIVER, SIGNAL =   3; EXPRESSED IN BRAIN, SIGNAL = 2.9; EXPRESSED IN BONE MARROW, SIGNAL = 3.2; EXPRESSED IN LUNG, SIGNAL = 3.6; EXPRESSED IN HELA, SIGNAL = 4.5; EXPRESSED IN HEART, SIGNAL = 3.1; SWISSPROT HIT: P36314, EVALUE 3.20e+00; NT HIT: X98485.1, EVALUE 3.00e-04; EST_HUMAN HIT: AI769331.1, EVALUE 3.00e-05
attgccttctcctcttctgtggtatcatcttcctccacctccttcctataaggaaacttgtgattgcatttagggtccaccgagtcaaattgctccatttcaaaatccttaatcatac

SEQ ID NO: 24276 - DNA, 82 bp, Homo sapiens
  MAP TO AC009699.6; EXPRESSED IN LUNG, SIGNAL =   2; EXPRESSED IN PLACENTA, SIGNAL = 2.3; EXPRESSED IN ADULT LIVER, SIGNAL = 1.1; EXPRESSED IN FETAL LIVER, SIGNAL = 1.7; EXPRESSED IN BRAIN, SIGNAL =   2; EXPRESSED IN BONE MARROW, SIGNAL = 1.6; EXPRESSED IN HEART, SIGNAL = 2.4; NT HIT: AL163278.2, EVALUE 6.60e-01; EST_HUMAN HIT: AA747820.1, EVALUE 3.90e+00
atgatatgcgttttggttgctgtcacaactaccaccatcatcatcatcaccaccaccacccacaccatcattatcactgttt

SEQ ID NO: 24277 - DNA, 79 bp, Homo sapiens
  MAP TO AC022174.2; EXPRESSED IN ADULT LIVER, SIGNAL = 2.4; EXPRESSED IN BRAIN, SIGNAL =   4; EXPRESSED IN LUNG, SIGNAL = 2.4; EXPRESSED IN PLACENTA, SIGNAL = 2.5; EXPRESSED IN BONE MARROW, SIGNAL =   3; EXPRESSED IN HEART, SIGNAL = 2.4; EXPRESSED IN FETAL LIVER, SIGNAL = 3.4; EST_HUMAN HIT: AW965921.1, EVALUE 6.00e-02; NT HIT: AJ000941.1, EVALUE 4.00e-02; SWISSPROT HIT: P26371, EVALUE 9.60e+00
ctagtcccaagaggggtagggttcggagcacaggaatggctgagggcactgtgaactgaaggcagagctgcagcagcat

SEQ ID NO: 24278 - DNA, 234 bp, Homo sapiens
  MAP TO AC018511.3; EXPRESSED IN LUNG, SIGNAL = 4.3; EXPRESSED IN PLACENTA, SIGNAL =   4; EXPRESSED IN ADULT LIVER, SIGNAL = 3.7; EXPRESSED IN BRAIN, SIGNAL = 4.5; EXPRESSED IN FETAL LIVER, SIGNAL = 3.1; EXPRESSED IN HEART, SIGNAL = 4.2; EXPRESSED IN BONE MARROW, SIGNAL = 4.5; SWISSPROT HIT: P07226, EVALUE 4.30e+00; EST_HUMAN HIT: AI791952.1, EVALUE 8.30e-01
tcatcgccaatgtagagcttgggccagacctcgttgacgtgggtgtactggggactgcccttccagaagagccgctccagctcaaaggctccaggggtgcagtagtcctcctcctccccttcctcctccatcttcggcgacagcctcttggcagatgagtaggcattcttgaggcttgtcttcacttctccagatgtcattttagagccaagggattttctctcctttctgcag

SEQ ID NO: 24279 - DNA, 188 bp, Homo sapiens
  MAP TO AL121910.19; EXPRESSED IN FETAL LIVER, SIGNAL = 1.6; EXPRESSED IN BONE MARROW, SIGNAL = 1.6; EXPRESSED IN HEART, SIGNAL = 1.5; EXPRESSED IN LUNG, SIGNAL = 1.8; EXPRESSED IN PLACENTA, SIGNAL = 1.7; EXPRESSED IN ADULT LIVER, SIGNAL = 1.9; EXPRESSED IN HELA, SIGNAL = 2.4; EXPRESSED IN BRAIN, SIGNAL = 1.6; SWISSPROT HIT: O00754, EVALUE 1.30e+00
gtgtccacctcctggatctgctgcactggggtccccaggtgtgtctccacaggggaacacacctgtcatctgtaggtgtccacctcctggatctgctgcactggggtccccaggtgtgtctccacaggggaacacacctgtcatctgcaggtgtccacctcctggatctgctgcactggggtctccag

SEQ ID NO: 24280 - DNA, 89 bp, Homo sapiens
  MAP TO AC013685.3; EXPRESSED IN LUNG, SIGNAL = 1.4; EXPRESSED IN ADULT LIVER, SIGNAL = 1.4; EXPRESSED IN HEART, SIGNAL = 1.2; EXPRESSED IN BRAIN, SIGNAL = 1.4; EXPRESSED IN BONE MARROW, SIGNAL = 1.3; EXPRESSED IN PLACENTA, SIGNAL = 1.2; EXPRESSED IN FETAL LIVER, SIGNAL = 1.7; NT HIT: AJ246003.1, EVALUE 1.20e-02; EST_HUMAN HIT: AL046816.1, EVALUE 7.00e-02
gatgttggtgcattattcatagttgccaaaggaatgacaaaagccatagaaaaggaagacacccaagagacaggaagtgtcagaaagca

SEQ ID NO: 24281 - DNA, 285 bp, Homo sapiens
  MAP TO AC021049.12; EXPRESSED IN HEART, SIGNAL = 2.3; EXPRESSED IN BRAIN, SIGNAL = 2.5; EXPRESSED IN LUNG, SIGNAL =   2; EXPRESSED IN PLACENTA, SIGNAL = 2.3; EXPRESSED IN ADULT LIVER, SIGNAL = 1.6; EXPRESSED IN FETAL LIVER, SIGNAL = 2.3; EXPRESSED IN BONE MARROW, SIGNAL = 2.4; EST_HUMAN HIT: BF692425.1, EVALUE 4.10e+00
agtcctctcatcatttgtactgactatataacattccattacatagctatccataattgtactagccttctatcatgggatattgagggtatcttaattgccattgcaaacattttgcttgatataatcccaacatccttacttctaaatactgtcatctgtttcaggatggtagctattctatttctgggaaaaaataaaataaaatggaatgatgaatgcagagttggggaaaacacactggttgtaggtacagaaataacacaaattggatgtgatgtgagg

SEQ ID NO: 24282 - DNA, 212 bp, Homo sapiens
  MAP TO AC022216.3; EXPRESSED IN PLACENTA, SIGNAL = 1.7; EXPRESSED IN ADULT LIVER, SIGNAL = 1.5; EXPRESSED IN BRAIN, SIGNAL = 1.5; EXPRESSED IN BONE MARROW, SIGNAL = 1.5; EXPRESSED IN LUNG, SIGNAL = 1.6; EXPRESSED IN HEART, SIGNAL = 1.8; EXPRESSED IN FETAL LIVER, SIGNAL = 1.4; NT HIT: gi11418646, EVALUE 1.00e-116; SWISSPROT HIT: P24043, EVALUE 4.00e-35
ctgaagatggcatccatcccaaagctgtatgtgatttgtaggaggactctcttcaaattcgcaagcactgtcataaattcctttctacggactggaaaatgtgtgccatgtatggtaaatgattcttctttaagtaacaatacattagtatgttcttcagatgggtgcaggtacacctcatcttgggctgtgctgatgctcaagtcattacc

SEQ ID NO: 24283 - DNA, 180 bp, Homo sapiens
  MAP TO AL121901.10; EXPRESSED IN ADULT LIVER, SIGNAL = 3.2; EXPRESSED IN BRAIN, SIGNAL = 2.7; EXPRESSED IN LUNG, SIGNAL = 4.9; EXPRESSED IN PLACENTA, SIGNAL = 3.1; EXPRESSED IN HELA, SIGNAL = 3.4; EXPRESSED IN BONE MARROW, SIGNAL = 2.6; EXPRESSED IN HEART, SIGNAL = 2.8; EXPRESSED IN FETAL LIVER, SIGNAL = 2.7; EST_HUMAN HIT: BF154912.1, EVALUE 5.00e-97; NT HIT: gi9938032, EVALUE 2.70e-02; SWISSPROT HIT: Q14449, EVALUE 1.30e+00
gccaagttgttggactcacagggaaaggtgaccaagtggttcaataactctgcagcttccctgacaatgcccaccctggacaacatcccgttcagcctcatcgtgagtcaggacgtggtgaaagctgcagtggctgctgtgctctctccagaagaattcatggtcctgttggactctgtg

SEQ ID NO: 24284 - DNA, 156 bp, Homo sapiens
  MAP TO AC013550.4; EXPRESSED IN LUNG, SIGNAL = 2.7; EXPRESSED IN PLACENTA, SIGNAL = 3.5; EXPRESSED IN FETAL LIVER, SIGNAL =   4; EXPRESSED IN HEART, SIGNAL = 6.8; EXPRESSED IN ADULT LIVER, SIGNAL = 3.1; EXPRESSED IN HELA, SIGNAL = 3.8; EXPRESSED IN BRAIN, SIGNAL = 2.8; EXPRESSED IN BONE MARROW, SIGNAL = 2.5; SWISSPROT HIT: P54296, EVALUE 6.00e-09; NT HIT: gi4505314, EVALUE 6.00e-83
gcgagcttccacccaggcatcttcccagaagtccttgagtcagcggtcgtcttcacagagagcctccagccagacgtccctgggaggaaccatctgcagggtctgtgcgaagcgagtgagcacgcaggaagatgaggagcaggagaacagaagcag

SEQ ID NO: 24285 - DNA, 363 bp, Homo sapiens
  MAP TO AC019276.3; EXPRESSED IN LUNG, SIGNAL = 2.8; EXPRESSED IN PLACENTA, SIGNAL =   3; EXPRESSED IN HEART, SIGNAL = 2.4; EXPRESSED IN BONE MARROW, SIGNAL = 2.7; EXPRESSED IN ADULT LIVER, SIGNAL = 2.3; EXPRESSED IN FETAL LIVER, SIGNAL = 2.7; EXPRESSED IN BRAIN, SIGNAL = 3.6; NT HIT: gi11432547, EVALUE 0.00e+00; SWISSPROT HIT: Q14153, EVALUE 3.00e-69; EST_HUMAN HIT: AW500526.1, EVALUE 0.00e+00
tcagttcttctctatctgctcaatgtccaactcgccgtccagggagcagaggctgttcccaggggccccgcggtcccgccaggctgcagccggctccgctctcctgccacaatcctcgtccagggcgcagctgtctgactcctcacaggacaggtcctcctggcaggcgaggtggtcgtcgaaggaagggggaagaggctcagggaccggggtcccagcgggggtcctgccccctgggccggaggctgagagcagggcggtccaggccctggtgttgctgacgtggcgggcgaaggggctctggggaccgcagtcctctgtccctgcgctcaggcagctgaggctgctgaaggtctgacagtt

SEQ ID NO: 24286 - DNA, 168 bp, Homo sapiens
  MAP TO AL157377.1; EXPRESSED IN LUNG, SIGNAL = 1.3; EXPRESSED IN FETAL LIVER, SIGNAL = 1.2; EXPRESSED IN BONE MARROW, SIGNAL = 1.1; EXPRESSED IN HEART, SIGNAL = 1.2; EXPRESSED IN PLACENTA, SIGNAL = 1.2; EXPRESSED IN ADULT LIVER, SIGNAL = 1.6; EXPRESSED IN BRAIN, SIGNAL = 1.1; NT HIT: gi11419429, EVALUE 5.00e-90; EST_HUMAN HIT: AI539373.1, EVALUE 7.00e-90; SWISSPROT HIT: P06802, EVALUE 4.00e-13
gaaggtaaaccagaagctctttgggttgaagaaagatttacagctcacattgcccgggtccgtgatgtagaacttctcactgggcttgacttctatcaggataaagtgcagcctgtctctgaaattttgcaactaaagacatatttaccaacatttgaaaccactatt

SEQ ID NO: 24287 - DNA, 114 bp, Homo sapiens
  MAP TO AC019221.3; EXPRESSED IN LUNG, SIGNAL = 3.6; EXPRESSED IN PLACENTA, SIGNAL = 3.5; EXPRESSED IN HEART, SIGNAL = 3.7; EXPRESSED IN BONE MARROW, SIGNAL =   4; EXPRESSED IN HELA, SIGNAL = 2.6; EXPRESSED IN FETAL LIVER, SIGNAL = 3.3; EXPRESSED IN ADULT LIVER, SIGNAL = 3.3; EXPRESSED IN BRAIN, SIGNAL = 4.3; NT HIT: U82668.1, EVALUE 1.00e-06; EST_HUMAN HIT: AA132611.1, EVALUE 2.00e-06
aggagaagacacagaagaaggaagaaaaggccatgtggagacagaggcagatcttgaagcgatgcagccacaagccagggaatgcctggaattaccaggagctgggaaaagcaa

SEQ ID NO: 24288 - DNA, 102 bp, Homo sapiens
  MAP TO AL160492.1; EXPRESSED IN PLACENTA, SIGNAL =   2; EXPRESSED IN ADULT LIVER, SIGNAL = 1.7; EXPRESSED IN HEART, SIGNAL = 2.3; EXPRESSED IN FETAL LIVER, SIGNAL = 1.8; EXPRESSED IN BONE MARROW, SIGNAL =   2; EXPRESSED IN LUNG, SIGNAL = 1.9; EXPRESSED IN BRAIN, SIGNAL = 2.2; NT HIT: gi7661535, EVALUE 6.00e-51; EST_HUMAN HIT: T11912.1, EVALUE 9.00e-51
tgacccgtgtccgttctcagggctttgtcaccctcctcttcaacgtggtgaccaaggacatgaggaaactgggctatgacactgggccttctgatacacagg

SEQ ID NO: 24289 - DNA, 214 bp, Homo sapiens
  MAP TO AL121895.18; EXPRESSED IN ADULT LIVER, SIGNAL = 4.8; EXPRESSED IN BRAIN, SIGNAL = 4.3; EXPRESSED IN LUNG, SIGNAL = 5.1; EXPRESSED IN PLACENTA, SIGNAL = 4.7; EXPRESSED IN HELA, SIGNAL = 6.5; EXPRESSED IN FETAL LIVER, SIGNAL = 4.6; EXPRESSED IN BONE MARROW, SIGNAL = 4.3; EXPRESSED IN HEART, SIGNAL = 4.5; SWISSPROT HIT: P42684, EVALUE 1.20e+00; NT HIT: J05412.1, EVALUE 5.10e-01
gaaatcagtgagccaagagaatcctcgttggcctagccgggccgtctcccttcccacactgcctctctgggggtacagcgtccctgtacccaggaagctggccctcttgggccggctttctgtggatccacaaggcaatcaccacaagaggctgaataagagcctgtcagtcactgggagacaggcagctataaatccagaggaccatgattag

SEQ ID NO: 24290 - DNA, 149 bp, Homo sapiens
  MAP TO AC016212.3; EXPRESSED IN LUNG, SIGNAL = 2.7; EXPRESSED IN PLACENTA, SIGNAL = 2.7; EXPRESSED IN ADULT LIVER, SIGNAL = 2.3; EXPRESSED IN HEART, SIGNAL = 2.3; EXPRESSED IN FETAL LIVER, SIGNAL = 1.9; EXPRESSED IN BONE MARROW, SIGNAL = 2.3; EXPRESSED IN BRAIN, SIGNAL = 2.2; NT HIT: AB026898.1, EVALUE 2.20e-02; SWISSPROT HIT: Q09550, EVALUE 2.30e+00
ctactgtgtgtcttcagaccagccctctagacccagtgtccactcttcaccaccctgcgctctgccctcagaccactggctgcattgctgggcttccttgcccttggcttcctgttggaattggccagttggaggcaccagaaagagat

SEQ ID NO: 24291 - DNA, 150 bp, Homo sapiens
  MAP TO AC009415.2; EXPRESSED IN ADULT LIVER, SIGNAL = 3.8; EXPRESSED IN BRAIN, SIGNAL = 3.1; EXPRESSED IN LUNG, SIGNAL = 3.8; EXPRESSED IN PLACENTA, SIGNAL = 3.9; EXPRESSED IN HELA, SIGNAL = 4.7; EXPRESSED IN HEART, SIGNAL = 3.6; EXPRESSED IN FETAL LIVER, SIGNAL = 3.4; EXPRESSED IN BONE MARROW, SIGNAL = 3.2; SWISSPROT HIT: P05107, EVALUE 5.20e+00; EST_HUMAN HIT: W22302.1, EVALUE 5.10e-01
tggagatcaggaataccaaactgaggcatatgctcctcattttcctggaaaaaaactttgtttttgcggtatctgtaataaaattgaaaaatgggagcaaagtcatgattacagcaataatccttgtcaatgcaagctttctctgactct

SEQ ID NO: 24292 - DNA, 246 bp, Homo sapiens
  MAP TO AC021468.2; EXPRESSED IN ADULT LIVER, SIGNAL = 3.7; EXPRESSED IN LUNG, SIGNAL = 3.3; EXPRESSED IN BONE MARROW, SIGNAL = 3.3; EXPRESSED IN BRAIN, SIGNAL = 3.2; EXPRESSED IN FETAL LIVER, SIGNAL = 3.5; EXPRESSED IN HEART, SIGNAL = 3.4; EXPRESSED IN HELA, SIGNAL = 3.1; EXPRESSED IN PLACENTA, SIGNAL = 2.8; EST_HUMAN HIT: AA189080.1, EVALUE 6.00e-48; SWISSPROT HIT: P49715, EVALUE 7.30e-01; NT HIT: M87299.1, EVALUE 4.00e-11
aggatttgccaaggatgaggaggttgcaaaaatcaacaagtttgtggttgagatggcaaacagctttgacctgggtgtggatgagaatgacactgaggagctcctagaggtggttcttgaggaattgactaataaggagttgttggaaatgaaacaggaatgcatagctgaagaagaggcaagaaaaaaggaaactgcatgtattagtctgttctcatgctgctataaagaactgcccaagaccag

SEQ ID NO: 24293 - DNA, 123 bp, Homo sapiens
  MAP TO AC018469.3; EXPRESSED IN LUNG, SIGNAL = 2.9; EXPRESSED IN PLACENTA, SIGNAL = 3.4; EXPRESSED IN BONE MARROW, SIGNAL = 3.1; EXPRESSED IN HEART, SIGNAL = 2.8; EXPRESSED IN ADULT LIVER, SIGNAL = 3.9; EXPRESSED IN FETAL LIVER, SIGNAL = 2.8; EXPRESSED IN BRAIN, SIGNAL = 3.2; SWISSPROT HIT: P42087, EVALUE 9.20e+00; NT HIT: U20874.1, EVALUE 1.10e+00; EST_HUMAN HIT: AI025699.1, EVALUE 4.00e-04
ctcaggctgctcaactgacaggtaggtgccagagttaagattcagactctccaaccggcccctagagcctggtcttcttgcactgctttgcactgcctcctgccatctccattctctggtcat

SEQ ID NO: 24294 - DNA, 163 bp, Homo sapiens
  MAP TO AC015897.3; EXPRESSED IN LUNG, SIGNAL = 0.95; EXPRESSED IN HELA, SIGNAL =  15; EXPRESSED IN FETAL LIVER, SIGNAL = 0.98; EXPRESSED IN HEART, SIGNAL = 1.5; EXPRESSED IN PLACENTA, SIGNAL = 0.92; EXPRESSED IN ADULT LIVER, SIGNAL = 1.3; EXPRESSED IN BRAIN, SIGNAL = 1.2; EXPRESSED IN BONE MARROW, SIGNAL = 0.77; EST_HUMAN HIT: AW897760.1, EVALUE 3.00e-21; SWISSPROT HIT: P18337, EVALUE 3.00e+00; NT HIT: AL161494.2, EVALUE 6.00e-03
cttatttttatagcaccaacaatgaatttcatggtggatgaaacagcagcaatcaactcaaacaaggaatcccagcaattggtgcaaaaaacgtatacactggagaagaaagaagcaatggaggaagatgaagcgccccagcacagagatgctgacatagtac

SEQ ID NO: 24295 - DNA, 111 bp, Homo sapiens
  MAP TO AC013317.4; EXPRESSED IN HELA, SIGNAL = 4.9; EXPRESSED IN HEART, SIGNAL =   6; EXPRESSED IN BRAIN, SIGNAL = 7.2; EXPRESSED IN BONE MARROW, SIGNAL = 8.4; EXPRESSED IN PLACENTA, SIGNAL = 5.1; EXPRESSED IN ADULT LIVER, SIGNAL = 7.8; EXPRESSED IN FETAL LIVER, SIGNAL = 6.8; EXPRESSED IN LUNG, SIGNAL = 5.9; EST_HUMAN HIT: BF304683.1, EVALUE 4.00e-41; NT HIT: AL163282.2, EVALUE 3.00e-25
ctttgcgccagttctcaacaagttcctcatctccatctgagaccacctcaggttggaccttattgttcatatcactatcagcatttttgtcaaagccattcaacaaatttc

SEQ ID NO: 24296 - DNA, 113 bp, Homo sapiens
  MAP TO AL157792.2; EXPRESSED IN BONE MARROW, SIGNAL =  14; EXPRESSED IN ADULT LIVER, SIGNAL =  10; EXPRESSED IN FETAL LIVER, SIGNAL =  17; EXPRESSED IN BRAIN, SIGNAL = 7.1; EXPRESSED IN LUNG, SIGNAL =  12; EXPRESSED IN PLACENTA, SIGNAL = 8.1; EXPRESSED IN HEART, SIGNAL = 8.9; EXPRESSED IN HELA, SIGNAL =  10; NT HIT: gi6912633, EVALUE 9.00e-32; SWISSPROT HIT: P40429, EVALUE 1.00e-04; EST_HUMAN HIT: AL036635.1, EVALUE 1.00e-34
ccgccaggcggcccaggagatggcctcgaccatcaagcaccaagacctgcacctccgccatcttcggcagcagcttgggaaagccctttttctatttttattgcattagctgc

SEQ ID NO: 24297 - DNA, 85 bp, Homo sapiens
  MAP TO AC015578.4; EXPRESSED IN LUNG, SIGNAL = 1.5; EXPRESSED IN PLACENTA, SIGNAL = 1.3; EXPRESSED IN BRAIN, SIGNAL = 1.3; EXPRESSED IN ADULT LIVER, SIGNAL = 1.3; EXPRESSED IN HEART, SIGNAL = 1.5; EXPRESSED IN FETAL LIVER, SIGNAL = 1.3; EXPRESSED IN BONE MARROW, SIGNAL = 1.3; NT HIT: AL161588.2, EVALUE 1.70e-01; EST_HUMAN HIT: AL040554.1, EVALUE 1.70e-02
catacagagccagaaatcttgttcttttgaagttgagacatctaattctaatactagggttgccatcaaattttctacttatcag

SEQ ID NO: 24298 - DNA, 161 bp, Homo sapiens
  MAP TO AC019126.3; EXPRESSED IN PLACENTA, SIGNAL = 1.1; EXPRESSED IN ADULT LIVER, SIGNAL = 1.8; EXPRESSED IN FETAL LIVER, SIGNAL = 1.5; EXPRESSED IN BRAIN, SIGNAL = 1.4; EXPRESSED IN BONE MARROW, SIGNAL = 1.5; EXPRESSED IN HEART, SIGNAL = 1.6; EXPRESSED IN LUNG, SIGNAL = 1.4; NT HIT: gi5453997, EVALUE 7.00e-86; EST_HUMAN HIT: AU133218.1, EVALUE 1.00e-85; SWISSPROT HIT: P46970, EVALUE 4.00e-02
caaatgttgtgtcatttctactgcaataggagtaacttcttcactatattcacagatcattttctgaattacattggtaaggtcatcattttctgtttctcttataatgtgaagaagagcctgcattacaggtctgatgaatggtgtgatatattctttag

SEQ ID NO: 24299 - DNA, 189 bp, Homo sapiens
  MAP TO AC021356.5; EXPRESSED IN LUNG, SIGNAL = 4.9; EXPRESSED IN PLACENTA, SIGNAL = 5.2; EXPRESSED IN ADULT LIVER, SIGNAL = 5.2; EXPRESSED IN HELA, SIGNAL = 5.2; EXPRESSED IN HEART, SIGNAL = 4.7; EXPRESSED IN FETAL LIVER, SIGNAL = 4.5; EXPRESSED IN BRAIN, SIGNAL = 6.6; EXPRESSED IN BONE MARROW, SIGNAL = 4.9; NT HIT: AB026898.1, EVALUE 3.00e-17; SWISSPROT HIT: Q00963, EVALUE 5.00e+00; EST_HUMAN HIT: AW895129.1, EVALUE 8.00e-13
cacatacatcctctttcctacatgaggtctttcatcacgggatgatgcagcaagaaggccctggcaagatacaagccccttgaccttggacttctcagcctccagaactgtaagaaataaatctctgttctttataaaacccagtttgtagcattctgttacagcaacacaaaatggactaagaaaatc

SEQ ID NO: 24300 - DNA, 149 bp, Homo sapiens
  MAP TO AL161751.1; EXPRESSED IN BONE MARROW, SIGNAL = 1.6; EXPRESSED IN PLACENTA, SIGNAL = 1.8; EXPRESSED IN ADULT LIVER, SIGNAL = 1.1; EXPRESSED IN HELA, SIGNAL = 2.5; EXPRESSED IN HEART, SIGNAL = 1.5; EXPRESSED IN LUNG, SIGNAL = 1.1; EXPRESSED IN FETAL LIVER, SIGNAL = 1.6; EXPRESSED IN BRAIN, SIGNAL = 1.5; EST_HUMAN HIT: AI276522.1, EVALUE 2.00e-22; SWISSPROT HIT: P36370, EVALUE 6.90e+00; NT HIT: AF223391.1, EVALUE 2.00e-18
acagggtcaggatcatcaatatcactgttggtcacctccatattttgtcccacttgaaggtcttcaggggtaataacatgaaggaagctctcatctcctatgataacagtgccttcgcctgcaatgtctcctaaaggacctgcctgagg

SEQ ID NO: 24301 - DNA, 116 bp, Homo sapiens
  MAP TO AC018421.3; EXPRESSED IN ADULT LIVER, SIGNAL = 1.1; EXPRESSED IN BRAIN, SIGNAL = 1.6; EXPRESSED IN PLACENTA, SIGNAL = 1.4; EXPRESSED IN HEART, SIGNAL = 1.7; EXPRESSED IN FETAL LIVER, SIGNAL = 1.9; EXPRESSED IN LUNG, SIGNAL = 1.2; EXPRESSED IN BONE MARROW, SIGNAL = 1.6; EST_HUMAN HIT: AV762869.1, EVALUE 5.00e-59; NT HIT: D38044.1, EVALUE 3.00e-16; SWISSPROT HIT: P36777, EVALUE 4.10e+00
cattgtcttccacctctacgccttgtcccactgaaagttcttcaggggcaataagaagcatggagctgtcagctcctttgacaacaaagccttcttctggatgcctcccgaaggac

SEQ ID NO: 24302 - DNA, 123 bp, Homo sapiens
  MAP TO AC009298.2; EXPRESSED IN PLACENTA, SIGNAL = 0.83; EXPRESSED IN FETAL LIVER, SIGNAL = 0.77; EXPRESSED IN ADULT LIVER, SIGNAL = 0.92; EXPRESSED IN BONE MARROW, SIGNAL = 0.51; EXPRESSED IN LUNG, SIGNAL = 1.3; EXPRESSED IN HEART, SIGNAL = 1.8; EXPRESSED IN BRAIN, SIGNAL = 1.1; NT HIT: gi11434672, EVALUE 1.00e-03; SWISSPROT HIT: P06026, EVALUE 2.40e+00; EST_HUMAN HIT: BE876158.1, EVALUE 3.00e-63
gtggaatttaattctcctccccttgaatatgggctggacaaagagaaaaatggtagctcaacagtggagacacctggacagcactttaaccaagtgatcaaagttaatatcgccaattatgta

SEQ ID NO: 24303 - DNA, 144 bp, Homo sapiens
  MAP TO AC021641.4; EXPRESSED IN ADULT LIVER, SIGNAL = 7.2; EXPRESSED IN BONE MARROW, SIGNAL = 5.3; EXPRESSED IN HEART, SIGNAL = 3.5; EXPRESSED IN FETAL LIVER, SIGNAL = 5.9; EXPRESSED IN LUNG, SIGNAL = 7.2; EXPRESSED IN PLACENTA, SIGNAL = 6.5; EXPRESSED IN HELA, SIGNAL = 3.9; EXPRESSED IN BRAIN, SIGNAL = 3.9; SWISSPROT HIT: P08672, EVALUE 3.00e-03; EST_HUMAN HIT: AI343326.1, EVALUE 4.80e-01
gtgctgctggagagcagagtgaaggaggaaataggacaggtgctaaggaacatgcaggtggagctggaacacagagtgcaagagggaataggccaggtgctaaggaacatgcaggtggagctggagagcagagtgcagaaggga

SEQ ID NO: 24304 - DNA, 114 bp, Homo sapiens
  MAP TO AC015570.5; EXPRESSED IN LUNG, SIGNAL = 2.7; EXPRESSED IN HEART, SIGNAL = 2.2; EXPRESSED IN BRAIN, SIGNAL = 2.2; EXPRESSED IN BONE MARROW, SIGNAL = 2.3; EXPRESSED IN ADULT LIVER, SIGNAL = 2.6; EXPRESSED IN PLACENTA, SIGNAL = 2.3; EXPRESSED IN FETAL LIVER, SIGNAL = 2.1; EST_HUMAN HIT: BE962631.2, EVALUE 9.30e-02; NT HIT: AE001713.1, EVALUE 2.50e-01
atcaatcacaggagcaacgagagggaggtgaagctggagaacaatcaactaagaagtcattcagcaaccaggttaacaaaatatgaaagcctaactcaagagaaagtgattgtg

SEQ ID NO: 24305 - DNA, 126 bp, Homo sapiens
  MAP TO AC009503.3; EXPRESSED IN LUNG, SIGNAL = 0.98; EXPRESSED IN BONE MARROW, SIGNAL = 0.85; EXPRESSED IN HEART, SIGNAL = 1.2; EXPRESSED IN PLACENTA, SIGNAL = 1.2; EXPRESSED IN ADULT LIVER, SIGNAL = 1.2; EXPRESSED IN FETAL LIVER, SIGNAL =   1; EXPRESSED IN BRAIN, SIGNAL = 0.88; NT HIT: L13654.1, EVALUE 2.80e-01; SWISSPROT HIT: Q92628, EVALUE 1.80e+00
atagcccaggagcaatcatgtaaatgcattctgttgcctgttccataatgaaagagaactgtttctgatccttgttcctgataaggatgtaaaacgccgcattcaccagctcaatggccatgtact

SEQ ID NO: 24306 - DNA, 83 bp, Homo sapiens
  MAP TO AC013314.4; EXPRESSED IN HELA, SIGNAL = 2.6; EXPRESSED IN LUNG, SIGNAL = 2.2; EXPRESSED IN PLACENTA, SIGNAL = 2.1; EXPRESSED IN ADULT LIVER, SIGNAL = 2.6; EXPRESSED IN BRAIN, SIGNAL = 3.1; EXPRESSED IN BONE MARROW, SIGNAL = 1.9; EXPRESSED IN FETAL LIVER, SIGNAL = 2.5; EXPRESSED IN HEART, SIGNAL = 2.1; EST_HUMAN HIT: BF672864.1, EVALUE 2.50e-01; NT HIT: U16288.1, EVALUE 1.70e-01
cagcctcagcctgtggtgcctccacataatactcaactatccagtaggctacagtcactccttctccaatgacatctggatcc

SEQ ID NO: 24307 - DNA, 145 bp, Homo sapiens
  MAP TO AC007000.2; EXPRESSED IN LUNG, SIGNAL =   4; EXPRESSED IN HEART, SIGNAL = 3.2; EXPRESSED IN BONE MARROW, SIGNAL = 3.3; EXPRESSED IN BRAIN, SIGNAL = 3.3; EXPRESSED IN FETAL LIVER, SIGNAL = 2.9; EXPRESSED IN HELA, SIGNAL = 2.8; EXPRESSED IN ADULT LIVER, SIGNAL = 3.2; EXPRESSED IN PLACENTA, SIGNAL =   3; EST_HUMAN HIT: AW299353.1, EVALUE 3.00e-76; NT HIT: U41411.1, EVALUE 3.00e-04
cagacacagaaaaagaagaggaagaggagaaagatgaaaaggatcaagagcccatttatgccatagtgcccacaattaacattcaagatgagcggtttgttgatttatctgaaactccagctttcatttttctgcatgaggtata

SEQ ID NO: 24308 - DNA, 116 bp, Homo sapiens
  MAP TO AC022939.2; EXPRESSED IN ADULT LIVER, SIGNAL =   2; EXPRESSED IN HEART, SIGNAL =   2; EXPRESSED IN FETAL LIVER, SIGNAL = 1.8; EXPRESSED IN BONE MARROW, SIGNAL = 1.8; EXPRESSED IN LUNG, SIGNAL = 2.2; EXPRESSED IN PLACENTA, SIGNAL = 1.9; EXPRESSED IN HELA, SIGNAL = 2.3; EXPRESSED IN BRAIN, SIGNAL = 1.7; SWISSPROT HIT: Q09746, EVALUE 4.10e+00; NT HIT: AB011126.1, EVALUE 6.40e-02; EST_HUMAN HIT: AW575478.1, EVALUE 9.50e-02
gatcagttcgacagcttagacaagcatacacaatggggaattgacttcttggaaagatatgccaaatttgttaaagagaggatagaaattgaacagaactatgcgaaacaattgag

SEQ ID NO: 24309 - DNA, 124 bp, Homo sapiens
  MAP TO AC021677.3; EXPRESSED IN ADULT LIVER, SIGNAL = 2.2; EXPRESSED IN FETAL LIVER, SIGNAL = 2.2; EXPRESSED IN BRAIN, SIGNAL = 2.8; EXPRESSED IN BONE MARROW, SIGNAL = 2.4; EXPRESSED IN LUNG, SIGNAL = 2.2; EXPRESSED IN PLACENTA, SIGNAL = 2.2; EXPRESSED IN HELA, SIGNAL = 2.8; EXPRESSED IN HEART, SIGNAL = 2.3; SWISSPROT HIT: Q91044, EVALUE 1.00e-19; NT HIT: S76475.1, EVALUE 6.00e-64; EST_HUMAN HIT: AI768152.1, EVALUE 9.00e-64
atcaccacgccctcgtcactggatgccgggcccgacactgtggtcattggcatgactcgcatccctgtcattgagaacccccagtacttccgtcagggacacaactgccacaagccggacacgt

SEQ ID NO: 24310 - DNA, 233 bp, Homo sapiens
  MAP TO AC018780.3; EXPRESSED IN PLACENTA, SIGNAL = 2.7; EXPRESSED IN ADULT LIVER, SIGNAL = 2.9; EXPRESSED IN HEART, SIGNAL = 2.5; EXPRESSED IN FETAL LIVER, SIGNAL = 2.5; EXPRESSED IN BRAIN, SIGNAL = 2.6; EXPRESSED IN BONE MARROW, SIGNAL = 2.8; EXPRESSED IN LUNG, SIGNAL = 2.9; EST_HUMAN HIT: BE870998.1, EVALUE 8.30e-01; NT HIT: U78028.1, EVALUE 3.60e-02; SWISSPROT HIT: P48982, EVALUE 7.00e-03
aggttgaacatgctgtgtctgaattcatcaaatatgagatctccttcaatgtatatatgttccatggtggaaccaactttggtttcatgaacggggccacatatttcgggaagcactcgggcattgtcaccagctatggcaagtgtcgctggtgtagtagcctctccagcatgggcggtgctggggctttacagaggaggctccggaagcctgttctggcaccactgggttct

SEQ ID NO: 24311 - DNA, 105 bp, Homo sapiens
  MAP TO AL133320.8; EXPRESSED IN ADULT LIVER, SIGNAL =   3; EXPRESSED IN HELA, SIGNAL = 3.5; EXPRESSED IN BRAIN, SIGNAL = 2.5; EXPRESSED IN LUNG, SIGNAL = 2.7; EXPRESSED IN PLACENTA, SIGNAL = 2.6; EXPRESSED IN BONE MARROW, SIGNAL = 2.7; EXPRESSED IN FETAL LIVER, SIGNAL = 2.7; EXPRESSED IN HEART, SIGNAL = 2.7; NT HIT: D87449.1, EVALUE 1.00e-27; EST_HUMAN HIT: AW450514.1, EVALUE 2.00e-27
cacaggagagggtgaactgcagaagaaagagggtgtcagcccagccttcaaactccacagcctgcaacacacaagaaagcattaaattttagaccaggccttcaa

SEQ ID NO: 24312 - DNA, 336 bp, Homo sapiens
  MAP TO AC022555.2; EXPRESSED IN PLACENTA, SIGNAL = 2.6; EXPRESSED IN FETAL LIVER, SIGNAL = 1.5; EXPRESSED IN ADULT LIVER, SIGNAL = 2.2; EXPRESSED IN BONE MARROW, SIGNAL = 1.5; EXPRESSED IN LUNG, SIGNAL =   2; EXPRESSED IN HEART, SIGNAL = 1.3; EXPRESSED IN BRAIN, SIGNAL = 1.5; SWISSPROT HIT: P26808, EVALUE 6.00e-18; NT HIT: AF009668.1, EVALUE 0.00e+00; EST_HUMAN HIT: AU134310.1, EVALUE 1.00e-130
cactgcatactctgcctttcgaagtcctttttctacaaaggaacttccatcagtatacaagttgaggtagggatcagtcaagggaacctctagaaggtcccctcgagtagcgtaggtttgagcaattacttgttgacagttacgttctgtcttttcttcattgtctggaagaaatgtgactgggttaagagttgcacaggtgtgcagtcgcagcactggtccttcaagtaatagagcctgatatttaagtaaatggttgtctgacagccacaagtctcctttagcagtgagtatgccgttcacatcatgagatgtccacacgataagatctcttcc

SEQ ID NO: 24313 - DNA, 130 bp, Homo sapiens
  MAP TO AC019214.2; EXPRESSED IN PLACENTA, SIGNAL = 2.4; EXPRESSED IN HEART, SIGNAL = 1.6; EXPRESSED IN FETAL LIVER, SIGNAL = 2.6; EXPRESSED IN BRAIN, SIGNAL = 2.2; EXPRESSED IN LUNG, SIGNAL = 2.4; EXPRESSED IN ADULT LIVER, SIGNAL = 1.9; EXPRESSED IN BONE MARROW, SIGNAL = 1.9; SWISSPROT HIT: P13284, EVALUE 5.40e+00; EST_HUMAN HIT: AW630048.1, EVALUE 4.30e-01
gtgcactgccacaccagcaccactgctccaggctcagccgtgggcatctgcgaggccctggagggcacagacagggtgtgcatgctcggctctgtcaaggggctgcagtgctgcagatgcctgtggtttg

SEQ ID NO: 24314 - DNA, 92 bp, Homo sapiens
  MAP TO AC013726.3; EXPRESSED IN ADULT LIVER, SIGNAL = 5.3; EXPRESSED IN LUNG, SIGNAL = 5.5; EXPRESSED IN BRAIN, SIGNAL = 4.8; EXPRESSED IN BONE MARROW, SIGNAL = 4.9; EXPRESSED IN PLACENTA, SIGNAL = 5.2; EXPRESSED IN HEART, SIGNAL = 4.9; EXPRESSED IN FETAL LIVER, SIGNAL = 4.4; NT HIT: U82668.1, EVALUE 3.00e-06; EST_HUMAN HIT: AA132611.1, EVALUE 1.00e-06
attccaggcattccctggcttgtggctgcatcgcttcaagatctgcctctgtctccacatggccttttcttccttcttctgtgtcttctcct

SEQ ID NO: 24315 - DNA, 97 bp, Homo sapiens
  MAP TO AL133419.11; EXPRESSED IN LUNG, SIGNAL = 1.9; EXPRESSED IN ADULT LIVER, SIGNAL = 2.1; EXPRESSED IN HEART, SIGNAL =   2; EXPRESSED IN FETAL LIVER, SIGNAL =   2; EXPRESSED IN BRAIN, SIGNAL = 1.9; EXPRESSED IN PLACENTA, SIGNAL = 2.2; EXPRESSED IN BONE MARROW, SIGNAL = 1.8; EST_HUMAN HIT: AW956704.1, EVALUE 3.00e-01; NT HIT: D10927.1, EVALUE 5.20e-02
atgtctgaatattcaggatgtacacattttgggctcccattttaggaccctgttggacttggaacattgccagtctcctcttggttggcactgtggt

SEQ ID NO: 24316 - DNA, 124 bp, Homo sapiens
  MAP TO AL121918.15; EXPRESSED IN PLACENTA, SIGNAL = 1.5; EXPRESSED IN ADULT LIVER, SIGNAL = 1.6; EXPRESSED IN BRAIN, SIGNAL = 1.3; EXPRESSED IN BONE MARROW, SIGNAL = 1.2; EXPRESSED IN LUNG, SIGNAL = 1.6; EXPRESSED IN FETAL LIVER, SIGNAL = 1.3; EXPRESSED IN HEART, SIGNAL = 1.3; EST_HUMAN HIT: T41290.1, EVALUE 1.60e+00; SWISSPROT HIT: Q58824, EVALUE 4.10e+00
aataggcttccacgggagagagggggtagaaagaccttgtctcttctcgatgattgcacttcttgcaaagcaccaagtacacaagcgccttagctacaacaaagggctccttagcttcaggcat

SEQ ID NO: 24317 - DNA, 161 bp, Homo sapiens
  MAP TO AC011666.18; EXPRESSED IN LUNG, SIGNAL = 2.1; EXPRESSED IN PLACENTA, SIGNAL = 1.7; EXPRESSED IN FETAL LIVER, SIGNAL = 1.9; EXPRESSED IN ADULT LIVER, SIGNAL =   2; EXPRESSED IN HEART, SIGNAL = 1.5; EXPRESSED IN BRAIN, SIGNAL = 1.5; EXPRESSED IN BONE MARROW, SIGNAL = 6.9; SWISSPROT HIT: Q02294, EVALUE 3.50e-01; NT HIT: AL163303.2, EVALUE 3.70e-01; EST_HUMAN HIT: BE908153.1, EVALUE 5.50e-01
aaaggactgtatgtttcggacgacagtctggcagtctgtggatacagtgcagcttgtgccagcggtgtggatgatgatgacatatttggctgggaggttcattttagggcagtgtgtctctctggcttcccaagcagatcgtttgatgatgttggggcaaa

SEQ ID NO: 24318 - DNA, 103 bp, Homo sapiens
  MAP TO AC021677.3; EXPRESSED IN PLACENTA, SIGNAL = 2.1; EXPRESSED IN ADULT LIVER, SIGNAL = 1.8; EXPRESSED IN FETAL LIVER, SIGNAL = 1.7; EXPRESSED IN BRAIN, SIGNAL = 1.6; EXPRESSED IN BONE MARROW, SIGNAL = 1.3; EXPRESSED IN HEART, SIGNAL = 1.4; EXPRESSED IN LUNG, SIGNAL = 1.9; EST_HUMAN HIT: N85135.1, EVALUE 1.30e+00; SWISSPROT HIT: P34434, EVALUE 9.40e+00; NT HIT: AE004963.1, EVALUE 8.70e-01
ctttgtcacccatgtggcagctctggactgcagtaagttgttcatggatgagggctggactgcttgctgctttctcaggagtcacacattggccttttcccat

SEQ ID NO: 24319 - DNA, 139 bp, Homo sapiens
  MAP TO AC025749.2; EXPRESSED IN ADULT LIVER, SIGNAL = 1.5; EXPRESSED IN BONE MARROW, SIGNAL = 2.3; EXPRESSED IN PLACENTA, SIGNAL = 1.8; EXPRESSED IN HEART, SIGNAL = 2.2; EXPRESSED IN FETAL LIVER, SIGNAL = 1.8; EXPRESSED IN LUNG, SIGNAL = 1.6; EXPRESSED IN BRAIN, SIGNAL = 1.9; NT HIT: gi11526037, EVALUE 8.00e-73; SWISSPROT HIT: P42701, EVALUE 4.00e-22; EST_HUMAN HIT: AV764573.1, EVALUE 2.00e-68
gccaaggccaccaggaccctgcacctggggaagatgccctatctctcgggtgctgcctacaacgtggctgtcatctcctcgaaccaatttggtcctggcctgaaccagacgtggcacattcctgccgacacccacacag

SEQ ID NO: 24320 - DNA, 154 bp, Homo sapiens
  MAP TO AL136528.9; EXPRESSED IN ADULT LIVER, SIGNAL = 0.81; EXPRESSED IN PLACENTA, SIGNAL = 1.1; EXPRESSED IN HEART, SIGNAL = 1.3; EXPRESSED IN FETAL LIVER, SIGNAL = 1.1; EXPRESSED IN BONE MARROW, SIGNAL = 1.1; EXPRESSED IN LUNG, SIGNAL = 0.83; EXPRESSED IN BRAIN, SIGNAL = 0.99; EST_HUMAN HIT: AA442309.1, EVALUE 3.00e-76; SWISSPROT HIT: Q06481, EVALUE 2.30e+00; NT HIT: Z95207.1, EVALUE 3.50e-01
cccctccgccagtaccttctcgtggatgactgagaggtaccagggcatcctctttctcaggcagctctgagatgcgactgagctgctggtgaccggactcaaagtctgggattttctcctcttccgcaagtaatcgaactcgcagatgctctta

SEQ ID NO: 24321 - DNA, 171 bp, Homo sapiens
  MAP TO AC009311.2; EXPRESSED IN LUNG, SIGNAL = 1.8; EXPRESSED IN ADULT LIVER, SIGNAL = 1.3; EXPRESSED IN BRAIN, SIGNAL = 1.6; EXPRESSED IN PLACENTA, SIGNAL = 1.3; EXPRESSED IN FETAL LIVER, SIGNAL = 1.1; EXPRESSED IN HEART, SIGNAL = 1.4; EXPRESSED IN BONE MARROW, SIGNAL = 1.2; EST_HUMAN HIT: BF529069.1, EVALUE 9.20e+00; NT HIT: AY010901.1, EVALUE 6.20e+00
agaagagtgacaagatcaggaatcttctgcttccccttctccttccccttccccttcccctcccccttcccctcctcctcctcctttttcttcttcttcctcctcttcttcctcttcttcttttttcttcttctttcttcttctcccttcctctcctctcttttcatcttc

SEQ ID NO: 24322 - DNA, 219 bp, Homo sapiens
  MAP TO AC015649.5; EXPRESSED IN ADULT LIVER, SIGNAL =   4; EXPRESSED IN LUNG, SIGNAL = 4.2; EXPRESSED IN HEART, SIGNAL = 4.7; EXPRESSED IN FETAL LIVER, SIGNAL = 3.1; EXPRESSED IN BRAIN, SIGNAL = 3.8; EXPRESSED IN BONE MARROW, SIGNAL =   4; EXPRESSED IN PLACENTA, SIGNAL = 3.5; EXPRESSED IN HELA, SIGNAL = 3.6; EST_HUMAN HIT: BF306541.1, EVALUE 1.00e-120; NT HIT: AF005213.1, EVALUE 1.00e-115
atgtggactttcgtcacccagctgttggtcacgctggtgctgctgagcttcttcctggtcagctgtcagaacgtgatgcacattgtcagggggtccctgtgctttgtgctaaagcacatccaccaggagctggacaaggagctgggggagagcgagggcctcagtgacgacgaggagaccatctccaccagggtggtccggcggcgggtcttcctgaag

SEQ ID NO: 24323 - DNA, 108 bp, Homo sapiens
  MAP TO AL031726.11; EXPRESSED IN PLACENTA, SIGNAL = 1.3; EXPRESSED IN HEART, SIGNAL = 1.4; EXPRESSED IN FETAL LIVER, SIGNAL = 1.2; EXPRESSED IN BRAIN, SIGNAL = 1.1; EXPRESSED IN ADULT LIVER, SIGNAL = 0.9; EXPRESSED IN BONE MARROW, SIGNAL = 1.2; EST_HUMAN HIT: W68223.1, EVALUE 5.40e+00; SWISSPROT HIT: O33120, EVALUE 5.50e+00; NT HIT: gi6671677, EVALUE 9.20e-01
ccagctcttgctgatggtgaggagcctcattatcttaagacaacacacagtggagatgtgctttacgtaattggcctgccctgtgaaaacccctggctgttttttcag

SEQ ID NO: 24324 - DNA, 348 bp, Homo sapiens
  MAP TO AC024060.2; EXPRESSED IN LUNG, SIGNAL = 1.4; EXPRESSED IN PLACENTA, SIGNAL = 1.2; EXPRESSED IN ADULT LIVER, SIGNAL = 1.3; EXPRESSED IN HEART, SIGNAL = 1.5; EXPRESSED IN FETAL LIVER, SIGNAL = 1.3; EXPRESSED IN BRAIN, SIGNAL = 1.3; EXPRESSED IN BONE MARROW, SIGNAL = 1.5; EST_HUMAN HIT: BE393648.1, EVALUE 8.10e-02; SWISSPROT HIT: P42679, EVALUE 5.30e+00; NT HIT: U69492.1, EVALUE 5.50e-02
cactttattttgaagttttatttttccacatccagttccacagctctgcagaatgttggttgaggttagaaaccacgcctcactcatctttatatgctcagtgatagcacagagtgaaatgttgataaacaattgttggactgaatttaactcagaggagaaagcccagcttatgtctacacagtcatgatatgtgctattcgaatgatggcttagagtgagaacccagtcatcagtaaaagtagtatagacctccagtccccaggataggacagaagaaacagggcgatattgaaggtaatgaatccaacaacctacatgtgtggaatgctttccaccagccatgct

SEQ ID NO: 24325 - DNA, 107 bp, Homo sapiens
  MAP TO AC019058.3; EXPRESSED IN LUNG, SIGNAL = 1.6; EXPRESSED IN PLACENTA, SIGNAL = 1.2; EXPRESSED IN HEART, SIGNAL = 1.3; EXPRESSED IN FETAL LIVER, SIGNAL = 1.2; EXPRESSED IN BRAIN, SIGNAL = 1.1; EXPRESSED IN ADULT LIVER, SIGNAL = 1.5; EXPRESSED IN BONE MARROW, SIGNAL = 1.3; SWISSPROT HIT: Q99189, EVALUE 5.50e+00; EST_HUMAN HIT: AI927629.1, EVALUE 1.30e+00
atgactgttccagaatttgttgactatggtacattcaggctactcttaattgtttgtcattgtcaaaatgctgatatggacattgttgaatatgtattcctgaacat

SEQ ID NO: 24326 - DNA, 291 bp, Homo sapiens
  MAP TO AC010789.7; EXPRESSED IN ADULT LIVER, SIGNAL = 2.9; EXPRESSED IN LUNG, SIGNAL = 2.9; EXPRESSED IN BRAIN, SIGNAL = 2.2; EXPRESSED IN BONE MARROW, SIGNAL = 2.4; EXPRESSED IN PLACENTA, SIGNAL = 2.7; EXPRESSED IN HELA, SIGNAL = 2.7; EXPRESSED IN HEART, SIGNAL = 2.6; EXPRESSED IN FETAL LIVER, SIGNAL = 2.2; NT HIT: S78466.1, EVALUE 0.00e+00; EST_HUMAN HIT: BE271316.1, EVALUE 6.70e-02; SWISSPROT HIT: P37237, EVALUE 9.00e-55
ctatcggggctcgggggcccaagtcctctggctgccgcgcaggctgcgcgtgaagggcgggtagttgaggaactcgaagcgcaggctctgctcggtggtgtggtggccccggggcagccgcttcatgaagtggacctcacgctggtgctgccgcgtcttggagcccttgcggggccggcccttgcgggtgaaggccatgtaccagccctcgtacttggcattctgcagcgctgtgtagttgttctccagcacaatctccgtgaagacgcagtccttgcctttgccgttgct

SEQ ID NO: 24327 - DNA, 537 bp, Homo sapiens
  MAP TO AL118520.12; EXPRESSED IN LUNG, SIGNAL = 2.7; EXPRESSED IN HEART, SIGNAL = 2.6; EXPRESSED IN BRAIN, SIGNAL = 2.9; EXPRESSED IN BONE MARROW, SIGNAL = 3.1; EXPRESSED IN HELA, SIGNAL = 3.5; EXPRESSED IN PLACENTA, SIGNAL = 2.7; EXPRESSED IN ADULT LIVER, SIGNAL = 3.1; EXPRESSED IN FETAL LIVER, SIGNAL = 2.5; NT HIT: AF245115.1, EVALUE 0.00e+00; EST_HUMAN HIT: BE563320.1, EVALUE 0.00e+00; SWISSPROT HIT: P08640, EVALUE 1.20e-02
attgctttttgtggtcggtacggcggagatgagctcggagggtaccagagtggttactatcgagcgtacactggtggggagagcaccgccaggtaagctgggtcctgctgaggcagtgcccgggcccacagggctagaggtcatttttagcagagtgggtgctgggggcgttggggttttactgtccagctctgtggataactgctctgttcccatgagccccggagctgtggtgtctagcccttggccttcagtctctccatctgcaccatattgttcttcccctttctcaagagagcctgtaactttcttacatgccttggtcaacaaaatttggccaattttgtccacttttcctttgcccttactagacgagactgggcttcgccggttgccagaggaccctggactattggtcaaaaggggagaaaccattgtggttgactgtgaagagggaagagtgttctgatctgctgaggtgttcacctgagggctagcctcatctggattcaattctttcacttgctgcacaggggg

SEQ ID NO: 24328 - DNA, 187 bp, Homo sapiens
  MAP TO AC010492.4; EXPRESSED IN PLACENTA, SIGNAL = 3.4; EXPRESSED IN ADULT LIVER, SIGNAL =   7; EXPRESSED IN HEART, SIGNAL = 5.6; EXPRESSED IN FETAL LIVER, SIGNAL =  13; EXPRESSED IN BONE MARROW, SIGNAL =  14; EXPRESSED IN LUNG, SIGNAL = 8.9; EXPRESSED IN BRAIN, SIGNAL = 6.2; EXPRESSED IN HELA, SIGNAL =   5; NT HIT: gi11424380, EVALUE 1.00e-101; SWISSPROT HIT: P29314, EVALUE 2.00e-28; EST_HUMAN HIT: BE619667.1, EVALUE 1.00e-101
ctgatatggcgctggcggatcagcacgcgagcgtggtggatggacttggccaagcccagcttgaagacctgggtctgcaggcgtctctctaagaaatcctctatcttcaggcccaggatgtaatccagcttcatcttgccctcatccagcaccccaatgcggaccagccgccgcagcagggcgttgc

SEQ ID NO: 24329 - DNA, 176 bp, Homo sapiens
  MAP TO AC007326.28; EXPRESSED IN LUNG, SIGNAL = 1.9; EXPRESSED IN ADULT LIVER, SIGNAL = 1.9; EXPRESSED IN FETAL LIVER, SIGNAL = 1.8; EXPRESSED IN BONE MARROW, SIGNAL = 1.7; EXPRESSED IN PLACENTA, SIGNAL = 1.7; EXPRESSED IN HEART, SIGNAL = 2.3; EXPRESSED IN BRAIN, SIGNAL = 2.3; SWISSPROT HIT: Q14129, EVALUE 9.00e-15; NT HIT: gi11526307, EVALUE 7.00e-86; EST_HUMAN HIT: AA458610.1, EVALUE 7.00e-81
ctcattccagcagcgcttgtcctacaccacgctgagcgacctggccctggcgcttctcgacggcaccgtgttcgaaatcgtgcaggggctactggagatccagcacctcaccgaaaagagcctgtacaaccagcgcctgcgcctacagaacgagcatcgaggtgcgcgggggcagc

SEQ ID NO: 24330 - DNA, 129 bp, Homo sapiens
  MAP TO AC008812.4; EXPRESSED IN PLACENTA, SIGNAL = 4.9; EXPRESSED IN ADULT LIVER, SIGNAL = 4.2; EXPRESSED IN HEART, SIGNAL = 4.2; EXPRESSED IN BRAIN, SIGNAL = 3.8; EXPRESSED IN BONE MARROW, SIGNAL = 3.6; EXPRESSED IN LUNG, SIGNAL = 4.7; EXPRESSED IN FETAL LIVER, SIGNAL = 4.7; EST_HUMAN HIT: AI471967.1, EVALUE 1.10e-01; SWISSPROT HIT: P17322, EVALUE 5.40e+00; NT HIT: L14561.1, EVALUE 7.20e-02
cagccaccaaatgtaccagcaccttgatagctggaagtgctgggcaaagttctagcaatgctatgatcagctgcaggaccagaccagctcctagaacaccatggtcacctaggaaggccagggcagctc

SEQ ID NO: 24331 - DNA, 239 bp, Homo sapiens
  MAP TO AL157777.3; EXPRESSED IN ADULT LIVER, SIGNAL = 5.1; EXPRESSED IN PLACENTA, SIGNAL = 6.7; EXPRESSED IN HELA, SIGNAL =  12; EXPRESSED IN FETAL LIVER, SIGNAL = 8.1; EXPRESSED IN BONE MARROW, SIGNAL = 7.3; EXPRESSED IN LUNG, SIGNAL = 2.5; EXPRESSED IN HEART, SIGNAL = 7.3; EXPRESSED IN BRAIN, SIGNAL = 8.2; NT HIT: gi11418170, EVALUE 1.00e-120; SWISSPROT HIT: P50502, EVALUE 2.00e-39; EST_HUMAN HIT: AU133205.1, EVALUE 1.00e-120
catggacgcccgcaaagtgaacgagcttcgggcctttgtgaaaatgtgtaagcaggatccgagcattctgcacaccgaggaaatgcacttcctgagggagtgggtggagagcatgggaggtaaagtaccacctgctactcagaaagctaaatcagaagaaaataccaaggaagaaaaacctgacagtaagaaggtggaggaagacttaaaggcagacgaaccatcaagtgaggaaagtg

SEQ ID NO: 24332 - DNA, 90 bp, Homo sapiens
  MAP TO AC021079.2; EXPRESSED IN FETAL LIVER, SIGNAL = 2.3; EXPRESSED IN PLACENTA, SIGNAL = 1.4; EXPRESSED IN ADULT LIVER, SIGNAL = 1.7; EXPRESSED IN HEART, SIGNAL = 1.6; EXPRESSED IN BRAIN, SIGNAL = 2.8; EXPRESSED IN BONE MARROW, SIGNAL = 1.8; EXPRESSED IN LUNG, SIGNAL = 1.1; EXPRESSED IN HELA, SIGNAL = 2.3; NT HIT: AL163303.2, EVALUE 2.00e-07; SWISSPROT HIT: Q9ZDX5, EVALUE 4.20e+00; EST_HUMAN HIT: AW104494.1, EVALUE 5.00e-06
aggggtccaagacttcagtggagaaagtcattacatatgtggtgaaaaccgcaagaaaactagaagtagaagtggaccatgaagacatag

SEQ ID NO: 24333 - DNA, 352 bp, Homo sapiens
  MAP TO AL161646.3; EXPRESSED IN PLACENTA, SIGNAL = 2.3; EXPRESSED IN FETAL LIVER, SIGNAL = 2.2; EXPRESSED IN ADULT LIVER, SIGNAL = 2.3; EXPRESSED IN HEART, SIGNAL = 2.1; EXPRESSED IN BONE MARROW, SIGNAL = 2.4; EXPRESSED IN LUNG, SIGNAL = 2.1; EXPRESSED IN BRAIN, SIGNAL = 2.2; SWISSPROT HIT: P15087, EVALUE 3.80e-01; NT HIT: L17432.1, EVALUE 2.20e-01; EST_HUMAN HIT: BE254318.1, EVALUE 8.20e-02
atggcttattcttcaagcaccgctcctgtcacttgtgactatcaagtggttgtaatcctcaaagctatagaatttgtgaagaggccaagaaattatctagttatttccaatttctttcttcaccacagaaccattatttcaaatggaacccttacaccacccactgcaggagaaagtgaggtcttgccccagatgaggcaggaagggaagaccagagctggatggaatccgcctcctcctcatcttccccctctccccactaggctcagccccatcccaggagccactagcagccacagcccaccccagacacatccaggaggcacacatccgtggcagcccctgcttccag

SEQ ID NO: 24334 - DNA, 160 bp, Homo sapiens
  MAP TO AL132654.12; EXPRESSED IN PLACENTA, SIGNAL = 2.1; EXPRESSED IN HELA, SIGNAL = 3.3; EXPRESSED IN HEART, SIGNAL = 2.3; EXPRESSED IN FETAL LIVER, SIGNAL = 1.9; EXPRESSED IN LUNG, SIGNAL = 0.93; EXPRESSED IN BRAIN, SIGNAL = 1.9; EXPRESSED IN ADULT LIVER, SIGNAL = 1.7; EXPRESSED IN BONE MARROW, SIGNAL =   2; NT HIT: Z95556.1, EVALUE 5.70e+00; EST_HUMAN HIT: AL449573.1, EVALUE 2.00e-25; SWISSPROT HIT: P56528, EVALUE 2.30e+00
ctcttttgggcttccttgttgatgaggtccatttctgaggttctcctgaacatctcttcctgaacccaatatccttggttacctggtcccagaatttcaggccggcacagttccttgcggttgcagcgctggtaaacagtgaccagacgtctgagacgag

SEQ ID NO: 24335 - DNA, 252 bp, Homo sapiens
  MAP TO AL121771.17; EXPRESSED IN PLACENTA, SIGNAL = 1.3; EXPRESSED IN FETAL LIVER, SIGNAL = 1.5; EXPRESSED IN BRAIN, SIGNAL = 1.6; EXPRESSED IN LUNG, SIGNAL = 2.7; EXPRESSED IN ADULT LIVER, SIGNAL = 1.9; EXPRESSED IN HEART, SIGNAL = 1.6; EXPRESSED IN BONE MARROW, SIGNAL = 1.4; EST_HUMAN HIT: AW363135.1, EVALUE 0.00e+00; NT HIT: gi11420512, EVALUE 0.00e+00; SWISSPROT HIT: Q05481, EVALUE 5.00e-22
ccgtgtgggatcgcaggtggacagtgagctggctggagttgcggctggcgtaggggcagatctggcatttgaagggccgctcgtccgagtggatcctcaggtgcttgttgaggctgctgctgtcggcagcggcgtagtcacacgtcttacacttgtagggcttcacgcccgtgtggcaccgcatgtgagttttcagcttgtctttccggctaaagcacttgccacagacttcacacttatggggtttgtctc

SEQ ID NO: 24336 - DNA, 154 bp, Homo sapiens
  MAP TO AC018761.2; EXPRESSED IN LUNG, SIGNAL = 1.1; EXPRESSED IN ADULT LIVER, SIGNAL =   2; EXPRESSED IN HEART, SIGNAL = 2.6; EXPRESSED IN FETAL LIVER, SIGNAL =  14; EXPRESSED IN BRAIN, SIGNAL = 5.1; EXPRESSED IN PLACENTA, SIGNAL = 0.89; EXPRESSED IN HELA, SIGNAL = 2.9; EXPRESSED IN BONE MARROW, SIGNAL = 7.7; NT HIT: X82321.1, EVALUE 1.00e-81; SWISSPROT HIT: P32119, EVALUE 5.00e-24; EST_HUMAN HIT: BE958278.1, EVALUE 1.00e-81
caagccaggtgggtgaactgagagtccaccgagacgcccagcacttcacagcccagcttgcggaagtcctctgcacggttgctgaacgcgatgatctcggtggggcacacaaaagtgaagtccagagggtagaaaaagaggaccacgtacttcc

SEQ ID NO: 24337 - DNA, 179 bp, Homo sapiens
  MAP TO AC024575.1; EXPRESSED IN LUNG, SIGNAL = 2.2; EXPRESSED IN ADULT LIVER, SIGNAL = 2.5; EXPRESSED IN HEART, SIGNAL = 2.1; EXPRESSED IN FETAL LIVER, SIGNAL =   2; EXPRESSED IN BRAIN, SIGNAL = 4.4; EXPRESSED IN BONE MARROW, SIGNAL = 2.4; EXPRESSED IN PLACENTA, SIGNAL = 2.1; EXPRESSED IN HELA, SIGNAL = 3.4; EST_HUMAN HIT: BE257917.1, EVALUE 1.00e-85
ccgcccctaccttggccacctccgtgtgtctgttttggcgcctccgccatctccagaaggcgcaggctgtgctgcagctggagctcctccagccgcctctgccgcaacaccacctggtgccgcagggcgttctgctgcttcaccttctccctcagccggtggtctaggtgctccagggc

SEQ ID NO: 24338 - DNA, 174 bp, Homo sapiens
  MAP TO AC025588.1; EXPRESSED IN ADULT LIVER, SIGNAL = 1.2; EXPRESSED IN BONE MARROW, SIGNAL = 1.2; EXPRESSED IN FETAL LIVER, SIGNAL = 1.6; EXPRESSED IN BRAIN, SIGNAL = 1.3; EXPRESSED IN PLACENTA, SIGNAL = 0.87; EXPRESSED IN HEART, SIGNAL = 1.4; NT HIT: gi8923669, EVALUE 4.00e-72; EST_HUMAN HIT: AI672700.1, EVALUE 6.00e-72
ctatttgtgagggcctcacccagagagtaatgactgactttgcaatcaaccaggaacaaaaggaagccctaggcaacttcactgcattgaccagtaacagtgatactgacagcagcagtgacagcgacagtgacaccagtgaaggcaaatgaaagtggagattcgggagcagca

SEQ ID NO: 24339 - DNA, 194 bp, Homo sapiens
  MAP TO AC011472.3; EXPRESSED IN BONE MARROW, SIGNAL = 5.6; EXPRESSED IN PLACENTA, SIGNAL = 4.9; EXPRESSED IN ADULT LIVER, SIGNAL = 5.2; EXPRESSED IN HEART, SIGNAL = 5.1; EXPRESSED IN BRAIN, SIGNAL = 5.7; EXPRESSED IN LUNG, SIGNAL = 5.4; EXPRESSED IN FETAL LIVER, SIGNAL = 5.1; NT HIT: AB037816.1, EVALUE 2.00e-58; SWISSPROT HIT: Q02817, EVALUE 3.40e-01; EST_HUMAN HIT: BE531136.1, EVALUE 2.00e-87
aattgcccggggctaccagggctcaccggaccttcggctgacctggttgcagaacatggccgggaagcacgcggacgtgggcaaccacgccgaggccgcccagtgcatggtgcacgcggccgccctcgtggctgagtacctcgccctgctcgaggaccagcgccacctgcccgtggctggcgatttccttccag

SEQ ID NO: 24340 - DNA, 252 bp, Homo sapiens
  MAP TO AC015599.3; EXPRESSED IN PLACENTA, SIGNAL = 1.8; EXPRESSED IN ADULT LIVER, SIGNAL = 2.4; EXPRESSED IN HEART, SIGNAL = 1.5; EXPRESSED IN FETAL LIVER, SIGNAL = 1.7; EXPRESSED IN BONE MARROW, SIGNAL = 1.7; EXPRESSED IN LUNG, SIGNAL = 2.2; EXPRESSED IN BRAIN, SIGNAL = 2.1; NT HIT: AB040918.1, EVALUE 1.00e-08; EST_HUMAN HIT: BE733922.1, EVALUE 1.00e-117; SWISSPROT HIT: P44221, EVALUE 2.60e-01
ctgcttctccttcctcctcacccaaattcagcacgataatgcagatgtgcttccgcagctggcgcgtgttggagaacttccgacagcacttgctacactccaagctgcttggaggcaggctgttcccttcctccggagccagcgggctgtcctcagtcggactcacgatgttttctgccagctcctcttctgtgctggacttcttcgtggaccccttaggcctgcctctcttcctcttcatgaccaaaaact

SEQ ID NO: 24341 - DNA, 202 bp, Homo sapiens
  MAP TO AC018761.2; EXPRESSED IN PLACENTA, SIGNAL = 1.4; EXPRESSED IN ADULT LIVER, SIGNAL = 1.8; EXPRESSED IN HELA, SIGNAL = 2.5; EXPRESSED IN HEART, SIGNAL = 1.4; EXPRESSED IN BRAIN, SIGNAL =   2; EXPRESSED IN BONE MARROW, SIGNAL = 1.9; EXPRESSED IN LUNG, SIGNAL = 1.6; EXPRESSED IN FETAL LIVER, SIGNAL = 1.8; EST_HUMAN HIT: BE780478.1, EVALUE 1.00e-94; SWISSPROT HIT: O43681, EVALUE 1.00e-22; NT HIT: gi11525962, EVALUE 8.00e-80
gctggtgaagggcatgaacttctcggtggtggtatttgacacggcacccacgggccacaccctgaggctgctcaacttccccaccatcgtggagcggggcctgggccggcttatgcagatcaagaaccagatcagccctttcatctcacaggcaggcggcgggggcccccacctgcaccatccaggcagccgggagtgggag

SEQ ID NO: 24342 - DNA, 80 bp, Homo sapiens
  MAP TO AL161752.1; EXPRESSED IN HELA, SIGNAL = 4.3; EXPRESSED IN HEART, SIGNAL = 3.7; EXPRESSED IN BONE MARROW, SIGNAL = 3.9; EXPRESSED IN BRAIN, SIGNAL = 3.4; EXPRESSED IN FETAL LIVER, SIGNAL = 3.8; EXPRESSED IN ADULT LIVER, SIGNAL = 2.8; EXPRESSED IN PLACENTA, SIGNAL = 3.5; EXPRESSED IN LUNG, SIGNAL = 1.9; EST_HUMAN HIT: AA449257.1, EVALUE 1.00e-06; NT HIT: X74965.1, EVALUE 1.00e-02
gtgatcatccccaccctgaagctatcagccaacattagcatgcaaaaagatagcactttggaaattccaaggatttttaa

SEQ ID NO: 24343 - DNA, 316 bp, Homo sapiens
  MAP TO AL160471.1; EXPRESSED IN LUNG, SIGNAL = 2.7; EXPRESSED IN BONE MARROW, SIGNAL = 8.2; EXPRESSED IN BRAIN, SIGNAL = 4.8; EXPRESSED IN FETAL LIVER, SIGNAL = 8.4; EXPRESSED IN HELA, SIGNAL = 6.3; EXPRESSED IN ADULT LIVER, SIGNAL = 1.8; EXPRESSED IN PLACENTA, SIGNAL = 0.99; EXPRESSED IN HEART, SIGNAL = 2.9; NT HIT: gi11427320, EVALUE 2.00e-90; SWISSPROT HIT: P14206, EVALUE 4.00e-32; EST_HUMAN HIT: BF570112.1, EVALUE 9.00e-88
attttcctctgtgctatgtggacactaccatcccatgcaacagcaagggagctcactcagtgggattgatgtggtggatgccgatccaggaagttcgcatgtgtggcaccatttcctgtgggaggtcatgcctgatctctacttctacagtgttcctgaggagattgaaaaagaagagcagcctgctgctgaaaaggctgtgaccaaggaggaatttcagggtgaatggactactccagctcctgagttcggtgctcctcaacctgaggttgcagactggtctgatggtgtgcaggtgccctctgtgcctatttag

SEQ ID NO: 24344 - DNA, 183 bp, Homo sapiens
  MAP TO AC016224.6; EXPRESSED IN PLACENTA, SIGNAL = 0.85; EXPRESSED IN ADULT LIVER, SIGNAL = 0.68; EXPRESSED IN FETAL LIVER, SIGNAL = 0.69; EXPRESSED IN BRAIN, SIGNAL = 0.69; EXPRESSED IN BONE MARROW, SIGNAL = 0.65; EXPRESSED IN HEART, SIGNAL = 7.1; SWISSPROT HIT: P32941, EVALUE 5.10e+00; EST_HUMAN HIT: AA715315.1, EVALUE 2.00e-22
aggttggatcaagaacaaggccctgaggagtctcagccagaaactgacacctcagacatggatcctttagttggttttaccattgaagatgtaaaatcagtgctggatcaagtcacagatgacattttaatcggcattcaggtactcagtattgatagtatgctcacttactttattactggt

SEQ ID NO: 24345 - DNA, 210 bp, Homo sapiens
  MAP TO AC022174.2; EXPRESSED IN LUNG, SIGNAL = 1.2; EXPRESSED IN PLACENTA, SIGNAL = 1.2; EXPRESSED IN FETAL LIVER, SIGNAL = 5.6; EXPRESSED IN BRAIN, SIGNAL = 1.1; EXPRESSED IN ADULT LIVER, SIGNAL = 1.3; EXPRESSED IN HEART, SIGNAL = 1.2; EXPRESSED IN BONE MARROW, SIGNAL =   1; EST_HUMAN HIT: AA657785.1, EVALUE 3.00e-09; NT HIT: AL163300.2, EVALUE 9.00e-12; SWISSPROT HIT: P57272, EVALUE 8.50e+00
ctgtgctgtgtccattgacttccattgtcctgtgcctctggatccctcagatccagtttcccttactagggctttagcctgaaggttgaaattgagtttgaggcaaaaatgtgtctcaggaaagttcacatatttatttaagtgaagtcccagacagccctcaccaaatttgcagccagcagctggcgaggtctctcctctgttgcttcc

SEQ ID NO: 24346 - DNA, 203 bp, Homo sapiens
  MAP TO AL158150.2; EXPRESSED IN ADULT LIVER, SIGNAL = 0.61; EXPRESSED IN HEART, SIGNAL = 2.6; EXPRESSED IN BONE MARROW, SIGNAL = 0.64; EXPRESSED IN PLACENTA, SIGNAL = 0.88; EXPRESSED IN FETAL LIVER, SIGNAL = 0.81; EXPRESSED IN BRAIN, SIGNAL = 0.65; SWISSPROT HIT: P03256, EVALUE 1.30e+00; NT HIT: L38975.1, EVALUE 1.90e+00; EST_HUMAN HIT: AA442292.1, EVALUE 1.00e-70
gagagattttgggcctcacaaagtggcaccagtgaaggtccaccagtatgaccagttcgtcccgagtgaagagaatatggatttgctcacgacgtataagaaagattacaatccctaccctgtctgtcgagtggaccccatcaaacctcgggacagtaaatatccatgtagcgacaagatggagtgtttgcctacttataaag

SEQ ID NO: 24347 - DNA, 116 bp, Homo sapiens
  MAP TO AC019275.3; EXPRESSED IN LUNG, SIGNAL = 2.2; EXPRESSED IN PLACENTA, SIGNAL = 2.7; EXPRESSED IN ADULT LIVER, SIGNAL = 2.7; EXPRESSED IN HEART, SIGNAL = 2.2; EXPRESSED IN BRAIN, SIGNAL = 2.4; EXPRESSED IN HELA, SIGNAL = 3.6; EXPRESSED IN FETAL LIVER, SIGNAL = 2.8; EXPRESSED IN BONE MARROW, SIGNAL = 2.6; SWISSPROT HIT: Q63518, EVALUE 1.40e+00; NT HIT: AF073896.1, EVALUE 1.00e+00; EST_HUMAN HIT: AV692954.1, EVALUE 2.40e-02
ctccctgttatggtcagagataccctttgcccaccaaatgcgaggcttaaacgatttctgaagagtgtactgtccagagccttggggccatcatgaagagccttggagcccttcat

SEQ ID NO: 24348 - DNA, 173 bp, Homo sapiens
  MAP TO AL136124.3; EXPRESSED IN LUNG, SIGNAL = 1.3; EXPRESSED IN PLACENTA, SIGNAL = 1.3; EXPRESSED IN ADULT LIVER, SIGNAL = 1.1; EXPRESSED IN HEART, SIGNAL = 1.3; EXPRESSED IN FETAL LIVER, SIGNAL = 2.9; EXPRESSED IN BONE MARROW, SIGNAL = 1.3; EXPRESSED IN BRAIN, SIGNAL = 1.2; NT HIT: gi5032156, EVALUE 5.00e-93; EST_HUMAN HIT: R50615.1, EVALUE 1.00e-88
catcttgggcactggaacctttcaacctgcatgtgttcaacagcttcaacagcagctggaggcatctgtcagtcttcagcaagggcatgtaggcattggtactaaacttcataagcacatccagaagagggtctaagaatatccgcaatacattctctgttctctgctttccg

SEQ ID NO: 24349 - DNA, 96 bp, Homo sapiens
  MAP TO AC021677.3; EXPRESSED IN LUNG, SIGNAL = 7.9; EXPRESSED IN HELA, SIGNAL = 6.2; EXPRESSED IN HEART, SIGNAL = 6.2; EXPRESSED IN FETAL LIVER, SIGNAL = 8.2; EXPRESSED IN BRAIN, SIGNAL = 6.2; EXPRESSED IN PLACENTA, SIGNAL = 4.3; EXPRESSED IN ADULT LIVER, SIGNAL = 8.8; EXPRESSED IN BONE MARROW, SIGNAL = 7.1; NT HIT: AF012898.1, EVALUE 5.10e-02; EST_HUMAN HIT: R25113.1, EVALUE 1.20e+00
tctgatcctggtgtttgctcccaaggtccccttcctgtcctttcttcttttcttcgtgtctgttgtattttggggggtgctgctgcctctctttta

SEQ ID NO: 24350 - DNA, 263 bp, Homo sapiens
  MAP TO AL080312.14; EXPRESSED IN ADULT LIVER, SIGNAL = 1.5; EXPRESSED IN BRAIN, SIGNAL = 0.98; EXPRESSED IN BONE MARROW, SIGNAL = 0.95; EXPRESSED IN LUNG, SIGNAL = 0.97; EXPRESSED IN PLACENTA, SIGNAL = 1.3; EXPRESSED IN HEART, SIGNAL = 1.2; EXPRESSED IN FETAL LIVER, SIGNAL = 1.1; SWISSPROT HIT: Q15811, EVALUE 1.10e+00; NT HIT: gi11419908, EVALUE 1.60e-01; EST_HUMAN HIT: R32667.1, EVALUE 1.50e-02
ccctctggttttcatcccacatgcccctctccacgcccagcagcccagtggaggagaagtgtgactgcattttgcaaatgagaaaaccaagggtgggagaggtggagtgacaggctctaggtccacagccagggtcaggctgggcagagcacagcctcctgcctccaccaggtcctgggccctggcccctccccctgccagggacagggcaggcagggcacagcctcccgcctccaccacttcccagaccctggctcctcccc

SEQ ID NO: 24351 - DNA, 243 bp, Homo sapiens
  MAP TO AL160404.1; EXPRESSED IN LUNG, SIGNAL = 1.4; EXPRESSED IN ADULT LIVER, SIGNAL = 1.1; EXPRESSED IN HEART, SIGNAL = 1.2; EXPRESSED IN BRAIN, SIGNAL = 1.1; EXPRESSED IN BONE MARROW, SIGNAL = 1.1; EXPRESSED IN PLACENTA, SIGNAL = 1.2; EXPRESSED IN FETAL LIVER, SIGNAL = 1.1; NT HIT: AF209389.1, EVALUE 5.80e-01; SWISSPROT HIT: P20434, EVALUE 2.10e+00; EST_HUMAN HIT: AA482864.1, EVALUE 5.60e-02
ctccagaacacagccctaacagaagtccaagtcagcactggtaaaatcaactgcttatcctcagttggcaaaaagctagtaacaacatttttactccatctattctcaaaaatgttttctgccttgggcttctttatcttgtctactgcctccttctcctccttaatgccaactctccctttgatttccattaaattgcctgctccaagtttcattttcttccattcttccttatcctcctta

SEQ ID NO: 24352 - DNA, 104 bp, Homo sapiens
  MAP TO AL158198.3; EXPRESSED IN PLACENTA, SIGNAL = 3.8; EXPRESSED IN FETAL LIVER, SIGNAL = 3.1; EXPRESSED IN BRAIN, SIGNAL = 3.4; EXPRESSED IN BONE MARROW, SIGNAL = 3.7; EXPRESSED IN LUNG, SIGNAL = 4.2; EXPRESSED IN HEART, SIGNAL = 3.6; EXPRESSED IN ADULT LIVER, SIGNAL = 3.9; EXPRESSED IN HELA, SIGNAL = 3.8; EST_HUMAN HIT: AV723725.1, EVALUE 3.30e-01; SWISSPROT HIT: P19779, EVALUE 7.20e+00; NT HIT: AF197941.1, EVALUE 2.20e-01
tcaattcagacatatgatggtgataaggacaaaggcatgggggatgaccatgaaaactttcacctcttccttccccagcccattttcaagaatgaggaagtgtc

SEQ ID NO: 24353 - DNA, 101 bp, Homo sapiens
  MAP TO AC012308.4; EXPRESSED IN ADULT LIVER, SIGNAL = 0.82; EXPRESSED IN BRAIN, SIGNAL = 1.2; EXPRESSED IN LUNG, SIGNAL = 1.2; EXPRESSED IN PLACENTA, SIGNAL = 1.1; EXPRESSED IN HEART, SIGNAL = 1.2; EXPRESSED IN FETAL LIVER, SIGNAL = 1.3; EXPRESSED IN BONE MARROW, SIGNAL = 1.1; NT HIT: AB046818.1, EVALUE 3.00e-50; SWISSPROT HIT: P07664, EVALUE 7.20e+00; EST_HUMAN HIT: BF082253.1, EVALUE 4.00e-50
catgttgtacatggccaagctgggaccagatgtaataactgaagagataaacattgatgatgaagattcgactacagacacagacggtgccgccgagactt

SEQ ID NO: 24354 - DNA, 246 bp, Homo sapiens
  MAP TO AL109824.21; EXPRESSED IN LUNG, SIGNAL = 2.3; EXPRESSED IN PLACENTA, SIGNAL = 4.5; EXPRESSED IN ADULT LIVER, SIGNAL = 2.5; EXPRESSED IN FETAL LIVER, SIGNAL = 2.4; EXPRESSED IN BRAIN, SIGNAL = 2.6; EXPRESSED IN HEART, SIGNAL = 2.2; EXPRESSED IN BONE MARROW, SIGNAL = 2.6; EXPRESSED IN HELA, SIGNAL = 2.4; SWISSPROT HIT: P41179, EVALUE 1.60e+00; NT HIT: AF128458.1, EVALUE 0.00e+00; EST_HUMAN HIT: AU132349.1, EVALUE 0.00e+00
tagttcaatgtttacctgttccttcctactctgggaattctggcaatcactgtcctgaggcacattcaagctctccttgttatcctcaacaacacccccaactgcagccacagacacagtagaattctgaggattcagcccactgttgttaggaaagctcccaggtacagggggattggccagaggagtgggactgaccaatacatttctcggcaactccacattctgcaatagggctgcatttgt

SEQ ID NO: 24355 - DNA, 124 bp, Homo sapiens
  MAP TO AC016790.3; EXPRESSED IN LUNG, SIGNAL =   2; EXPRESSED IN PLACENTA, SIGNAL = 1.9; EXPRESSED IN ADULT LIVER, SIGNAL =   2; EXPRESSED IN FETAL LIVER, SIGNAL = 1.7; EXPRESSED IN BONE MARROW, SIGNAL = 1.6; EXPRESSED IN HEART, SIGNAL = 1.8; EXPRESSED IN BRAIN, SIGNAL = 1.7; EST_HUMAN HIT: BF240154.1, EVALUE 1.00e-01; NT HIT: X62679.1, EVALUE 2.80e-01
cttctttatgcacagtgagaaaaacactctgagagtagatgacccaatttttcttgtttcttatgccctcaaaatatttcgtgcatttcatcagcacccctattcgtatgaagaacatgttggc

SEQ ID NO: 24356 - DNA, 100 bp, Homo sapiens
  MAP TO AL121881.25; EXPRESSED IN HELA, SIGNAL = 3.8; EXPRESSED IN LUNG, SIGNAL = 2.2; EXPRESSED IN ADULT LIVER, SIGNAL = 2.7; EXPRESSED IN HEART, SIGNAL = 2.6; EXPRESSED IN FETAL LIVER, SIGNAL = 3.3; EXPRESSED IN BRAIN, SIGNAL = 2.6; EXPRESSED IN BONE MARROW, SIGNAL = 2.5; EXPRESSED IN PLACENTA, SIGNAL = 2.2; EST_HUMAN HIT: R42861.1, EVALUE 1.00e-09; SWISSPROT HIT: P24011, EVALUE 4.20e+00; NT HIT: AF020503.1, EVALUE 6.00e-14
gagatccgatggtattgtaagtgtttggtaagtttctcatccgcttgctggctctctcaactgccaccatgtaagatgtgcctgctttcccttccaccat

SEQ ID NO: 24357 - DNA, 251 bp, Homo sapiens
  MAP TO AL078646.29; EXPRESSED IN ADULT LIVER, SIGNAL = 1.8; EXPRESSED IN HELA, SIGNAL = 2.7; EXPRESSED IN HEART, SIGNAL = 1.7; EXPRESSED IN BRAIN, SIGNAL = 1.6; EXPRESSED IN BONE MARROW, SIGNAL = 1.8; EXPRESSED IN LUNG, SIGNAL = 1.9; EXPRESSED IN PLACENTA, SIGNAL = 1.6; EXPRESSED IN FETAL LIVER, SIGNAL = 2.2; SWISSPROT HIT: P30617, EVALUE 2.30e+00; NT HIT: AB008193.1, EVALUE 6.00e-01; EST_HUMAN HIT: BF329138.1, EVALUE 9.00e-01
aagattgtcttatgtggccccactttggagactaccactcttggggctgccgtggtcacaaaaacccagattattgttttaactctatttcttgccttggttcatcgtactttggggaagaatctggaatttgtataaagtataccacccaagtggcagtcccagctggaagtcatggaatgggggcaagaacaataacctgggagcacgggatctgggttcggaacaaggatgatggccgggagctctag

SEQ ID NO: 24358 - DNA, 176 bp, Homo sapiens
  MAP TO AC013746.4; EXPRESSED IN BONE MARROW, SIGNAL =   4; EXPRESSED IN LUNG, SIGNAL =   6; EXPRESSED IN ADULT LIVER, SIGNAL = 5.6; EXPRESSED IN FETAL LIVER, SIGNAL = 5.2; EXPRESSED IN PLACENTA, SIGNAL =   4; EXPRESSED IN HEART, SIGNAL = 3.8; EXPRESSED IN BRAIN, SIGNAL = 3.2; EST_HUMAN HIT: BE044282.1, EVALUE 4.00e-82; SWISSPROT HIT: P15586, EVALUE 5.00e-13; NT HIT: AB029000.1, EVALUE 3.00e-82
attgatcctggttctacacttggaccacgaataaaaaaaggcacacgaatatcaaagtcatatggcatggatttccccttgaccagtccaaactgcccaatatggtaaccatggtcggcggtgtaaatgatgtaagtattctccagctcccccgtctccacgagcatgttatacag

SEQ ID NO: 24359 - DNA, 173 bp, Homo sapiens
  MAP TO AC019101.3; EXPRESSED IN LUNG, SIGNAL = 1.2; EXPRESSED IN PLACENTA, SIGNAL = 1.3; EXPRESSED IN FETAL LIVER, SIGNAL = 0.97; EXPRESSED IN BONE MARROW, SIGNAL = 1.1; EXPRESSED IN HEART, SIGNAL = 1.2; EXPRESSED IN ADULT LIVER, SIGNAL = 1.6; EXPRESSED IN BRAIN, SIGNAL = 1.2; NT HIT: gi6752979, EVALUE 6.20e+00; SWISSPROT HIT: P09182, EVALUE 5.10e+00
tgtgtatcaggcaccatggaggtcctcagaacgcaagagtgagccaagtgcgtccacaggctgagaaggtagatgatggcaaagggcgtcaacacctctgggctggggacaggcttaaaattggggaagagactcagggggccttgagcatcatctggtatcacacaggcacc

SEQ ID NO: 24360 - DNA, 207 bp, Homo sapiens
  MAP TO AL161732.1; EXPRESSED IN BONE MARROW, SIGNAL = 1.3; EXPRESSED IN ADULT LIVER, SIGNAL = 1.2; EXPRESSED IN BRAIN, SIGNAL = 1.4; EXPRESSED IN LUNG, SIGNAL = 1.3; EXPRESSED IN PLACENTA, SIGNAL = 1.3; EXPRESSED IN HEART, SIGNAL = 1.3; EXPRESSED IN FETAL LIVER, SIGNAL = 1.2; NT HIT: gi11429367, EVALUE 1.00e-113; EST_HUMAN HIT: BF368819.1, EVALUE 5.00e-48; SWISSPROT HIT: Q99156, EVALUE 7.50e-01
ataaaagacaccattgggtttgacacactaggtcattgtttctttttggaagatggtattgaacagaggaatactttgttccacaatctgggactcctcaccaagccgggtactctcctgcccaccgataggaacaactccatgtgtaccaccatgcgagataaagtgtttggaaattacattcctgtgcctgctactgactgtatg

SEQ ID NO: 24361 - DNA, 105 bp, Homo sapiens
  MAP TO AC013771.3; EXPRESSED IN PLACENTA, SIGNAL = 1.6; EXPRESSED IN FETAL LIVER, SIGNAL = 1.2; EXPRESSED IN BONE MARROW, SIGNAL = 1.4; EXPRESSED IN LUNG, SIGNAL = 1.3; EXPRESSED IN ADULT LIVER, SIGNAL = 1.5; EXPRESSED IN HEART, SIGNAL = 1.4; EXPRESSED IN BRAIN, SIGNAL =   1; NT HIT: X52124.1, EVALUE 2.30e-01; SWISSPROT HIT: P19701, EVALUE 5.50e+00; EST_HUMAN HIT: AW977783.1, EVALUE 1.30e+00
ggaaaaaaaacatctgttataagcgaagatgaaggatatcgctttgtggccgaagagtttcaatggaccctgggcaaggacaaagtttcaagttcaaaagatcat

SEQ ID NO: 24362 - DNA, 126 bp, Homo sapiens
  MAP TO AL121673.27; EXPRESSED IN LUNG, SIGNAL = 1.5; EXPRESSED IN FETAL LIVER, SIGNAL = 1.6; EXPRESSED IN BONE MARROW, SIGNAL = 1.4; EXPRESSED IN PLACENTA, SIGNAL = 1.8; EXPRESSED IN ADULT LIVER, SIGNAL = 2.2; EXPRESSED IN HEART, SIGNAL = 1.6; EXPRESSED IN BRAIN, SIGNAL = 1.4; SWISSPROT HIT: P28799, EVALUE 1.80e+00; NT HIT: AB023151.1, EVALUE 1.10e+00; EST_HUMAN HIT: BE184901.1, EVALUE 1.60e+00
atgaaaggccccctgttgaggtcgagcctggcagcatggggggactcgctcgtcttcgtggtgggcctcacagacacagccatctgggcacacaagagcattctggccgtgcatgtgtgcaaatga

SEQ ID NO: 24363 - DNA, 253 bp, Homo sapiens
  MAP TO AC015649.5; EXPRESSED IN BONE MARROW, SIGNAL =  16; EXPRESSED IN ADULT LIVER, SIGNAL =  20; EXPRESSED IN HEART, SIGNAL = 7.7; EXPRESSED IN LUNG, SIGNAL =  14; EXPRESSED IN HELA, SIGNAL =  16; EXPRESSED IN FETAL LIVER, SIGNAL =  20; EXPRESSED IN BRAIN, SIGNAL = 9.1; EXPRESSED IN PLACENTA, SIGNAL =  13; NT HIT: AF317516.1, EVALUE 0.00e+00; EST_HUMAN HIT: BE740490.1, EVALUE 0.00e+00; SWISSPROT HIT: P07210, EVALUE 1.30e+00
aggaccgtgagccgaaggctgatgtactggaagttataattggttctgctcagcaggttccaggactccagttcttctgctgagaatctctttgtcacctcatcatccataatggtctccattcctttccggcaaaagtagaaaatgtcagagagctcgaactctggagtgttgtccagagccttactactaccacttcgacgaatctctttgatctcttcttctagtgaagtgggatcctttgcaatgattc

SEQ ID NO: 24364 - DNA, 271 bp, Homo sapiens
  MAP TO AC010229.4; EXPRESSED IN HELA, SIGNAL =   4; EXPRESSED IN LUNG, SIGNAL = 4.4; EXPRESSED IN PLACENTA, SIGNAL = 4.9; EXPRESSED IN HEART, SIGNAL = 4.6; EXPRESSED IN BRAIN, SIGNAL = 3.9; EXPRESSED IN BONE MARROW, SIGNAL = 3.8; EXPRESSED IN ADULT LIVER, SIGNAL =   5; EXPRESSED IN FETAL LIVER, SIGNAL =   6; EST_HUMAN HIT: AA969018.1, EVALUE 2.50e-01; SWISSPROT HIT: P38080, EVALUE 7.70e-02; NT HIT: AF113031.1, EVALUE 2.60e+00
gcagaagaggcagaagagtcagtcagaagaggcaggaaagacacgaagcatgagagggactcggcctactattgctggctttggaaatgaaggggcaatgagccaagaatacgggaagccccagaaagtgaagaacaaccctgaccagaaaactagcaagaaaacaagaccaaagcctcatatacacatgcaactgaactctgccagcaacctgaatgatcctgaaagtagattccccctagaccttggggagactgaagacatggctaag

SEQ ID NO: 24365 - DNA, 106 bp, Homo sapiens
  MAP TO AL121914.16; EXPRESSED IN LUNG, SIGNAL = 3.8; EXPRESSED IN HEART, SIGNAL = 3.1; EXPRESSED IN FETAL LIVER, SIGNAL = 3.1; EXPRESSED IN BRAIN, SIGNAL = 2.8; EXPRESSED IN BONE MARROW, SIGNAL = 3.2; EXPRESSED IN ADULT LIVER, SIGNAL = 3.2; EXPRESSED IN PLACENTA, SIGNAL = 3.3; EXPRESSED IN HELA, SIGNAL = 4.1; EST_HUMAN HIT: BE833054.1, EVALUE 8.50e-02
cagaaatccctcccagaagaagtgtctgtagatactttgatttttcctcaggttgtccttcctccttctctgtcttccctttttggagaatgtaggtgggaaaaat

SEQ ID NO: 24366 - DNA, 157 bp, Homo sapiens
  MAP TO AL132981.5; EXPRESSED IN LUNG, SIGNAL = 1.3; EXPRESSED IN ADULT LIVER, SIGNAL = 0.71; EXPRESSED IN HEART, SIGNAL = 1.4; EXPRESSED IN BRAIN, SIGNAL = 1.2; EXPRESSED IN PLACENTA, SIGNAL = 1.1; EXPRESSED IN FETAL LIVER, SIGNAL = 1.2; EXPRESSED IN BONE MARROW, SIGNAL = 1.1; NT HIT: AF022855.1, EVALUE 4.00e-04; SWISSPROT HIT: P23326, EVALUE 6.80e+00; EST_HUMAN HIT: AA361434.1, EVALUE 5.30e-01
ctgatcatcctctgggtagcccctctcactggaatgaaactgctgatgtcacttaccaaaatcctcattaacatatgtgccaggttcagagtcagtttcaaaatgcctctgaagtgtttaagagtaattggctttgaagtagagcaagacctcaaaa

SEQ ID NO: 24367 - DNA, 97 bp, Homo sapiens
  MAP TO AL162311.1; EXPRESSED IN LUNG, SIGNAL = 1.1; EXPRESSED IN PLACENTA, SIGNAL = 1.3; EXPRESSED IN ADULT LIVER, SIGNAL = 1.3; EXPRESSED IN HEART, SIGNAL = 1.3; EXPRESSED IN FETAL LIVER, SIGNAL = 1.1; EXPRESSED IN BRAIN, SIGNAL = 1.3; EXPRESSED IN BONE MARROW, SIGNAL = 1.2; EST_HUMAN HIT: BE538919.1, EVALUE 2.00e-42; SWISSPROT HIT: P13489, EVALUE 3.20e+00; NT HIT: AP000007.1, EVALUE 3.20e+00
ctgaggtaatatcaatgctgtgcctatcctcttcaagccttcttatcttctcctctagttcactctggactgtatcatatagcaacagcttttcgct

SEQ ID NO: 24368 - DNA, 186 bp, Homo sapiens
  MAP TO AL133295.11; EXPRESSED IN BONE MARROW, SIGNAL = 1.5; EXPRESSED IN LUNG, SIGNAL = 1.7; EXPRESSED IN PLACENTA, SIGNAL = 1.8; EXPRESSED IN ADULT LIVER, SIGNAL = 1.6; EXPRESSED IN FETAL LIVER, SIGNAL = 1.8; EXPRESSED IN BRAIN, SIGNAL = 1.7; EXPRESSED IN HEART, SIGNAL = 1.7; NT HIT: AJ276005.1, EVALUE 1.00e-100; EST_HUMAN HIT: AW630487.1, EVALUE 1.00e-100; SWISSPROT HIT: P34941, EVALUE 6.60e+00
cagcagctgtccattccgcaccgacggtcgcgtgcccgcaatggacaccagtcgagggccgctgtcgttggtcacgctggctctaggacccctcctctggaaactggtgacgttgctcttgctggctgtcgccactgcagacccagtactcgcggcaacactaccgcaggttgccactgccgccat

SEQ ID NO: 24369 - DNA, 113 bp, Homo sapiens
  MAP TO AC008597.3; EXPRESSED IN PLACENTA, SIGNAL = 1.1; EXPRESSED IN FETAL LIVER, SIGNAL = 2.6; EXPRESSED IN BONE MARROW, SIGNAL = 1.6; EXPRESSED IN HEART, SIGNAL = 1.7; EXPRESSED IN BRAIN, SIGNAL = 1.9; EXPRESSED IN LUNG, SIGNAL = 2.3; EXPRESSED IN ADULT LIVER, SIGNAL = 2.2; SWISSPROT HIT: P51659, EVALUE 5.00e-14; NT HIT: AF057722.1, EVALUE 2.00e-57; EST_HUMAN HIT: BF683535.1, EVALUE 3.00e-54
cataccatagttggccactgcttttccacctctccttcttatttcttcaacaaccttatcagcagctaaggagcctttaccaactcctttgaagtcccctcccaaatcattca

SEQ ID NO: 24370 - DNA, 349 bp, Homo sapiens
  MAP TO AC008468.4; EXPRESSED IN LUNG, SIGNAL = 1.4; EXPRESSED IN ADULT LIVER, SIGNAL =   2; EXPRESSED IN HEART, SIGNAL = 1.8; EXPRESSED IN FETAL LIVER, SIGNAL = 2.3; EXPRESSED IN BRAIN, SIGNAL = 1.7; EXPRESSED IN PLACENTA, SIGNAL = 1.6; EXPRESSED IN HELA, SIGNAL = 2.7; EXPRESSED IN BONE MARROW, SIGNAL = 1.8; SWISSPROT HIT: P34616, EVALUE 2.00e-10; NT HIT: gi7662067, EVALUE 0.00e+00; EST_HUMAN HIT: AW161561.1, EVALUE 1.00e-49
acgtggaggtgaaggacattaacgacaaccctccagtgttcccagcgacacaaaagaatctgttcatcgcggaatccaggccgcttgactctcggtttccactagagggcgcgtccgatgcagatatcggggagaacgccctgctcacttacagactgagccccaatgagtatttcttcctggacgtgccaaccagcaaccagcaggtaaaacctcttggacttgtattacggaaacttttagacagagaagaaactccggagcttcatttattgctcacggccaccgatggaggcaaacccgagctgactggcaccgttcaattactcatcacggtactggacaacaa

SEQ ID NO: 24371 - DNA, 176 bp, Homo sapiens
  MAP TO AC008103.27; EXPRESSED IN LUNG, SIGNAL = 2.8; EXPRESSED IN PLACENTA, SIGNAL = 2.4; EXPRESSED IN HELA, SIGNAL = 2.5; EXPRESSED IN HEART, SIGNAL = 2.8; EXPRESSED IN FETAL LIVER, SIGNAL = 3.4; EXPRESSED IN BRAIN, SIGNAL = 3.1; EXPRESSED IN ADULT LIVER, SIGNAL = 3.1; EXPRESSED IN BONE MARROW, SIGNAL = 2.7; EST_HUMAN HIT: W76467.1, EVALUE 3.00e-43; SWISSPROT HIT: O43272, EVALUE 1.00e-29; NT HIT: gi5174644, EVALUE 8.00e-95
ctgtggtacatggcgttggtggcctcgtacgtggggttgatggggtcctcatagccgatctctgccgcacgggctcgctcctgggccaggtatgcgccccgcaccagcttggccccaaaacaccagccctcacggcgagccagctccacgtccagggtcacattgtcataggcatc

SEQ ID NO: 24372 - DNA, 109 bp, Homo sapiens
  MAP TO AC021846.3; EXPRESSED IN BRAIN, SIGNAL = 2.2; EXPRESSED IN LUNG, SIGNAL = 2.2; EXPRESSED IN ADULT LIVER, SIGNAL = 2.3; EXPRESSED IN BONE MARROW, SIGNAL = 2.3; EXPRESSED IN PLACENTA, SIGNAL = 1.8; EXPRESSED IN HEART, SIGNAL = 1.8; EXPRESSED IN FETAL LIVER, SIGNAL = 2.2; NT HIT: gi7710107, EVALUE 1.00e-40; EST_HUMAN HIT: AA195154.1, EVALUE 6.00e-43; SWISSPROT HIT: Q14119, EVALUE 8.00e-03
ctgccagtgtgactgggtttgacatagccccagacgacacagaggatgttatattgaatggcgtagtgagagtcacaggtgttgtagcagccgtggaggtttggcacag

SEQ ID NO: 24373 - DNA, 203 bp, Homo sapiens
  MAP TO AC025601.2; EXPRESSED IN LUNG, SIGNAL = 1.5; EXPRESSED IN PLACENTA, SIGNAL = 1.6; EXPRESSED IN HEART, SIGNAL = 2.2; EXPRESSED IN BRAIN, SIGNAL = 1.4; EXPRESSED IN FETAL LIVER, SIGNAL = 1.5; EXPRESSED IN ADULT LIVER, SIGNAL = 1.6; EXPRESSED IN BONE MARROW, SIGNAL = 1.3; NT HIT: gi6981001, EVALUE 1.90e+00; SWISSPROT HIT: P50900, EVALUE 8.50e+00; EST_HUMAN HIT: BE904405.1, EVALUE 7.10e-01
atcatcaacaatgttcttgaccatgtatgaaatgatatgtgaacacaggctttttttcttcagaataatcatgctccaattttgcctaatggttctcatcatattactcaaagctactgaaccactttcttcatctaaactacctaatgcattagtaagatagcaagaaaatgagctgagcatgcagcgaataatgaacttgg

SEQ ID NO: 24374 - DNA, 105 bp, Homo sapiens
  MAP TO AL162261.1; EXPRESSED IN BONE MARROW, SIGNAL = 1.5; EXPRESSED IN ADULT LIVER, SIGNAL = 2.2; EXPRESSED IN HELA, SIGNAL = 2.6; EXPRESSED IN BRAIN, SIGNAL = 1.5; EXPRESSED IN LUNG, SIGNAL = 1.8; EXPRESSED IN PLACENTA, SIGNAL =   2; EXPRESSED IN HEART, SIGNAL = 1.9; EXPRESSED IN FETAL LIVER, SIGNAL = 1.7; EST_HUMAN HIT: AW801912.1, EVALUE 6.00e-06; NT HIT: AF260225.1, EVALUE 1.40e-02
atggattcaaagtcaaatttgaagaaagctgagcaggcagaagaaacaatcagtgaacctgaagataaggcaatggaaatcatccagtttgaggaacagaaataa

SEQ ID NO: 24375 - DNA, 120 bp, Homo sapiens
  MAP TO AC019184.2; EXPRESSED IN HELA, SIGNAL =  11; EXPRESSED IN LUNG, SIGNAL = 6.5; EXPRESSED IN ADULT LIVER, SIGNAL = 7.8; EXPRESSED IN FETAL LIVER, SIGNAL =   6; EXPRESSED IN BRAIN, SIGNAL = 6.4; EXPRESSED IN BONE MARROW, SIGNAL = 6.1; EXPRESSED IN PLACENTA, SIGNAL = 6.5; EXPRESSED IN HEART, SIGNAL = 7.6; NT HIT: U67488.1, EVALUE 4.10e+00; EST_HUMAN HIT: BF376754.1, EVALUE 1.50e+00
tctacctaccccaggctcacctcctgcaagaaaaatcctacattgacagccgtcttcctcaattctatcatgacgaaatcagaaggaaaggggataaaatggaagacaagagttttctta

SEQ ID NO: 24376 - DNA, 151 bp, Homo sapiens
  MAP TO AL157396.2; EXPRESSED IN LUNG, SIGNAL = 1.7; EXPRESSED IN ADULT LIVER, SIGNAL = 1.9; EXPRESSED IN HEART, SIGNAL = 1.7; EXPRESSED IN BRAIN, SIGNAL = 1.5; EXPRESSED IN PLACENTA, SIGNAL = 1.8; EXPRESSED IN FETAL LIVER, SIGNAL = 1.5; EXPRESSED IN BONE MARROW, SIGNAL = 1.5; SWISSPROT HIT: P51160, EVALUE 8.00e-16; EST_HUMAN HIT: AA056299.1, EVALUE 3.30e-02; NT HIT: U20211.1, EVALUE 6.00e-80
ctttttcggctcctccttcttgcttttttgcctcctcttcaatgaccttcatctttgcatcatactcatcagctagtgatttccattctactctgttattctgaagaccactcagcataggtgtgatttctttgtgaaaccgtgagaactc

SEQ ID NO: 24377 - DNA, 331 bp, Homo sapiens
  MAP TO AL137026.10; EXPRESSED IN LUNG, SIGNAL = 1.6; EXPRESSED IN PLACENTA, SIGNAL = 1.5; EXPRESSED IN ADULT LIVER, SIGNAL = 1.7; EXPRESSED IN HEART, SIGNAL = 1.5; EXPRESSED IN FETAL LIVER, SIGNAL = 1.3; EXPRESSED IN BRAIN, SIGNAL = 1.4; EXPRESSED IN BONE MARROW, SIGNAL = 1.4; SWISSPROT HIT: P20908, EVALUE 9.00e-03; EST_HUMAN HIT: BE957710.2, EVALUE 1.20e+00
agcagggagggcaggctggggacgttcaccacccagaacgcctctgctccccgcaaccctgagactccaggctcccctgttcctccctccgggagaccctgcccgtcctccccgcggggctccttcgcagttcgggggaagggacgggttgcgtcctcgggacctttctctgcagccacagcagcgcatcccagcacctcctccaggagccccgccacctcctgccacccggactttccccacagcgcagcgtcccctcgtcctctcagggctggaacagcggtacccgcagacagtgcaaaagggaagtccctgttgccttcccatgcaa

SEQ ID NO: 24378 - DNA, 130 bp, Homo sapiens
  MAP TO AC018529.4; EXPRESSED IN BONE MARROW, SIGNAL =  17; EXPRESSED IN PLACENTA, SIGNAL =  17; EXPRESSED IN ADULT LIVER, SIGNAL =  20; EXPRESSED IN HELA, SIGNAL =  25; EXPRESSED IN FETAL LIVER, SIGNAL =  16; EXPRESSED IN BRAIN, SIGNAL =  15; EXPRESSED IN LUNG, SIGNAL =  18; EXPRESSED IN HEART, SIGNAL =  15; EST_HUMAN HIT: BF035817.1, EVALUE 4.30e-01; SWISSPROT HIT: Q53194, EVALUE 3.60e-01
ctgaaataaccccaggctcctttccgcagcagcacactgacctgggtgacgtgtcctccccatgccaccctcccacaaacgctgccttccacccacagcacccgcagagagtggcagagagggcattcct

SEQ ID NO: 24379 - DNA, 104 bp, Homo sapiens; identical to SEQ ID NO: 23649
  MAP TO AC020919.3; EXPRESSED IN LUNG, SIGNAL = 3.7; EXPRESSED IN ADULT LIVER, SIGNAL = 3.8; EXPRESSED IN FETAL LIVER, SIGNAL = 3.9; EXPRESSED IN BRAIN, SIGNAL = 4.5; EXPRESSED IN PLACENTA, SIGNAL = 3.9; EXPRESSED IN HELA, SIGNAL = 5.8; EXPRESSED IN HEART, SIGNAL = 4.9; EXPRESSED IN BONE MARROW, SIGNAL = 3.7; NT HIT: AF148532.1, EVALUE 3.50e+00; EST_HUMAN HIT: BE963379.2, EVALUE 1.30e+00

SEQ ID NO: 24380 - DNA, 274 bp, Homo sapiens
  MAP TO AL160281.2; EXPRESSED IN LUNG, SIGNAL = 1.5; EXPRESSED IN PLACENTA, SIGNAL = 1.5; EXPRESSED IN FETAL LIVER, SIGNAL = 1.7; EXPRESSED IN BRAIN, SIGNAL = 1.6; EXPRESSED IN ADULT LIVER, SIGNAL = 1.7; EXPRESSED IN HEART, SIGNAL = 1.3; EXPRESSED IN BONE MARROW, SIGNAL = 1.7; SWISSPROT HIT: P14148, EVALUE 4.00e-16; EST_HUMAN HIT: AW503755.1, EVALUE 1.00e-124; NT HIT: U89275.1, EVALUE 6.60e-01
acaagccaaggtcaagaataagaccatccctctgacagacagtacagtgattgaggagcacctggggaagtttggtgtcatttgcttggaagacctcattcatgaaattgccttcccagggaaacatttcgaggagatctcatggttcttgagccctttccacctgtcagtggcccgtcatgctaccaaaaatagagtaggcttcctcaaggagacgggcacacctggctatcggggtgaacacatcaatctgctcatccaccagctgaactag

SEQ ID NO: 24381 - DNA, 117 bp, Homo sapiens
  MAP TO AL139258.2; EXPRESSED IN BONE MARROW, SIGNAL = 1.3; EXPRESSED IN LUNG, SIGNAL = 0.96; EXPRESSED IN PLACENTA, SIGNAL = 1.3; EXPRESSED IN ADULT LIVER, SIGNAL = 1.7; EXPRESSED IN HEART, SIGNAL = 1.8; EXPRESSED IN FETAL LIVER, SIGNAL = 1.3; EXPRESSED IN BRAIN, SIGNAL = 1.1; NT HIT: M62857.1, EVALUE 1.00e+00; EST_HUMAN HIT: BE894895.1, EVALUE 9.60e-02
gggatgatgagggatttgggggactatgaaacagtgcaaggcttggaggaggcaggcatgagaaagagaggggagaaacagaggactacgaagaagagaggatgtcagattatgtaa

SEQ ID NO: 24382 - DNA, 167 bp, Homo sapiens
  MAP TO AC007981.43; EXPRESSED IN ADULT LIVER, SIGNAL = 5.7; EXPRESSED IN HEART, SIGNAL = 5.2; EXPRESSED IN BONE MARROW, SIGNAL = 6.5; EXPRESSED IN LUNG, SIGNAL = 4.8; EXPRESSED IN PLACENTA, SIGNAL = 5.9; EXPRESSED IN HELA, SIGNAL = 3.3; EXPRESSED IN FETAL LIVER, SIGNAL = 9.7; EXPRESSED IN BRAIN, SIGNAL = 8.7; NT HIT: gi4758431, EVALUE 1.00e-28; EST_HUMAN HIT: AU142027.1, EVALUE 2.00e-28
ctacggagccatgggtgacctggtcctgctggggctggggctggggctggcgctggctgtcattgtgctggctgtggtcctctctcgacaccaggccccatttgacccccggcctttgcccacgccgctgttgctgctgactccaaggtcttctcaaatattgtacg

SEQ ID NO: 24383 - DNA, 142 bp, Homo sapiens
  MAP TO AL121751.12; EXPRESSED IN HELA, SIGNAL = 2.4; EXPRESSED IN LUNG, SIGNAL = 2.2; EXPRESSED IN PLACENTA, SIGNAL = 2.4; EXPRESSED IN FETAL LIVER, SIGNAL = 2.5; EXPRESSED IN HEART, SIGNAL = 1.8; EXPRESSED IN BRAIN, SIGNAL = 2.2; EXPRESSED IN BONE MARROW, SIGNAL =   2; EXPRESSED IN ADULT LIVER, SIGNAL = 2.2; NT HIT: U70408.1, EVALUE 2.00e-02; EST_HUMAN HIT: BF344296.1, EVALUE 3.00e-02; SWISSPROT HIT: P37758, EVALUE 3.60e-01
ttttactacttggagcatatttatcatagctgttttatcatccttgtctgctagtttcatcatcattgtcatttctgtgttggttgatttgtttttctcctggttatgggtcatattttcctgctttttttttttgtatgcc

SEQ ID NO: 24384 - DNA, 196 bp, Homo sapiens
  MAP TO AC026407.1; EXPRESSED IN HELA, SIGNAL = 3.5; EXPRESSED IN BRAIN, SIGNAL =   3; EXPRESSED IN LUNG, SIGNAL = 2.9; EXPRESSED IN ADULT LIVER, SIGNAL = 3.5; EXPRESSED IN BONE MARROW, SIGNAL =   3; EXPRESSED IN PLACENTA, SIGNAL = 2.9; EXPRESSED IN FETAL LIVER, SIGNAL = 3.7; EXPRESSED IN HEART, SIGNAL =   3; NT HIT: M19879.1, EVALUE 3.90e-01; EST_HUMAN HIT: AW984443.1, EVALUE 1.80e+00
ctttctcatcatccttgaaaagccactaattggtagcaagagggccaggctattgtataagtgccagaaggacttaggtagactagaaaatcagaatgttaagaagtgggaaagtagtcatagcttttctttctttgctcatgaacctgatgactactttaactacaagagcttccgtaaaggattgcacgcatga

SEQ ID NO: 24385 - DNA, 176 bp, Homo sapiens
  MAP TO AC011472.3; EXPRESSED IN HELA, SIGNAL = 3.2; EXPRESSED IN LUNG, SIGNAL = 3.8; EXPRESSED IN PLACENTA, SIGNAL = 2.9; EXPRESSED IN ADULT LIVER, SIGNAL = 3.3; EXPRESSED IN HEART, SIGNAL = 2.8; EXPRESSED IN FETAL LIVER, SIGNAL = 3.1; EXPRESSED IN BRAIN, SIGNAL = 2.9; EXPRESSED IN BONE MARROW, SIGNAL = 3.1; NT HIT: AB037816.1, EVALUE 8.00e-95; EST_HUMAN HIT: BE713699.1, EVALUE 3.90e-02; SWISSPROT HIT: P16097, EVALUE 1.00e+00
gtcccactgactgaagttgtcgagcccctggactttgaggatgtacttctgagccggccaccagatgctgagcccgggcccctcagggacctggtagaattcccagctgatgacttggagctgctgctgcagccccgggaatgccggaccacggagcccgggatccccaaggatga

SEQ ID NO: 24386 - DNA, 323 bp, Homo sapiens
  MAP TO AL118520.12; EXPRESSED IN LUNG, SIGNAL =   3; EXPRESSED IN PLACENTA, SIGNAL = 2.3; EXPRESSED IN ADULT LIVER, SIGNAL = 3.1; EXPRESSED IN HEART, SIGNAL = 2.2; EXPRESSED IN FETAL LIVER, SIGNAL = 2.3; EXPRESSED IN BRAIN, SIGNAL = 2.5; EXPRESSED IN BONE MARROW, SIGNAL = 2.6; EXPRESSED IN HELA, SIGNAL = 3.3; EST_HUMAN HIT: AU132349.1, EVALUE 0.00e+00; SWISSPROT HIT: Q10199, EVALUE 7.00e-03; NT HIT: D80003.1, EVALUE 0.00e+00
ctgggaagtttgttaggatccgaaggctgcccatcctttttggactgatcttcagggacaaccattttaacttcttgggcagggactgcttttagttcaatgtttacctgttccttcctactctgggaattctggcaatcactgtcctgaggcacattcaagctctccttgttatcctcaacaacacccccaactgcagccacagacacagtagaattctgaggattcagcccactgttgttaggaaagctcccaggtacagggggattggccagaggagtgggactgaccaatacatttctcggcaactccacattctgcaa

SEQ ID NO: 24387 - DNA, 467 bp, Homo sapiens
  MAP TO AC008468.4; EXPRESSED IN ADULT LIVER, SIGNAL = 2.3; EXPRESSED IN HEART, SIGNAL = 1.9; EXPRESSED IN BONE MARROW, SIGNAL = 2.4; EXPRESSED IN LUNG, SIGNAL = 2.2; EXPRESSED IN PLACENTA, SIGNAL = 2.2; EXPRESSED IN FETAL LIVER, SIGNAL = 2.5; EXPRESSED IN BRAIN, SIGNAL = 2.4; EST_HUMAN HIT: BF089693.1, EVALUE 9.00e-24; SWISSPROT HIT: O02840, EVALUE 1.90e-01; NT HIT: AF152308.1, EVALUE 0.00e+00
acgacacgcatcctggatgaggcggacgctccgcgccaccgcctgctggtgctggtgaaggaccacggtgagcccgcgctgacgtccacggccacggtgctggtgtcgctggtggagaacggccaggccccaaagacgtcgtcgcgggcctcagtgggcgctgtggatcccgaagcggctctggtggatattaacgtgtacctcatcatcgccatctgtgcggtgtccagcctgctggtgctcacgctgctgctgtacactgcgctgcgttgctcagcgccgcccaccgtgagccggtgcgcgccgggcaagcccacgctggtgtgctccagcgccgtggggagttggtcttactcgcagcagaggaggcagagggtgtgctctgcagagagcccgcccaagacggacctcatggccttcagcccaagccttcagctgtctcgagaagattgtttaaatcctcccag

SEQ ID NO: 24388 - DNA, 173 bp, Homo sapiens
  MAP TO AL157381.7; EXPRESSED IN BONE MARROW, SIGNAL = 1.4; EXPRESSED IN PLACENTA, SIGNAL = 1.5; EXPRESSED IN ADULT LIVER, SIGNAL = 1.4; EXPRESSED IN FETAL LIVER, SIGNAL = 1.2; EXPRESSED IN BRAIN, SIGNAL = 1.2; EXPRESSED IN LUNG, SIGNAL = 1.1; EXPRESSED IN HEART, SIGNAL = 1.3
ctctttcttcttcttcttcttcctcttcttcttcttcttcctcttcttcttcttcttcttcttcttcttcttcttcttcttcttcttcttcttcttcttcttcttcttcttcttcttccttcttcttcttctttcttcttcttcttcctcttcttcttcttcctcttcctctt

SEQ ID NO: 24389 - DNA, 186 bp, Homo sapiens; identical to SEQ ID NO: 18873
  MAP TO AL137225.7; EXPRESSED IN LUNG, SIGNAL = 1.4; EXPRESSED IN PLACENTA, SIGNAL = 1.8; EXPRESSED IN ADULT LIVER, SIGNAL = 1.5; EXPRESSED IN FETAL LIVER, SIGNAL = 1.8; EXPRESSED IN BRAIN, SIGNAL = 1.4; EXPRESSED IN HEART, SIGNAL = 1.6; EXPRESSED IN HELA, SIGNAL = 2.7; EXPRESSED IN BONE MARROW, SIGNAL = 1.5; EST_HUMAN HIT: AJ403124.1, EVALUE 3.00e-98; SWISSPROT HIT: P56730, EVALUE 2.90e+00; NT HIT: X52772.1, EVALUE 6.80e+00

SEQ ID NO: 24390 - DNA, 254 bp, Homo sapiens
  MAP TO AC024196.2; EXPRESSED IN PLACENTA, SIGNAL = 1.6; EXPRESSED IN ADULT LIVER, SIGNAL = 1.6; EXPRESSED IN FETAL LIVER, SIGNAL = 2.9; EXPRESSED IN HEART, SIGNAL = 1.5; EXPRESSED IN LUNG, SIGNAL = 1.5; EXPRESSED IN BRAIN, SIGNAL = 1.5; EXPRESSED IN BONE MARROW, SIGNAL = 1.4; SWISSPROT HIT: P19013, EVALUE 5.00e-20; NT HIT: gi9910293, EVALUE 2.00e-50; EST_HUMAN HIT: BE735977.1, EVALUE 1.00e-27
gagatcactcagatccagtcccacatcagtgacatgtctgtcatcctgtccatggacaacaaccggaacctagacctggacagcatcattgacgaagtccgcacccagtatgaggagattgccttgaagagtaaggccgaggctgaggccctgtaccagaccaaggtgagctgggctgaggtggggccagggagggtgatgccagcgggcagcagatggagacagatcgtgcccagaatagaagcagtgtccca

SEQ ID NO: 24391 - DNA, 127 bp, Homo sapiens
  MAP TO AL139248.2; EXPRESSED IN LUNG, SIGNAL = 1.2; EXPRESSED IN ADULT LIVER, SIGNAL = 1.5; EXPRESSED IN HEART, SIGNAL = 1.3; EXPRESSED IN BRAIN, SIGNAL = 1.1; EXPRESSED IN PLACENTA, SIGNAL = 1.3; EXPRESSED IN FETAL LIVER, SIGNAL = 1.4; EXPRESSED IN BONE MARROW, SIGNAL = 1.3; SWISSPROT HIT: P81694, EVALUE 8.10e-01; NT HIT: AB018310.1, EVALUE 2.80e-01; EST_HUMAN HIT: AU153793.1, EVALUE 1.00e-65
ctggcatggtgcctccacaggcgcagcgagcggttttctggcccccgctggagcagaaggtgcagcagtgaaacacgcctgagtgtgggcggtgctttctcctcaccgtcacagtgaatggcgagcc

SEQ ID NO: 24392 - DNA, 153 bp, Homo sapiens
  MAP TO AL121917.12; EXPRESSED IN LUNG, SIGNAL = 5.6; EXPRESSED IN PLACENTA, SIGNAL = 4.8; EXPRESSED IN ADULT LIVER, SIGNAL = 5.1; EXPRESSED IN HEART, SIGNAL =   5; EXPRESSED IN FETAL LIVER, SIGNAL = 4.9; EXPRESSED IN BRAIN, SIGNAL = 5.6; EXPRESSED IN BONE MARROW, SIGNAL = 5.5; EST_HUMAN HIT: AA662553.1, EVALUE 5.20e-01; SWISSPROT HIT: Q58069, EVALUE 1.00e+00; NT HIT: Z26825.1, EVALUE 3.50e-01
cttctcctttctcatattttcgacttcaattttttttggtctaattgtgcgaaccatcacttccagaccaaaattaatagtggtgagaataggtactgttttgttgttcctgacttcaagaatattaagaatattgctggctgttggatccat

SEQ ID NO: 24393 - DNA, 103 bp, Homo sapiens
  MAP TO AC010802.4; EXPRESSED IN LUNG, SIGNAL =   2; EXPRESSED IN PLACENTA, SIGNAL =   2; EXPRESSED IN ADULT LIVER, SIGNAL = 2.3; EXPRESSED IN FETAL LIVER, SIGNAL = 2.1; EXPRESSED IN BRAIN, SIGNAL = 1.9; EXPRESSED IN HEART, SIGNAL = 1.7; EXPRESSED IN HELA, SIGNAL = 2.9; EXPRESSED IN BONE MARROW, SIGNAL = 2.2; NT HIT: AL163209.2, EVALUE 2.20e-01; EST_HUMAN HIT: AV734819.1, EVALUE 9.00e-08; SWISSPROT HIT: P08548, EVALUE 2.00e-05
attgggaacaatgcaaggatatgtcctcccaccactccttttcaacatcatgctggaagttctggctaatgcaataagacaagaaaagatgataacaggtata

SEQ ID NO: 24394 - DNA, 151 bp, Homo sapiens
  MAP TO AL135937.22; EXPRESSED IN ADULT LIVER, SIGNAL = 1.5; EXPRESSED IN HELA, SIGNAL = 3.2; EXPRESSED IN BRAIN, SIGNAL = 1.9; EXPRESSED IN BONE MARROW, SIGNAL = 2.1; EXPRESSED IN LUNG, SIGNAL = 1.5; EXPRESSED IN PLACENTA, SIGNAL = 2.4; EXPRESSED IN FETAL LIVER, SIGNAL =   2; EXPRESSED IN HEART, SIGNAL = 2.2; EST_HUMAN HIT: BF570972.1, EVALUE 5.10e-01; NT HIT: AJ225084.1, EVALUE 3.40e-01
aaactttcagcccttcgagaggcagctcaagagattgggaaactggaagaggctctgctatatcctgtcctccttttgggagatcttggcagcccttgcgtagagagagggaggagggttggtgggcatgggggtttggtggggaagctaa

SEQ ID NO: 24395 - DNA, 87 bp, Homo sapiens
  MAP TO AC016648.3; EXPRESSED IN PLACENTA, SIGNAL = 1.1; EXPRESSED IN HEART, SIGNAL = 1.3; EXPRESSED IN FETAL LIVER, SIGNAL = 0.84; EXPRESSED IN BONE MARROW, SIGNAL = 0.9; EXPRESSED IN LUNG, SIGNAL =   1; EXPRESSED IN ADULT LIVER, SIGNAL = 0.81; EXPRESSED IN BRAIN, SIGNAL = 0.89; SWISSPROT HIT: P08548, EVALUE 7.40e-02; NT HIT: AJ006345.1, EVALUE 8.00e-13; EST_HUMAN HIT: BF690617.1, EVALUE 3.00e-16
tctgaccacaatggaataaaactggaaatcaataacaagagaaattgtgaaaactatacaaacatttgtcgattaagaactaagaaa

SEQ ID NO: 24396 - DNA, 94 bp, Homo sapiens
  MAP TO AP000432.4; EXPRESSED IN BONE MARROW, SIGNAL = 1.9; EXPRESSED IN HELA, SIGNAL = 2.8; EXPRESSED IN LUNG, SIGNAL = 2.1; EXPRESSED IN PLACENTA, SIGNAL = 2.2; EXPRESSED IN ADULT LIVER, SIGNAL = 2.3; EXPRESSED IN HEART, SIGNAL = 2.1; EXPRESSED IN FETAL LIVER, SIGNAL =   2; EXPRESSED IN BRAIN, SIGNAL = 2.1; NT HIT: AF146692.1, EVALUE 2.00e-01
gggacagtgcctggaacaccttcactggctcctctatgcagctgcttggcatctgcacagaatggtggctgagctgctttttatgactcagcct

SEQ ID NO: 24397 - DNA, 230 bp, Homo sapiens
  MAP TO AC013291.4; EXPRESSED IN PLACENTA, SIGNAL = 2.4; EXPRESSED IN FETAL LIVER, SIGNAL = 2.1; EXPRESSED IN BONE MARROW, SIGNAL = 2.2; EXPRESSED IN LUNG, SIGNAL = 2.6; EXPRESSED IN ADULT LIVER, SIGNAL = 2.2; EXPRESSED IN HEART, SIGNAL = 2.1; EXPRESSED IN BRAIN, SIGNAL = 2.2; NT HIT: gi8922819, EVALUE 1.00e-110; EST_HUMAN HIT: BF111413.1, EVALUE 1.00e-112; SWISSPROT HIT: P55965, EVALUE 9.30e+00
agatggcagatcctgaggtagttgtgagtagctgcagctctcatgaagaggaaaatcgctgcaattttaaccagcaaacatctccatctgaggagcttctattagaagaccagatgaggcgaaaactcaaattttttttcatgaatccctgtgagaagttctgggctcgaggtagaaaaccatggaaacttgccatacaaattctaaaaattgcaatggtgactatccag

SEQ ID NO: 24398 - DNA, 123 bp, Homo sapiens
  MAP TO AL139245.2; EXPRESSED IN HEART, SIGNAL = 1.3; EXPRESSED IN ADULT LIVER, SIGNAL = 1.6; EXPRESSED IN BRAIN, SIGNAL = 1.3; EXPRESSED IN BONE MARROW, SIGNAL = 1.6; EXPRESSED IN LUNG, SIGNAL = 1.3; EXPRESSED IN PLACENTA, SIGNAL = 2.3; EXPRESSED IN FETAL LIVER, SIGNAL = 1.6; SWISSPROT HIT: P11369, EVALUE 3.00e-03; NT HIT: AF081127.1, EVALUE 4.30e+00; EST_HUMAN HIT: BF365998.1, EVALUE 1.60e+00
atatgcaagaatccaaaagtttgatgacataccctactggcatgactgtgaagagtcagagacttgcatgcattgttagcaagaatgcagagtggtataacccctatggaacttttttgcaat

SEQ ID NO: 24399 - DNA, 134 bp, Homo sapiens
  MAP TO AC012241.4; EXPRESSED IN PLACENTA, SIGNAL = 0.99; EXPRESSED IN ADULT LIVER, SIGNAL = 1.7; EXPRESSED IN HELA, SIGNAL =   3; EXPRESSED IN HEART, SIGNAL = 1.3; EXPRESSED IN FETAL LIVER, SIGNAL = 1.7; EXPRESSED IN LUNG, SIGNAL = 1.6; EXPRESSED IN BRAIN, SIGNAL = 1.6; EXPRESSED IN BONE MARROW, SIGNAL = 1.4; NT HIT: AL139078.2, EVALUE 7.60e-02; SWISSPROT HIT: O88416, EVALUE 3.10e+00
atgaaagttggtaccacgctcacaaaaggccatcatgaagatgccctggaatccaatggtttacccaagacacgacactcatcacggacaccaagaagtcaggaggggcaagagacagcagcaaacaagcagag

SEQ ID NO: 24400 - DNA, 100 bp, Homo sapiens
  MAP TO AL137022.6; EXPRESSED IN BONE MARROW, SIGNAL = 4.3; EXPRESSED IN ADULT LIVER, SIGNAL = 3.1; EXPRESSED IN HELA, SIGNAL = 6.9; EXPRESSED IN HEART, SIGNAL = 4.4; EXPRESSED IN BRAIN, SIGNAL = 4.2; EXPRESSED IN LUNG, SIGNAL =   3; EXPRESSED IN PLACENTA, SIGNAL = 4.9; EXPRESSED IN FETAL LIVER, SIGNAL = 4.5; NT HIT: U91328.1, EVALUE 1.00e-18; EST_HUMAN HIT: AA456954.1, EVALUE 6.00e-15; SWISSPROT HIT: Q22702, EVALUE 3.20e+00
actcaccctaaattcttgtgtgagatccaagaaccctctcttggggtctggatccagacctctttctgtaacactagctctgggaagaatcctaacttaa

SEQ ID NO: 24401 - DNA, 150 bp, Homo sapiens
  MAP TO AC006054.2; EXPRESSED IN HELA, SIGNAL =  55; EXPRESSED IN LUNG, SIGNAL =  29; EXPRESSED IN PLACENTA, SIGNAL = 5.4; EXPRESSED IN HEART, SIGNAL =  24; EXPRESSED IN FETAL LIVER, SIGNAL =  62; EXPRESSED IN BONE MARROW, SIGNAL =  37; EXPRESSED IN ADULT LIVER, SIGNAL =  13; EXPRESSED IN BRAIN, SIGNAL =  44; NT HIT: M12937.1, EVALUE 9.00e-76; EST_HUMAN HIT: AU150849.1, EVALUE 5.00e-75; SWISSPROT HIT: P02794, EVALUE 2.00e-23
agattcgggcgctcccatcttgtgcaagttggtcacgtggtcacccaattctttgatggctttcacctgctcattcaggtaatgtgtctcaatgaagtcacacaaatgggggtcatttttgtcagtggccagtttgtgcagttccagtgg

SEQ ID NO: 24402 - DNA, 75 bp, Homo sapiens
  MAP TO AC025738.1; EXPRESSED IN ADULT LIVER, SIGNAL = 2.8; EXPRESSED IN BONE MARROW, SIGNAL =   3; EXPRESSED IN PLACENTA, SIGNAL =   3; EXPRESSED IN HEART, SIGNAL = 2.7; EXPRESSED IN FETAL LIVER, SIGNAL = 2.4; EXPRESSED IN LUNG, SIGNAL = 3.2; EXPRESSED IN BRAIN, SIGNAL = 3.2; NT HIT: AB037786.1, EVALUE 6.00e-35; SWISSPROT HIT: Q12923, EVALUE 2.50e+00; EST_HUMAN HIT: BF130286.1, EVALUE 6.00e-05
ctgaaggatcttatcaccaggctgcagtaggtttgatgctggcccatcaggctgaaccctagtaacaaagatacc

SEQ ID NO: 24403 - DNA, 104 bp, Homo sapiens
  MAP TO AL161441.2; EXPRESSED IN HELA, SIGNAL = 3.5; EXPRESSED IN LUNG, SIGNAL = 3.7; EXPRESSED IN PLACENTA, SIGNAL = 3.5; EXPRESSED IN ADULT LIVER, SIGNAL = 3.3; EXPRESSED IN FETAL LIVER, SIGNAL = 3.4; EXPRESSED IN BRAIN, SIGNAL = 3.2; EXPRESSED IN HEART, SIGNAL = 2.7; EXPRESSED IN BONE MARROW, SIGNAL = 2.8; EST_HUMAN HIT: AW962880.1, EVALUE 2.00e-14; NT HIT: AL163247.2, EVALUE 2.00e-17
ctgcttctcccatgctagatgcttcctgttctcgaacattgaactccaagttcttcggctttgggactggggctggtttccttgctcctcagcttgcaaacagc

SEQ ID NO: 24404 - DNA, 164 bp, Homo sapiens
  MAP TO AC020919.3; EXPRESSED IN ADULT LIVER, SIGNAL = 0.99; EXPRESSED IN HEART, SIGNAL = 1.3; EXPRESSED IN BONE MARROW, SIGNAL = 1.1; EXPRESSED IN LUNG, SIGNAL = 1.1; EXPRESSED IN PLACENTA, SIGNAL = 1.1; EXPRESSED IN FETAL LIVER, SIGNAL =   1; EXPRESSED IN BRAIN, SIGNAL = 0.94; EST_HUMAN HIT: AV710948.1, EVALUE 2.00e-31; NT HIT: D38044.1, EVALUE 5.00e-31; SWISSPROT HIT: Q91191, EVALUE 3.90e+00
tgtgctccttcaggagcctcaggcaagtccttcaggagatattccaaaagaaggcattattatcatagaagatgacagctccatgcatgttattgcccttgaagagctcccagtgggacaagatgtgggatggaagacaacgatattgatgatcctaaccatgg

SEQ ID NO: 24405 - DNA, 303 bp, Homo sapiens
  MAP TO AL139117.3; EXPRESSED IN LUNG, SIGNAL = 4.4; EXPRESSED IN PLACENTA, SIGNAL = 2.8; EXPRESSED IN ADULT LIVER, SIGNAL = 2.3; EXPRESSED IN FETAL LIVER, SIGNAL = 2.6; EXPRESSED IN BRAIN, SIGNAL = 2.6; EXPRESSED IN BONE MARROW, SIGNAL = 5.5; EXPRESSED IN HEART, SIGNAL = 2.7; EST_HUMAN HIT: AW467285.1, EVALUE 9.00e-94; SWISSPROT HIT: P43629, EVALUE 6.00e-18; NT HIT: AF009220.1, EVALUE 0.00e+00
gacagttctatgacagagtctccctctcggtgcagccgggccccacggtggcctcaggagagaacgtgaccctgctgtgtcagtcacagggatggatgcaaactttccttctgaccaaggagggggcagctgatgacccatggcgtctaagatcaacgtaccaatctcaaaaataccaggctgaattccccatgggtcctgtgacctcagcccatgcggggacctacaggtgctacggctcacagagctccaaaccctacctgctgactcaccccagtgaccccctggagctcgtggtctcag

SEQ ID NO: 24406 - DNA, 136 bp, Homo sapiens
  MAP TO AP001439.1; EXPRESSED IN LUNG, SIGNAL = 2.1; EXPRESSED IN ADULT LIVER, SIGNAL = 2.5; EXPRESSED IN HEART, SIGNAL = 2.3; EXPRESSED IN BRAIN, SIGNAL = 2.7; EXPRESSED IN PLACENTA, SIGNAL = 2.1; EXPRESSED IN FETAL LIVER, SIGNAL = 2.3; EXPRESSED IN HELA, SIGNAL = 3.3; EXPRESSED IN BONE MARROW, SIGNAL = 2.4; NT HIT: X13467.1, EVALUE 5.00e-71; SWISSPROT HIT: Q95241, EVALUE 5.00e-13; EST_HUMAN HIT: BF315675.1, EVALUE 5.00e-47
tcccattctggacattcatgtgcatgttcagtctgccacagaacatggcaatctggggttcagccagcaggccagcattaccatcagtgggtacctgaaagaagaagcttcagttagttatagtatccatagctcc

SEQ ID NO: 24407 - DNA, 142 bp, Homo sapiens
  MAP TO AC013497.4; EXPRESSED IN LUNG, SIGNAL = 1.8; EXPRESSED IN PLACENTA, SIGNAL = 1.8; EXPRESSED IN ADULT LIVER, SIGNAL = 1.8; EXPRESSED IN FETAL LIVER, SIGNAL = 1.7; EXPRESSED IN BRAIN, SIGNAL = 1.6; EXPRESSED IN BONE MARROW, SIGNAL = 1.6; EXPRESSED IN HEART, SIGNAL = 1.7; SWISSPROT HIT: P48552, EVALUE 4.00e+00; EST_HUMAN HIT: H16797.1, EVALUE 1.20e-01; NT HIT: AY005150.1, EVALUE 8.10e-02
actcatcatccctggaatgactctctgtgtttgtcttactccctatattgtaaactctgtaaggacaggggtcttgtctgacatttttactgttgttcctaatacctagtagcacactgctggacatgtggaggttgttcat

SEQ ID NO: 24408 - DNA, 173 bp, Homo sapiens
  MAP TO AC022860.3; EXPRESSED IN LUNG, SIGNAL = 1.3; EXPRESSED IN ADULT LIVER, SIGNAL = 2.6; EXPRESSED IN HEART, SIGNAL = 1.2; EXPRESSED IN BRAIN, SIGNAL = 1.2; EXPRESSED IN PLACENTA, SIGNAL = 1.2; EXPRESSED IN FETAL LIVER, SIGNAL = 1.6; EXPRESSED IN BONE MARROW, SIGNAL = 1.1; SWISSPROT HIT: P34466, EVALUE 3.00e-03; EST_HUMAN HIT: AW291521.1, EVALUE 1.00e-05
aagtcttaccccaggagatcaagcaggagatccaccaggtgctcatggaccatggagtcccatgtcattacacctgcttcttgctgcacccagaagacagcacactggagcgcttcttagttctgcacagcatccaggggctgcaagaggactcagtgctgtgcaaggtggag

SEQ ID NO: 24409 - DNA, 98 bp, Homo sapiens
  MAP TO AC013691.3; EXPRESSED IN LUNG, SIGNAL = 1.3; EXPRESSED IN PLACENTA, SIGNAL = 1.3; EXPRESSED IN ADULT LIVER, SIGNAL = 1.2; EXPRESSED IN HEART, SIGNAL = 1.4; EXPRESSED IN FETAL LIVER, SIGNAL = 1.5; EXPRESSED IN BRAIN, SIGNAL = 1.3; EXPRESSED IN BONE MARROW, SIGNAL = 1.4; SWISSPROT HIT: P44697, EVALUE 9.50e+00; NT HIT: U37575.1, EVALUE 3.00e-03; EST_HUMAN HIT: AA454055.1, EVALUE 3.00e-04
ctccttggccgggacccacttctgctccaactcttgctggccattaagtctgtgccccgcctcactcagcccgccgcagccccactgcctgtggagag

SEQ ID NO: 24410 - DNA, 75 bp, Homo sapiens
  MAP TO AC010363.3; EXPRESSED IN HELA, SIGNAL = 6.9; EXPRESSED IN BRAIN, SIGNAL = 7.5; EXPRESSED IN LUNG, SIGNAL = 8.9; EXPRESSED IN PLACENTA, SIGNAL = 7.8; EXPRESSED IN ADULT LIVER, SIGNAL = 7.8; EXPRESSED IN FETAL LIVER, SIGNAL = 8.5; EXPRESSED IN HEART, SIGNAL =   7; EXPRESSED IN BONE MARROW, SIGNAL = 6.2; NT HIT: AF007570.1, EVALUE 1.50e-01; SWISSPROT HIT: P15309, EVALUE 7.40e+00
tcagtggacttccttcatttcctgcgtggctgccagtacttgggcagtgatgagaccagtcacaattactctcct

SEQ ID NO: 24411 - DNA, 120 bp, Homo sapiens
  MAP TO AC025747.3; EXPRESSED IN HELA, SIGNAL = 2.7; EXPRESSED IN PLACENTA, SIGNAL = 1.3; EXPRESSED IN ADULT LIVER, SIGNAL =   2; EXPRESSED IN FETAL LIVER, SIGNAL = 1.6; EXPRESSED IN BRAIN, SIGNAL = 1.7; EXPRESSED IN BONE MARROW, SIGNAL = 1.6; EXPRESSED IN LUNG, SIGNAL = 1.7; EXPRESSED IN HEART, SIGNAL = 1.6; EST_HUMAN HIT: AW500256.1, EVALUE 2.00e-61; NT HIT: AF294883.1, EVALUE 6.70e-02; SWISSPROT HIT: P38129, EVALUE 1.20e-01
ctcggcctctagaacagctccagattcgaatggtttgatctttgcttccagtggctaagtagcaaccttttgttactggagcttgtgctacagcattcccgttggtaatttcagcttctt

SEQ ID NO: 24412 - DNA, 315 bp, Homo sapiens
  MAP TO AL136306.2; EXPRESSED IN HEART, SIGNAL = 1.6; EXPRESSED IN BONE MARROW, SIGNAL = 2.5; EXPRESSED IN PLACENTA, SIGNAL = 1.1; EXPRESSED IN ADULT LIVER, SIGNAL = 1.1; EXPRESSED IN BRAIN, SIGNAL = 1.8; EXPRESSED IN LUNG, SIGNAL = 1.5; EXPRESSED IN FETAL LIVER, SIGNAL = 3.2; EST_HUMAN HIT: BF092898.1, EVALUE 0.00e+00; NT HIT: AB011148.1, EVALUE 0.00e+00; SWISSPROT HIT: P57071, EVALUE 9.00e-07
acacaaatacataatctatgctgtggtgctcctcataatgactcagaaatgcttcttccacattaaagataagatcacaaagcccacagaagtatttaatctttatctcattgtcatgctcatcttggcaatgtcggtacaatgtttctatcttatgaaaaggctttctgcagtgagcacagctgtatctatgaaacttgtggcttgccaaagacatgcagtgctgttttacatattcctgggaatcaaacatatcttcacaaatccggcattgccatttacccctcggagaactatttgccggggaatgatcaa

SEQ ID NO: 24413 - DNA, 186 bp, Homo sapiens
  MAP TO AC013685.3; EXPRESSED IN HELA, SIGNAL = 2.3; EXPRESSED IN LUNG, SIGNAL =   2; EXPRESSED IN ADULT LIVER, SIGNAL = 2.3; EXPRESSED IN HEART, SIGNAL = 1.9; EXPRESSED IN BRAIN, SIGNAL = 2.5; EXPRESSED IN BONE MARROW, SIGNAL = 2.7; EXPRESSED IN PLACENTA, SIGNAL = 2.4; EXPRESSED IN FETAL LIVER, SIGNAL = 2.3; EST_HUMAN HIT: AA807128.1, EVALUE 3.00e-15; SWISSPROT HIT: P34722, EVALUE 5.10e+00; NT HIT: AL163246.2, EVALUE 3.00e-14
atgaaaccaaaagcaaaatctatacaagaaaaatatattgataaactgagctttattaaaattataaacctttattctttgaaaaataccattaagagattgaaaagaaagcccgttgtgatggttactattgagtatcaacttgactggatagaaagaggcaaagtattgatcctgggtgtgtct

SEQ ID NO: 24414 - DNA, 199 bp, Homo sapiens
  MAP TO AC009874.5; EXPRESSED IN ADULT LIVER, SIGNAL = 2.3; EXPRESSED IN HELA, SIGNAL = 2.8; EXPRESSED IN FETAL LIVER, SIGNAL = 2.1; EXPRESSED IN BRAIN, SIGNAL =   2; EXPRESSED IN PLACENTA, SIGNAL =   2; EXPRESSED IN HEART, SIGNAL = 2.3; EXPRESSED IN BONE MARROW, SIGNAL = 2.1; EXPRESSED IN LUNG, SIGNAL = 2.2; SWISSPROT HIT: P39801, EVALUE 1.30e+00; NT HIT: AF236667.1, EVALUE 4.70e-01; EST_HUMAN HIT: AA082578.1, EVALUE 1.10e-02
ctcttctaccaggctcctcactctcaaacagctcacactcactaaagctatcggacagaaacacagtcatcttcccacctgcaaagcagctgctggcatccacaccatgttcttctgtctcatgtatcaactcccttctcagatcggcccatctacccatgttctggatcctccccaccttctcaagagcacagcccat

SEQ ID NO: 24415 - DNA, 139 bp, Homo sapiens
  MAP TO AC019284.4; EXPRESSED IN HELA, SIGNAL = 4.5; EXPRESSED IN LUNG, SIGNAL = 3.7; EXPRESSED IN ADULT LIVER, SIGNAL = 3.6; EXPRESSED IN BRAIN, SIGNAL = 2.9; EXPRESSED IN PLACENTA, SIGNAL = 3.6; EXPRESSED IN HEART, SIGNAL = 3.3; EXPRESSED IN FETAL LIVER, SIGNAL = 3.5; EXPRESSED IN BONE MARROW, SIGNAL = 3.5; EST_HUMAN HIT: BF375152.1, EVALUE 7.30e+00; NT HIT: X56832.1, EVALUE 1.20e+00
ttattgctgcagctgagtcttgagctgatacccagtgaagggattgcacatgtcaaatggctcatctttgcccctgtggctcttgaaatatggaagcaaattgatcagggggagctcttcagtctgcatgcttgagtaa

SEQ ID NO: 24416 - DNA, 105 bp, Homo sapiens
  MAP TO AC019276.3; EXPRESSED IN HELA, SIGNAL = 3.3; EXPRESSED IN PLACENTA, SIGNAL = 2.6; EXPRESSED IN LUNG, SIGNAL = 2.9; EXPRESSED IN HEART, SIGNAL = 2.5; EXPRESSED IN FETAL LIVER, SIGNAL = 2.6; EXPRESSED IN BONE MARROW, SIGNAL = 2.8; EXPRESSED IN ADULT LIVER, SIGNAL = 3.1; EXPRESSED IN BRAIN, SIGNAL = 2.4; NT HIT: Z70200.1, EVALUE 7.60e-01; EST_HUMAN HIT: BE173060.1, EVALUE 2.30e-01
tcatattcttgaccattccctattgatggagatgaggctgcttccagtttcgctcttgtgcgtaaccctgatgaacacatcttgtatgtacatcctcttgtacat

SEQ ID NO: 24417 - DNA, 176 bp, Homo sapiens
  MAP TO AC021237.3; EXPRESSED IN HEART, SIGNAL = 9.1; EXPRESSED IN PLACENTA, SIGNAL = 8.9; EXPRESSED IN ADULT LIVER, SIGNAL = 9.8; EXPRESSED IN HELA, SIGNAL =  13; EXPRESSED IN BRAIN, SIGNAL = 8.1; EXPRESSED IN BONE MARROW, SIGNAL = 9.1; EXPRESSED IN LUNG, SIGNAL = 9.8; EXPRESSED IN FETAL LIVER, SIGNAL = 8.2; NT HIT: AB046799.1, EVALUE 1.00e-01; SWISSPROT HIT: O60152, EVALUE 5.90e-01; EST_HUMAN HIT: AW022606.1, EVALUE 1.50e-01
ctttatggacaaacaaacaaacaagcaccactggagttatttcttcacttggccagaatagtaaaactctgtcctctttgatagctagtgaaatccccaagagtctttatcaacctgatcatctgaattcttattatactgacttgcttaacatcaagatctggattaatgactga

SEQ ID NO: 24418 - DNA, 157 bp, Homo sapiens
  MAP TO AC024193.2; EXPRESSED IN HELA, SIGNAL = 4.2; EXPRESSED IN PLACENTA, SIGNAL = 2.3; EXPRESSED IN FETAL LIVER, SIGNAL = 2.5; EXPRESSED IN BONE MARROW, SIGNAL = 2.5; EXPRESSED IN LUNG, SIGNAL = 2.8; EXPRESSED IN ADULT LIVER, SIGNAL = 3.5; EXPRESSED IN BRAIN, SIGNAL = 2.8; EXPRESSED IN HEART, SIGNAL = 2.4; NT HIT: AL163246.2, EVALUE 6.00e-03; EST_HUMAN HIT: BF674524.1, EVALUE 1.00e-07; SWISSPROT HIT: Q05280, EVALUE 4.00e+00
ttatccttccatggtccacttagtgccatggtttttcacatttttgtgcattttgttgattttgctgcttaaaatgacccccaagcacagtgaagtgccgaccagtatccccaagcataagaagaggcgccctatggagaaaaataacatgtgttgg

SEQ ID NO: 24419 - DNA, 125 bp, Homo sapiens
  MAP TO AC018390.3; EXPRESSED IN HELA, SIGNAL = 7.1; EXPRESSED IN LUNG, SIGNAL = 5.3; EXPRESSED IN BONE MARROW, SIGNAL = 5.5; EXPRESSED IN BRAIN, SIGNAL = 4.6; EXPRESSED IN FETAL LIVER, SIGNAL = 4.8; EXPRESSED IN ADULT LIVER, SIGNAL =   6; EXPRESSED IN PLACENTA, SIGNAL = 4.1; EXPRESSED IN HEART, SIGNAL = 4.4; EST_HUMAN HIT: T12268.1, EVALUE 1.60e+00; SWISSPROT HIT: Q99145, EVALUE 1.40e+00; NT HIT: AL161515.2, EVALUE 1.10e+00
caggtaacataggtatagtttttatagacatcaaggacaggggcagaagatatctcaatgaaataatgatgttcagctgttgaaaaactcgtaatgaattccagaatgtcagccacagcttcttt

SEQ ID NO: 24420 - DNA, 118 bp, Homo sapiens
  MAP TO AL136146.5; EXPRESSED IN BONE MARROW, SIGNAL = 1.3; EXPRESSED IN LUNG, SIGNAL = 1.2; EXPRESSED IN PLACENTA, SIGNAL = 1.2; EXPRESSED IN ADULT LIVER, SIGNAL = 1.3; EXPRESSED IN HEART, SIGNAL = 1.3; EXPRESSED IN FETAL LIVER, SIGNAL = 1.2; EXPRESSED IN BRAIN, SIGNAL = 1.2; SWISSPROT HIT: P30291, EVALUE 6.00e-06; NT HIT: AF205599.1, EVALUE 4.10e+00; EST_HUMAN HIT: AA386311.1, EVALUE 1.00e-07
cagagctgctgcagaaggtctctctcctggatcagggtggatcatgtgcttgagcagactgtaaaagtcttctgagagctcctgaggaatgtctgggaagttactctcatggttatgg

SEQ ID NO: 24421 - DNA, 150 bp, Homo sapiens
  MAP TO AC022459.3; EXPRESSED IN PLACENTA, SIGNAL = 4.7; EXPRESSED IN ADULT LIVER, SIGNAL = 6.5; EXPRESSED IN BRAIN, SIGNAL = 4.6; EXPRESSED IN BONE MARROW, SIGNAL = 5.2; EXPRESSED IN FETAL LIVER, SIGNAL = 4.8; EXPRESSED IN HEART, SIGNAL = 4.7; EXPRESSED IN HELA, SIGNAL = 8.7; EXPRESSED IN LUNG, SIGNAL = 5.5; EST_HUMAN HIT: BE086509.1, EVALUE 8.00e-03; SWISSPROT HIT: P57207, EVALUE 5.20e+00; NT HIT: M74557.1, EVALUE 3.40e-01
gatgatagtgaaaaagacaagaaggaggaaatgaaagaggaggaggaggaggaagacttgcattggactggacttgaggagtttatatttatatttatgtatgctgaagcaagattggttgccactgtgcacctccttgttttggcagct

SEQ ID NO: 24422 - DNA, 200 bp, Homo sapiens
  MAP TO AL139423.2; EXPRESSED IN LUNG, SIGNAL = 4.3; EXPRESSED IN PLACENTA, SIGNAL = 4.2; EXPRESSED IN ADULT LIVER, SIGNAL = 4.3; EXPRESSED IN HEART, SIGNAL = 4.4; EXPRESSED IN BRAIN, SIGNAL = 4.6; EXPRESSED IN FETAL LIVER, SIGNAL = 5.9; EXPRESSED IN HELA, SIGNAL = 5.3; EXPRESSED IN BONE MARROW, SIGNAL = 4.6; NT HIT: gi8392874, EVALUE 4.70e-01; EST_HUMAN HIT: AA325216.1, EVALUE 4.50e-02; SWISSPROT HIT: Q61645, EVALUE 3.30e-01
tccccaaccccaactctggaagctccacttcaggttttccatactacaaccccgagtgtcaccacagggtccggcccaacctgggctccagctgattaaggatctgcaacaggatgtagggattacagtaaaacctggctccggatctgcaggggcagcaggccaagtcccagccctgggactcccctcccctacccttc

SEQ ID NO: 24423 - DNA, 239 bp, Homo sapiens
  MAP TO AL139250.2; EXPRESSED IN BONE MARROW, SIGNAL = 1.8; EXPRESSED IN PLACENTA, SIGNAL = 1.5; EXPRESSED IN HELA, SIGNAL = 2.7; EXPRESSED IN HEART, SIGNAL = 2.2; EXPRESSED IN FETAL LIVER, SIGNAL = 2.2; EXPRESSED IN LUNG, SIGNAL = 1.6; EXPRESSED IN ADULT LIVER, SIGNAL = 2.1; EXPRESSED IN BRAIN, SIGNAL = 1.9; EST_HUMAN HIT: BF206507.1, EVALUE 2.20e-01; SWISSPROT HIT: Q00975, EVALUE 1.50e+00
atgaccaccaaacccaaggaacaggcggacactgaacagttccccttcctgctactgcgtggaatggctgaggaggaggcagtgctcagacaagggaggaagaggggaggccccagctcccggctatggggtgtgcccaccagaggcccggagcaggttaggctcagcgacgggaccacccagagcagcccggcattggcacctccctctgccctcagctgcccagctcatcacagcag

SEQ ID NO: 24424 - DNA, 247 bp, Homo sapiens
  MAP TO AL121586.28; EXPRESSED IN ADULT LIVER, SIGNAL = 2.9; EXPRESSED IN LUNG, SIGNAL = 2.7; EXPRESSED IN BONE MARROW, SIGNAL = 2.7; EXPRESSED IN BRAIN, SIGNAL = 2.4; EXPRESSED IN FETAL LIVER, SIGNAL = 2.7; EXPRESSED IN HEART, SIGNAL = 2.4; EXPRESSED IN HELA, SIGNAL = 3.3; EXPRESSED IN PLACENTA, SIGNAL = 2.7; NT HIT: AF022655.1, EVALUE 0.00e+00; SWISSPROT HIT: P06653, EVALUE 8.30e+00; EST_HUMAN HIT: BE280793.1, EVALUE 0.00e+00
cttggcctgcagcttcctcacaagggttgcttgtctctgctgggcctcctgggagttcttcagcttccgccaggaggctgcctgattctctgccatctgctgctgtagtgccagcacctgctcttccagtaccagctgcagtgactggggcttcatgttgttcaacccagggcttcttgtctccatgagggcaccaggtggtaggcccacaggtccctaggtagccagagggtgttcacgcccagca

SEQ ID NO: 24425 - DNA, 114 bp, Homo sapiens
  MAP TO AL139805.2; EXPRESSED IN HELA, SIGNAL = 4.4; EXPRESSED IN BRAIN, SIGNAL = 2.7; EXPRESSED IN BONE MARROW, SIGNAL = 3.3; EXPRESSED IN FETAL LIVER, SIGNAL = 2.7; EXPRESSED IN HEART, SIGNAL = 3.1; EXPRESSED IN ADULT LIVER, SIGNAL = 3.6; EXPRESSED IN PLACENTA, SIGNAL = 3.4; EXPRESSED IN LUNG, SIGNAL = 3.7; NT HIT: AJ248287.1, EVALUE 8.40e-01; EST_HUMAN HIT: BE297806.1, EVALUE 1.00e+00
tgactagatttctgattctgaatccacgttatcacagaggccccgtctgccttcttcttaggcaccttcaccttagttgggtacttctgttccttcactatctcctccatctcc

SEQ ID NO: 24426 - DNA, 169 bp, Homo sapiens
  MAP TO AC016326.4; EXPRESSED IN PLACENTA, SIGNAL = 1.5; EXPRESSED IN BONE MARROW, SIGNAL = 1.3; EXPRESSED IN HEART, SIGNAL = 1.6; EXPRESSED IN FETAL LIVER, SIGNAL = 0.92; EXPRESSED IN LUNG, SIGNAL = 1.7; EXPRESSED IN ADULT LIVER, SIGNAL = 0.88; EXPRESSED IN BRAIN, SIGNAL = 1.4; NT HIT: Y18276.1, EVALUE 2.00e-52; EST_HUMAN HIT: AU118985.1, EVALUE 2.00e-90; SWISSPROT HIT: P15442, EVALUE 3.90e+00
gttcagctttccctatacacatatttgtctgctgaatttattggaactgctaccatctacaccaccatacgcagagtaggaacagtattacagctaatgcacaccttaaaatattactactgggttattaatcctgctgacagtagtggcattacacctaaaggattag

SEQ ID NO: 24427 - DNA, 132 bp, Homo sapiens
  MAP TO AC022658.3; EXPRESSED IN LUNG, SIGNAL = 2.2; EXPRESSED IN HEART, SIGNAL =   2; EXPRESSED IN FETAL LIVER, SIGNAL = 1.7; EXPRESSED IN ADULT LIVER, SIGNAL = 2.1; EXPRESSED IN BRAIN, SIGNAL = 2.2; EXPRESSED IN PLACENTA, SIGNAL = 1.9; EXPRESSED IN BONE MARROW, SIGNAL = 2.1; NT HIT: gi6678797, EVALUE 1.20e+00; EST_HUMAN HIT: AI268650.1, EVALUE 4.40e-01
cggtccgttcaaagagggcaggcaattttctggcaccataacagttgcatattttaactcctatcttctcttggtcatttacaaggacatgttcatttccaggcttggctcctgtttcctcattgctcattc

SEQ ID NO: 24428 - DNA, 226 bp, Homo sapiens
  MAP TO AL121918.15; EXPRESSED IN PLACENTA, SIGNAL = 2.1; EXPRESSED IN HELA, SIGNAL = 2.7; EXPRESSED IN FETAL LIVER, SIGNAL = 2.1; EXPRESSED IN BONE MARROW, SIGNAL = 3.9; EXPRESSED IN ADULT LIVER, SIGNAL = 2.3; EXPRESSED IN HEART, SIGNAL = 2.5; EXPRESSED IN BRAIN, SIGNAL = 1.9; EXPRESSED IN LUNG, SIGNAL = 2.3; SWISSPROT HIT: P28922, EVALUE 4.40e-01
ctaaaacactcccccaaagttcttcatctgcttcactggcaagtgcacagcctgggtgtatgcgtgccacttccctccacacactgagatcactggaagtaacaaggagccaggaaccacatctagagtccaggatcccagagggatggctaccacctgcaccaacaggtaaatctccaagatgctcctcactgacagaatctcctctctgaaggtccccgaaatg

SEQ ID NO: 24429 - DNA, 282 bp, Homo sapiens
  MAP TO AC013705.3; EXPRESSED IN BRAIN, SIGNAL = 2.4; EXPRESSED IN BONE MARROW, SIGNAL = 2.5; EXPRESSED IN FETAL LIVER, SIGNAL = 2.3; EXPRESSED IN HEART, SIGNAL = 2.3; EXPRESSED IN HELA, SIGNAL =   3; EXPRESSED IN ADULT LIVER, SIGNAL = 3.2; EXPRESSED IN PLACENTA, SIGNAL = 2.5; EXPRESSED IN LUNG, SIGNAL = 2.9; EST_HUMAN HIT: AL134399.1, EVALUE 3.00e-07; SWISSPROT HIT: P11369, EVALUE 5.00e-03; NT HIT: U36308.2, EVALUE 8.00e-10
attgatttcacttagtataatgtcctcaaggctcatccgtgttgtagtgtgtgtcaggatttccttccttttgaagctgagtagtattttattgtatgtatatacgtcattttgtttatccattcccacgtcgatgcacgctagcggttgtaataaggctgctgtgaacgcgagtgtcttaacatgtgtttctatcctcagtgtcacaactctcagagttacaactctagctaagtcagcttctttctctggatcttttccagaagtgccactcatcagttt

SEQ ID NO: 24430 - DNA, 158 bp, Homo sapiens
  MAP TO AC015662.4; EXPRESSED IN HEART, SIGNAL = 4.8; EXPRESSED IN BRAIN, SIGNAL = 5.1; EXPRESSED IN BONE MARROW, SIGNAL = 4.6; EXPRESSED IN PLACENTA, SIGNAL = 5.1; EXPRESSED IN ADULT LIVER, SIGNAL = 6.8; EXPRESSED IN HELA, SIGNAL = 6.1; EXPRESSED IN FETAL LIVER, SIGNAL = 4.1; EXPRESSED IN LUNG, SIGNAL = 5.7; SWISSPROT HIT: P36417, EVALUE 3.00e+00; EST_HUMAN HIT: BE564367.1, EVALUE 1.00e-81; NT HIT: AJ271735.1, EVALUE 1.00e-07
agatggatcaagatggtgaaatagaagactccaccaatcatccccttcacacgaacaccaatttaacaactatctacatgcacacacacaaaagcttcatcaatttaacaactatctacatgcacacacacaaaacctttgtaagaactcaaaatcag

SEQ ID NO: 24431 - DNA, 121 bp, Homo sapiens
  MAP TO AC021486.3; EXPRESSED IN LUNG, SIGNAL = 1.5; EXPRESSED IN PLACENTA, SIGNAL = 1.8; EXPRESSED IN FETAL LIVER, SIGNAL = 1.7; EXPRESSED IN BRAIN, SIGNAL = 2.2; EXPRESSED IN BONE MARROW, SIGNAL = 2.1; EXPRESSED IN ADULT LIVER, SIGNAL = 1.7; EXPRESSED IN HEART, SIGNAL = 1.6; SWISSPROT HIT: P47970, EVALUE 4.10e+00; NT HIT: AL163248.2, EVALUE 3.00e-38; EST_HUMAN HIT: AW893093.1, EVALUE 4.00e-35
gcctgttgatttaaaggtaggaggagcccaaagtgtccaggtggcaatcttaacttccagtttaatggcatcattgttgtgtctcctggtggcagcattccttcctctggaactaagatct

SEQ ID NO: 24432 - DNA, 429 bp, Homo sapiens
  MAP TO AC009334.3; EXPRESSED IN BONE MARROW, SIGNAL = 3.6; EXPRESSED IN BRAIN, SIGNAL =   3; EXPRESSED IN FETAL LIVER, SIGNAL =   9; EXPRESSED IN HEART, SIGNAL = 1.7; EXPRESSED IN HELA, SIGNAL = 6.8; EXPRESSED IN ADULT LIVER, SIGNAL = 2.5; EXPRESSED IN PLACENTA, SIGNAL = 0.87; EXPRESSED IN LUNG, SIGNAL = 3.7; NT HIT: gi5031856, EVALUE 1.00e-120; EST_HUMAN HIT: AW236269.1, EVALUE 0.00e+00; SWISSPROT HIT: P13491, EVALUE 8.00e-40
agatggctttctccctcttgcgatgtgcctcagccgtgatagtgaccagcttggagtttacagttacagtatagtctttgccagagacaatctttggtgttctaaggaaaaggctgccatggtggagatccatcatctcgcccttcaatttgtcttccatgacatcaacaagagcaagttcgccttccaagtccttcattaagataccgatggcacaggccatgccaagagcaccaaccccaacaactgtaatcttattctggaggatctgttcttcctttagaagactgtgaataagctgatccttgagcgtatacttgagagtatattggacttggaaacaaaaggaatcgagaatgcacgtccggcgggtgttggggcacgcggcagtgagatccagactcgtcggcagcggctccagcaccttcg

SEQ ID NO: 24433 - DNA, 217 bp, Homo sapiens
  MAP TO AC013317.4; EXPRESSED IN LUNG, SIGNAL = 0.99; EXPRESSED IN PLACENTA, SIGNAL = 1.2; EXPRESSED IN HEART, SIGNAL = 1.5; EXPRESSED IN FETAL LIVER, SIGNAL = 1.4; EXPRESSED IN BONE MARROW, SIGNAL = 1.2; EXPRESSED IN ADULT LIVER, SIGNAL = 0.97; EXPRESSED IN BRAIN, SIGNAL = 1.2; SWISSPROT HIT: P08548, EVALUE 5.90e-02; EST_HUMAN HIT: BE149303.1, EVALUE 2.00e-04; NT HIT: AB042297.1, EVALUE 3.30e-02
ctgggagcgaacttgctgggtcatgataattttgtttagctttttgaggaactgacaattttctacggtggctaggccagtttgcatttccaccagtaatgtgtaagagttccatttccccacatccccatcaattcttattgttattactattattattattgccatcctaatgggggtgaaatggtaactcatcatggttttgattttgatttcc

SEQ ID NO: 24434 - DNA, 138 bp, Homo sapiens
  MAP TO AC015592.4; EXPRESSED IN ADULT LIVER, SIGNAL = 1.6; EXPRESSED IN HEART, SIGNAL = 1.3; EXPRESSED IN BRAIN, SIGNAL = 1.6; EXPRESSED IN BONE MARROW, SIGNAL = 1.6; EXPRESSED IN PLACENTA, SIGNAL = 1.2; EXPRESSED IN HELA, SIGNAL = 3.4; EXPRESSED IN FETAL LIVER, SIGNAL = 2.6; EXPRESSED IN LUNG, SIGNAL = 1.8; EST_HUMAN HIT: AI915634.1, EVALUE 4.60e-01; SWISSPROT HIT: P97245, EVALUE 2.40e+00
ctctggactgtccttcagggtgtcagaacggggaagttctgagagctgggaaaatcttcggtcataaatacacagatgaagatgtttatcaagtacccgaaaatcttcataacttcttttaacaatccaactttttcc

SEQ ID NO: 24435 - DNA, 369 bp, Homo sapiens
  MAP TO AC027343.1; EXPRESSED IN LUNG, SIGNAL = 7.1; EXPRESSED IN BONE MARROW, SIGNAL = 9.5; EXPRESSED IN BRAIN, SIGNAL =  10; EXPRESSED IN FETAL LIVER, SIGNAL = 8.7; EXPRESSED IN HEART, SIGNAL = 6.8; EXPRESSED IN HELA, SIGNAL =  11; EXPRESSED IN ADULT LIVER, SIGNAL = 9.8; EXPRESSED IN PLACENTA, SIGNAL = 6.1; NT HIT: AL163210.2, EVALUE 8.00e-32; EST_HUMAN HIT: AV653028.1, EVALUE 6.00e-40; SWISSPROT HIT: P02849, EVALUE 1.10e-01
atgccgagaagagcagaggacagaaagaaagaaagaccggcccaccacgagacgaatagaggcagggacccagagcagaccacaaggacgacaagaacgaacgagggcgaaacagacagaacggacaagagaaggaagcacaacgccacaaccaccacgcagcgaggatggcggatagcagggcgaagcgccgaagatagcgcgacggccaacaagagctgggggaacaagggtatactgtgcacctggaaaagccacagtcactcaacaccagcccgtgaaagcagccaggagggagtctgtatcctgcaaagccagagtggcggagctgcccaagaccatgggaacccacttcttggatcagcgtga

SEQ ID NO: 24436 - DNA, 118 bp, Homo sapiens
  MAP TO AC027304.1; EXPRESSED IN LUNG, SIGNAL = 2.5; EXPRESSED IN HEART, SIGNAL = 1.9; EXPRESSED IN BONE MARROW, SIGNAL = 2.2; EXPRESSED IN BRAIN, SIGNAL = 2.3; EXPRESSED IN FETAL LIVER, SIGNAL = 2.7; EXPRESSED IN HELA, SIGNAL = 4.1; EXPRESSED IN ADULT LIVER, SIGNAL = 2.5; EXPRESSED IN PLACENTA, SIGNAL = 1.8; SWISSPROT HIT: O35464, EVALUE 1.00e-15; EST_HUMAN HIT: AI384100.1, EVALUE 3.00e-60; NT HIT: gi11991659, EVALUE 2.00e-60
atacaaaacagtatccggtgtttgtgggccacaagccaggacggaacaccacacagaggcacaggctggacatccagatgattatgatcatgaacggaaccctctacattgctgctag

SEQ ID NO: 24437 - DNA, 165 bp, Homo sapiens
  MAP TO AC012405.4; EXPRESSED IN PLACENTA, SIGNAL = 3.3; EXPRESSED IN ADULT LIVER, SIGNAL = 4.1; EXPRESSED IN HELA, SIGNAL = 5.7; EXPRESSED IN HEART, SIGNAL = 3.1; EXPRESSED IN FETAL LIVER, SIGNAL = 3.7; EXPRESSED IN BRAIN, SIGNAL = 3.5; EXPRESSED IN LUNG, SIGNAL = 3.9; EXPRESSED IN BONE MARROW, SIGNAL =   4; NT HIT: AJ271735.1, EVALUE 9.60e-02; SWISSPROT HIT: P15533, EVALUE 1.80e+00; EST_HUMAN HIT: AL048507.2, EVALUE 6.00e-04
atggcagaaggtcagaagagctacataaacaggagtttggaaggagttccaactctcattgataactttgaggggttcaagatgttgtcactagaggaagtaactacagatgtggtagaaatattaatagaaagcaaactagaattagaaatggagcctgaagat

SEQ ID NO: 24438 - DNA, 117 bp, Homo sapiens
  MAP TO AC013657.3; EXPRESSED IN PLACENTA, SIGNAL = 2.8; EXPRESSED IN HEART, SIGNAL =   3; EXPRESSED IN FETAL LIVER, SIGNAL = 2.9; EXPRESSED IN BONE MARROW, SIGNAL = 2.8; EXPRESSED IN LUNG, SIGNAL = 3.3; EXPRESSED IN ADULT LIVER, SIGNAL = 3.3; EXPRESSED IN HELA, SIGNAL =   4; EXPRESSED IN BRAIN, SIGNAL = 2.7; NT HIT: M17466.1, EVALUE 6.50e-02; EST_HUMAN HIT: AA493894.1, EVALUE 2.40e-02
atagggctgataggatttgttgatgggttggagatgcagagtgagagggagttgctgatgctgccaagggccctggccccagctgtgtggtgattccgcttatggaggtaggagaag

SEQ ID NO: 24439 - DNA, 128 bp, Homo sapiens
  MAP TO AC012571.3; EXPRESSED IN LUNG, SIGNAL =   3; EXPRESSED IN ADULT LIVER, SIGNAL = 2.6; EXPRESSED IN HELA, SIGNAL = 3.3; EXPRESSED IN HEART, SIGNAL =   3; EXPRESSED IN BRAIN, SIGNAL = 3.4; EXPRESSED IN PLACENTA, SIGNAL = 2.8; EXPRESSED IN FETAL LIVER, SIGNAL = 3.3; EXPRESSED IN BONE MARROW, SIGNAL = 3.4; SWISSPROT HIT: P48610, EVALUE 7.00e+00
ctgactcaccaaattttcggtcgtctctcgtaagtccttaagttgatatgtgttgctttgtccgaaattgttattgatttgtggatctaaaattttaaaggagccatgatagtactcctttttttggt

SEQ ID NO: 24440 - DNA, 267 bp, Homo sapiens
  MAP TO AC009334.3; EXPRESSED IN HEART, SIGNAL = 1.9; EXPRESSED IN BONE MARROW, SIGNAL = 0.63; EXPRESSED IN PLACENTA, SIGNAL = 0.59; EXPRESSED IN FETAL LIVER, SIGNAL = 0.5; NT HIT: gi11427235, EVALUE 0.00e+00; SWISSPROT HIT: Q99698, EVALUE 1.00e-42
atgaaaatatttgtatttcaggaaagtctttcagttgtttatacaacttactgtcctgctcagtataccatctatgaaccagtgattagacttaaaggtcaaatgaaaacccaactctctcaaagacccttcagctcaaaagaagttcagagcatcttattagaacctcatcatctaaagaatctccaacctactgaatataaaactattcaaggcattctgcacgaaattggtggaactggcatatttgtttttctctttgccagg

SEQ ID NO: 24441 - DNA, 126 bp, Homo sapiens
  MAP TO AC015999.3; EXPRESSED IN LUNG, SIGNAL =  10; EXPRESSED IN ADULT LIVER, SIGNAL =  13; EXPRESSED IN HELA, SIGNAL =  18; EXPRESSED IN HEART, SIGNAL = 8.1; EXPRESSED IN BRAIN, SIGNAL =  11; EXPRESSED IN PLACENTA, SIGNAL = 8.3; EXPRESSED IN FETAL LIVER, SIGNAL =  11; EXPRESSED IN BONE MARROW, SIGNAL =  14; NT HIT: AF003528.1, EVALUE 8.00e-08; EST_HUMAN HIT: BE165980.1, EVALUE 2.00e-12
agattggagcaattcagtcccatcttcagtcttcacttctaattctagttctcttgttatttccaccacaagagaattggtaatcacttcctccaccaaagtgttgaacccctcaaagttatccat

SEQ ID NO: 24442 - DNA, 159 bp, Homo sapiens
  MAP TO AC015756.4; EXPRESSED IN LUNG, SIGNAL =   2; EXPRESSED IN PLACENTA, SIGNAL = 2.7; EXPRESSED IN ADULT LIVER, SIGNAL = 2.4; EXPRESSED IN HEART, SIGNAL =   2; EXPRESSED IN FETAL LIVER, SIGNAL =   2; EXPRESSED IN BRAIN, SIGNAL = 2.1; EXPRESSED IN HELA, SIGNAL = 2.4; EXPRESSED IN BONE MARROW, SIGNAL = 1.9; EST_HUMAN HIT: BF572536.1, EVALUE 5.40e-01; NT HIT: M15545.1, EVALUE 1.40e+00; SWISSPROT HIT: P12394, EVALUE 5.20e+00
aacgtactgtcaatgagctttgttttggtccaaatattgatgcagcaagtgttcgtcagcaagtctgagccctggttccagcagcgtgttgagggattccaacactttgggccaatagtcagacttcgttatgacttcctgctcctctccaaaggcctg

SEQ ID NO: 24443 - DNA, 147 bp, Homo sapiens
  MAP TO AC019278.3; EXPRESSED IN LUNG, SIGNAL = 1.8; EXPRESSED IN ADULT LIVER, SIGNAL = 1.6; EXPRESSED IN BRAIN, SIGNAL = 2.3; EXPRESSED IN BONE MARROW, SIGNAL = 2.1; EXPRESSED IN PLACENTA, SIGNAL = 2.1; EXPRESSED IN HEART, SIGNAL = 2.1; EXPRESSED IN FETAL LIVER, SIGNAL = 2.2; NT HIT: L41044.1, EVALUE 3.30e-01; SWISSPROT HIT: P31644, EVALUE 9.00e+00
ttaatcctcaacaaactttcgaaagatctctgttatttccattttctctatgaaggacctgcccaaagtcagatggatagtaaccttcctgaattcaaggcctatactttgtcgactatttctcatgagggaaaaaaaagccatatc

SEQ ID NO: 24444 - DNA, 107 bp, Homo sapiens
  MAP TO AC025539.2; EXPRESSED IN ADULT LIVER, SIGNAL = 2.6; EXPRESSED IN FETAL LIVER, SIGNAL = 1.9; EXPRESSED IN BRAIN, SIGNAL = 2.8; EXPRESSED IN BONE MARROW, SIGNAL = 2.3; EXPRESSED IN LUNG, SIGNAL = 2.7; EXPRESSED IN PLACENTA, SIGNAL = 2.5; EXPRESSED IN HEART, SIGNAL = 2.3; NT HIT: AJ293261.1, EVALUE 2.30e-01; SWISSPROT HIT: P57027, EVALUE 9.40e+00; EST_HUMAN HIT: R73702.1, EVALUE 3.40e-01
ctagctgcttattgccttccagtccacctctgccttctggccgatcctcccctccaggtggctaaagtgccacagtgtcccaaagcagccgatgtcatcactctgct

SEQ ID NO: 24445 - DNA, 141 bp, Homo sapiens
  MAP TO AC006319.3; EXPRESSED IN ADULT LIVER, SIGNAL = 3.2; EXPRESSED IN FETAL LIVER, SIGNAL = 3.2; EXPRESSED IN BRAIN, SIGNAL = 3.3; EXPRESSED IN BONE MARROW, SIGNAL = 3.4; EXPRESSED IN LUNG, SIGNAL =   4; EXPRESSED IN PLACENTA, SIGNAL = 4.3; EXPRESSED IN HELA, SIGNAL = 2.7; EXPRESSED IN HEART, SIGNAL =   3; NT HIT: U44914.1, EVALUE 3.20e-01; SWISSPROT HIT: O14400, EVALUE 9.10e+00; EST_HUMAN HIT: BF341718.1, EVALUE 1.90e+00
ctacacaccacactgttctcttccatacagctcttgctgtaagttgacgtcccaagttttgcttatctttttactctgccaggggataactactactactttattctgcattagactttcaaatagatcaccttcccctat

SEQ ID NO: 24446 - DNA, 313 bp, Homo sapiens
  MAP TO AL121901.10; EXPRESSED IN PLACENTA, SIGNAL = 1.4; EXPRESSED IN ADULT LIVER, SIGNAL = 1.4; EXPRESSED IN BRAIN, SIGNAL = 1.3; EXPRESSED IN BONE MARROW, SIGNAL = 1.2; EXPRESSED IN LUNG, SIGNAL = 1.3; EXPRESSED IN HEART, SIGNAL = 1.5; EXPRESSED IN FETAL LIVER, SIGNAL = 1.3; SWISSPROT HIT: P51989, EVALUE 3.00e-03; EST_HUMAN HIT: AV714154.1, EVALUE 2.90e-01
gttcaatgaattctcagaccggcaataggtttcctagtggttatggtcaaactgaggctgggcaatctggtggctacgatcagtttgggacagggtcatttggaaggtatggtcagtctgaggcagggtcaataaatgttcaatctgggtctagaccatctaatggtatgggtcaacttggagcagagtcaatgaacagtcagcctggggctaaaccatctggtagccatggtcagtttgggacagggtcattaggagcgtatagtcagtctgggtctggatcatctggttctttgggtcgatctggagcagg

SEQ ID NO: 24447 - DNA, 91 bp, Homo sapiens
  MAP TO AL133405.9; EXPRESSED IN HEART, SIGNAL = 3.3; EXPRESSED IN BONE MARROW, SIGNAL = 3.9; EXPRESSED IN ADULT LIVER, SIGNAL = 4.2; EXPRESSED IN FETAL LIVER, SIGNAL = 3.2; EXPRESSED IN BRAIN, SIGNAL = 3.6; EXPRESSED IN LUNG, SIGNAL = 3.6; EXPRESSED IN PLACENTA, SIGNAL = 3.8; EXPRESSED IN HELA, SIGNAL = 2.8; NT HIT: AF003528.1, EVALUE 4.00e-30; EST_HUMAN HIT: AW971568.1, EVALUE 2.00e-30
ctttctgtggtgcctccttgaatagcttaataattgaccttctgaattcttcttctggcaattcagagatttcttcttggtttggatccat

SEQ ID NO: 24448 - DNA, 140 bp, Homo sapiens
  MAP TO AL133417.9; EXPRESSED IN PLACENTA, SIGNAL =  21; EXPRESSED IN HELA, SIGNAL =  23; EXPRESSED IN LUNG, SIGNAL =  22; EXPRESSED IN ADULT LIVER, SIGNAL =  20; EXPRESSED IN BRAIN, SIGNAL =  18; EXPRESSED IN BONE MARROW, SIGNAL =  21; EXPRESSED IN HEART, SIGNAL =  20; EXPRESSED IN FETAL LIVER, SIGNAL =  19; NT HIT: gi6754021, EVALUE 1.10e+00; EST_HUMAN HIT: AW936241.1, EVALUE 1.30e+00
gatgacactgtcatccagtcacatggcctcaatgccaagtatagattcgtgattcctaactttgtatttctagccaggacatctcctcaccccttcaggctccccacacctccagctgcctacatgacatttctgcctgg

SEQ ID NO: 24449 - DNA, 211 bp, Homo sapiens
  MAP TO AL121895.18; EXPRESSED IN LUNG, SIGNAL = 2.1; EXPRESSED IN HEART, SIGNAL = 1.9; EXPRESSED IN BONE MARROW, SIGNAL = 1.7; EXPRESSED IN FETAL LIVER, SIGNAL = 2.1; EXPRESSED IN PLACENTA, SIGNAL = 2.1; EXPRESSED IN ADULT LIVER, SIGNAL = 2.1; EXPRESSED IN BRAIN, SIGNAL = 2.2; SWISSPROT HIT: P48193, EVALUE 3.00e-24; EST_HUMAN HIT: BF347885.1, EVALUE 1.00e-113; NT HIT: AB002336.1, EVALUE 1.00e-115
ctatatgtcttatgcagctccatgatcctctcctccagctcccgggtctggttaggggcgaagcggagctcgctgacatagttgcccacatgctcctcagcatcatagtcacccagctcagcctgcacagcgtaggagcccagtagggcatgcgtgacaaaggagcatggcagccggcccgtgatgatgtctgcccgcagctgcaggcaca

SEQ ID NO: 24450 - DNA, 91 bp, Homo sapiens
  MAP TO AL162171.1; EXPRESSED IN PLACENTA, SIGNAL = 2.3; EXPRESSED IN HELA, SIGNAL = 2.4; EXPRESSED IN LUNG, SIGNAL = 2.5; EXPRESSED IN ADULT LIVER, SIGNAL = 2.4; EXPRESSED IN BRAIN, SIGNAL = 2.5; EXPRESSED IN BONE MARROW, SIGNAL = 2.3; EXPRESSED IN HEART, SIGNAL = 2.6; EXPRESSED IN FETAL LIVER, SIGNAL = 2.7; NT HIT: Z26269.1, EVALUE 1.90e-01; EST_HUMAN HIT: AW873187.1, EVALUE 7.20e-02
taaccctgttgggcacaattattactatcccattattgatgaaggtatggagacttacagaagtgaaatgtcttgccctgccacacaacta

SEQ ID NO: 24451 - DNA, 146 bp, Homo sapiens
  MAP TO AL121772.12; EXPRESSED IN LUNG, SIGNAL = 1.6; EXPRESSED IN PLACENTA, SIGNAL = 0.9; EXPRESSED IN FETAL LIVER, SIGNAL = 2.7; EXPRESSED IN BRAIN, SIGNAL = 1.6; EXPRESSED IN BONE MARROW, SIGNAL = 1.6; EXPRESSED IN ADULT LIVER, SIGNAL = 1.5; EXPRESSED IN HELA, SIGNAL = 2.3; EXPRESSED IN HEART, SIGNAL = 1.5; SWISSPROT HIT: P47969, EVALUE 2.30e+00; EST_HUMAN HIT: AV710857.1, EVALUE 1.20e-01
ctctttcttccttaattgtaaatgaataacggtagtcgtgtttatggagtgcttgctgtgtgtcaggcatgatgcggactggactgtgcgttgtgtggtcagagattgaatcctcagcctcaaagtaggtaccgtgcatctccgcc

SEQ ID NO: 24452 - DNA, 137 bp, Homo sapiens
  MAP TO AC006038.2; EXPRESSED IN PLACENTA, SIGNAL = 6.2; EXPRESSED IN ADULT LIVER, SIGNAL = 7.8; EXPRESSED IN FETAL LIVER, SIGNAL = 7.1; EXPRESSED IN BRAIN, SIGNAL = 7.9; EXPRESSED IN LUNG, SIGNAL = 7.1; EXPRESSED IN HELA, SIGNAL = 6.3; EXPRESSED IN HEART, SIGNAL = 6.5; EXPRESSED IN BONE MARROW, SIGNAL = 9.5; NT HIT: AY007643.1, EVALUE 1.00e-71; SWISSPROT HIT: O14548, EVALUE 2.00e-19; EST_HUMAN HIT: BF131304.1, EVALUE 2.00e-71
ctgatggtgtgcccgtctacctgaaacgaggcctgcctgaccaaatgctttaccggaccaccatggcgctgactgtgggagggaccatctactgcctgatcgccctctacatggcttcgcagcccaaaaacaaatga

SEQ ID NO: 24453 - DNA, 108 bp, Homo sapiens
  MAP TO AL161450.2; EXPRESSED IN ADULT LIVER, SIGNAL = 1.2; EXPRESSED IN PLACENTA, SIGNAL = 1.1; EXPRESSED IN FETAL LIVER, SIGNAL = 1.4; EXPRESSED IN BRAIN, SIGNAL = 0.79; EXPRESSED IN LUNG, SIGNAL = 1.3; EXPRESSED IN HEART, SIGNAL = 1.3; EXPRESSED IN BONE MARROW, SIGNAL = 1.6; SWISSPROT HIT: O60674, EVALUE 2.00e-15; NT HIT: gi11429127, EVALUE 2.00e-54; EST_HUMAN HIT: AV729875.1, EVALUE 3.00e-54
tcatccagccatgttatcccttatttgatccactcgaagagctagatccctaaaggaggggcgttgatttacattattgttccagcattctgtcatgatcatatagat

SEQ ID NO: 24454 - DNA, 112 bp, Homo sapiens
  MAP TO AC012429.4; EXPRESSED IN HEART, SIGNAL = 1.2; EXPRESSED IN LUNG, SIGNAL = 1.3; EXPRESSED IN ADULT LIVER, SIGNAL = 1.6; EXPRESSED IN BRAIN, SIGNAL = 1.1; EXPRESSED IN BONE MARROW, SIGNAL = 1.7; EXPRESSED IN PLACENTA, SIGNAL =   2; EXPRESSED IN FETAL LIVER, SIGNAL = 1.7; EST_HUMAN HIT: BF248349.1, EVALUE 9.10e-02; NT HIT: gi6755609, EVALUE 6.00e-33; SWISSPROT HIT: P40645, EVALUE 5.00e-14
atgaccagtgttacttttggaaccccagagcgccgcaaagggagtcttgccgatgtggtggacacactgaaacagaagaagcttgaggaaatgactcggactgaacaagagg

SEQ ID NO: 24455 - DNA, 151 bp, Homo sapiens
  MAP TO AL158049.2; EXPRESSED IN LUNG, SIGNAL = 1.5; EXPRESSED IN BRAIN, SIGNAL = 1.1; EXPRESSED IN BONE MARROW, SIGNAL =   1; EXPRESSED IN HEART, SIGNAL = 1.3; EXPRESSED IN PLACENTA, SIGNAL = 1.3; EXPRESSED IN ADULT LIVER, SIGNAL = 1.2; EXPRESSED IN FETAL LIVER, SIGNAL = 1.3; SWISSPROT HIT: Q03712, EVALUE 5.30e-02; NT HIT: AF079236.1, EVALUE 3.40e-01; EST_HUMAN HIT: BE798603.1, EVALUE 9.00e-80
gaggcgcatgaagcgtgtctgggaccgagctgtggagttcctggcctccaacgaatcccggatccagacggagtcccaccgcgttgcaggagaggacatgctggtgtggagatggactaagccctcttccttctctgactcagagcgataa

SEQ ID NO: 24456 - DNA, 114 bp, Homo sapiens
  MAP TO AC026213.2; EXPRESSED IN HELA, SIGNAL = 5.2; EXPRESSED IN BONE MARROW, SIGNAL =   3; EXPRESSED IN BRAIN, SIGNAL = 2.6; EXPRESSED IN FETAL LIVER, SIGNAL = 2.9; EXPRESSED IN HEART, SIGNAL = 3.1; EXPRESSED IN ADULT LIVER, SIGNAL = 3.8; EXPRESSED IN PLACENTA, SIGNAL = 3.5; EXPRESSED IN LUNG, SIGNAL = 3.8; EST_HUMAN HIT: AW075816.1, EVALUE 3.70e-01; NT HIT: AB010162.1, EVALUE 6.30e-02; SWISSPROT HIT: Q9T1W1, EVALUE 7.10e+00
caatatcttcgtttttttgcctgaattcccacaaaagctttccaataaatttccctgcttccagccttgctccatttccaacccatccttcatgatgacatcaatgtgattttg

SEQ ID NO: 24457 - DNA, 266 bp, Homo sapiens
  MAP TO AL133284.7; EXPRESSED IN ADULT LIVER, SIGNAL = 6.1; EXPRESSED IN FETAL LIVER, SIGNAL = 6.8; EXPRESSED IN BRAIN, SIGNAL =   7; EXPRESSED IN PLACENTA, SIGNAL =   6; EXPRESSED IN BONE MARROW, SIGNAL = 7.1; EXPRESSED IN LUNG, SIGNAL = 6.9; EXPRESSED IN HELA, SIGNAL = 3.3; EXPRESSED IN HEART, SIGNAL =   6; NT HIT: AB014534.1, EVALUE 0.00e+00; SWISSPROT HIT: Q61137, EVALUE 2.00e-09; EST_HUMAN HIT: AU143673.1, EVALUE 0.00e+00
agaccacagagctgggcagcaagaaggagctcaagtccatgcccttcatcacctacctctcaggtttgctgacagcccagatgctgtcagatgaccagctcatttcaggtgtggagattcgctgtgaggagaaggggcgctgtccatctacctgtcacctttgccgccggccaggcaaggagcagctgagccccacaccagtgctgctggaaatcaaccgtgtggtgccactttataccctcatccaagacaatggcacaaaggag

SEQ ID NO: 24458 - DNA, 209 bp, Homo sapiens
  MAP TO AC007595.3; EXPRESSED IN LUNG, SIGNAL = 2.2; EXPRESSED IN PLACENTA, SIGNAL = 2.1; EXPRESSED IN ADULT LIVER, SIGNAL = 2.1; EXPRESSED IN BRAIN, SIGNAL = 1.8; EXPRESSED IN FETAL LIVER, SIGNAL = 2.4; EXPRESSED IN HEART, SIGNAL = 1.7; EXPRESSED IN BONE MARROW, SIGNAL = 2.7; SWISSPROT HIT: O02697, EVALUE 3.30e-01; NT HIT: AJ297131.1, EVALUE 3.20e-02; EST_HUMAN HIT: AA405777.1, EVALUE 2.00e-04
accataggggttgtacccccctcgcaatattgtccgtaatattcaggaaggaagaggatgatgttactctccatatcgcagtaggtgtacagtcccctgcaatattgtccgtaatatccagggtggaagaatgtattgcagaatgtatacacccccttgtgacatatttcataatatccaggggtgaagaggatgatattactccccat

SEQ ID NO: 24459 - DNA, 228 bp, Homo sapiens
  MAP TO AC008065.3; EXPRESSED IN ADULT LIVER, SIGNAL = 1.7; EXPRESSED IN HEART, SIGNAL = 1.7; EXPRESSED IN FETAL LIVER, SIGNAL = 2.4; EXPRESSED IN BRAIN, SIGNAL = 1.5; EXPRESSED IN BONE MARROW, SIGNAL =   2; EXPRESSED IN LUNG, SIGNAL = 1.3; EXPRESSED IN PLACENTA, SIGNAL = 0.94; EST_HUMAN HIT: BF213797.1, EVALUE 5.20e-02; SWISSPROT HIT: P26300, EVALUE 2.30e+00; NT HIT: X76642.1, EVALUE 3.50e-02
aacactgatagtcttatgtggaacattggcaggcaaaaagaacaaaggcacatcagggtaaaggtggtggtaggtggagcatttcatttcatttgcctccaccaaagagcttgcatttactggagaaggaaaacaaataagaaacaggagcatctgcacttgctgttgaaggtttcatttcttatcactgttaagtcacatttgaatggaaccattacagtcttgttg

SEQ ID NO: 24460 - DNA, 264 bp, Homo sapiens
  MAP TO AL133414.3; EXPRESSED IN LUNG, SIGNAL = 6.6; EXPRESSED IN ADULT LIVER, SIGNAL = 4.2; EXPRESSED IN HEART, SIGNAL = 7.5; EXPRESSED IN BRAIN, SIGNAL =   3; EXPRESSED IN BONE MARROW, SIGNAL =  13; EXPRESSED IN PLACENTA, SIGNAL = 3.3; EXPRESSED IN HELA, SIGNAL = 3.6; EXPRESSED IN FETAL LIVER, SIGNAL = 3.4; EST_HUMAN HIT: AW951147.1, EVALUE 2.00e-60; NT HIT: AF072408.1, EVALUE 0.00e+00; SWISSPROT HIT: P43630, EVALUE 1.00e-35
gtcccctggtgaaatcgggagagacggtcatcctgcaatgttggtcagatgtcaggtttgagcgcttccttctgcacagagaggggatcactgaggaccccttgcgcctcattggacagctccacgatgcgggttcccaggtcaactattccatgggtcccatgacacctgcccttgcagggacctacagatgctttggttctgtcactcacttaccctatgagttgtcggctcccagtgaccctctggacatcgtggtcgtag

SEQ ID NO: 24461 - DNA, 100 bp, Homo sapiens
  MAP TO AL135936.10; EXPRESSED IN FETAL LIVER, SIGNAL = 4.3; EXPRESSED IN PLACENTA, SIGNAL = 4.4; EXPRESSED IN ADULT LIVER, SIGNAL = 4.8; EXPRESSED IN HEART, SIGNAL = 4.6; EXPRESSED IN BONE MARROW, SIGNAL = 5.3; EXPRESSED IN BRAIN, SIGNAL = 4.9; EXPRESSED IN LUNG, SIGNAL = 4.6; EXPRESSED IN HELA, SIGNAL = 3.3; NT HIT: AF153715.1, EVALUE 6.00e-11; EST_HUMAN HIT: AI289831.1, EVALUE 4.00e-13
atgagtaaaatacagacatcattggagagcttcttcgtagagggggaaatacccagtgatgagacagcagaagactctaagactgccaacaaaaagaaag

SEQ ID NO: 24462 - DNA, 386 bp, Homo sapiens
  MAP TO AL121914.16; EXPRESSED IN FETAL LIVER, SIGNAL = 2.5; EXPRESSED IN PLACENTA, SIGNAL = 2.8; EXPRESSED IN ADULT LIVER, SIGNAL = 2.4; EXPRESSED IN BRAIN, SIGNAL = 2.7; EXPRESSED IN BONE MARROW, SIGNAL = 2.8; EXPRESSED IN HEART, SIGNAL = 2.5; EXPRESSED IN LUNG, SIGNAL = 2.9; EXPRESSED IN HELA, SIGNAL = 2.5; NT HIT: gi11421001, EVALUE 0.00e+00; SWISSPROT HIT: Q14511, EVALUE 3.00e-13; EST_HUMAN HIT: AA588030.1, EVALUE 3.60e-01
aatcctggccctcttatacctcagccttcgagtcaacagactcctgagaggaaaccccgcttatctgaacactgccggctctactttggggcgctcttcaaagccatcagcgcatttcacggcagcctcagcagcagccagcccgcggagatcatcactcagagcaagctggtcatcatggtgggacagaagctggtggacacgctgtgcatggagacccaggagagggacgtgcgcaacgagatcctccgtggcagcagtcacctctgcagcctgctcaaggacgtagcgctggccactaagaatgccgtgctcacgtaccccagccctgccgcgctggggcacctccaggcggaggctgagaagctggagcaacacacgcggca

SEQ ID NO: 24463 - DNA, 180 bp, Homo sapiens
  MAP TO AL133395.14; EXPRESSED IN PLACENTA, SIGNAL = 5.5; EXPRESSED IN BONE MARROW, SIGNAL = 6.7; EXPRESSED IN LUNG, SIGNAL = 6.5; EXPRESSED IN HELA, SIGNAL =   4; EXPRESSED IN ADULT LIVER, SIGNAL = 5.9; EXPRESSED IN HEART, SIGNAL = 5.6; EXPRESSED IN FETAL LIVER, SIGNAL = 5.8; EXPRESSED IN BRAIN, SIGNAL = 6.4; NT HIT: AF137367.1, EVALUE 3.00e-54; EST_HUMAN HIT: D81625.1, EVALUE 4.00e-76; SWISSPROT HIT: O31500, EVALUE 6.80e-02
ggtgatgttcagcggacactcatccaagtggactttggcgatggtatcgcggtgtcttacgtcaatctcagctccatggaagatgggatcaaacacgtctatcagaacgtgggcattttccgtgtgaccgtgcaggtggacaacagtctgggttctgacagcgccgtcctgtacttacat

SEQ ID NO: 24464 - DNA, 171 bp, Homo sapiens
  MAP TO AC011859.4; EXPRESSED IN HEART, SIGNAL = 1.3; EXPRESSED IN BRAIN, SIGNAL = 1.2; EXPRESSED IN BONE MARROW, SIGNAL = 1.9; EXPRESSED IN LUNG, SIGNAL = 1.2; EXPRESSED IN PLACENTA, SIGNAL = 0.91; EXPRESSED IN ADULT LIVER, SIGNAL = 1.1; EXPRESSED IN FETAL LIVER, SIGNAL = 1.8; NT HIT: Y13829.1, EVALUE 8.00e-92; SWISSPROT HIT: P28010, EVALUE 2.30e+00; EST_HUMAN HIT: D31587.1, EVALUE 2.00e-87
cacgggttgtaatggggcaccaggcatcatggcattggctagttgcatttgctgggccaacatggccatgttcttctgctgaatcaagttattgcgtccatttatctccaactgcgtttttaaatgtgggggtggatgaagatatttgcagttctccctggagcaacggcc

SEQ ID NO: 24465 - DNA, 219 bp, Homo sapiens
  MAP TO AL121935.12; EXPRESSED IN LUNG, SIGNAL = 1.3; EXPRESSED IN PLACENTA, SIGNAL = 1.3; EXPRESSED IN HEART, SIGNAL = 1.3; EXPRESSED IN BONE MARROW, SIGNAL = 1.8; EXPRESSED IN ADULT LIVER, SIGNAL = 1.3; EXPRESSED IN FETAL LIVER, SIGNAL = 1.7; EXPRESSED IN BRAIN, SIGNAL = 1.4; EST_HUMAN HIT: BF222920.1, EVALUE 3.10e+00; NT HIT: AF143952.2, EVALUE 5.20e-01; SWISSPROT HIT: P45631, EVALUE 1.60e+00
catggcaagaacagccacaaattcctctacaagaaattacgggaaatcttggaagtcattcccagtcttcgggagctctgcgagagttttgtttccgtggagatggcttctgctgcctcagaaagaaagcgggtttatcctctcagcacagcaaagtgcccagtccttctgccgaacgacgagtggaagccgggcaggctgttcctccgtcagaggtag

SEQ ID NO: 24466 - DNA, 339 bp, Homo sapiens
  MAP TO AL121895.18; EXPRESSED IN BONE MARROW, SIGNAL = 4.9; EXPRESSED IN LUNG, SIGNAL =   6; EXPRESSED IN ADULT LIVER, SIGNAL = 6.1; EXPRESSED IN HEART, SIGNAL = 5.7; EXPRESSED IN BRAIN, SIGNAL = 4.2; EXPRESSED IN PLACENTA, SIGNAL = 5.6; EXPRESSED IN HELA, SIGNAL = 7.7; EXPRESSED IN FETAL LIVER, SIGNAL = 4.7; EST_HUMAN HIT: AI081644.1, EVALUE 7.90e-02; SWISSPROT HIT: O32961, EVALUE 3.00e+00; NT HIT: M25161.1, EVALUE 3.30e+00
cgagtaagcagtggaaccaggactagaagtctgcgtggcttctgccttccagtttcccaggaagcctcccttgagaaaggtagaaaaggcggcagaagtgaggctgggatttgggggtatgggggtaaggacagggcagcactgcctcctcaggcctgctccaccccagctcccagccatcgcactgctcatgggtgtggccaaacctgccaaaccagtctctgtgccagagctgagtagcaaagcccagagcttcaggggtgtgggtgaggcggtagacaccaagaaccaggaaggacacagaaaggctcttccagggcctgctagcctaggccacat

SEQ ID NO: 24467 - DNA, 120 bp, Homo sapiens
  MAP TO AC008269.3; EXPRESSED IN ADULT LIVER, SIGNAL = 5.1; EXPRESSED IN LUNG, SIGNAL = 5.8; EXPRESSED IN PLACENTA, SIGNAL = 4.8; EXPRESSED IN HELA, SIGNAL =  12; EXPRESSED IN FETAL LIVER, SIGNAL = 5.8; EXPRESSED IN BRAIN, SIGNAL = 5.2; EXPRESSED IN HEART, SIGNAL = 6.3; EXPRESSED IN BONE MARROW, SIGNAL = 5.6; EST_HUMAN HIT: AW754010.1, EVALUE 5.00e-59; NT HIT: gi11428892, EVALUE 1.00e-61
gaccaccttactgcattcatccaggagtataagagatcggtgattcatggcagctagtacttcaaacatgtgttggctattcaaaacagaaaatctgtctaattccctcaaggctttcat

SEQ ID NO: 24468 - DNA, 156 bp, Homo sapiens
  MAP TO AC022918.2; EXPRESSED IN PLACENTA, SIGNAL = 1.4; EXPRESSED IN FETAL LIVER, SIGNAL = 1.4; EXPRESSED IN HELA, SIGNAL = 2.2; EXPRESSED IN HEART, SIGNAL = 1.5; EXPRESSED IN BRAIN, SIGNAL = 1.3; EXPRESSED IN BONE MARROW, SIGNAL = 1.5; EXPRESSED IN ADULT LIVER, SIGNAL = 1.6; EXPRESSED IN LUNG, SIGNAL = 1.4; SWISSPROT HIT: P44023, EVALUE 1.60e-01; NT HIT: AE000199.1, EVALUE 2.30e-02
aattcacaggtctgccagacaccagcttattcaaatgatcaagcacagcatcaccaacagtagaacaaactaaccttaggtgtctctctagtggtgcaatgagactaactgacaacgccttggtagaagcatctgtgtgtctaaaatcaatcttat

SEQ ID NO: 24469 - DNA, 203 bp, Homo sapiens
  MAP TO AL136300.5; EXPRESSED IN ADULT LIVER, SIGNAL = 2.6; EXPRESSED IN BRAIN, SIGNAL = 2.9; EXPRESSED IN LUNG, SIGNAL =   3; EXPRESSED IN PLACENTA, SIGNAL = 2.7; EXPRESSED IN FETAL LIVER, SIGNAL = 3.6; EXPRESSED IN HEART, SIGNAL = 2.6; EXPRESSED IN BONE MARROW, SIGNAL = 2.5; SWISSPROT HIT: P11657, EVALUE 7.50e-01; EST_HUMAN HIT: AI268033.1, EVALUE 7.10e-01; NT HIT: AF034779.1, EVALUE 3.10e-02
tcaacctagaatatcatctatctgcacatttaatattgttaggaactttgtgaggaacttattaatcaggggtttgtgatcttcctttgtaatcttaactggagtgtttggttctctaacatcaggtgctagcaggggccaagatggatccaagtggagtgagctgtttggaaatatcaggatatggggaaaccagcgatttt

SEQ ID NO: 24470 - DNA, 147 bp, Homo sapiens
  MAP TO AL162311.1; EXPRESSED IN FETAL LIVER, SIGNAL = 4.5; EXPRESSED IN LUNG, SIGNAL = 2.5; EXPRESSED IN PLACENTA, SIGNAL = 2.6; EXPRESSED IN ADULT LIVER, SIGNAL = 2.8; EXPRESSED IN BRAIN, SIGNAL = 3.4; EXPRESSED IN BONE MARROW, SIGNAL = 4.8; EXPRESSED IN HELA, SIGNAL = 4.7; EXPRESSED IN HEART, SIGNAL = 2.1; EST_HUMAN HIT: BE799537.1, EVALUE 1.00e-63; NT HIT: Y07848.1, EVALUE 7.00e-64
gtgcagtggctgctggctgctgcccataggctgggtaagcaggctgagtgccatatgcagactgagcagcttggaggcctgggtggtggtgactgtagcagtggtggtatcataagcaccagtgccacacccctggacaggctggct

SEQ ID NO: 24471 - DNA, 157 bp, Homo sapiens
  MAP TO AC009466.2; EXPRESSED IN PLACENTA, SIGNAL = 3.2; EXPRESSED IN HEART, SIGNAL = 3.3; EXPRESSED IN BONE MARROW, SIGNAL = 2.5; EXPRESSED IN LUNG, SIGNAL = 2.4; EXPRESSED IN ADULT LIVER, SIGNAL = 2.2; EXPRESSED IN FETAL LIVER, SIGNAL = 2.4; EXPRESSED IN BRAIN, SIGNAL =   4; EST_HUMAN HIT: AA984078.1, EVALUE 6.00e-81; SWISSPROT HIT: P13592, EVALUE 1.00e-26; NT HIT: M22094.1, EVALUE 2.00e-83
cttccttggcatcataccacttggaatgccatacttcttcaccaactgctctccactcagctttgtatttgaggatgggcaccccacctgtggcctctggttcatcaaactgcacctgggctgtgctggagtatggctccacctggtcgatggatgg

SEQ ID NO: 24472 - DNA, 107 bp, Homo sapiens
  MAP TO AC025826.1; EXPRESSED IN PLACENTA, SIGNAL = 1.4; EXPRESSED IN ADULT LIVER, SIGNAL = 1.1; EXPRESSED IN HEART, SIGNAL = 1.2; EXPRESSED IN FETAL LIVER, SIGNAL =   1; EXPRESSED IN BRAIN, SIGNAL = 1.3; EXPRESSED IN BONE MARROW, SIGNAL = 1.3; EXPRESSED IN LUNG, SIGNAL = 1.2; NT HIT: L78810.1, EVALUE 5.00e-21; EST_HUMAN HIT: M78590.1, EVALUE 2.00e-27; SWISSPROT HIT: Q07956, EVALUE 9.40e+00
gcaggaagaagcaagaaggaagaaaatgccatcgttgtcatcttgtgtctggaattggtgggttcttggtctcactgacttcaagaatgaagccgtggaccctcgcg

SEQ ID NO: 24473 - DNA, 122 bp, Homo sapiens
  MAP TO AC013591.3; EXPRESSED IN PLACENTA, SIGNAL = 1.5; EXPRESSED IN ADULT LIVER, SIGNAL = 1.4; EXPRESSED IN HEART, SIGNAL = 1.4; EXPRESSED IN FETAL LIVER, SIGNAL = 1.3; EXPRESSED IN BRAIN, SIGNAL = 1.8; EXPRESSED IN BONE MARROW, SIGNAL = 1.4; EXPRESSED IN LUNG, SIGNAL = 1.5; SWISSPROT HIT: Q17094, EVALUE 5.40e+00
ggctgcccaggcaccctgtggtgcccagccctgagtgtgaagcccctgggctgagtgtacctggcctggtcctgggggccaagcaactcagcaagtggagggactatgagggagggaagcat

SEQ ID NO: 24474 - DNA, 109 bp, Homo sapiens
  MAP TO AL138807.7; EXPRESSED IN LUNG, SIGNAL = 1.6; EXPRESSED IN BONE MARROW, SIGNAL = 1.3; EXPRESSED IN HEART, SIGNAL = 1.9; EXPRESSED IN PLACENTA, SIGNAL = 1.5; EXPRESSED IN ADULT LIVER, SIGNAL = 1.6; EXPRESSED IN FETAL LIVER, SIGNAL = 1.6; EXPRESSED IN BRAIN, SIGNAL = 1.8; NT HIT: AB014511.1, EVALUE 5.00e-55; EST_HUMAN HIT: BF061308.1, EVALUE 2.00e-52; SWISSPROT HIT: O75110, EVALUE 8.00e-14
ctcgtgctgtgagccggctgtagacctgggagttgacttccttgtcccgcacgtagcatcggatctcctccaccgcctcacggatgacagtgacggccagcacgaagcc

SEQ ID NO: 24475 - DNA, 133 bp, Homo sapiens
  MAP TO AC009301.3; EXPRESSED IN LUNG, SIGNAL = 2.5; EXPRESSED IN HEART, SIGNAL = 2.5; EXPRESSED IN BRAIN, SIGNAL = 2.6; EXPRESSED IN BONE MARROW, SIGNAL = 2.3; EXPRESSED IN PLACENTA, SIGNAL = 2.3; EXPRESSED IN ADULT LIVER, SIGNAL = 2.6; EXPRESSED IN FETAL LIVER, SIGNAL = 2.6; SWISSPROT HIT: P13673, EVALUE 2.40e+00; EST_HUMAN HIT: BE147929.1, EVALUE 6.90e+00
gtggtggctctgcaggagccatgtggccgcctggaggggggccggcctggaaatgaggggcagagcctggggctccagacagtcattgtctttgagactgggccctggccagtgggcatcctgcatgacactg

SEQ ID NO: 24476 - DNA, 165 bp, Homo sapiens
  MAP TO AC010338.3; EXPRESSED IN HEART, SIGNAL = 1.7; EXPRESSED IN FETAL LIVER, SIGNAL = 1.2; EXPRESSED IN BRAIN, SIGNAL = 1.3; EXPRESSED IN BONE MARROW, SIGNAL = 1.3; EXPRESSED IN ADULT LIVER, SIGNAL = 1.7; EXPRESSED IN LUNG, SIGNAL = 1.3; EXPRESSED IN PLACENTA, SIGNAL =   1; NT HIT: AJ243211.1, EVALUE 9.60e-02; SWISSPROT HIT: P40134, EVALUE 1.80e+00; EST_HUMAN HIT: BE895676.1, EVALUE 8.80e+00
gactccaactaaagtgtccaaggagaagggacaccactcaagaggaaggaagaaaaaggctttggtgagtctcaggccaccccaggaatctctgggtgatggagaagggagctacagagatgtctctgctccagcagaagaacagaaagatggttctaacctggg

SEQ ID NO: 24477 - DNA, 117 bp, Homo sapiens
  MAP TO AC022758.3; EXPRESSED IN HELA, SIGNAL = 3.1; EXPRESSED IN HEART, SIGNAL = 2.7; EXPRESSED IN BRAIN, SIGNAL = 2.7; EXPRESSED IN BONE MARROW, SIGNAL =   2; EXPRESSED IN PLACENTA, SIGNAL =   3; EXPRESSED IN ADULT LIVER, SIGNAL = 2.8; EXPRESSED IN FETAL LIVER, SIGNAL = 2.3; EXPRESSED IN LUNG, SIGNAL = 2.7; SWISSPROT HIT: P44778, EVALUE 9.30e+00; NT HIT: AF079764.1, EVALUE 1.60e-02
atgattcagatggagtctgtctttggggcccgtaaaagtgaccaggccctgctcattccctggcccagcagacagcagcagctgcagaagcttaggatacagagccatgtgacgtag

SEQ ID NO: 24478 - DNA, 96 bp, Homo sapiens
  MAP TO AC022206.2; EXPRESSED IN LUNG, SIGNAL = 2.1; EXPRESSED IN PLACENTA, SIGNAL = 1.9; EXPRESSED IN ADULT LIVER, SIGNAL = 2.1; EXPRESSED IN HEART, SIGNAL = 1.9; EXPRESSED IN BRAIN, SIGNAL =   2; EXPRESSED IN FETAL LIVER, SIGNAL = 1.8; EXPRESSED IN BONE MARROW, SIGNAL = 1.9; NT HIT: AF086907.1, EVALUE 2.00e-01; EST_HUMAN HIT: BE782809.1, EVALUE 1.20e+00
atgcagtctcgtggagttgttcacttcaggcttgatgctggtcttgaaatgaaagggcagcccctggccatgaagagcctggctggtctgacacat

SEQ ID NO: 24479 - DNA, 114 bp, Homo sapiens
  MAP TO AL117341.26; EXPRESSED IN LUNG, SIGNAL = 6.9; EXPRESSED IN PLACENTA, SIGNAL = 6.3; EXPRESSED IN HEART, SIGNAL = 5.4; EXPRESSED IN BONE MARROW, SIGNAL = 6.4; EXPRESSED IN HELA, SIGNAL = 5.2; EXPRESSED IN ADULT LIVER, SIGNAL = 6.4; EXPRESSED IN FETAL LIVER, SIGNAL = 4.5; EXPRESSED IN BRAIN, SIGNAL = 5.7; NT HIT: X85812.1, EVALUE 3.90e+00; EST_HUMAN HIT: AA251376.1, EVALUE 2.00e-03
tgtgatgctaagagcagacttgtgccactcagccatatcctgaggctgcaggttatgcctcaatttcctcatctagagaataatgatcacagagttgtggagaatatgaaatag

SEQ ID NO: 24480 - DNA, 114 bp, Homo sapiens
  MAP TO AC009316.3; EXPRESSED IN ADULT LIVER, SIGNAL = 2.5; EXPRESSED IN HEART, SIGNAL = 1.9; EXPRESSED IN BONE MARROW, SIGNAL = 2.1; EXPRESSED IN LUNG, SIGNAL = 2.2; EXPRESSED IN PLACENTA, SIGNAL = 2.5; EXPRESSED IN FETAL LIVER, SIGNAL = 2.1; EXPRESSED IN BRAIN, SIGNAL = 2.1; SWISSPROT HIT: P56635, EVALUE 4.10e+00; NT HIT: AL115527.1, EVALUE 9.90e-01; EST_HUMAN HIT: AI432661.1, EVALUE 6.00e-03
gctgggatcttggcttctcttttccagcagccagtctacctctaacctctttctcatcataggtcataggaagatcctcgtgacctatgcgatctttccagtcaccgtcctttt

SEQ ID NO: 24481 - DNA, 94 bp, Homo sapiens
  MAP TO AL133293.14; EXPRESSED IN LUNG, SIGNAL = 1.4; EXPRESSED IN PLACENTA, SIGNAL = 1.2; EXPRESSED IN BRAIN, SIGNAL = 1.1; EXPRESSED IN ADULT LIVER, SIGNAL = 1.2; EXPRESSED IN HEART, SIGNAL = 1.3; EXPRESSED IN FETAL LIVER, SIGNAL =   1; EXPRESSED IN BONE MARROW, SIGNAL = 1.1; SWISSPROT HIT: P31072, EVALUE 7.30e+00; NT HIT: Y12839.1, EVALUE 5.00e-02; EST_HUMAN HIT: BF695832.1, EVALUE 1.90e-02
ggaatttcaccctacacacctgaagccttgcacatggcagtgattcaagaggacacatgtagatttctggagctgtttttcttccttcagtcag

SEQ ID NO: 24482 - DNA, 77 bp, Homo sapiens
  MAP TO AC011272.3; EXPRESSED IN PLACENTA, SIGNAL = 0.92; EXPRESSED IN ADULT LIVER, SIGNAL = 1.5; EXPRESSED IN FETAL LIVER, SIGNAL = 1.8; EXPRESSED IN BONE MARROW, SIGNAL = 1.5; EXPRESSED IN HEART, SIGNAL = 1.6; EXPRESSED IN BRAIN, SIGNAL = 1.1; EXPRESSED IN LUNG, SIGNAL = 1.4; NT HIT: AF119117.1, EVALUE 6.10e-01
gcaggattacatctctagggctgtagaacgagtgattcaatacagggaagaaggagccttggcccaggatgtagcag

SEQ ID NO: 24483 - DNA, 108 bp, Homo sapiens
  MAP TO AC009298.2; EXPRESSED IN ADULT LIVER, SIGNAL = 1.3; EXPRESSED IN LUNG, SIGNAL = 1.1; EXPRESSED IN PLACENTA, SIGNAL = 0.95; EXPRESSED IN HEART, SIGNAL = 1.5; EXPRESSED IN FETAL LIVER, SIGNAL = 1.4; EXPRESSED IN BRAIN, SIGNAL = 1.7; EXPRESSED IN BONE MARROW, SIGNAL = 1.3; EST_HUMAN HIT: AW151673.1, EVALUE 2.00e-18; NT HIT: gi11430960, EVALUE 3.00e-13; SWISSPROT HIT: P25425, EVALUE 1.90e+00
gtacaggaagcgtggtgctggcatctgcttctggcgagggcctcaggaacctcccaatcatgccagaagatgaaggaggagcaggcgtgtcacatggcgagagtggga

SEQ ID NO: 24484 - DNA, 112 bp, Homo sapiens
  MAP TO AC015525.3; EXPRESSED IN ADULT LIVER, SIGNAL = 1.8; EXPRESSED IN BONE MARROW, SIGNAL = 1.8; EXPRESSED IN HEART, SIGNAL = 1.9; EXPRESSED IN FETAL LIVER, SIGNAL = 1.6; EXPRESSED IN LUNG, SIGNAL = 1.8; EXPRESSED IN PLACENTA, SIGNAL = 1.5; EXPRESSED IN BRAIN, SIGNAL = 1.7; SWISSPROT HIT: P21504, EVALUE 4.20e+00; EST_HUMAN HIT: AW845987.1, EVALUE 1.00e-56; NT HIT: AF148110.1, EVALUE 9.70e-01
tgtatcattactttgtggatattataacatggaacaagaatgtaagaagaggggacattaccatcaaattgagagacaaagctggaaacaccacagaatccaaaatcaatca

SEQ ID NO: 24485 - DNA, 146 bp, Homo sapiens
  MAP TO AL136442.10; EXPRESSED IN PLACENTA, SIGNAL = 5.4; EXPRESSED IN HEART, SIGNAL =   4; EXPRESSED IN BONE MARROW, SIGNAL = 4.3; EXPRESSED IN HELA, SIGNAL =   3; EXPRESSED IN LUNG, SIGNAL = 5.1; EXPRESSED IN ADULT LIVER, SIGNAL = 4.9; EXPRESSED IN FETAL LIVER, SIGNAL = 4.3; EXPRESSED IN BRAIN, SIGNAL = 4.5; SWISSPROT HIT: P19719, EVALUE 7.90e-01
ctagagaaactgaggttccagtcagtcaatgtgaatcagggtcctcttcaggtgacgtgtggactcattgtcaagatattcgtgtttatcatcactctctacatttggtttctcctgttggtggaaaatgtaaaagaagacagcag

SEQ ID NO: 24486 - DNA, 118 bp, Homo sapiens
  MAP TO AL121884.5; EXPRESSED IN PLACENTA, SIGNAL = 1.8; EXPRESSED IN ADULT LIVER, SIGNAL = 1.4; EXPRESSED IN HEART, SIGNAL = 1.7; EXPRESSED IN FETAL LIVER, SIGNAL = 1.5; EXPRESSED IN BRAIN, SIGNAL = 1.8; EXPRESSED IN BONE MARROW, SIGNAL = 1.4; EXPRESSED IN LUNG, SIGNAL = 1.4; SWISSPROT HIT: P91919, EVALUE 7.10e+00; EST_HUMAN HIT: BF337944.1, EVALUE 1.50e+00
atttatcatatttgctaattgtcatcttgatgcccaggaagatatagatatcccactccccatagatgtagagaaagctgttggttgtccaaccaaatatctttcccccttctttcat

SEQ ID NO: 24487 - DNA, 161 bp, Homo sapiens
  MAP TO AC018535.3; EXPRESSED IN HELA, SIGNAL = 2.5; EXPRESSED IN BONE MARROW, SIGNAL = 1.6; EXPRESSED IN LUNG, SIGNAL = 1.4; EXPRESSED IN HEART, SIGNAL = 1.6; EXPRESSED IN PLACENTA, SIGNAL = 1.1; EXPRESSED IN ADULT LIVER, SIGNAL = 1.9; EXPRESSED IN FETAL LIVER, SIGNAL =   2; EXPRESSED IN BRAIN, SIGNAL = 1.1; SWISSPROT HIT: P16798, EVALUE 2.30e+00; EST_HUMAN HIT: AI290373.1, EVALUE 2.20e+00
aggctattgaagaatcctcagaggaaatcccaatggtgtacgacagatataagatgatacaggaaagtacagttgtgcagagtgcaataaggaacatcggtgtgatgttcatcttggttgtccttaccttcctctctacactggtgacacagctatcaatg

SEQ ID NO: 24488 - DNA, 174 bp, Homo sapiens
  MAP TO AC010767.3; EXPRESSED IN HEART, SIGNAL = 1.7; EXPRESSED IN BRAIN, SIGNAL = 0.54; EXPRESSED IN BONE MARROW, SIGNAL = 0.48; NT HIT: AL163246.2, EVALUE 5.00e-16; SWISSPROT HIT: Q27675, EVALUE 1.30e+00; EST_HUMAN HIT: AI492868.1, EVALUE 2.00e-13
cttttggactcacggacttatgccagtgatttgacgggggggtctcaggcctttggccatagactgatggctgcactatcagcttccctacttttgggattttggggacttgaactggcttcctggctcctcatcttgctgacagcttactatgagacttcaccttgtgatcat

SEQ ID NO: 24489 - DNA, 413 bp, Homo sapiens
  MAP TO AC007000.2; EXPRESSED IN LUNG, SIGNAL = 3.4; EXPRESSED IN ADULT LIVER, SIGNAL = 3.2; EXPRESSED IN HELA, SIGNAL = 2.8; EXPRESSED IN HEART, SIGNAL =   3; EXPRESSED IN BRAIN, SIGNAL =   3; EXPRESSED IN PLACENTA, SIGNAL = 3.1; EXPRESSED IN FETAL LIVER, SIGNAL = 3.6; EXPRESSED IN BONE MARROW, SIGNAL = 3.4; EST_HUMAN HIT: AU136637.1, EVALUE 0.00e+00; SWISSPROT HIT: P12804, EVALUE 3.00e-48; NT HIT: AF104014.1, EVALUE 0.00e+00
ctggacgtgactgtatttgttcttggctgggacactttgaacatttgccatccaaactattgacaacaaatgttagatttgccactttgctgtcaacataattttctatgttgttcatatttacaagattcagcttctccaggcgaccatgaagtacattgatctcctctttggcattctttagctcagaggacagcttgttaacctcactctctaattctctaactctgttatcaccaacctctcccggggctcctgtactgggtaacaacagtccgtttctgcctgggtctccgttgtcatcagcctgcagcttgcagtcttggcaagatttctttagactatttacgatttccttgaggttttggacttctttgaacacctcctcgatcctgctgaattgcttcgggagc

SEQ ID NO: 24490 - DNA, 148 bp, Homo sapiens
  MAP TO AL158138.1; EXPRESSED IN LUNG, SIGNAL = 4.9; EXPRESSED IN ADULT LIVER, SIGNAL = 4.5; EXPRESSED IN HEART, SIGNAL = 3.8; EXPRESSED IN FETAL LIVER, SIGNAL = 4.1; EXPRESSED IN BRAIN, SIGNAL = 4.1; EXPRESSED IN PLACENTA, SIGNAL = 4.5; EXPRESSED IN BONE MARROW, SIGNAL = 4.2; EXPRESSED IN HELA, SIGNAL = 2.7; EST_HUMAN HIT: AA719795.1, EVALUE 3.20e-02; SWISSPROT HIT: P21263, EVALUE 3.10e+00
ttagctcctctctcccatggctttgctcttggttttctgttggagggtaatggcaggctctgcactcagactgtctgggtacaaaatcagcttcaccattggctgcctggcaatctccttcaggtgtccaaggcttcgttttttcagt

SEQ ID NO: 24491 - DNA, 191 bp, Homo sapiens
  MAP TO AC013451.7; EXPRESSED IN HELA, SIGNAL = 2.5; EXPRESSED IN LUNG, SIGNAL =   2; EXPRESSED IN PLACENTA, SIGNAL =   2; EXPRESSED IN ADULT LIVER, SIGNAL = 1.8; EXPRESSED IN FETAL LIVER, SIGNAL = 1.6; EXPRESSED IN BRAIN, SIGNAL = 1.4; EXPRESSED IN BONE MARROW, SIGNAL = 1.3; EXPRESSED IN HEART, SIGNAL =   2; SWISSPROT HIT: P56891, EVALUE 1.10e-01; NT HIT: Z37976.1, EVALUE 1.00e-103; EST_HUMAN HIT: AW580424.1, EVALUE 4.00e-67
cccagggggatgaggggtgctccagaggtaccgcctgttgggtgccatctctctgctcaaggcctggtcccgggggcagggcgttggaagagagctggctactggccgtggcagtcgggtgaagtcggacagtgcgggacaaccccacgtgctgctgggaagggtgggtctggctgaggccactcagggtc

SEQ ID NO: 24492 - DNA, 98 bp, Homo sapiens
  MAP TO AC021641.4; EXPRESSED IN HELA, SIGNAL = 2.4; EXPRESSED IN HEART, SIGNAL = 1.5; EXPRESSED IN BONE MARROW, SIGNAL = 1.6; EXPRESSED IN BRAIN, SIGNAL = 1.4; EXPRESSED IN FETAL LIVER, SIGNAL = 1.7; EXPRESSED IN ADULT LIVER, SIGNAL = 2.2; EXPRESSED IN PLACENTA, SIGNAL = 1.5; EXPRESSED IN LUNG, SIGNAL = 1.6; NT HIT: AF052659.1, EVALUE 8.20e-01
aaaaactgattctaacagtacagaagacgaagagcacaccttgcacatcatgttcagctttaaaaagaacttatccaggagctggagatctggagatg

SEQ ID NO: 24493 - DNA, 128 bp, Homo sapiens
  MAP TO AC027273.2; EXPRESSED IN ADULT LIVER, SIGNAL = 5.2; EXPRESSED IN FETAL LIVER, SIGNAL = 1.9; EXPRESSED IN BONE MARROW, SIGNAL =   5; EXPRESSED IN LUNG, SIGNAL = 3.3; EXPRESSED IN PLACENTA, SIGNAL = 3.8; EXPRESSED IN HELA, SIGNAL = 4.3; EXPRESSED IN HEART, SIGNAL = 2.8; EXPRESSED IN BRAIN, SIGNAL = 3.3; SWISSPROT HIT: P53046, EVALUE 3.10e+00; NT HIT: gi7706163, EVALUE 2.80e-01; EST_HUMAN HIT: BF219358.1, EVALUE 4.20e-01
atgtgtcattttttcttggatctagagatactgaagaagaaagccttactgaattgtcttgcttgttatgcaattcaagggtatggcctgcttgctgagggacaaacacagcagcaaaagtgtgaggg

SEQ ID NO: 24494 - DNA, 92 bp, Homo sapiens
  MAP TO AL158049.2; EXPRESSED IN ADULT LIVER, SIGNAL = 1.7; EXPRESSED IN BRAIN, SIGNAL = 1.5; EXPRESSED IN LUNG, SIGNAL = 1.8; EXPRESSED IN PLACENTA, SIGNAL = 1.7; EXPRESSED IN FETAL LIVER, SIGNAL = 1.7; EXPRESSED IN BONE MARROW, SIGNAL = 1.6; EXPRESSED IN HEART, SIGNAL = 1.5; EST_HUMAN HIT: BE778274.1, EVALUE 1.80e-02; NT HIT: U66061.1, EVALUE 3.00e+00
acctgttgggggagtacttactccatttccacatgtccatggagaacatgttccaggacggccccttctccctcaccgctcatttcacagag

SEQ ID NO: 24495 - DNA, 99 bp, Homo sapiens
  MAP TO AC011181.5; EXPRESSED IN ADULT LIVER, SIGNAL = 1.2; EXPRESSED IN HEART, SIGNAL = 7.8; EXPRESSED IN FETAL LIVER, SIGNAL = 0.81; EXPRESSED IN BONE MARROW, SIGNAL =   1; EXPRESSED IN LUNG, SIGNAL = 0.92; EXPRESSED IN PLACENTA, SIGNAL =   1; EXPRESSED IN BRAIN, SIGNAL =   1; EST_HUMAN HIT: BF696639.1, EVALUE 3.10e-01; NT HIT: AK024472.1, EVALUE 3.30e+00
taaatctagcagccagtcttcaagatggtcctcacttatccccacctttttggtgtttgtgcccttgtgcagtatacttccatattgaataagtctggc

SEQ ID NO: 24496 - DNA, 348 bp, Homo sapiens
  MAP TO AL157777.3; EXPRESSED IN PLACENTA, SIGNAL = 2.7; EXPRESSED IN ADULT LIVER, SIGNAL = 3.9; EXPRESSED IN HEART, SIGNAL = 3.4; EXPRESSED IN BRAIN, SIGNAL = 2.1; EXPRESSED IN LUNG, SIGNAL = 3.8; EXPRESSED IN FETAL LIVER, SIGNAL = 4.9; EXPRESSED IN BONE MARROW, SIGNAL = 3.1; NT HIT: X52967.1, EVALUE 2.00e-69; SWISSPROT HIT: P18124, EVALUE 6.00e-37; EST_HUMAN HIT: AV761217.1, EVALUE 1.00e-71
atggtgatgataccctcttttattgccggaaccaaggagtgtgccaaagagaagaaggttcctgctttgccaaaaaccctcaagaaaaagcaaagaagttttgcagagctgaagatcaagcacctgagaaagaagtttgcccaaaaggtgcttgtaaaggcaaggagaaagcttatctgtgaaaaactgaagcactttcacaagaaatatacacagatggacagaatggagattcgaatggccagaatggcaagaaaagctggcaacctctatatacctgcagaatccaaactggcatttgtcatcaggatcagaagttccaatggtgtgcacacaaaggtgttctga

SEQ ID NO: 24497 - DNA, 201 bp, Homo sapiens
  MAP TO AL132874.14; EXPRESSED IN LUNG, SIGNAL = 1.7; EXPRESSED IN PLACENTA, SIGNAL = 1.6; EXPRESSED IN FETAL LIVER, SIGNAL = 1.4; EXPRESSED IN HEART, SIGNAL = 1.4; EXPRESSED IN ADULT LIVER, SIGNAL = 1.6; EXPRESSED IN BRAIN, SIGNAL = 1.4; EXPRESSED IN BONE MARROW, SIGNAL = 1.4; SWISSPROT HIT: P45894, EVALUE 6.50e+00; EST_HUMAN HIT: BE787366.1, EVALUE 3.00e-65
gtgatgacctcactatttacgggattgtaatgcaacggtggaagccctttcagcaagatgtgcgctgtgaagtggagatagtcctgaaagcaaattacatccaagtaaataatgagcagtcctcagggatcatcatggatgaggaggtccaaaaggaattcgaagatttttgggaatactataagagcgatccctttgcag

SEQ ID NO: 24498 - DNA, 163 bp, Homo sapiens
  MAP TO AC007981.43; EXPRESSED IN PLACENTA, SIGNAL = 3.4; EXPRESSED IN HEART, SIGNAL = 3.4; EXPRESSED IN FETAL LIVER, SIGNAL = 3.7; EXPRESSED IN BONE MARROW, SIGNAL = 3.4; EXPRESSED IN HELA, SIGNAL = 3.8; EXPRESSED IN LUNG, SIGNAL = 4.2; EXPRESSED IN ADULT LIVER, SIGNAL = 4.1; EXPRESSED IN BRAIN, SIGNAL = 3.9; NT HIT: U07000.1, EVALUE 2.00e-77; SWISSPROT HIT: P11274, EVALUE 2.00e-22; EST_HUMAN HIT: AL043314.2, EVALUE 7.00e-87
ggcagtcaataagatgtccctgcacaaccttggcacggtgtttggccccacgctgctccggccctccgagaaggagagcaagctccctgccaaccccagccagcccatcaccatgactgacagctggtccttggaggtcatgtcccaggtatgggaagacagg

SEQ ID NO: 24499 - DNA, 253 bp, Homo sapiens
  MAP TO AC019126.3; EXPRESSED IN LUNG, SIGNAL = 2.3; EXPRESSED IN ADULT LIVER, SIGNAL =   2; EXPRESSED IN HEART, SIGNAL = 2.1; EXPRESSED IN BRAIN, SIGNAL = 2.1; EXPRESSED IN BONE MARROW, SIGNAL = 2.2; EXPRESSED IN PLACENTA, SIGNAL =   2; EXPRESSED IN FETAL LIVER, SIGNAL = 2.1; SWISSPROT HIT: P52747, EVALUE 9.00e-34; NT HIT: AJ295844.1, EVALUE 0.00e+00; EST_HUMAN HIT: BF369434.1, EVALUE 1.00e-126
aaaatatagtagacaaaactctcacctgggggcggctcaaagaaggcttcctgctcctcctcgatgggctcagtgtcgttgtgggctgtccgtttgtgcatggccagcgtggagatctgcttgtatgtcttcccacagtggttacagttgtaaggtttggaatgagtgtggacaacatgatgtttgtacaaactggaatattctgtaaaccttttgtcacacccaggaactgtacaaacatatggcttttctc

SEQ ID NO: 24500 - DNA, 182 bp, Homo sapiens
  MAP TO AC018377.4; EXPRESSED IN LUNG, SIGNAL = 2.4; EXPRESSED IN HELA, SIGNAL = 2.9; EXPRESSED IN BONE MARROW, SIGNAL = 1.9; EXPRESSED IN HEART, SIGNAL = 2.1; EXPRESSED IN PLACENTA, SIGNAL = 2.1; EXPRESSED IN ADULT LIVER, SIGNAL = 2.6; EXPRESSED IN FETAL LIVER, SIGNAL = 1.9; EXPRESSED IN BRAIN, SIGNAL = 2.4; SWISSPROT HIT: Q9ZE07, EVALUE 6.60e+00
ttctatttctctatctggacatcatcatccaaaacatacttgaggcaaataaacacatcgtggacatcaacatgcaatccatacttgagaaagaaagccgtttttcatatggtgtcctgaagagttctggctcaaactcagcatcagaagtatggacttctaccttttccttcaggcagtga

SEQ ID NO: 24501 - DNA, 149 bp, Homo sapiens
  MAP TO AC019233.3; EXPRESSED IN PLACENTA, SIGNAL = 2.7; EXPRESSED IN HEART, SIGNAL = 2.2; EXPRESSED IN LUNG, SIGNAL = 2.5; EXPRESSED IN HELA, SIGNAL =   3; EXPRESSED IN BRAIN, SIGNAL = 2.3; EXPRESSED IN ADULT LIVER, SIGNAL = 3.4; EXPRESSED IN FETAL LIVER, SIGNAL = 1.7; EXPRESSED IN BONE MARROW, SIGNAL = 2.6; SWISSPROT HIT: Q24270, EVALUE 4.00e+00; EST_HUMAN HIT: BE408611.1, EVALUE 2.00e-31; NT HIT: AL163249.2, EVALUE 7.00e-27
actttccaccacagcttcagttacttcctcatctgaagtcttgaatccctcaaagtcatccatgaaggttggaatcaacttcttccaaactccttttaacgttgatattttgacctccttccatgaatcacaaatgttcttattggaat

SEQ ID NO: 24502 - DNA, 240 bp, Homo sapiens
  MAP TO AC013746.4; EXPRESSED IN LUNG, SIGNAL = 3.2; EXPRESSED IN HEART, SIGNAL = 2.5; EXPRESSED IN BONE MARROW, SIGNAL =   3; EXPRESSED IN BRAIN, SIGNAL = 2.6; EXPRESSED IN FETAL LIVER, SIGNAL = 2.9; EXPRESSED IN HELA, SIGNAL = 2.6; EXPRESSED IN ADULT LIVER, SIGNAL = 3.2; EXPRESSED IN PLACENTA, SIGNAL = 3.4; EST_HUMAN HIT: AI909676.1, EVALUE 6.00e-42; SWISSPROT HIT: P50426, EVALUE 9.00e-16; NT HIT: AB029000.1, EVALUE 1.00e-120
ctgttctgtagccagtgttgttaagatatacagcaaaagtccgaggctcatgcatggcctgccacgagggggaagagcagttctcgttgttggtgtagacattgtgattgtgcacatacttcccggtgagcatggaggaccgtgacgggcagcacatgggtgtagtcacaaaggcattgatgaaggtggcccccccatgttccataatctttctcgttttgttcatgacttgcagggacc

SEQ ID NO: 24503 - DNA, 78 bp, Homo sapiens
  MAP TO AC012611.4; EXPRESSED IN ADULT LIVER, SIGNAL = 7.5; EXPRESSED IN HELA, SIGNAL =  10; EXPRESSED IN HEART, SIGNAL = 7.1; EXPRESSED IN FETAL LIVER, SIGNAL = 5.9; EXPRESSED IN BONE MARROW, SIGNAL =   7; EXPRESSED IN LUNG, SIGNAL = 7.2; EXPRESSED IN PLACENTA, SIGNAL = 6.8; EXPRESSED IN BRAIN, SIGNAL = 6.2; EST_HUMAN HIT: AW296818.1, EVALUE 9.20e-01; NT HIT: AL161511.2, EVALUE 6.20e-01
atttactttcactaagcaaagtttctgggtagaatatatacccagggatgtcgttagtattccttgtagaatcattac

SEQ ID NO: 24504 - DNA, 156 bp, Homo sapiens
  MAP TO AL121908.7; EXPRESSED IN ADULT LIVER, SIGNAL = 2.4; EXPRESSED IN HELA, SIGNAL = 2.6; EXPRESSED IN BRAIN, SIGNAL = 2.3; EXPRESSED IN LUNG, SIGNAL = 2.6; EXPRESSED IN PLACENTA, SIGNAL = 2.3; EXPRESSED IN FETAL LIVER, SIGNAL = 2.2; EXPRESSED IN BONE MARROW, SIGNAL = 2.2; EXPRESSED IN HEART, SIGNAL = 2.2; EST_HUMAN HIT: BE005850.1, EVALUE 6.00e-04; NT HIT: AF245699.1, EVALUE 1.00e-03; SWISSPROT HIT: Q57500, EVALUE 6.80e+00
agctgctgtgcatattcacgtgcacatttttgtgtggacacctgttttcagttctacgggatctactcaggagtcagatggttatatggtgacccagtcttcggggcaagctcaggagcagaatcatcgtacggtgactcggtcattggggtctac

SEQ ID NO: 24505 - DNA, 123 bp, Homo sapiens
  MAP TO AC022038.2; EXPRESSED IN PLACENTA, SIGNAL = 0.9; EXPRESSED IN FETAL LIVER, SIGNAL = 0.91; EXPRESSED IN ADULT LIVER, SIGNAL = 1.1; EXPRESSED IN BRAIN, SIGNAL = 0.74; EXPRESSED IN BONE MARROW, SIGNAL = 0.85; EXPRESSED IN HEART, SIGNAL = 1.3; EST_HUMAN HIT: BF310077.1, EVALUE 1.60e+00; NT HIT: AF091848.1, EVALUE 2.70e-01
agaagatggagaccatcaggcagaaactgtctttacatcacctcactctgaaagatccactcagtgttgctatttctggattcatctccaatacccctccttcctatgtacttggggaaaaag

SEQ ID NO: 24506 - DNA, 112 bp, Homo sapiens
  MAP TO AC021855.3; EXPRESSED IN ADULT LIVER, SIGNAL = 9.1; EXPRESSED IN BRAIN, SIGNAL = 7.4; EXPRESSED IN HEART, SIGNAL = 4.5; EXPRESSED IN FETAL LIVER, SIGNAL = 6.1; EXPRESSED IN BONE MARROW, SIGNAL = 8.6; EXPRESSED IN LUNG, SIGNAL = 5.4; EXPRESSED IN PLACENTA, SIGNAL = 6.3; EXPRESSED IN HELA, SIGNAL = 5.6; SWISSPROT HIT: P74435, EVALUE 7.10e+00; NT HIT: AL163303.2, EVALUE 1.00e-21; EST_HUMAN HIT: AW470791.1, EVALUE 2.00e-30
cttctgccttctgttcacctgcaggctcaacaccatgtggaagccaccaaggcttgggggttgcaccttctgaagcaatggccagagctataccttggccccttttagccat

SEQ ID NO: 24507 - DNA, 195 bp, Homo sapiens
  MAP TO AL133324.7; EXPRESSED IN LUNG, SIGNAL = 1.4; EXPRESSED IN PLACENTA, SIGNAL = 1.1; EXPRESSED IN FETAL LIVER, SIGNAL = 1.5; EXPRESSED IN BONE MARROW, SIGNAL = 0.92; EXPRESSED IN HEART, SIGNAL = 1.3; EXPRESSED IN ADULT LIVER, SIGNAL = 1.4; EXPRESSED IN BRAIN, SIGNAL = 1.1; NT HIT: gi4504168, EVALUE 1.00e-106; SWISSPROT HIT: P48637, EVALUE 8.00e-32; EST_HUMAN HIT: BF027310.1, EVALUE 1.00e-106
cacatccagtgagtagaggccagcaaaggtggcgcggaggcgggccacagcctcaggctggccagggagcaacatctccagcatgcccggcctgcttagctcctgctgcaccttcttagtcccagccagctgggtggcaatgtctgggcacttggcagcatgtgacctctccagcagtagacgtgcttcccaatt

SEQ ID NO: 24508 - DNA, 358 bp, Homo sapiens
  MAP TO AC021287.4; EXPRESSED IN LUNG, SIGNAL = 1.3; EXPRESSED IN ADULT LIVER, SIGNAL = 2.5; EXPRESSED IN HELA, SIGNAL =   3; EXPRESSED IN BRAIN, SIGNAL = 3.1; EXPRESSED IN BONE MARROW, SIGNAL = 2.6; EXPRESSED IN HEART, SIGNAL =   4; EXPRESSED IN PLACENTA, SIGNAL = 2.4; EXPRESSED IN FETAL LIVER, SIGNAL = 2.8; SWISSPROT HIT: P24152, EVALUE 4.00e-03; NT HIT: AJ010482.1, EVALUE 0.00e+00; EST_HUMAN HIT: AA196387.1, EVALUE 0.00e+00
atttcatgcaaagctcctctgccaaacaaaagacccctcctcctgttgctccaaaacctgcagtcaagtcctcatcctcccaaccagtaactccagtttccccagtctggtctccaggagtggctcccacccaacctcctgccttccccacatccaacccatcaaagggcaccgttgtctcctccatcaaaatagcccagccttcttaccctcctgcccggcctgcaagtactttgaacgtggctggtcccttcaaaggaccacaagcagcagtagccagtcagaattacacacccaaaccaacagtttccacaccaacagtcaatgctgttcagcctggtgcagtgggaccatccaa

SEQ ID NO: 24509 - DNA, 233 bp, Homo sapiens
  MAP TO AC018389.3; EXPRESSED IN HEART, SIGNAL = 3.9; EXPRESSED IN FETAL LIVER, SIGNAL = 3.4; EXPRESSED IN LUNG, SIGNAL = 4.8; EXPRESSED IN PLACENTA, SIGNAL = 6.2; EXPRESSED IN HELA, SIGNAL = 6.3; EXPRESSED IN ADULT LIVER, SIGNAL = 5.1; EXPRESSED IN BRAIN, SIGNAL =   4; EXPRESSED IN BONE MARROW, SIGNAL = 4.2; NT HIT: gi4757969, EVALUE 9.00e-43; EST_HUMAN HIT: BE782401.1, EVALUE 1.00e-42; SWISSPROT HIT: P33742, EVALUE 4.30e+00
agattggcaaacactatgagtctaaaaacagccagttgtttgctgctacccagaagttcaggaaaaacacagctccatctctctctagctggaagaatattgacctagcaaagtcaagtatcaagatatttgtgtttatgagccccattaagagcaggaccacagagaatggctttcagaacaagagcccccagaaactggaccctgttgagcagggtcaggagaatatggtg

SEQ ID NO: 24510 - DNA, 119 bp, Homo sapiens
  MAP TO AC013497.4; EXPRESSED IN LUNG, SIGNAL = 1.5; EXPRESSED IN PLACENTA, SIGNAL = 1.5; EXPRESSED IN ADULT LIVER, SIGNAL = 1.4; EXPRESSED IN BRAIN, SIGNAL = 1.7; EXPRESSED IN HEART, SIGNAL = 1.4; EXPRESSED IN FETAL LIVER, SIGNAL = 1.5; EXPRESSED IN BONE MARROW, SIGNAL = 1.7; SWISSPROT HIT: P51960, EVALUE 5.40e+00; EST_HUMAN HIT: AI817905.1, EVALUE 9.80e-02; NT HIT: Y07848.1, EVALUE 6.60e-02
ccttgccttcgaggccctgcgtgatgaacgatctagctcctacctcctctttggcttccttgcccattacgctcccctcgtatgatatgctccagccagaccgatctgctggttcttcc

SEQ ID NO: 24511 - DNA, 80 bp, Homo sapiens
  MAP TO AC025588.1; EXPRESSED IN LUNG, SIGNAL = 7.6; EXPRESSED IN HEART, SIGNAL =  14; EXPRESSED IN HELA, SIGNAL = 9.9; EXPRESSED IN BONE MARROW, SIGNAL = 6.9; EXPRESSED IN BRAIN, SIGNAL = 8.6; EXPRESSED IN FETAL LIVER, SIGNAL = 8.3; EXPRESSED IN ADULT LIVER, SIGNAL =  11; EXPRESSED IN PLACENTA, SIGNAL = 7.3; NT HIT: U82828.1, EVALUE 6.40e-01
cctactcccatttttgctatctccatgggccctacttctcctctcttagctccaattatgctataatgcagcacatgcat

SEQ ID NO: 24512 - DNA, 150 bp, Homo sapiens
  MAP TO AC016457.3; EXPRESSED IN LUNG, SIGNAL = 1.9; EXPRESSED IN ADULT LIVER, SIGNAL = 1.7; EXPRESSED IN HEART, SIGNAL = 1.4; EXPRESSED IN BRAIN, SIGNAL = 1.4; EXPRESSED IN BONE MARROW, SIGNAL = 3.1; EXPRESSED IN PLACENTA, SIGNAL =   2; EXPRESSED IN FETAL LIVER, SIGNAL = 1.9; NT HIT: S72869.1, EVALUE 2.00e-79; SWISSPROT HIT: Q16204, EVALUE 1.00e-21; EST_HUMAN HIT: BE814014.1, EVALUE 9.00e-43
ctgcatcaattttctggagagctcattagtgaggaattcttcttctttctcataatttacagcaagggtttctttctccttctgcaaagcctgaattttcttgaataaagtgttactaatgaattcttcttcctgctcagccctggcttg

SEQ ID NO: 24513 - DNA, 236 bp, Homo sapiens
  MAP TO AL162261.1; EXPRESSED IN LUNG, SIGNAL = 2.5; EXPRESSED IN PLACENTA, SIGNAL = 3.2; EXPRESSED IN HEART, SIGNAL = 3.1; EXPRESSED IN BRAIN, SIGNAL = 2.8; EXPRESSED IN BONE MARROW, SIGNAL = 3.4; EXPRESSED IN ADULT LIVER, SIGNAL = 3.7; EXPRESSED IN HELA, SIGNAL = 5.1; EXPRESSED IN FETAL LIVER, SIGNAL = 3.9; SWISSPROT HIT: P15818, EVALUE 2.00e+00; NT HIT: AF134401.1, EVALUE 1.00e-102; EST_HUMAN HIT: BE791713.1, EVALUE 1.00e-104
cccgattcgccgctgccgtctgtgtcacctgcactgttaccagtccagagccccacaccgccagctgcggggtttcagccgctgctcaacggaagcttggttccggtgccgcccactactcctgcgccgggggtgcagctggacgtggaggcgctcatccccacgcacgatgagcagggccgtcccaagcccgagtggaagcgccaggtgatggtgggcaagatgcagctgaagat

SEQ ID NO: 24514 - DNA, 198 bp, Homo sapiens
  MAP TO AC022995.2; EXPRESSED IN PLACENTA, SIGNAL = 4.1; EXPRESSED IN ADULT LIVER, SIGNAL = 5.3; EXPRESSED IN FETAL LIVER, SIGNAL = 3.8; EXPRESSED IN BRAIN, SIGNAL = 3.6; EXPRESSED IN LUNG, SIGNAL = 2.4; EXPRESSED IN HELA, SIGNAL =   6; EXPRESSED IN HEART, SIGNAL = 4.1; EXPRESSED IN BONE MARROW, SIGNAL = 3.8; NT HIT: gi11526208, EVALUE 1.20e-01; SWISSPROT HIT: P00469, EVALUE 2.90e+00; EST_HUMAN HIT: AA314665.1, EVALUE 1.10e-02
aggtttcccattctggccacaaatgtgtttgatgccacttggatcaagattttaaaaagaactggatttccagatctctatgagaaaaatttcataatcatcttcatacagggagttgcagacagaaaaagtggaatcagattagccgggcttaacttcaccctgatgggatatttcaaagctgcaataattatagtt

SEQ ID NO: 24515 - DNA, 100 bp, Homo sapiens
  MAP TO AC016706.2; EXPRESSED IN LUNG, SIGNAL = 2.8; EXPRESSED IN ADULT LIVER, SIGNAL = 3.2; EXPRESSED IN FETAL LIVER, SIGNAL = 2.3; EXPRESSED IN BRAIN, SIGNAL = 2.2; EXPRESSED IN BONE MARROW, SIGNAL = 2.5; EXPRESSED IN PLACENTA, SIGNAL = 3.2; EXPRESSED IN HELA, SIGNAL = 2.6; EXPRESSED IN HEART, SIGNAL = 2.7; NT HIT: AL163278.2, EVALUE 2.00e-07; EST_HUMAN HIT: AW799667.1, EVALUE 5.00e-09
atcaaagattcttttctcacagtcctggaggttaggaagtccaaggtcaaggcactgggtgagggcctgcttccttagttcatagacagcagtcttcttg

SEQ ID NO: 24516 - DNA, 160 bp, Homo sapiens
  MAP TO AL121931.9; EXPRESSED IN HELA, SIGNAL = 2.4; EXPRESSED IN LUNG, SIGNAL = 2.6; EXPRESSED IN PLACENTA, SIGNAL =   3; EXPRESSED IN ADULT LIVER, SIGNAL = 2.2; EXPRESSED IN FETAL LIVER, SIGNAL = 3.7; EXPRESSED IN BRAIN, SIGNAL = 2.7; EXPRESSED IN BONE MARROW, SIGNAL = 2.2; EXPRESSED IN HEART, SIGNAL = 2.3; SWISSPROT HIT: Q03718, EVALUE 5.20e+00; EST_HUMAN HIT: BF246782.1, EVALUE 2.20e+00
cagaattcataaaactacagttgtcatatatcattgcactattaataaactcaatagttatcccatttatatcaataattacagtaagtgtattctgacatctgatttttataattctttgtcggtatctcctgcagttacttctgacagtggatttgct

SEQ ID NO: 24517 - DNA, 195 bp, Homo sapiens
  MAP TO AC015649.5; EXPRESSED IN LUNG, SIGNAL = 5.4; EXPRESSED IN ADULT LIVER, SIGNAL = 4.9; EXPRESSED IN BRAIN, SIGNAL = 4.3; EXPRESSED IN PLACENTA, SIGNAL = 4.9; EXPRESSED IN HELA, SIGNAL = 4.9; EXPRESSED IN FETAL LIVER, SIGNAL = 4.5; EXPRESSED IN HEART, SIGNAL = 4.7; EXPRESSED IN BONE MARROW, SIGNAL = 5.1; SWISSPROT HIT: P35590, EVALUE 4.40e-01
tgtgaaaactccatgtgcttttgatatatccggcatctcccccttcttcctactttcaaatcacatgttctggaacccccgctccctcctgcatgcactgcagagcccacagccgagaatctacaacaggaagatccaaggaaagtctaagttccccacggccacggtgcccagctccccagaaacccagtcccg

SEQ ID NO: 24518 - DNA, 82 bp, Homo sapiens
  MAP TO AL162260.1; EXPRESSED IN FETAL LIVER, SIGNAL = 1.7; EXPRESSED IN PLACENTA, SIGNAL = 1.3; EXPRESSED IN ADULT LIVER, SIGNAL = 1.7; EXPRESSED IN HELA, SIGNAL = 2.7; EXPRESSED IN HEART, SIGNAL = 1.5; EXPRESSED IN BONE MARROW, SIGNAL = 1.7; EXPRESSED IN LUNG, SIGNAL = 1.3; EXPRESSED IN BRAIN, SIGNAL = 1.4; EST_HUMAN HIT: AW581997.1, EVALUE 2.50e-01
ggctgacatgccactttatttagaagttggggtggagatggaaactttccaagtggttgatgccattgagccttgtgaattt

SEQ ID NO: 24519 - DNA, 190 bp, Homo sapiens
  MAP TO AC013612.3; EXPRESSED IN ADULT LIVER, SIGNAL = 2.3; EXPRESSED IN BRAIN, SIGNAL = 1.9; EXPRESSED IN LUNG, SIGNAL = 2.4; EXPRESSED IN FETAL LIVER, SIGNAL = 1.6; EXPRESSED IN BONE MARROW, SIGNAL = 1.8; EXPRESSED IN PLACENTA, SIGNAL = 2.1; EXPRESSED IN HELA, SIGNAL =   3; EXPRESSED IN HEART, SIGNAL = 2.1; EST_HUMAN HIT: AW963676.1, EVALUE 1.00e-103; SWISSPROT HIT: Q15034, EVALUE 8.00e-05; NT HIT: gi7705930, EVALUE 2.00e-25
ataactacgtgtctcgaggatgatctgctcagagctcttccatgccattctccacaccaagaagctttatcagttttcctcctgctcccagaatgtcctgtgatgcatgattctaagaactggaagaacctggtggttccatttgcaaaggctgtgtgtgaaatgagtaaacaatctttgcaagtcctaa

SEQ ID NO: 24520 - DNA, 153 bp, Homo sapiens
  MAP TO AC010458.2; EXPRESSED IN LUNG, SIGNAL = 1.7; EXPRESSED IN PLACENTA, SIGNAL = 1.4; EXPRESSED IN ADULT LIVER, SIGNAL = 1.3; EXPRESSED IN HEART, SIGNAL = 1.5; EXPRESSED IN FETAL LIVER, SIGNAL = 1.8; EXPRESSED IN BRAIN, SIGNAL = 1.5; EXPRESSED IN BONE MARROW, SIGNAL = 1.8; NT HIT: gi11425281, EVALUE 4.00e-81; SWISSPROT HIT: P18858, EVALUE 5.00e-24; EST_HUMAN HIT: AV696415.1, EVALUE 6.00e-81
ctgaagaaggactaccttgatggcgtgggtgacaccctggacctggtggtgatcggcgcctacctgggccgggggaagcgggccggccggtacgggggcttcctgctggcctcctacgacgaggacagtgaggagctgcaggccatatgcaag

SEQ ID NO: 24521 - DNA, 100 bp, Homo sapiens
  MAP TO AC022918.2; EXPRESSED IN LUNG, SIGNAL =   4; EXPRESSED IN ADULT LIVER, SIGNAL =   9; EXPRESSED IN BRAIN, SIGNAL = 6.2; EXPRESSED IN HEART, SIGNAL = 6.9; EXPRESSED IN PLACENTA, SIGNAL =   7; EXPRESSED IN HELA, SIGNAL =  10; EXPRESSED IN FETAL LIVER, SIGNAL = 6.6; EXPRESSED IN BONE MARROW, SIGNAL = 7.1; SWISSPROT HIT: O13066, EVALUE 3.20e+00; NT HIT: AF111167.2, EVALUE 1.40e-02; EST_HUMAN HIT: AA313620.1, EVALUE 5.00e-06
ctttttgctgtgggacagaagctgaagtttagctccttaagtttgtgccacattccctccttcagctcctctaaatcctgggccaggtgtgtgctcagcc

SEQ ID NO: 24522 - DNA, 184 bp, Homo sapiens
  MAP TO AC018389.3; EXPRESSED IN LUNG, SIGNAL = 1.3; EXPRESSED IN ADULT LIVER, SIGNAL = 1.3; EXPRESSED IN BRAIN, SIGNAL = 1.2; EXPRESSED IN BONE MARROW, SIGNAL = 1.2; EXPRESSED IN HEART, SIGNAL = 1.4; EXPRESSED IN PLACENTA, SIGNAL = 1.3; EXPRESSED IN FETAL LIVER, SIGNAL = 1.2; SWISSPROT HIT: P05857, EVALUE 3.00e+00; EST_HUMAN HIT: BF670405.1, EVALUE 6.40e-01
caaggctctgtctacaatggtggtcagtggagggttggggatgctacacacctgtgtgctggttgggcaagcaaagcaaaacctgaccatgcagacgtgcatgaacaaagtgatctggagagtagccatgggctcaggggaagttccagtacggagagggaacatgtggactggtgcacggctg

SEQ ID NO: 24523 - DNA, 154 bp, Homo sapiens
  MAP TO AC015525.3; EXPRESSED IN LUNG, SIGNAL =   3; EXPRESSED IN ADULT LIVER, SIGNAL = 3.5; EXPRESSED IN HEART, SIGNAL = 2.9; EXPRESSED IN BRAIN, SIGNAL = 3.3; EXPRESSED IN PLACENTA, SIGNAL = 3.7; EXPRESSED IN FETAL LIVER, SIGNAL = 2.6; EXPRESSED IN BONE MARROW, SIGNAL =   3; NT HIT: AE004574.1, EVALUE 1.40e+00; SWISSPROT HIT: P48848, EVALUE 7.90e-01; EST_HUMAN HIT: BE744545.1, EVALUE 1.00e-81
caggaagctggagccggggatggcaaagccctgtttgtagaggtaggcgccgcagaagagcaggaacacgtaggcctggtgctccttccggtactctcgaaggacctcagagagctcccgcagctctgccaggtcggaggggaaccacagcgac

SEQ ID NO: 24524 - DNA, 87 bp, Homo sapiens
  MAP TO AC018525.4; EXPRESSED IN LUNG, SIGNAL = 2.3; EXPRESSED IN BONE MARROW, SIGNAL = 2.1; EXPRESSED IN PLACENTA, SIGNAL = 2.3; EXPRESSED IN ADULT LIVER, SIGNAL = 2.5; EXPRESSED IN HEART, SIGNAL = 2.2; EXPRESSED IN FETAL LIVER, SIGNAL = 1.6; EXPRESSED IN BRAIN, SIGNAL = 1.9; NT HIT: X92511.1, EVALUE 2.40e+00
ttaataaaacctgggcaaatgtagtagatgatgataatgatgacgatgatgatgatggtaataatctcctgattcatttcatttatt

SEQ ID NO: 24525 - DNA, 155 bp, Homo sapiens
  MAP TO AC007326.28; EXPRESSED IN LUNG, SIGNAL = 1.8; EXPRESSED IN PLACENTA, SIGNAL = 1.2; EXPRESSED IN ADULT LIVER, SIGNAL = 2.1; EXPRESSED IN FETAL LIVER, SIGNAL = 1.5; EXPRESSED IN BRAIN, SIGNAL = 1.8; EXPRESSED IN BONE MARROW, SIGNAL = 1.7; EXPRESSED IN HEART, SIGNAL = 1.2; NT HIT: Y08032.1, EVALUE 2.00e-82; EST_HUMAN HIT: BF431465.1, EVALUE 9.00e-80; SWISSPROT HIT: P10263, EVALUE 3.50e-01
ggtgaaggtacgctcgagcgtggtcattgaggacaagtcgacgagagatcccgagtacgtctacagtcagccttacggtaagcttgtgcgctcggaagaagctagggtgataatggggcaaactaaaagtaaaattaaaagtaaatatgcctctt

SEQ ID NO: 24526 - DNA, 99 bp, Homo sapiens
  MAP TO AL139187.4; EXPRESSED IN PLACENTA, SIGNAL = 1.3; EXPRESSED IN FETAL LIVER, SIGNAL = 1.1; EXPRESSED IN LUNG, SIGNAL = 1.5; EXPRESSED IN ADULT LIVER, SIGNAL = 1.4; EXPRESSED IN HEART, SIGNAL = 1.2; EXPRESSED IN BRAIN, SIGNAL = 1.3; EXPRESSED IN BONE MARROW, SIGNAL = 1.1; NT HIT: AF098070.1, EVALUE 8.30e-01
cagaattgtctctttggcattagtatatccatctctgctctccagaatctgcattttccaacagtccgccagcatggagacctttcccatgccctgcag

SEQ ID NO: 24527 - DNA, 259 bp, Homo sapiens
  MAP TO AC011859.4; EXPRESSED IN PLACENTA, SIGNAL = 0.76; EXPRESSED IN ADULT LIVER, SIGNAL = 0.96; EXPRESSED IN FETAL LIVER, SIGNAL = 1.6; EXPRESSED IN BRAIN, SIGNAL =   1; EXPRESSED IN BONE MARROW, SIGNAL = 1.8; EXPRESSED IN HEART, SIGNAL = 1.2; SWISSPROT HIT: Q94131, EVALUE 1.40e+00; EST_HUMAN HIT: AA131248.1, EVALUE 0.00e+00; NT HIT: gi10518339, EVALUE 0.00e+00
gtatgtcgagagtaccaacgtggcaattgcaaccgaggagaaaatgattgtcggtttgctcatcctgctgacagcacaatgattgacaccaatgacaacacagtcactgtgtgtatggattacatcaaagggagatgctctcgggaaaagtgcaaatactttcatccccctgcacatttgcaagccaagatcaaggctgcccaataccaggtcaaccaggctgcagctgcacaggctgcagccaccgcagctgccatgg

SEQ ID NO: 24528 - DNA, 78 bp, Homo sapiens
  MAP TO AC021824.2; EXPRESSED IN BONE MARROW, SIGNAL = 3.9; EXPRESSED IN PLACENTA, SIGNAL = 3.8; EXPRESSED IN ADULT LIVER, SIGNAL = 4.8; EXPRESSED IN HELA, SIGNAL = 5.5; EXPRESSED IN FETAL LIVER, SIGNAL = 3.9; EXPRESSED IN BRAIN, SIGNAL = 3.9; EXPRESSED IN LUNG, SIGNAL = 2.5; EXPRESSED IN HEART, SIGNAL = 4.1; NT HIT: gi9507162, EVALUE 6.20e-01; SWISSPROT HIT: P28040, EVALUE 5.60e+00; EST_HUMAN HIT: BF364169.1, EVALUE 1.00e-36
tctacacatgtgctgacaatggaccctaattttctctgctcttgtcccaggcatggtcctagcccagcagttctcttt

SEQ ID NO: 24529 - DNA, 194 bp, Homo sapiens
  MAP TO AL121917.12; EXPRESSED IN PLACENTA, SIGNAL = 4.6; EXPRESSED IN HELA, SIGNAL = 5.5; EXPRESSED IN FETAL LIVER, SIGNAL = 5.6; EXPRESSED IN ADULT LIVER, SIGNAL = 5.8; EXPRESSED IN HEART, SIGNAL = 4.5; EXPRESSED IN BONE MARROW, SIGNAL = 6.2; EXPRESSED IN LUNG, SIGNAL = 4.8; EXPRESSED IN BRAIN, SIGNAL = 5.5; NT HIT: gi5730038, EVALUE 2.00e-52; EST_HUMAN HIT: AW962016.1, EVALUE 8.00e-50; SWISSPROT HIT: P41997, EVALUE 1.00e-02
tttgcgtcaaatgccgaatgaccgtagaaaggtggacgttgagttcttcagcagcttctggtgtagttgtaagaggaccagcttccgtgattgctctcagttggtggttgtcaacttccgacgactggccgctacgctcctcatcttcaaggctctcctctcttttgcaaaacttcttgaacccccactgcacg

SEQ ID NO: 24530 - DNA, 414 bp, Homo sapiens
  MAP TO AC015908.4; EXPRESSED IN ADULT LIVER, SIGNAL = 1.6; EXPRESSED IN BRAIN, SIGNAL = 1.4; EXPRESSED IN LUNG, SIGNAL = 1.6; EXPRESSED IN FETAL LIVER, SIGNAL = 1.1; EXPRESSED IN BONE MARROW, SIGNAL = 1.2; EXPRESSED IN PLACENTA, SIGNAL = 1.3; EXPRESSED IN HEART, SIGNAL = 1.2; NT HIT: AB020652.1, EVALUE 2.60e-01; EST_HUMAN HIT: AU117659.1, EVALUE 2.00e-83; SWISSPROT HIT: P36702, EVALUE 1.60e-01
atgacgatggagactctccccaaggttctagaggtcgatgagaagtctccagaagccaaggacctgctgcccagccagaccgccagctccctgtgcatcagctccaggagcgagtctgtctggaccaccacccccaggagtaactgggaaatctaccgcaagcccatcgttatcatgtcagtgggcggtgccatcctgcttttcggcgtggtcatcacctgcttggcctacaccttgaagctgagtgacaagagtctctccatcctcaaaatggtagggcctggcttcctgtccctgggactcatgatgctggtgtgcgggctggtgtgggtgcccatcatcaaaaagaaacagaagcacagacagaagtcgaatttcttacgcagcctcaagtccttcttcctgactcgctga

SEQ ID NO: 24531 - DNA, 123 bp, Homo sapiens
  MAP TO AL121920.7; EXPRESSED IN ADULT LIVER, SIGNAL = 0.86; EXPRESSED IN HELA, SIGNAL = 3.7; EXPRESSED IN HEART, SIGNAL = 1.9; EXPRESSED IN FETAL LIVER, SIGNAL = 2.5; EXPRESSED IN BRAIN, SIGNAL = 3.1; EXPRESSED IN BONE MARROW, SIGNAL = 2.8; EXPRESSED IN LUNG, SIGNAL = 1.5; EXPRESSED IN PLACENTA, SIGNAL = 2.1; SWISSPROT HIT: Q03376, EVALUE 9.20e+00; NT HIT: AF087434.1, EVALUE 2.70e-01; EST_HUMAN HIT: AU116802.1, EVALUE 1.60e+00
cttccggggatcccagtgtcagtctccttgtgagtctttgggttagactgggtcacgtgcttatccccgagctcatggaacagaacgatctgcttggctccggctctcaatattccgcatggg

SEQ ID NO: 24532 - DNA, 105 bp, Homo sapiens
  MAP TO AL139340.3; EXPRESSED IN PLACENTA, SIGNAL = 2.6; EXPRESSED IN ADULT LIVER, SIGNAL = 4.4; EXPRESSED IN HEART, SIGNAL = 3.1; EXPRESSED IN BRAIN, SIGNAL = 5.6; EXPRESSED IN BONE MARROW, SIGNAL = 5.8; EXPRESSED IN LUNG, SIGNAL = 4.6; EXPRESSED IN HELA, SIGNAL = 6.6; EXPRESSED IN FETAL LIVER, SIGNAL = 5.2; SWISSPROT HIT: Q10384, EVALUE 5.50e+00; NT HIT: L78810.1, EVALUE 3.00e-16; EST_HUMAN HIT: AI961087.1, EVALUE 4.00e-16
ggctcaggacctgcagcccaccatgcctgagccccgcattttccgtgggctcctgtgtggcctgagcctctccgatgagcgccaccccctgctccatggcgccca

SEQ ID NO: 24533 - DNA, 114 bp, Homo sapiens
  MAP TO AP001537.1; EXPRESSED IN ADULT LIVER, SIGNAL =   2; EXPRESSED IN HEART, SIGNAL = 1.6; EXPRESSED IN BRAIN, SIGNAL = 1.8; EXPRESSED IN LUNG, SIGNAL = 1.6; EXPRESSED IN PLACENTA, SIGNAL = 1.8; EXPRESSED IN FETAL LIVER, SIGNAL = 1.4; EXPRESSED IN BONE MARROW, SIGNAL = 1.7; NT HIT: AL163218.2, EVALUE 5.00e-58; SWISSPROT HIT: P78334, EVALUE 9.30e+00
cccatcaaggtttccagcttgcaccatccacagcagtgggttgagctgcacctgttcctgcctgggcttctggtgaggcagccgaggagcactgcatagaaatgcatgaagcag

SEQ ID NO: 24534 - DNA, 100 bp, Homo sapiens
  MAP TO AL121904.13; EXPRESSED IN BONE MARROW, SIGNAL = 1.2; EXPRESSED IN LUNG, SIGNAL = 1.4; EXPRESSED IN ADULT LIVER, SIGNAL = 1.3; EXPRESSED IN BRAIN, SIGNAL = 1.6; EXPRESSED IN PLACENTA, SIGNAL = 1.2; EXPRESSED IN HEART, SIGNAL = 1.2; EXPRESSED IN FETAL LIVER, SIGNAL = 1.3; NT HIT: AL163202.2, EVALUE 4.00e-21; EST_HUMAN HIT: AL043129.2, EVALUE 1.00e-49; SWISSPROT HIT: Q03613, EVALUE 3.20e+00
tgtttactctgtgccggaaccccttttggagcttataattattacttattatgtcatgttgttaccatattcagcatgtgtcagaaattttatatccaag

SEQ ID NO: 24535 - DNA, 107 bp, Homo sapiens
  MAP TO AC010290.4; EXPRESSED IN PLACENTA, SIGNAL = 2.1; EXPRESSED IN FETAL LIVER, SIGNAL = 2.3; EXPRESSED IN BRAIN, SIGNAL = 2.1; EXPRESSED IN LUNG, SIGNAL = 2.4; EXPRESSED IN ADULT LIVER, SIGNAL = 2.4; EXPRESSED IN HEART, SIGNAL = 2.2; EXPRESSED IN BONE MARROW, SIGNAL = 1.9; NT HIT: gi11417222, EVALUE 7.00e-54; SWISSPROT HIT: P29809, EVALUE 9.40e+00; EST_HUMAN HIT: BE910167.1, EVALUE 1.00e-53
atcctctggaacttggtccgtgtggagatggccatggcacgcgcatcatggaggattgcctcctgggaggcaccagagttagtctgcccgaggaccttctggaggat

SEQ ID NO: 24536 - DNA, 98 bp, Homo sapiens
  MAP TO AC021567.2; EXPRESSED IN LUNG, SIGNAL = 1.5; EXPRESSED IN BONE MARROW, SIGNAL = 1.7; EXPRESSED IN BRAIN, SIGNAL = 1.7; EXPRESSED IN FETAL LIVER, SIGNAL = 1.7; EXPRESSED IN HELA, SIGNAL = 2.9; EXPRESSED IN ADULT LIVER, SIGNAL = 2.3; EXPRESSED IN PLACENTA, SIGNAL = 1.7; EXPRESSED IN HEART, SIGNAL =   2; SWISSPROT HIT: P03342, EVALUE 4.90e-01; EST_HUMAN HIT: AI244001.1, EVALUE 3.10e-01
ctgggttgattgcaaacaacttcttctgtcattatttgatatggaagagcaccaaagagttatacaagctgctctccagtggctcgagaacaatgagc

SEQ ID NO: 24537 - DNA, 178 bp, Homo sapiens
  MAP TO AL133260.7; EXPRESSED IN LUNG, SIGNAL = 2.4; EXPRESSED IN PLACENTA, SIGNAL = 4.2; EXPRESSED IN FETAL LIVER, SIGNAL = 2.1; EXPRESSED IN BRAIN, SIGNAL = 1.9; EXPRESSED IN ADULT LIVER, SIGNAL =   2; EXPRESSED IN HEART, SIGNAL =   2; EXPRESSED IN BONE MARROW, SIGNAL = 2.1; SWISSPROT HIT: P11586, EVALUE 1.00e-13; NT HIT: AJ133091.1, EVALUE 6.40e+00; EST_HUMAN HIT: H68849.1, EVALUE 7.00e-90
ctgaacatcatacaggaactggaatcggcttcttttactcgcagcctctctcacagcccgagccaagtccaccgatccttttccaccaaccgaccagtgatagcaggggactgcatcaaaggcaccagcccgctttgcaagctcacacaccaagtcaatctcagcgcgggtgtcggtc

SEQ ID NO: 24538 - DNA, 232 bp, Homo sapiens
  MAP TO AL133174.9; EXPRESSED IN PLACENTA, SIGNAL = 1.3; EXPRESSED IN ADULT LIVER, SIGNAL = 0.77; EXPRESSED IN HELA, SIGNAL = 3.4; EXPRESSED IN HEART, SIGNAL = 1.3; EXPRESSED IN BRAIN, SIGNAL = 1.6; EXPRESSED IN BONE MARROW, SIGNAL = 1.7; EXPRESSED IN FETAL LIVER, SIGNAL = 1.6; SWISSPROT HIT: P55060, EVALUE 2.00e-40; EST_HUMAN HIT: AA639198.1, EVALUE 1.00e-128; NT HIT: AF053651.1, EVALUE 1.00e-128
gactccattattacagtctttgattggtctttttgagttacccgaagatgataccattcctgatgaggaacattttattgacatagaagatacaccaggatatcagactgccttctcacagttggcatttgctgggaaaaaagagcatgatcctgtaggtcaaatggtgaataaccccaaaattcacctggcacagtcacttcacaagttgtctaccgcctgtccaggaagg

SEQ ID NO: 24539 - DNA, 159 bp, Homo sapiens
  MAP TO AC013627.3; EXPRESSED IN PLACENTA, SIGNAL = 1.3; EXPRESSED IN ADULT LIVER, SIGNAL = 1.6; EXPRESSED IN FETAL LIVER, SIGNAL = 1.3; EXPRESSED IN BRAIN, SIGNAL = 1.5; EXPRESSED IN BONE MARROW, SIGNAL = 1.4; EXPRESSED IN LUNG, SIGNAL =   1; EXPRESSED IN HEART, SIGNAL = 1.3; NT HIT: AF123303.1, EVALUE 2.00e-70; SWISSPROT HIT: Q01888, EVALUE 6.00e-05; EST_HUMAN HIT: BE079471.1, EVALUE 6.00e-44
ctgcatcatgattttcagacggtccaaaggggcagtgcttgttcgagagacagcaccagcaatgcctcctgccaaaagctgcctccaccattgtccggattttttttcgtcttccgtgaattcatctggaatagttaagctatcccctatgtcaattcc

SEQ ID NO: 24540 - DNA, 84 bp, Homo sapiens
  MAP TO AC009924.4; EXPRESSED IN HELA, SIGNAL = 5.8; EXPRESSED IN PLACENTA, SIGNAL = 3.9; EXPRESSED IN ADULT LIVER, SIGNAL = 4.3; EXPRESSED IN HEART, SIGNAL =   4; EXPRESSED IN FETAL LIVER, SIGNAL =   4; EXPRESSED IN BONE MARROW, SIGNAL = 4.4; EXPRESSED IN LUNG, SIGNAL = 3.7; EXPRESSED IN BRAIN, SIGNAL =   4; NT HIT: AL163303.2, EVALUE 3.00e-03; SWISSPROT HIT: P32994, EVALUE 9.60e+00
cgtaatatacttactattcatccatattgttccatatgccagaatgtccttctttttgaaagctgagtatttcgagtatttcat

SEQ ID NO: 24541 - DNA, 97 bp, Homo sapiens
  MAP TO AC013584.3; EXPRESSED IN BONE MARROW, SIGNAL =   2; EXPRESSED IN LUNG, SIGNAL = 2.1; EXPRESSED IN ADULT LIVER, SIGNAL = 2.4; EXPRESSED IN HELA, SIGNAL = 3.2; EXPRESSED IN FETAL LIVER, SIGNAL = 1.9; EXPRESSED IN BRAIN, SIGNAL =   2; EXPRESSED IN PLACENTA, SIGNAL = 2.1; EXPRESSED IN HEART, SIGNAL = 1.7; NT HIT: AB016081.2, EVALUE 3.20e+00
tcacactgtgctgtaactgtttatttgtatgccttcctccctcacaagactctgaaaccttgagggcaggaactgcatcttcatcatctctgcatcc

SEQ ID NO: 24542 - DNA, 87 bp, Homo sapiens
  MAP TO AC020991.3; EXPRESSED IN LUNG, SIGNAL = 2.1; EXPRESSED IN HELA, SIGNAL = 2.6; EXPRESSED IN HEART, SIGNAL = 2.1; EXPRESSED IN FETAL LIVER, SIGNAL = 2.6; EXPRESSED IN PLACENTA, SIGNAL = 2.8; EXPRESSED IN ADULT LIVER, SIGNAL = 3.9; EXPRESSED IN BRAIN, SIGNAL = 3.1; EXPRESSED IN BONE MARROW, SIGNAL =   4; SWISSPROT HIT: P71153, EVALUE 9.60e+00; EST_HUMAN HIT: AL121240.1, EVALUE 5.00e-09; NT HIT: U78027.1, EVALUE 8.00e-13
cagctgcagcaagacccgcgcaaggagagtctgacctcagacacagctagccctgcccaacctggtggtcactccctacccatcctg

SEQ ID NO: 24543 - DNA, 165 bp, Homo sapiens
  MAP TO AC025644.2; EXPRESSED IN PLACENTA, SIGNAL = 1.6; EXPRESSED IN ADULT LIVER, SIGNAL =   2; EXPRESSED IN FETAL LIVER, SIGNAL = 1.3; EXPRESSED IN BRAIN, SIGNAL = 1.5; EXPRESSED IN BONE MARROW, SIGNAL = 1.4; EXPRESSED IN LUNG, SIGNAL = 1.7; EXPRESSED IN HEART, SIGNAL = 1.6; NT HIT: AB013985.1, EVALUE 9.60e-02; EST_HUMAN HIT: BE620497.1, EVALUE 5.70e-01; SWISSPROT HIT: P49371, EVALUE 6.80e+00
cagaagcatttgggaagtcaacagaataacattgcagcagggacttctcttggtaatgaaaattgcagaatggtttcaataagagtgaacatttaaggcccattaagtcatctttcttattgtgcttaacaccatcaaattcaatgagtgaatcaatggccacag

SEQ ID NO: 24544 - DNA, 204 bp, Homo sapiens
  MAP TO AC011022.4; EXPRESSED IN HELA, SIGNAL = 2.6; EXPRESSED IN PLACENTA, SIGNAL = 1.6; EXPRESSED IN ADULT LIVER, SIGNAL = 2.7; EXPRESSED IN FETAL LIVER, SIGNAL =   2; EXPRESSED IN BRAIN, SIGNAL = 3.2; EXPRESSED IN LUNG, SIGNAL = 1.6; EXPRESSED IN HEART, SIGNAL = 1.5; EXPRESSED IN BONE MARROW, SIGNAL =   2; SWISSPROT HIT: P38606, EVALUE 3.00e-35; NT HIT: gi4502304, EVALUE 1.00e-111; EST_HUMAN HIT: AA504160.1, EVALUE 1.00e-111
ctttcccacaagctgtacaatttctgccaggtcttcttcttcctgcagaatttccttagctttcgtcctcagaggaacgaactctgtgaagtgtttgtcatagtattcatccaaggcacgcatatacttgctgtagctgatgagccaattgacagaggggaaatgcttacgttgagctagtttcttatctaagccccagaacac

SEQ ID NO: 24545 - DNA, 147 bp, Homo sapiens
  MAP TO AC011686.3; EXPRESSED IN PLACENTA, SIGNAL = 2.2; EXPRESSED IN ADULT LIVER, SIGNAL = 2.3; EXPRESSED IN HEART, SIGNAL = 2.1; EXPRESSED IN FETAL LIVER, SIGNAL = 2.1; EXPRESSED IN BRAIN, SIGNAL =   2; EXPRESSED IN BONE MARROW, SIGNAL = 2.1; EXPRESSED IN LUNG, SIGNAL = 1.9; SWISSPROT HIT: Q07283, EVALUE 1.20e-01; NT HIT: U75967.1, EVALUE 8.40e-02; EST_HUMAN HIT: BE081653.1, EVALUE 7.00e-65
acgttccagatttgttttcagtactaatggttcatctctttttttctgttcatccattttccttttccctgtttctgtatcctctggtaacagcttgtggatttgatcttcagagggtttttcctcttgtaacttttcttctctcag

SEQ ID NO: 24546 - DNA, 303 bp, Homo sapiens
  MAP TO AC025747.3; EXPRESSED IN BONE MARROW, SIGNAL = 1.8; EXPRESSED IN LUNG, SIGNAL = 1.6; EXPRESSED IN ADULT LIVER, SIGNAL = 1.9; EXPRESSED IN HELA, SIGNAL = 2.3; EXPRESSED IN FETAL LIVER, SIGNAL = 1.6; EXPRESSED IN BRAIN, SIGNAL = 1.4; EXPRESSED IN PLACENTA, SIGNAL = 1.6; EXPRESSED IN HEART, SIGNAL = 1.5; EST_HUMAN HIT: AW753647.1, EVALUE 7.00e-79; NT HIT: AF179308.1, EVALUE 0.00e+00; SWISSPROT HIT: O95239, EVALUE 8.00e-47
atggaactcaggagtgctcagattgctgacctacagcagaagctgctggatgcagaaagtgaagataggccaaaacaatgctgggagaatattgccaccattctggaagccaagtgtgccctgaaatatttgattggagagctggtctcctccaaaatacatgtcaccaaacttgaaaacagcctgagacagagcaaggccagctgtgctgacatgcagaagatgctatttgaggaacaaaatcatttttctgagatagagacagagttacaagctgagctggtcagaatggagcaacagcac

SEQ ID NO: 24547 - DNA, 179 bp, Homo sapiens
  MAP TO AC012683.3; EXPRESSED IN PLACENTA, SIGNAL = 0.68; EXPRESSED IN ADULT LIVER, SIGNAL = 1.6; EXPRESSED IN FETAL LIVER, SIGNAL = 0.87; EXPRESSED IN BRAIN, SIGNAL = 1.2; EXPRESSED IN HEART, SIGNAL = 1.6; EXPRESSED IN BONE MARROW, SIGNAL = 0.91; NT HIT: AB033116.1, EVALUE 1.00e-96; SWISSPROT HIT: Q02218, EVALUE 2.00e-26; EST_HUMAN HIT: BE883595.1, EVALUE 3.00e-89
catgccttccatgccatggggcagcagcagcacaatgccattatgccgcacccacttggcctggccggtgctgatgaactggtcgatgatgcactgggccgtgttgtggaagtccccaaactgggcctcccagaggaccagggcattggggctggccatggcatagcccagctcaaagc

SEQ ID NO: 24548 - DNA, 208 bp, Homo sapiens
  MAP TO AF241725.1; EXPRESSED IN LUNG, SIGNAL = 1.2; EXPRESSED IN ADULT LIVER, SIGNAL = 1.7; EXPRESSED IN HEART, SIGNAL = 1.3; EXPRESSED IN FETAL LIVER, SIGNAL = 1.3; EXPRESSED IN PLACENTA, SIGNAL = 1.1; EXPRESSED IN BRAIN, SIGNAL = 1.5; EXPRESSED IN BONE MARROW, SIGNAL = 1.4; SWISSPROT HIT: P57042, EVALUE 1.70e+00; EST_HUMAN HIT: BE276179.1, EVALUE 1.00e-58; NT HIT: AL163227.2, EVALUE 1.00e-114
caagttcctcatctccatctgagaccacctcagcctggattttgttgtcaatattattatcagcatcttggtcaaagccactcaacaagtctctaggaagttccaaactttccacattttgctgtcttctcctgagccctccaaactgttccagccactccctgttacccagttcaaaagtctcttccacatttcctagtatcttttc

SEQ ID NO: 24549 - DNA, 119 bp, Homo sapiens
  MAP TO AL121910.19; EXPRESSED IN PLACENTA, SIGNAL = 1.5; EXPRESSED IN FETAL LIVER, SIGNAL = 1.2; EXPRESSED IN BONE MARROW, SIGNAL = 1.2; EXPRESSED IN LUNG, SIGNAL = 1.3; EXPRESSED IN ADULT LIVER, SIGNAL = 1.7; EXPRESSED IN HEART, SIGNAL = 1.3; EXPRESSED IN BRAIN, SIGNAL = 1.2; NT HIT: gi9790044, EVALUE 1.00e+00; SWISSPROT HIT: Q16650, EVALUE 4.20e-02
gctgaccgtggctgggacagcagaggggggctctgaattccctgtggacgccatgcttccagacaagtggaaggagaccgtgtccatctgcagccatcatcgcccggcagatgccctac

SEQ ID NO: 24550 - DNA, 269 bp, Homo sapiens
  MAP TO AC013751.3; EXPRESSED IN PLACENTA, SIGNAL = 3.7; EXPRESSED IN LUNG, SIGNAL = 3.6; EXPRESSED IN BONE MARROW, SIGNAL =   5; EXPRESSED IN BRAIN, SIGNAL = 3.8; EXPRESSED IN FETAL LIVER, SIGNAL = 3.8; EXPRESSED IN HEART, SIGNAL = 3.9; EXPRESSED IN HELA, SIGNAL = 5.7; EXPRESSED IN ADULT LIVER, SIGNAL = 4.6; SWISSPROT HIT: P53278, EVALUE 4.50e-02; NT HIT: AF224669.1, EVALUE 2.00e-62; EST_HUMAN HIT: AW857816.1, EVALUE 4.00e-34
caatggatccaaaccaagatgaaatctctgaactgacagatgaagaattcagaaggttgattattaagctactcaaggagccaccagagaaaggtgaaaaccaacttaaagaaattaaaaacaaaaaggaggatatgaatgaaaaattccatagaaagatagatatcgtaaagaaaagacaattacaacgtctggaaatgaaagacacacttagagaaatgcaaaatacactggaaggtttcaacaatagaattgaacaagtagaagaa

SEQ ID NO: 24551 - DNA, 134 bp, Homo sapiens
  MAP TO AL133295.11; EXPRESSED IN HELA, SIGNAL = 4.8; EXPRESSED IN LUNG, SIGNAL = 4.7; EXPRESSED IN ADULT LIVER, SIGNAL = 4.3; EXPRESSED IN HEART, SIGNAL = 5.3; EXPRESSED IN FETAL LIVER, SIGNAL = 5.1; EXPRESSED IN BRAIN, SIGNAL = 4.9; EXPRESSED IN BONE MARROW, SIGNAL = 4.3; EXPRESSED IN PLACENTA, SIGNAL =   5; NT HIT: M71245.1, EVALUE 1.20e+00; EST_HUMAN HIT: BE245070.1, EVALUE 1.00e-69; SWISSPROT HIT: P36417, EVALUE 4.10e+00
gccaatggtggcagagtctacatagaactatgcttcgtggtgttctggggaaaacctttcgacttgttggctatactattcaatatggctgtatagctcattgtgcttttgaatacgttggtggtgttgtcatg

SEQ ID NO: 24552 - DNA, 186 bp, Homo sapiens
  MAP TO AC015502.3; EXPRESSED IN ADULT LIVER, SIGNAL = 5.8; EXPRESSED IN HELA, SIGNAL = 5.3; EXPRESSED IN FETAL LIVER, SIGNAL = 2.9; EXPRESSED IN BRAIN, SIGNAL = 2.7; EXPRESSED IN PLACENTA, SIGNAL = 3.6; EXPRESSED IN HEART, SIGNAL =   3; EXPRESSED IN BONE MARROW, SIGNAL = 9.9; EXPRESSED IN LUNG, SIGNAL = 4.6; EST_HUMAN HIT: AA101247.1, EVALUE 3.00e-03; SWISSPROT HIT: P08547, EVALUE 1.00e-04; NT HIT: AL163202.2, EVALUE 1.10e-01
gaaactattatctgtggaaagaagttcagaaatttctcacagagcttaaaacacaactaccatccaatccagcaaaactattaccggatgtatatccaaaagaaaataaattgtcctaccaaaggagacatgttcttgtatgttcatcacagcgctattcatgagaaggaaaacacggactcaacc

SEQ ID NO: 24553 - DNA, 191 bp, Homo sapiens
  MAP TO AC019276.3; EXPRESSED IN LUNG, SIGNAL =   2; EXPRESSED IN ADULT LIVER, SIGNAL = 2.9; EXPRESSED IN HEART, SIGNAL = 2.4; EXPRESSED IN BRAIN, SIGNAL = 1.9; EXPRESSED IN BONE MARROW, SIGNAL = 1.7; EXPRESSED IN PLACENTA, SIGNAL = 1.9; EXPRESSED IN FETAL LIVER, SIGNAL = 1.8; NT HIT: X04267.1, EVALUE 1.80e+00; SWISSPROT HIT: P40603, EVALUE 5.10e-02; EST_HUMAN HIT: AW874179.1, EVALUE 6.70e-01
ccacatgaaattgaagtgggagaacatggtgtgtgagcattattgggggtggggtgcggagcaggcactggctttggttgaggtctgcaaaggaaagcacccccactgccaggctgctcaggagtggctcccaccctcgactgcggggaagtgctggaaccctccgcacgagggcaacctttcttgggctc

SEQ ID NO: 24554 - DNA, 119 bp, Homo sapiens
  MAP TO AC023134.3; EXPRESSED IN LUNG, SIGNAL = 1.7; EXPRESSED IN FETAL LIVER, SIGNAL = 1.3; EXPRESSED IN PLACENTA, SIGNAL =   2; EXPRESSED IN HEART, SIGNAL = 1.8; EXPRESSED IN ADULT LIVER, SIGNAL = 1.7; EXPRESSED IN BRAIN, SIGNAL = 1.4; EXPRESSED IN BONE MARROW, SIGNAL = 1.2; NT HIT: Z35775.1, EVALUE 1.00e+00; EST_HUMAN HIT: BE254850.1, EVALUE 7.00e-09
ctgaaaagtctgctttgtgattgtctgtcttcctccttctcttcctcccttgctgcttccttcctgctttcctgcctttcttctttccttctttttctgttctctcctttatcttcttc

SEQ ID NO: 24555 - DNA, 173 bp, Homo sapiens
  MAP TO AC011938.3; EXPRESSED IN PLACENTA, SIGNAL =   2; EXPRESSED IN HEART, SIGNAL = 1.8; EXPRESSED IN BRAIN, SIGNAL = 1.9; EXPRESSED IN LUNG, SIGNAL = 1.9; EXPRESSED IN ADULT LIVER, SIGNAL = 1.8; EXPRESSED IN FETAL LIVER, SIGNAL = 1.7; EXPRESSED IN BONE MARROW, SIGNAL =   2; NT HIT: AL163203.2, EVALUE 6.00e-03; EST_HUMAN HIT: AW466995.1, EVALUE 1.00e-05; SWISSPROT HIT: P08547, EVALUE 1.00e-03
aaaccaaaatatgtgaagcaaaaactgatggaattgaagtagaagatgacaattcaacagtaacagaaacatcaatacccgattctccaccagttaatgtaataaaccatattaacaaaggacaaaactatatgatcatatcgatagaccaagaaaaagcatttgaaaaaatc

SEQ ID NO: 24556 - DNA, 125 bp, Homo sapiens
  MAP TO AC022658.3; EXPRESSED IN LUNG, SIGNAL = 0.95; EXPRESSED IN PLACENTA, SIGNAL = 1.1; EXPRESSED IN ADULT LIVER, SIGNAL = 1.1; EXPRESSED IN BRAIN, SIGNAL = 1.1; EXPRESSED IN FETAL LIVER, SIGNAL = 0.92; EXPRESSED IN HEART, SIGNAL = 1.3; EXPRESSED IN BONE MARROW, SIGNAL = 1.1; NT HIT: U20949.1, EVALUE 4.30e+00; SWISSPROT HIT: O83279, EVALUE 9.20e+00; EST_HUMAN HIT: AW835644.1, EVALUE 1.60e+00
cacccagtgtgttagaaactcctttttggtcacgtccatagaatattctgtcccagaggtcaaagttaagacaagttgcttggtaggtaagacaagcttctttgtgctagtgttctcagcatcac

SEQ ID NO: 24557 - DNA, 98 bp, Homo sapiens
  MAP TO AC022474.3; EXPRESSED IN PLACENTA, SIGNAL =  25; EXPRESSED IN ADULT LIVER, SIGNAL =  45; EXPRESSED IN HELA, SIGNAL =  49; EXPRESSED IN BRAIN, SIGNAL =  23; EXPRESSED IN BONE MARROW, SIGNAL =  27; EXPRESSED IN FETAL LIVER, SIGNAL =  26; EXPRESSED IN HEART, SIGNAL =  25; EXPRESSED IN LUNG, SIGNAL =  23; EST_HUMAN HIT: AW812259.1, EVALUE 1.00e-19; SWISSPROT HIT: P39188, EVALUE 1.00e-06; NT HIT: U80017.1, EVALUE 6.00e-14
ctgtagtcccagctactctggaggttgaagtgggtggaatacttgagcccaggaggttgaggctgcagtcagctgtaattgtgccattgcacttcaac

SEQ ID NO: 24558 - DNA, 178 bp, Homo sapiens
  MAP TO AP000946.3; EXPRESSED IN PLACENTA, SIGNAL = 0.63; EXPRESSED IN FETAL LIVER, SIGNAL = 0.5; EXPRESSED IN ADULT LIVER, SIGNAL = 0.71; EXPRESSED IN HEART, SIGNAL = 1.2; EXPRESSED IN BRAIN, SIGNAL = 0.74; EXPRESSED IN BONE MARROW, SIGNAL = 0.61; EST_HUMAN HIT: BE799228.1, EVALUE 6.20e-01; SWISSPROT HIT: Q28295, EVALUE 2.60e-01
aacaggcatactggctgcacatccttccaatagagctagtatacttggctccaggcatcctctttgtgctgaatccccttgctcaaatctcacctttgattctcataaccacattatcaacagagaaggatgttgtggcagagagagagtaagagacacaggacatatgaatattgtg

SEQ ID NO: 24559 - DNA, 128 bp, Homo sapiens
  MAP TO AC013612.3; EXPRESSED IN ADULT LIVER, SIGNAL = 4.5; EXPRESSED IN HEART, SIGNAL = 3.5; EXPRESSED IN BRAIN, SIGNAL = 3.7; EXPRESSED IN BONE MARROW, SIGNAL = 3.6; EXPRESSED IN LUNG, SIGNAL = 3.3; EXPRESSED IN HELA, SIGNAL =   5; EXPRESSED IN FETAL LIVER, SIGNAL = 3.2; EXPRESSED IN PLACENTA, SIGNAL = 3.6; NT HIT: X00682.1, EVALUE 4.40e+00; SWISSPROT HIT: Q15034, EVALUE 9.30e-02; EST_HUMAN HIT: AA417173.1, EVALUE 4.20e-01
gacgggaaagtgttcacatttggagacaatcgctctggacagctgggatacagccccactcctgagaagagaggtccacaacttgtggaaagaattgatggcctagtttcgcagatagattgtggaag

SEQ ID NO: 24560 - DNA, 119 bp, Homo sapiens
  MAP TO AC013657.3; EXPRESSED IN PLACENTA, SIGNAL = 2.3; EXPRESSED IN LUNG, SIGNAL =   2; EXPRESSED IN BONE MARROW, SIGNAL = 2.9; EXPRESSED IN BRAIN, SIGNAL = 1.7; EXPRESSED IN FETAL LIVER, SIGNAL = 2.9; EXPRESSED IN HEART, SIGNAL =   2; EXPRESSED IN HELA, SIGNAL = 3.8; EXPRESSED IN ADULT LIVER, SIGNAL = 4.5; SWISSPROT HIT: Q00382, EVALUE 7.10e+00; EST_HUMAN HIT: AA017689.1, EVALUE 1.50e+00
atgtggtatttggtcacctgttatgagcctgactccatgccaagtgctgaggccgtcaccctggttaagatccccaccatctgcagcctactgcagtggaggaggctacattcccgaag

SEQ ID NO: 24561 - DNA, 98 bp, Homo sapiens
  MAP TO AC018529.4; EXPRESSED IN HELA, SIGNAL = 2.7; EXPRESSED IN LUNG, SIGNAL = 1.5; EXPRESSED IN ADULT LIVER, SIGNAL = 1.7; EXPRESSED IN FETAL LIVER, SIGNAL = 1.7; EXPRESSED IN BRAIN, SIGNAL = 1.5; EXPRESSED IN BONE MARROW, SIGNAL = 2.1; EXPRESSED IN PLACENTA, SIGNAL = 1.6; EXPRESSED IN HEART, SIGNAL = 1.8; NT HIT: AL161554.2, EVALUE 8.20e-01; SWISSPROT HIT: Q92207, EVALUE 9.50e+00; EST_HUMAN HIT: N44631.1, EVALUE 1.00e-19
ctgcatttggaaagagcacgatcgatccactcatgaattaaaaacaggctgtgtgttgtcagagaaaattcgtggcaagacagcttgataaatgtcat

SEQ ID NO: 24562 - DNA, 94 bp, Homo sapiens
  MAP TO AC016706.2; EXPRESSED IN PLACENTA, SIGNAL = 1.4; EXPRESSED IN BONE MARROW, SIGNAL = 1.3; EXPRESSED IN ADULT LIVER, SIGNAL = 1.6; EXPRESSED IN HEART, SIGNAL = 1.3; EXPRESSED IN FETAL LIVER, SIGNAL = 1.1; EXPRESSED IN BRAIN, SIGNAL = 1.3; EXPRESSED IN LUNG, SIGNAL = 1.3; EST_HUMAN HIT: AA769299.1, EVALUE 7.30e-02; NT HIT: AF305238.1, EVALUE 5.00e-02
atgcactttaaggtctcagaaggctttcttagaattctctttcttgggataatggtgagaatgaggaatctccaactcctcactcttgaggaag

SEQ ID NO: 24563 - DNA, 134 bp, Homo sapiens
  MAP TO AC012571.3; EXPRESSED IN ADULT LIVER, SIGNAL = 8.2; EXPRESSED IN HELA, SIGNAL = 8.2; EXPRESSED IN FETAL LIVER, SIGNAL = 4.2; EXPRESSED IN BRAIN, SIGNAL =   4; EXPRESSED IN BONE MARROW, SIGNAL = 3.9; EXPRESSED IN PLACENTA, SIGNAL = 6.2; EXPRESSED IN HEART, SIGNAL = 4.6; EXPRESSED IN LUNG, SIGNAL = 4.5; NT HIT: U66061.1, EVALUE 5.00e-06; EST_HUMAN HIT: AA081868.1, EVALUE 1.00e-10; SWISSPROT HIT: P39087, EVALUE 5.30e+00
caatgtttcttaaccagactgaaaagactgaaactacagatatagaatgtagaatccggatagcaaggatactcattgagatgcaggagaaagttgaaatccaatccaatgagtccagtaatatgatccaagag

SEQ ID NO: 24564 - DNA, 77 bp, Homo sapiens
  MAP TO AL161730.2; EXPRESSED IN LUNG, SIGNAL = 2.5; EXPRESSED IN ADULT LIVER, SIGNAL = 2.6; EXPRESSED IN HEART, SIGNAL = 2.9; EXPRESSED IN FETAL LIVER, SIGNAL = 2.5; EXPRESSED IN BRAIN, SIGNAL = 2.9; EXPRESSED IN PLACENTA, SIGNAL = 2.6; EXPRESSED IN HELA, SIGNAL = 4.6; EXPRESSED IN BONE MARROW, SIGNAL = 2.7; NT HIT: X98852.1, EVALUE 1.50e-01; EST_HUMAN HIT: H50288.1, EVALUE 9.00e-01
gaaaagccaagtttgagaaggagaatttcttagatgtcctggacgtgctcatcctcaccctctctagaagattcaag

SEQ ID NO: 24565 - DNA, 460 bp, Homo sapiens
  MAP TO AC015897.3; EXPRESSED IN PLACENTA, SIGNAL = 1.2; EXPRESSED IN HEART, SIGNAL = 1.2; EXPRESSED IN FETAL LIVER, SIGNAL =   1; EXPRESSED IN LUNG, SIGNAL = 2.1; EXPRESSED IN ADULT LIVER, SIGNAL = 1.5; EXPRESSED IN BRAIN, SIGNAL = 1.6; EXPRESSED IN BONE MARROW, SIGNAL =   1; NT HIT: X78577.1, EVALUE 4.50e+00; EST_HUMAN HIT: R80590.1, EVALUE 1.10e-01
agggagatccctccaggcatagaaaggggggcagagggagcagcagaagcagaaggggtcagaaggctgggtgaaggggggtcagaccccataggacaagcagcagcaaaagatgctgtgggtctgagtaaagatgaggctcctgaaaagcaagccttgatgctcacagtgcttgagacagacaaagcagcttctgaaggggaacagggtttagagaaggcagtgcttgcaaatgaagcagcagccctgaacttggagcatcttcatgaagtagcagccctgagagaggcagcgacatcggaggagggagaggctgagggtggggtggctgtgagtgatgtcggagaaagtgaagaggaagcatccatagacctagaggacacaggacccatggaggacacagcatcaaagagagaggacggttctgaagaggcaattcttgggggagaggaaccagcca

SEQ ID NO: 24566 - DNA, 318 bp, Homo sapiens
  MAP TO AC013611.3; EXPRESSED IN LUNG, SIGNAL = 1.9; EXPRESSED IN ADULT LIVER, SIGNAL = 2.2; EXPRESSED IN HELA, SIGNAL = 2.7; EXPRESSED IN HEART, SIGNAL = 1.9; EXPRESSED IN FETAL LIVER, SIGNAL = 1.7; EXPRESSED IN BRAIN, SIGNAL = 1.9; EXPRESSED IN PLACENTA, SIGNAL = 1.9; EXPRESSED IN BONE MARROW, SIGNAL = 2.2; NT HIT: M63707.1, EVALUE 1.30e-02; EST_HUMAN HIT: AV733158.1, EVALUE 2.90e-01; SWISSPROT HIT: Q12446, EVALUE 2.10e+00
gcagttaagcagtcacggctctgctgggacattttctcgcatgtcgatgtttctcaggagagctgctcagtgatttcccatcaccatcttcaccagagactccatgtcttcatcattagtgaccattgctttcccaccatttcccactggtaccctgagaggcaatgccagctaaagagccagcttctggaatgggggctggtggggcccttgacatggagcagggctcgaaatcaagagagccttcgaggtggagaagacacagggggaagaggggcaccctgggccagtggtgggaaggaggacatggaccaggag

SEQ ID NO: 24567 - DNA, 156 bp, Homo sapiens
  MAP TO AC016498.4; EXPRESSED IN HELA, SIGNAL = 4.4; EXPRESSED IN FETAL LIVER, SIGNAL = 3.9; EXPRESSED IN BONE MARROW, SIGNAL = 3.3; EXPRESSED IN LUNG, SIGNAL = 3.4; EXPRESSED IN PLACENTA, SIGNAL = 3.6; EXPRESSED IN ADULT LIVER, SIGNAL = 3.3; EXPRESSED IN HEART, SIGNAL = 3.8; EXPRESSED IN BRAIN, SIGNAL = 3.2; EST_HUMAN HIT: AA326273.1, EVALUE 8.30e+00; SWISSPROT HIT: Q03570, EVALUE 6.80e+00
ctgggagggctaatgcccattctcatccaggagcgaggaaggaccagctcccaggctggccttctgttaggatagatcctgctccataagaggccatggaagcaggacctgccacagaatttccaggacccagggaaagatgtccatgtaggaccc

SEQ ID NO: 24568 - DNA, 114 bp, Homo sapiens
  MAP TO AL161724.2; EXPRESSED IN HELA, SIGNAL = 3.6; EXPRESSED IN LUNG, SIGNAL = 4.6; EXPRESSED IN PLACENTA, SIGNAL = 4.2; EXPRESSED IN FETAL LIVER, SIGNAL = 4.2; EXPRESSED IN BONE MARROW, SIGNAL = 3.7; EXPRESSED IN ADULT LIVER, SIGNAL = 4.2; EXPRESSED IN HEART, SIGNAL = 3.9; EXPRESSED IN BRAIN, SIGNAL = 4.1; EST_HUMAN HIT: AI336411.1, EVALUE 3.70e-01; NT HIT: Y08502.1, EVALUE 3.90e+00; SWISSPROT HIT: P04626, EVALUE 3.20e+00
tccatctgccacataagcctcctgcttttcatccagcattccagaatcattctcaacccaggggtttcgcacttgctgctccccatgtctggaacctttttttccagtgcccat

SEQ ID NO: 24569 - DNA, 270 bp, Homo sapiens
  MAP TO AC016851.3; EXPRESSED IN PLACENTA, SIGNAL = 5.3; EXPRESSED IN BONE MARROW, SIGNAL =  11; EXPRESSED IN ADULT LIVER, SIGNAL = 5.3; EXPRESSED IN HEART, SIGNAL = 3.4; EXPRESSED IN BRAIN, SIGNAL = 6.2; EXPRESSED IN LUNG, SIGNAL = 4.2; EXPRESSED IN HELA, SIGNAL =  13; EXPRESSED IN FETAL LIVER, SIGNAL =  12; NT HIT: gi4504452, EVALUE 0.00e+00; SWISSPROT HIT: Q07244, EVALUE 2.00e-42; EST_HUMAN HIT: BE730772.1, EVALUE 0.00e+00
actctgatgaatcaacagcctcaactcgcagtcaaagtcacttcctttatagtgttggtaacttaagcattccacagcaacagattcgagcggcagctggctggttgcagtgggtgatggaaactgcaggccctcttccaaggtagggatgattttcttcagaatttctccaattgtgtcaataccagcactgatactcaatatgtgctcggggccactgctgtctgggactgaaacactggcattgtagtctgtacggagagccttgat

SEQ ID NO: 24570 - DNA, 141 bp, Homo sapiens
  MAP TO AC013771.3; EXPRESSED IN PLACENTA, SIGNAL = 1.7; EXPRESSED IN ADULT LIVER, SIGNAL = 1.4; EXPRESSED IN HEART, SIGNAL = 1.6; EXPRESSED IN FETAL LIVER, SIGNAL = 1.3; EXPRESSED IN BONE MARROW, SIGNAL = 1.2; EXPRESSED IN LUNG, SIGNAL = 1.4; EXPRESSED IN BRAIN, SIGNAL = 1.6; NT HIT: AE004392.1, EVALUE 1.30e+00; EST_HUMAN HIT: BF515014.1, EVALUE 1.90e+00; SWISSPROT HIT: P97852, EVALUE 5.30e+00
tcaggtctcattagcagagaccacatcattggtcaaaaccacggtggaaatcttggcagttatgttattgactgccttagggaaagcaggatgagagaaagtgcagatgcatgtccaactcacatgaacataaagaaataa

SEQ ID NO: 24571 - DNA, 99 bp, Homo sapiens
  MAP TO AC025324.2; EXPRESSED IN BONE MARROW, SIGNAL =   4; EXPRESSED IN LUNG, SIGNAL = 4.2; EXPRESSED IN PLACENTA, SIGNAL = 3.9; EXPRESSED IN ADULT LIVER, SIGNAL =   4; EXPRESSED IN HELA, SIGNAL = 4.8; EXPRESSED IN HEART, SIGNAL = 3.1; EXPRESSED IN FETAL LIVER, SIGNAL = 3.5; EXPRESSED IN BRAIN, SIGNAL = 3.5; NT HIT: AF108133.1, EVALUE 8.30e-01
gttggaccctgggaagcacatgcagtgtgtgatggctttaccagttgaagcgtcagagtcaccactggtgatgggcattgggcggccagtcctcagtcc

SEQ ID NO: 24572 - DNA, 162 bp, Homo sapiens
  MAP TO AC025863.2; EXPRESSED IN LUNG, SIGNAL = 4.5; EXPRESSED IN ADULT LIVER, SIGNAL = 4.1; EXPRESSED IN HELA, SIGNAL = 2.9; EXPRESSED IN HEART, SIGNAL = 3.3; EXPRESSED IN FETAL LIVER, SIGNAL = 3.1; EXPRESSED IN BRAIN, SIGNAL = 3.4; EXPRESSED IN PLACENTA, SIGNAL = 3.5; EXPRESSED IN BONE MARROW, SIGNAL = 3.3; NT HIT: M19703.1, EVALUE 3.70e-01; EST_HUMAN HIT: BE886479.1, EVALUE 3.00e-86; SWISSPROT HIT: P18562, EVALUE 2.00e-14
tgagaattggatacatcagaaggacttttctccggtaaatgtctggggggaatttggcataatatactttggctctttgtgtctcctcatcactctgaatcaggatctttccaattcgtatggatcgacagcagtctcgtaaaccttgttccattgcctcac

SEQ ID NO: 24573 - DNA, 109 bp, Homo sapiens
  MAP TO AC018583.3; EXPRESSED IN PLACENTA, SIGNAL = 1.1; EXPRESSED IN ADULT LIVER, SIGNAL = 1.3; EXPRESSED IN BRAIN, SIGNAL = 2.5; EXPRESSED IN BONE MARROW, SIGNAL = 1.2; EXPRESSED IN LUNG, SIGNAL = 1.2; EXPRESSED IN HEART, SIGNAL = 1.2; EXPRESSED IN FETAL LIVER, SIGNAL = 0.93; EST_HUMAN HIT: AU129307.1, EVALUE 4.00e-53; SWISSPROT HIT: Q99435, EVALUE 7.00e-17; NT HIT: gi5453765, EVALUE 5.00e-55
ctgtctcgagctgaacagcgaatgaatagattggatcagtgctattgtgaaaggacttgcaccatgaagggaaccacctaccgagaatttgagtcctggatagacggct

SEQ ID NO: 24574 - DNA, 138 bp, Homo sapiens
  MAP TO AC015842.4; EXPRESSED IN PLACENTA, SIGNAL = 2.4; EXPRESSED IN BONE MARROW, SIGNAL = 2.3; EXPRESSED IN ADULT LIVER, SIGNAL = 2.6; EXPRESSED IN HEART, SIGNAL = 2.2; EXPRESSED IN BRAIN, SIGNAL = 2.5; EXPRESSED IN LUNG, SIGNAL = 2.2; EXPRESSED IN HELA, SIGNAL = 2.3; EXPRESSED IN FETAL LIVER, SIGNAL = 2.1; EST_HUMAN HIT: AI392964.1, EVALUE 3.00e-14; SWISSPROT HIT: Q9UHT9, EVALUE 9.10e+00; NT HIT: AF200719.1, EVALUE 9.00e-17
atggaaatttatcaacacgagtgtctcatccttgttgtcttcatgttgagtaggctgagaaggaggaggaagagaggggttggtcttgctgtttcagaggtggcagagtcagaagaggtggaggaggtggaaggggag

SEQ ID NO: 24575 - DNA, 129 bp, Homo sapiens
  MAP TO AL138956.3; EXPRESSED IN LUNG, SIGNAL = 1.6; EXPRESSED IN PLACENTA, SIGNAL = 1.3; EXPRESSED IN ADULT LIVER, SIGNAL = 1.4; EXPRESSED IN FETAL LIVER, SIGNAL = 1.1; EXPRESSED IN BRAIN, SIGNAL = 1.4; EXPRESSED IN BONE MARROW, SIGNAL = 1.2; EXPRESSED IN HEART, SIGNAL = 1.2; SWISSPROT HIT: O01975, EVALUE 4.10e+00; NT HIT: X96933.1, EVALUE 1.80e-02
atgtttcttgaacttccatctcatgctcagttggtgaagcataaccactacaagccaaaccaaaattatagtatttttctcctcatcaaaatcagtgagcatgttttgaatgaagaaatgggaaaaaag

SEQ ID NO: 24576 - DNA, 131 bp, Homo sapiens
  MAP TO AC015914.3; EXPRESSED IN PLACENTA, SIGNAL = 0.99; EXPRESSED IN FETAL LIVER, SIGNAL = 0.57; EXPRESSED IN BRAIN, SIGNAL = 0.84; EXPRESSED IN BONE MARROW, SIGNAL = 0.85; EXPRESSED IN ADULT LIVER, SIGNAL = 0.66; EXPRESSED IN HEART, SIGNAL = 1.3; SWISSPROT HIT: P51461, EVALUE 1.10e+00; EST_HUMAN HIT: AW170559.1, EVALUE 4.30e-01
ctgacattttagctgggcccctctgctcagtggctggcactgctgggccaggaggagggtgggattctcattaacgagattccccacacctgcaagttgaccttccagccatgggcttagctcttcctccc

SEQ ID NO: 24577 - DNA, 153 bp, Homo sapiens
  MAP TO AL121918.15; EXPRESSED IN LUNG, SIGNAL = 1.5; EXPRESSED IN ADULT LIVER, SIGNAL = 1.5; EXPRESSED IN BRAIN, SIGNAL = 1.2; EXPRESSED IN BONE MARROW, SIGNAL = 1.2; EXPRESSED IN PLACENTA, SIGNAL = 1.4; EXPRESSED IN HEART, SIGNAL = 1.2; EXPRESSED IN FETAL LIVER, SIGNAL = 1.1; NT HIT: AJ271735.1, EVALUE 9.00e-08; EST_HUMAN HIT: BE082877.1, EVALUE 1.00e-07; SWISSPROT HIT: P11369, EVALUE 7.00e-11
ttttgacatccttgtcaaaattcagttgaccatagacacaaggttttatttctggactctcacttttactccatttatctatacgtctatccttatgccaggaccatactttcttgatgaccatttcattgtagtaagttttgaagtcaagaa

SEQ ID NO: 24578 - DNA, 150 bp, Homo sapiens
  MAP TO AC020991.3; EXPRESSED IN PLACENTA, SIGNAL = 1.6; EXPRESSED IN FETAL LIVER, SIGNAL = 2.4; EXPRESSED IN HEART, SIGNAL = 1.4; EXPRESSED IN BONE MARROW, SIGNAL = 1.5; EXPRESSED IN LUNG, SIGNAL = 1.8; EXPRESSED IN ADULT LIVER, SIGNAL = 1.9; EXPRESSED IN BRAIN, SIGNAL = 1.4; EST_HUMAN HIT: AI802760.1, EVALUE 7.90e+00; SWISSPROT HIT: Q03077, EVALUE 4.00e+00; NT HIT: M29953.1, EVALUE 1.30e+00
  unsure 84
gacaacaactaccaatttaggcttatccagttgttgccgaatgagtggcattcccagagcacttcagaaactgagtatgtaganaataagaggaaacactcttatcttgaccagacaatgctatatccaaccatgaataggattgttata

SEQ ID NO: 24579 - DNA, 84 bp, Homo sapiens
  MAP TO AC006319.3; EXPRESSED IN HELA, SIGNAL = 3.4; EXPRESSED IN HEART, SIGNAL = 2.4; EXPRESSED IN BONE MARROW, SIGNAL = 2.4; EXPRESSED IN LUNG, SIGNAL = 2.8; EXPRESSED IN PLACENTA, SIGNAL = 2.8; EXPRESSED IN ADULT LIVER, SIGNAL = 2.5; EXPRESSED IN FETAL LIVER, SIGNAL = 2.2; EXPRESSED IN BRAIN, SIGNAL = 2.4; NT HIT: AL163284.2, EVALUE 1.70e-01
gctggagaggtaggggcttcaccacaacacatggaaagagcacagaaacagcaggtaggagaggaccctgcagcatttctcaaa

SEQ ID NO: 24580 - DNA, 150 bp, Homo sapiens
  MAP TO AL121901.10; EXPRESSED IN LUNG, SIGNAL = 3.1; EXPRESSED IN PLACENTA, SIGNAL = 2.6; EXPRESSED IN ADULT LIVER, SIGNAL =   3; EXPRESSED IN HELA, SIGNAL = 4.1; EXPRESSED IN HEART, SIGNAL = 3.1; EXPRESSED IN BRAIN, SIGNAL = 2.4; EXPRESSED IN BONE MARROW, SIGNAL = 2.9; EXPRESSED IN FETAL LIVER, SIGNAL = 2.5; SWISSPROT HIT: P16648, EVALUE 3.50e-01; EST_HUMAN HIT: AI638623.1, EVALUE 5.00e-75
gtccttcgataacaacatcgtaaagatgtgtgcacatatgagcatcgttgtggagttctggctggagaaagacgagtttggccggagggatctggtgataggcaaatgcgatgcagagcccagcagtgtccatgtggccatcctcactga

SEQ ID NO: 24581 - DNA, 273 bp, Homo sapiens
  MAP TO AC007923.2; EXPRESSED IN LUNG, SIGNAL = 3.4; EXPRESSED IN ADULT LIVER, SIGNAL = 3.7; EXPRESSED IN HEART, SIGNAL = 2.9; EXPRESSED IN FETAL LIVER, SIGNAL = 2.9; EXPRESSED IN BRAIN, SIGNAL = 2.8; EXPRESSED IN BONE MARROW, SIGNAL = 3.4; EXPRESSED IN HELA, SIGNAL = 3.4; EXPRESSED IN PLACENTA, SIGNAL = 3.2; SWISSPROT HIT: P23963, EVALUE 2.00e-08; EST_HUMAN HIT: BF666614.1, EVALUE 5.00e-27; NT HIT: AL163249.2, EVALUE 9.00e-22
ttgtaacactcaccgcgaaggtccgcggcttcattcttgaagtcagcgagaccaggaacccaccagaagtaataaatttcagacacaggattatgggcatgcaccaccatgcccagctaattttgttttttttagtagagatggggtttctccagttggtcaggctggtcttgaactcccgacctcaggtaacccacctgcctgagcctcccaaagtgtattcctttactttcttaataaacttgctttcactttactctatggacttgcccc

SEQ ID NO: 24582 - DNA, 247 bp, Homo sapiens
  MAP TO AL121895.18; EXPRESSED IN LUNG, SIGNAL =  11; EXPRESSED IN ADULT LIVER, SIGNAL =  11; EXPRESSED IN HELA, SIGNAL =  14; EXPRESSED IN FETAL LIVER, SIGNAL = 9.1; EXPRESSED IN BRAIN, SIGNAL = 9.2; EXPRESSED IN PLACENTA, SIGNAL =  11; EXPRESSED IN HEART, SIGNAL = 9.9; EXPRESSED IN BONE MARROW, SIGNAL =  10; SWISSPROT HIT: Q9Z183, EVALUE 1.60e+00; EST_HUMAN HIT: AI878956.1, EVALUE 1.00e-103; NT HIT: AB002336.1, EVALUE 1.00e-103
tggacctggaggacggtctgggcaggaaaggtacgcccatgctctcgggcacacacctgttcagcaggccgcgtgtcctgctgggatggatgcttctcattggagttggcctctgggtggccgtggcctgcaggggtcacaggggtggtcacagcggcagcagcctcgggctgctgcggggcctcctcctgagctttcttcacctcagagtcggggcctgtctctgttgtcatggtgaccagcacgc

SEQ ID NO: 24583 - DNA, 102 bp, Homo sapiens; identical to SEQ ID NO: 24188
  MAP TO AL133232.9; EXPRESSED IN HELA, SIGNAL = 4.5; EXPRESSED IN PLACENTA, SIGNAL = 3.6; EXPRESSED IN HEART, SIGNAL = 3.4; EXPRESSED IN BONE MARROW, SIGNAL = 3.3; EXPRESSED IN LUNG, SIGNAL = 3.4; EXPRESSED IN ADULT LIVER, SIGNAL = 4.5; EXPRESSED IN FETAL LIVER, SIGNAL = 3.1; EXPRESSED IN BRAIN, SIGNAL = 3.6; NT HIT: AL163248.2, EVALUE 2.00e-29; EST_HUMAN HIT: AI052242.1, EVALUE 3.00e-29

SEQ ID NO: 24584 - DNA, 204 bp, Homo sapiens
  MAP TO AC009466.2; EXPRESSED IN PLACENTA, SIGNAL =  11; EXPRESSED IN HELA, SIGNAL = 6.7; EXPRESSED IN HEART, SIGNAL = 5.8; EXPRESSED IN FETAL LIVER, SIGNAL = 8.2; EXPRESSED IN BONE MARROW, SIGNAL = 5.5; EXPRESSED IN LUNG, SIGNAL = 6.6; EXPRESSED IN ADULT LIVER, SIGNAL = 6.9; EXPRESSED IN BRAIN, SIGNAL = 6.2; NT HIT: gi11438643, EVALUE 1.00e-103; SWISSPROT HIT: Q9RPF2, EVALUE 1.60e+00; EST_HUMAN HIT: AA604417.1, EVALUE 1.00e-106
acatctctggcttacactcatttatcatttcagtcaggatctcaatccccccagcatagaacaaggggatctggtcaggcttggaaagggtctccaggaggttcttggtggtcacggctgtgttctttcctgaatccagcagttcgtgggcttccttttcttgaaggtctgctttttcctgaagatctacttgattcaggtaac

SEQ ID NO: 24585 - DNA, 267 bp, Homo sapiens
  MAP TO AL157997.2; EXPRESSED IN LUNG, SIGNAL = 7.3; EXPRESSED IN ADULT LIVER, SIGNAL = 7.4; EXPRESSED IN HEART, SIGNAL = 6.5; EXPRESSED IN FETAL LIVER, SIGNAL = 7.4; EXPRESSED IN BRAIN, SIGNAL = 6.6; EXPRESSED IN BONE MARROW, SIGNAL = 6.1; EXPRESSED IN HELA, SIGNAL = 6.7; EXPRESSED IN PLACENTA, SIGNAL = 7.3; SWISSPROT HIT: P09099, EVALUE 2.40e+00; EST_HUMAN HIT: AW997245.1, EVALUE 3.80e+00
agaattgtttactccaagagcatccatggaacagaaataaaagggaagggaataaagccaaaggatatgcaaaatatctactcactgcagggcatgctcctcaagcttggtactcagtatcatttacctcaattaagtgtgagcagctcaccttgtaagactccccagcccatgtcacctggctttgagactgtcaactatctctgggttcagtcacatcaagaatctgttcataggaataatcaggttgtgctggctgagagcatg

SEQ ID NO: 24586 - DNA, 162 bp, Homo sapiens
  MAP TO AC011815.2; EXPRESSED IN LUNG, SIGNAL = 1.4; EXPRESSED IN PLACENTA, SIGNAL = 1.4; EXPRESSED IN HEART, SIGNAL = 1.4; EXPRESSED IN FETAL LIVER, SIGNAL = 1.2; EXPRESSED IN BONE MARROW, SIGNAL = 1.2; EXPRESSED IN ADULT LIVER, SIGNAL = 1.4; EXPRESSED IN BRAIN, SIGNAL = 1.2; NT HIT: X97943.1, EVALUE 3.70e-01; EST_HUMAN HIT: BF515938.1, EVALUE 1.00e-82; SWISSPROT HIT: O97711, EVALUE 8.90e+00
atgtcagatgactctgaccacaaaggtgttaatcagaagatgttacagttgagccagactttgaagaatgttacaacggccaatgactggaagagacgacttcaagtgatgttctgtatctactatccaatatggaagccattagccatttatggctatgtg

SEQ ID NO: 24587 - DNA, 324 bp, Homo sapiens
  MAP TO AL161642.2; EXPRESSED IN PLACENTA, SIGNAL = 2.3; EXPRESSED IN HELA, SIGNAL =   3; EXPRESSED IN FETAL LIVER, SIGNAL = 2.8; EXPRESSED IN HEART, SIGNAL = 1.5; EXPRESSED IN BONE MARROW, SIGNAL = 5.3; EXPRESSED IN LUNG, SIGNAL = 2.3; EXPRESSED IN ADULT LIVER, SIGNAL =   3; EXPRESSED IN BRAIN, SIGNAL = 3.4; EST_HUMAN HIT: AA465124.1, EVALUE 1.00e-119; SWISSPROT HIT: P45559, EVALUE 2.50e-01
ctcctccaactcctcccgggaaacccaagccctgccgctcatggaacagaagaactggaaccgaagtttctggaacagggctatctgagagcggttcttcctggccctcgggttcatgcaacggcataactggaaccgacggttacggaccaagggtatgcgagagcgggtcttcccatacaggaagtagaagatgttttgtttggggtcctcgtcgtcctcctccatgtcattggccaggtagctgaggacagaaatcaggttgctgctcaggggcaccaccaggagaggcctccggctgaggtcagcttcccagagaggaag

SEQ ID NO: 24588 - DNA, 251 bp, Homo sapiens
  MAP TO AL161732.1; EXPRESSED IN ADULT LIVER, SIGNAL = 2.1; EXPRESSED IN LUNG, SIGNAL = 1.8; EXPRESSED IN PLACENTA, SIGNAL = 1.9; EXPRESSED IN HELA, SIGNAL = 2.3; EXPRESSED IN HEART, SIGNAL = 1.7; EXPRESSED IN FETAL LIVER, SIGNAL =   2; EXPRESSED IN BRAIN, SIGNAL = 1.7; EXPRESSED IN BONE MARROW, SIGNAL = 1.8; NT HIT: AL163247.2, EVALUE 3.00e-09; EST_HUMAN HIT: AI733082.1, EVALUE 6.00e-08; SWISSPROT HIT: P53450, EVALUE 2.30e+00
tcacatgctactacagactgggtgacttaaacgacagaaatgtattttctcaaagttctggaggttggaaatctggaagtccaaggtcaaggtgccagcaggcttggtttctggcgaggcctttctcctcagctcgcagatcgtacctccttgctctgtcctctcattgcccatctctctgtggcacacatgttgagagagagctctctgttgttgcttcttcttataggacatctgtcctactggactag

SEQ ID NO: 24589 - DNA, 150 bp, Homo sapiens
  MAP TO AL158176.5; EXPRESSED IN PLACENTA, SIGNAL = 2.8; EXPRESSED IN ADULT LIVER, SIGNAL = 2.8; EXPRESSED IN HEART, SIGNAL = 3.1; EXPRESSED IN FETAL LIVER, SIGNAL =   2; EXPRESSED IN BONE MARROW, SIGNAL = 2.9; EXPRESSED IN LUNG, SIGNAL = 2.9; EXPRESSED IN HELA, SIGNAL = 3.6; EXPRESSED IN BRAIN, SIGNAL = 2.3; EST_HUMAN HIT: AV691563.1, EVALUE 3.00e-61; SWISSPROT HIT: P00640, EVALUE 4.60e-01; NT HIT: gi11421778, EVALUE 2.00e-61
atgaaggataacattaatacctttgtttctaggattatagaattatgtcaccagttccctcatggaatcacagaccaagtaattcagaatgaaatgcctcatatagaagcccagcagcgggcagtagccatcaataggttgttgtctatg

SEQ ID NO: 24590 - DNA, 96 bp, Homo sapiens
  MAP TO AC023296.2; EXPRESSED IN LUNG, SIGNAL = 3.5; EXPRESSED IN HEART, SIGNAL = 3.3; EXPRESSED IN BRAIN, SIGNAL = 3.3; EXPRESSED IN PLACENTA, SIGNAL = 3.4; EXPRESSED IN FETAL LIVER, SIGNAL = 3.4; EXPRESSED IN ADULT LIVER, SIGNAL =   4; EXPRESSED IN HELA, SIGNAL = 4.3; EXPRESSED IN BONE MARROW, SIGNAL = 3.5; NT HIT: AB007927.1, EVALUE 3.20e+00; SWISSPROT HIT: P08174, EVALUE 9.60e-02; EST_HUMAN HIT: BE728756.1, EVALUE 1.20e+00
ggaagttcccacaagccggaaaccaggattgcactggtaaaccaccgtgtctctgtaactgaagccatctccactaatgtgaccgttcacaatcgg

SEQ ID NO: 24591 - DNA, 100 bp, Homo sapiens
  MAP TO AC018530.4; EXPRESSED IN ADULT LIVER, SIGNAL = 5.4; EXPRESSED IN BRAIN, SIGNAL = 4.8; EXPRESSED IN HELA, SIGNAL = 6.5; EXPRESSED IN HEART, SIGNAL = 5.3; EXPRESSED IN BONE MARROW, SIGNAL = 5.2; EXPRESSED IN LUNG, SIGNAL = 4.5; EXPRESSED IN PLACENTA, SIGNAL =   5; EXPRESSED IN FETAL LIVER, SIGNAL = 7.2; SWISSPROT HIT: P21817, EVALUE 3.20e+00; EST_HUMAN HIT: W30810.1, EVALUE 4.00e-16; NT HIT: D13391.1, EVALUE 2.00e-17
tcctgcatataggatgcctgctcctgctttgccttccaccatgagtaaaagctccctgaggcctcctgaaaagtagttgccaccatgctttctgtacagc

SEQ ID NO: 24592 - DNA, 177 bp, Homo sapiens
  MAP TO AC022038.2; EXPRESSED IN ADULT LIVER, SIGNAL = 1.5; EXPRESSED IN BRAIN, SIGNAL = 1.1; EXPRESSED IN LUNG, SIGNAL = 1.2; EXPRESSED IN HEART, SIGNAL = 1.3; EXPRESSED IN BONE MARROW, SIGNAL = 1.2; EXPRESSED IN PLACENTA, SIGNAL = 1.6; EXPRESSED IN FETAL LIVER, SIGNAL = 1.3; EST_HUMAN HIT: AA731904.1, EVALUE 2.40e+00; SWISSPROT HIT: P32357, EVALUE 5.10e+00; NT HIT: AL139076.2, EVALUE 4.10e-01
atgccgcatttcctgattttcaccactgtgaaattttttccggactactatagtatctacaagaggcaaatgaactattccatgacatggcaaatccattcttttttgcccatctacacaatcgataccaatcgccacagccaaattgatctggctgcaattcacatcaattcttag

SEQ ID NO: 24593 - DNA, 103 bp, Homo sapiens
  MAP TO AL133419.11; EXPRESSED IN LUNG, SIGNAL = 3.1; EXPRESSED IN FETAL LIVER, SIGNAL = 3.6; EXPRESSED IN BONE MARROW, SIGNAL = 2.6; EXPRESSED IN HEART, SIGNAL = 3.2; EXPRESSED IN PLACENTA, SIGNAL = 3.3; EXPRESSED IN ADULT LIVER, SIGNAL =   3; EXPRESSED IN HELA, SIGNAL = 3.9; EXPRESSED IN BRAIN, SIGNAL =   3; NT HIT: AF013167.1, EVALUE 3.40e+00
ggaaagccaagaaatgcagagagaagtagaggaggaagaagaggaggaggaagaggaggaaaaagaagggaaaagagaaagaaggaaaaagaaaaaagggagg

SEQ ID NO: 24594 - DNA, 108 bp, Homo sapiens
  MAP TO AC021287.4; EXPRESSED IN LUNG, SIGNAL = 3.7; EXPRESSED IN HELA, SIGNAL =   5; EXPRESSED IN HEART, SIGNAL = 3.6; EXPRESSED IN PLACENTA, SIGNAL = 3.6; EXPRESSED IN FETAL LIVER, SIGNAL = 3.5; EXPRESSED IN ADULT LIVER, SIGNAL = 4.1; EXPRESSED IN BRAIN, SIGNAL = 3.2; EXPRESSED IN BONE MARROW, SIGNAL = 3.4; NT HIT: gi11430963, EVALUE 9.20e-01
cttagagtgtgactcaagatcactgaggtctgtgctagtttcagctgtgtcagttgctgtgcaacctttaacagggatcttaacttctctggatctcagttgttctgt

SEQ ID NO: 24595 - DNA, 167 bp, Homo sapiens
  MAP TO AC023032.2; EXPRESSED IN LUNG, SIGNAL =   6; EXPRESSED IN ADULT LIVER, SIGNAL = 7.4; EXPRESSED IN HELA, SIGNAL = 8.6; EXPRESSED IN BRAIN, SIGNAL = 5.4; EXPRESSED IN BONE MARROW, SIGNAL = 6.1; EXPRESSED IN PLACENTA, SIGNAL = 6.3; EXPRESSED IN HEART, SIGNAL = 6.5; EXPRESSED IN FETAL LIVER, SIGNAL = 5.9; SWISSPROT HIT: P11260, EVALUE 1.40e-02; NT HIT: AF223391.1, EVALUE 2.00e-03; EST_HUMAN HIT: AW892507.1, EVALUE 2.00e-07
atgaaacaaaagttaaaggcagctaaggagaatggacatgacacctacaaaggaaaccccataaggctaagaatagaccttttagcagaaaaccaacaaagcagaagacaaagggggcctatgtttagcattcttaaaaaaatttcagtgaagaatttcatgttcag

SEQ ID NO: 24596 - DNA, 294 bp, Homo sapiens
  MAP TO AL162458.1; EXPRESSED IN LUNG, SIGNAL = 1.1; EXPRESSED IN PLACENTA, SIGNAL = 0.77; EXPRESSED IN BRAIN, SIGNAL = 1.1; EXPRESSED IN BONE MARROW, SIGNAL = 1.2; EXPRESSED IN FETAL LIVER, SIGNAL = 1.3; EXPRESSED IN ADULT LIVER, SIGNAL = 0.9; EXPRESSED IN HEART, SIGNAL = 1.2; EST_HUMAN HIT: AW977544.1, EVALUE 1.00e-102; SWISSPROT HIT: P28167, EVALUE 9.10e-02; NT HIT: gi11560151, EVALUE 0.00e+00
gagcccccatgacatcaccaatgtccagttccaccttggcccacagcctagcagccattgaggccctggcagatggccccacatccacatccacatgcctggaggcacagggtgggcccagctccccggtgcagctgcccccagcctccggtgccgaagagccggacctgcagagcctggaggccatgatggaggtggtggtggtgcagcagttcaaatgcaagatgtgccagtaccggagcagcaccaaggccacactgctgcgccacatgcgggaacgccacttccgtccag

SEQ ID NO: 24597 - DNA, 204 bp, Homo sapiens
  MAP TO AC011859.4; EXPRESSED IN BONE MARROW, SIGNAL = 6.4; EXPRESSED IN ADULT LIVER, SIGNAL = 5.9; EXPRESSED IN BRAIN, SIGNAL = 5.2; EXPRESSED IN LUNG, SIGNAL = 5.8; EXPRESSED IN PLACENTA, SIGNAL = 5.6; EXPRESSED IN HELA, SIGNAL = 7.7; EXPRESSED IN HEART, SIGNAL = 6.4; EXPRESSED IN FETAL LIVER, SIGNAL = 5.8; SWISSPROT HIT: O50404, EVALUE 3.80e+00; EST_HUMAN HIT: AA131248.1, EVALUE 1.00e-111; NT HIT: Y13829.1, EVALUE 1.00e-111
ccaatgttttcagttgcaccaagcttagccaccaatgcatcagcagccgcctttaatccctatctgggacctgtttctccaagcctggtcccggcagagatcttgccgactgcaccaatgttggttacagggaatccgggtgtccctgtacctgcagctgctgcagctgctgcacagaaattaatgcgaacagacagacttgag

SEQ ID NO: 24598 - DNA, 162 bp, Homo sapiens
  MAP TO AC015570.5; EXPRESSED IN LUNG, SIGNAL = 1.8; EXPRESSED IN PLACENTA, SIGNAL =   1; EXPRESSED IN HEART, SIGNAL = 1.4; EXPRESSED IN FETAL LIVER, SIGNAL = 1.6; EXPRESSED IN BRAIN, SIGNAL = 1.5; EXPRESSED IN BONE MARROW, SIGNAL = 1.7; EXPRESSED IN ADULT LIVER, SIGNAL = 1.6; EXPRESSED IN HELA, SIGNAL = 2.4; SWISSPROT HIT: Q01497, EVALUE 6.00e-01; NT HIT: AE001013.1, EVALUE 1.50e+00
ttactctgggacagcattggtgtattttcggaaagctgtcatgacccagttgaggaagactgctggaattttctcctctttttcctgagtaatatctctaaccttatgatagttcatgagatttactatgcacttgtccattgccttagcaaagtaataaaa

SEQ ID NO: 24599 - DNA, 132 bp, Homo sapiens
  MAP TO AC021824.2; EXPRESSED IN ADULT LIVER, SIGNAL = 5.1; EXPRESSED IN HELA, SIGNAL = 6.3; EXPRESSED IN BRAIN, SIGNAL = 4.4; EXPRESSED IN BONE MARROW, SIGNAL = 4.1; EXPRESSED IN PLACENTA, SIGNAL = 4.8; EXPRESSED IN HEART, SIGNAL = 4.7; EXPRESSED IN FETAL LIVER, SIGNAL = 4.2; EXPRESSED IN LUNG, SIGNAL = 4.6; SWISSPROT HIT: P13520, EVALUE 1.10e+00; EST_HUMAN HIT: AW880885.1, EVALUE 8.00e-12; NT HIT: AL163303.2, EVALUE 5.00e-12
atggatgactttgacggcttcaagatttcagtgaaggaaataaatgcagatatgatgaaaacagcaagagaactagaattagaagtggtgtctaaagctgtaatcaaattgttgcactcttgtgataaaatt

SEQ ID NO: 24600 - DNA, 157 bp, Homo sapiens
  MAP TO AC013777.3; EXPRESSED IN LUNG, SIGNAL = 3.4; EXPRESSED IN HEART, SIGNAL = 4.1; EXPRESSED IN PLACENTA, SIGNAL = 3.4; EXPRESSED IN FETAL LIVER, SIGNAL = 3.9; EXPRESSED IN ADULT LIVER, SIGNAL = 4.2; EXPRESSED IN HELA, SIGNAL = 4.9; EXPRESSED IN BRAIN, SIGNAL = 3.8; EXPRESSED IN BONE MARROW, SIGNAL = 4.4; EST_HUMAN HIT: AA634801.1, EVALUE 2.00e-06; SWISSPROT HIT: P39192, EVALUE 7.90e-01; NT HIT: AF200923.2, EVALUE 6.00e-09
ctaattcattttcttcttgttctttcttctttcctcctcctcctccttctcctcctcctgctcttcttcttcctcctcctccttcttctttttttttttttggatagagtctcgctctatcactctgtcaccaggctggagtgcagtggcaaaatca

SEQ ID NO: 24601 - DNA, 246 bp, Homo sapiens
  MAP TO AL137853.3; EXPRESSED IN PLACENTA, SIGNAL = 1.6; EXPRESSED IN ADULT LIVER, SIGNAL = 0.84; EXPRESSED IN FETAL LIVER, SIGNAL = 1.5; EXPRESSED IN BONE MARROW, SIGNAL = 1.4; EXPRESSED IN HEART, SIGNAL = 1.6; EXPRESSED IN BRAIN, SIGNAL = 1.7; NT HIT: AB029290.1, EVALUE 0.00e+00; SWISSPROT HIT: P13395, EVALUE 1.00e-03; EST_HUMAN HIT: AV753128.1, EVALUE 1.00e-86
tttatgctaaaggaatttgaagcacgcaggcaacagcatgagcaactgaatgaggcagctcagggcatcctaacaggccctggagatgtctctctgtccaccagccaagtacagaaagaactccagagcatcaatcagaaatgggttgagctgactgacaaactcaactcccgttccagccaaattgaccaagctattgttaagagcacccagtaccaggaactgctccaggacttatcagagaag

SEQ ID NO: 24602 - DNA, 165 bp, Homo sapiens
  MAP TO AC008065.3; EXPRESSED IN LUNG, SIGNAL = 2.2; EXPRESSED IN PLACENTA, SIGNAL = 1.4; EXPRESSED IN ADULT LIVER, SIGNAL = 2.9; EXPRESSED IN BRAIN, SIGNAL = 3.5; EXPRESSED IN FETAL LIVER, SIGNAL = 7.6; EXPRESSED IN BONE MARROW, SIGNAL =   7; EXPRESSED IN HELA, SIGNAL = 4.1; EXPRESSED IN HEART, SIGNAL = 3.3; SWISSPROT HIT: P30742, EVALUE 4.00e-25; NT HIT: gi11437211, EVALUE 2.00e-76; EST_HUMAN HIT: BF103571.1, EVALUE 4.00e-76
atgacaaagaaaagaaggaacaacggtcatgccaaaaagggccgcggccacgtgcatcctattcgctgcactaactgtacccgatgcgtgcccaaggacaaggccattaagaaattcgtcattcgaaacgtagtggaggccgcagcagtcagggacatttctgaa

SEQ ID NO: 24603 - DNA, 194 bp, Homo sapiens
  MAP TO AL136363.4; EXPRESSED IN LUNG, SIGNAL = 2.3; EXPRESSED IN PLACENTA, SIGNAL = 4.7; EXPRESSED IN BRAIN, SIGNAL = 3.2; EXPRESSED IN BONE MARROW, SIGNAL = 2.9; EXPRESSED IN HELA, SIGNAL = 2.7; EXPRESSED IN ADULT LIVER, SIGNAL = 3.4; EXPRESSED IN HEART, SIGNAL = 3.3; EXPRESSED IN FETAL LIVER, SIGNAL = 3.8; NT HIT: AF111849.1, EVALUE 1.80e+00; EST_HUMAN HIT: BE787512.1, EVALUE 2.70e+00; SWISSPROT HIT: Q15669, EVALUE 5.00e+00
ttactagtgtgaactaatttatcatatttgctaattgtcatcttgatgcccaggaagatatagatatcccactccccatagatgtagagaaagctgttggttgtccaaccaaatatctttcccccttctttcatagcaatagagttaatcttgctgtgcaagtaaaggctacatcacacagatttccttgtaac

SEQ ID NO: 24604 - DNA, 229 bp, Homo sapiens
  MAP TO AC025115.2; EXPRESSED IN LUNG, SIGNAL = 5.2; EXPRESSED IN BRAIN, SIGNAL = 5.4; EXPRESSED IN BONE MARROW, SIGNAL = 4.4; EXPRESSED IN HEART, SIGNAL = 4.6; EXPRESSED IN PLACENTA, SIGNAL = 5.1; EXPRESSED IN ADULT LIVER, SIGNAL = 5.3; EXPRESSED IN HELA, SIGNAL = 6.4; EXPRESSED IN FETAL LIVER, SIGNAL = 4.6; SWISSPROT HIT: Q13606, EVALUE 2.00e-11; EST_HUMAN HIT: AA247547.1, EVALUE 5.20e-02; NT HIT: AF282280.1, EVALUE 3.50e-02
gattcttcaagaagaaatacacgggggtgtggagatgatggtccaaagttgtgatcatgataatgaggacattccccatcagggcacacaaataaatcaacaagaagagaatcgaatgcaaaatgcacatatttttattggtagaaaaccccataaggataaattcagtcacgattgtgagatttgccattattgcaggagtaatctgcaggaaaaggagaagactgaa

SEQ ID NO: 24605 - DNA, 199 bp, Homo sapiens
  MAP TO AL121575.24; EXPRESSED IN HELA, SIGNAL = 2.7; EXPRESSED IN HEART, SIGNAL = 1.9; EXPRESSED IN FETAL LIVER, SIGNAL = 1.6; EXPRESSED IN BRAIN, SIGNAL = 1.6; EXPRESSED IN BONE MARROW, SIGNAL = 1.6; EXPRESSED IN PLACENTA, SIGNAL = 1.8; EXPRESSED IN ADULT LIVER, SIGNAL = 0.92; NT HIT: AB033042.1, EVALUE 5.00e-84; SWISSPROT HIT: P03379, EVALUE 1.70e+00; EST_HUMAN HIT: AW363299.1, EVALUE 1.00e-106
aaaagcacaaagaaaatgagctgacttgagagatgctgccacaggagttggcttgttcccccatcgtcaaacttctcctcggtctcagatcgctccatggcataaacaaccagatccaccaactggtcctccagcacagggcagcgctgcttgtgctgtagggcagagattaaatacagtattccaaaagcctctcggt

SEQ ID NO: 24606 - DNA, 307 bp, Homo sapiens
  MAP TO AC022664.2; EXPRESSED IN LUNG, SIGNAL = 5.5; EXPRESSED IN HEART, SIGNAL = 5.6; EXPRESSED IN PLACENTA, SIGNAL = 5.4; EXPRESSED IN FETAL LIVER, SIGNAL = 5.8; EXPRESSED IN ADULT LIVER, SIGNAL = 5.8; EXPRESSED IN HELA, SIGNAL = 6.6; EXPRESSED IN BRAIN, SIGNAL = 5.1; EXPRESSED IN BONE MARROW, SIGNAL = 5.8; NT HIT: AL161502.2, EVALUE 3.00e+00; EST_HUMAN HIT: BE144758.1, EVALUE 3.00e-78; SWISSPROT HIT: P03462, EVALUE 3.30e+00
cctgaacctctatactcagctccatttggaggtcctggtggtacctgcagctcaaatgtccaaaatgcgacttttcatcttgcttctcattcctgactttcctctattatttcctaacgatgataatgatgccattatccatccaaccctccagaccagaaacctgcgattgattcttcccgactttctttccacagcagttgagcctcaggtcttgctgatgttttctcctgaacagcttcagtattttcccacttatctccatttcctttgcaatttgaatcagaatcaccattatttctcatct

SEQ ID NO: 24607 - DNA, 306 bp, Homo sapiens
  MAP TO AL161756.1; EXPRESSED IN FETAL LIVER, SIGNAL =   6; EXPRESSED IN PLACENTA, SIGNAL = 5.8; EXPRESSED IN ADULT LIVER, SIGNAL = 4.3; EXPRESSED IN HEART, SIGNAL = 5.2; EXPRESSED IN BONE MARROW, SIGNAL = 4.1; EXPRESSED IN LUNG, SIGNAL = 4.7; EXPRESSED IN BRAIN, SIGNAL =   6; SWISSPROT HIT: Q92731, EVALUE 9.00e-58; EST_HUMAN HIT: BF510841.1, EVALUE 1.00e-46; NT HIT: AB006590.1, EVALUE 0.00e+00
tcaatccatcttacccctggagcacggctccatatacataccttcctcctatgtagacagccaccatgaatatccagccatgacattctatagccctgctgtgatgaattacagcattcccagcaatgtcactaacttggaaggtgggcctggtcggcagaccacaagcccaaatgtgttgtggccaacacctgggcacctttctcctttagtggtccatcgccagttatcacatctgtatgcggaacctcaaaagagtccctggtgtgaagcaagatcgctagaacacaccttacctgtaaacag

SEQ ID NO: 24608 - DNA, 318 bp, Homo sapiens
  MAP TO AC013550.4; EXPRESSED IN HEART, SIGNAL = 3.3; EXPRESSED IN FETAL LIVER, SIGNAL = 0.57; SWISSPROT HIT: P54296, EVALUE 6.00e-57; NT HIT: gi11425430, EVALUE 0.00e+00; EST_HUMAN HIT: AA194770.1, EVALUE 0.00e+00
accttgaatctgacctgcacggtgtttggaaaccctgaccccgaagtgatttggttcaagaacgaccaggacatccagctcagcgagcacttctcggtgaaggtggagcaggccaagtacgtcagcatgaccatcaaaggcgtgacctccgaggactcgggcaagtacagcatcaacatcaagaataagtatggcggggagaagatcgacgtgacagtgagcgtgtacaaacacggggagaagatcccggacatggccccgccccagcaagccaagcccaagctcatccccgcgtctgcctcagcggcaggccagtga

SEQ ID NO: 24609 - DNA, 315 bp, Homo sapiens
  MAP TO AL161747.1; EXPRESSED IN FETAL LIVER, SIGNAL = 5.5; EXPRESSED IN LUNG, SIGNAL = 4.5; EXPRESSED IN PLACENTA, SIGNAL = 4.8; EXPRESSED IN ADULT LIVER, SIGNAL = 4.7; EXPRESSED IN HEART, SIGNAL = 5.4; EXPRESSED IN BONE MARROW, SIGNAL = 4.5; EXPRESSED IN HELA, SIGNAL =   4; EXPRESSED IN BRAIN, SIGNAL = 5.5; NT HIT: AB046784.1, EVALUE 0.00e+00; SWISSPROT HIT: P53236, EVALUE 2.00e+00; EST_HUMAN HIT: BF340331.1, EVALUE 0.00e+00
ttagcttctcttccttctcatcctcactctcatcagtgctggagctggagctggatgaggatgaggaagaagaagaagatggtgacagcttgctcaagtccagctcagagtccgaatcatcctcatcctccagtttgactggtggaacactccgggaaaccagaggggtagtatcagagggggatactcgcatctcatagtcttgtggggttggtcggctcctggccaccacctcgtgctctagctttaaagtcagactctccagactggggacctgggtagctgtctcctcgggtgacttttcaacaggagcat

SEQ ID NO: 24610 - DNA, 128 bp, Homo sapiens
  MAP TO AP000404.2; EXPRESSED IN ADULT LIVER, SIGNAL = 1.1; EXPRESSED IN FETAL LIVER, SIGNAL = 0.99; EXPRESSED IN BRAIN, SIGNAL = 1.3; EXPRESSED IN BONE MARROW, SIGNAL = 1.1; EXPRESSED IN LUNG, SIGNAL = 1.2; EXPRESSED IN PLACENTA, SIGNAL = 1.3; EXPRESSED IN HEART, SIGNAL = 1.3; SWISSPROT HIT: P09845, EVALUE 7.00e+00; NT HIT: AF100956.1, EVALUE 4.40e+00; EST_HUMAN HIT: AV687379.1, EVALUE 7.00e-03
attgtggcattgaaggttcatctccatggtggcagagatgaacatgactctgagagcaatgactttcccatcaatcatgaaagacatatttattcaccaccattctgtattagggatcctattgtgta

SEQ ID NO: 24611 - DNA, 179 bp, Homo sapiens
  MAP TO AC015999.3; EXPRESSED IN PLACENTA, SIGNAL = 7.5; EXPRESSED IN FETAL LIVER, SIGNAL =  11; EXPRESSED IN ADULT LIVER, SIGNAL =  14; EXPRESSED IN HELA, SIGNAL =  16; EXPRESSED IN HEART, SIGNAL = 8.4; EXPRESSED IN BONE MARROW, SIGNAL =  11; EXPRESSED IN LUNG, SIGNAL =  11; EXPRESSED IN BRAIN, SIGNAL =  13; SWISSPROT HIT: P55013, EVALUE 3.90e+00; NT HIT: AL163227.2, EVALUE 3.00e-45; EST_HUMAN HIT: AL119158.1, EVALUE 2.00e-41
gcaaggattggaacagtttggaggactccaaagaagacacgaaaatgtgggaaagtttggaacctcctagagacttgttgaatggctttgaccaaaatgatgatagtgatatgggcaataaggtccaggctgatgtggcctcagaaggaaatgagaaacttgttggaactggagcaaag

SEQ ID NO: 24612 - DNA, 169 bp, Homo sapiens
  MAP TO AC013657.3; EXPRESSED IN PLACENTA, SIGNAL = 2.4; EXPRESSED IN BONE MARROW, SIGNAL = 2.5; EXPRESSED IN ADULT LIVER, SIGNAL = 3.3; EXPRESSED IN HELA, SIGNAL = 4.1; EXPRESSED IN HEART, SIGNAL = 2.5; EXPRESSED IN BRAIN, SIGNAL = 2.2; EXPRESSED IN LUNG, SIGNAL = 2.4; EXPRESSED IN FETAL LIVER, SIGNAL = 2.8; SWISSPROT HIT: P23306, EVALUE 1.30e+00; EST_HUMAN HIT: AI814046.1, EVALUE 1.50e-01
actcggcttgctcgtgtcaacgcaaaaccaggacaagcagaataaacaaagagatgctggcagaaggctgggtgtgtcgcctcaggtctacagatgtgctggggccacactgaggaaggccctcgtgtgcatgcagggcgctggccggagcgccttaggacgcatctga

SEQ ID NO: 24613 - DNA, 138 bp, Homo sapiens
  MAP TO AL162171.1; EXPRESSED IN FETAL LIVER, SIGNAL = 0.99; EXPRESSED IN LUNG, SIGNAL = 1.4; EXPRESSED IN PLACENTA, SIGNAL = 1.3; EXPRESSED IN ADULT LIVER, SIGNAL = 1.2; EXPRESSED IN BRAIN, SIGNAL = 0.79; EXPRESSED IN BONE MARROW, SIGNAL =   1; EXPRESSED IN HEART, SIGNAL = 1.3; SWISSPROT HIT: Q16825, EVALUE 6.00e-20; EST_HUMAN HIT: AA102018.1, EVALUE 5.00e-41; NT HIT: gi11434746, EVALUE 6.00e-58
ggaatgaaaaagactcgagtagatgcaaaaaaaattggtcctcttaaactggctgccctaaatggactctccctatctcgagtgcctctgcctgatgaaggaaaggaagtggctaccagagcaacgaatgatgaaagg

SEQ ID NO: 24614 - DNA, 143 bp, Homo sapiens
  MAP TO AC023602.5; EXPRESSED IN PLACENTA, SIGNAL = 3.9; EXPRESSED IN HEART, SIGNAL = 3.2; EXPRESSED IN BONE MARROW, SIGNAL = 3.7; EXPRESSED IN HELA, SIGNAL = 2.8; EXPRESSED IN LUNG, SIGNAL = 3.9; EXPRESSED IN ADULT LIVER, SIGNAL =   4; EXPRESSED IN FETAL LIVER, SIGNAL =   3; EXPRESSED IN BRAIN, SIGNAL = 3.4; NT HIT: AB011399.1, EVALUE 3.20e-01; SWISSPROT HIT: Q19584, EVALUE 5.30e+00
aggagagaaaggccaagatgaggagcagttgtgccatcatgtgagagtggacatcgtgtgcatcagtgacaacacacaacaggagaaatgtttctgcctaatgtggcacaaaataaagcaagtgagagaaagtatggtctact

SEQ ID NO: 24615 - DNA, 109 bp, Homo sapiens
  MAP TO AC026206.1; EXPRESSED IN LUNG, SIGNAL = 2.8; EXPRESSED IN ADULT LIVER, SIGNAL = 2.9; EXPRESSED IN HEART, SIGNAL = 3.1; EXPRESSED IN FETAL LIVER, SIGNAL = 2.6; EXPRESSED IN BRAIN, SIGNAL = 2.9; EXPRESSED IN PLACENTA, SIGNAL = 2.7; EXPRESSED IN BONE MARROW, SIGNAL = 2.9; EXPRESSED IN HELA, SIGNAL = 2.4; EST_HUMAN HIT: AI392964.1, EVALUE 6.00e-06; NT HIT: AL163283.2, EVALUE 1.00e-09
tgactgtgcctgcctctcctgcctctcctttcacctcctccacctctttcacctttgccactcctaagagagtgagaccggacacctcctcttcctccttctcctcagc

SEQ ID NO: 24616 - DNA, 155 bp, Homo sapiens
  MAP TO AC022050.2; EXPRESSED IN LUNG, SIGNAL =   4; EXPRESSED IN BONE MARROW, SIGNAL = 7.8; EXPRESSED IN BRAIN, SIGNAL = 7.8; EXPRESSED IN HEART, SIGNAL =   4; EXPRESSED IN HELA, SIGNAL = 5.8; EXPRESSED IN ADULT LIVER, SIGNAL =   6; EXPRESSED IN PLACENTA, SIGNAL =   3; EXPRESSED IN FETAL LIVER, SIGNAL = 7.6; SWISSPROT HIT: Q24278, EVALUE 1.80e+00; EST_HUMAN HIT: AA663520.1, EVALUE 3.00e-18; NT HIT: U60822.1, EVALUE 5.00e-22
agccttggtggcttccatgtggttttcagcttgcaggtcacagaagtcaaaaattgaggtttgggagcctctgcctatgtttccgatgatgtatggaaacacctggatgtccaggatgaagtctgctgcaggggcgaagtcctcatggagaactt

SEQ ID NO: 24617 - DNA, 114 bp, Homo sapiens
  MAP TO AC022555.2; EXPRESSED IN PLACENTA, SIGNAL =   4; EXPRESSED IN ADULT LIVER, SIGNAL = 4.1; EXPRESSED IN HELA, SIGNAL = 4.1; EXPRESSED IN HEART, SIGNAL = 3.7; EXPRESSED IN FETAL LIVER, SIGNAL = 3.8; EXPRESSED IN BRAIN, SIGNAL = 3.5; EXPRESSED IN LUNG, SIGNAL =   4; EXPRESSED IN BONE MARROW, SIGNAL = 3.6; EST_HUMAN HIT: AW206117.1, EVALUE 9.30e-02; SWISSPROT HIT: P06928, EVALUE 4.10e+00; NT HIT: U67472.1, EVALUE 3.90e+00
tcctcccgcatttctggtttctgtgatgggatcaccattcttgtagttgcccaggcttgtaccgttgggttcaccttttacttcttcctcttcattgctgcatgccaaactcat

SEQ ID NO: 24618 - DNA, 76 bp, Homo sapiens
  MAP TO AC016057.3; EXPRESSED IN PLACENTA, SIGNAL = 1.6; EXPRESSED IN ADULT LIVER, SIGNAL =   2; EXPRESSED IN HEART, SIGNAL = 1.7; EXPRESSED IN FETAL LIVER, SIGNAL = 1.6; EXPRESSED IN BRAIN, SIGNAL = 1.6; EXPRESSED IN BONE MARROW, SIGNAL = 1.7; EXPRESSED IN LUNG, SIGNAL = 1.8; EXPRESSED IN HELA, SIGNAL = 2.3; NT HIT: gi7669493, EVALUE 7.90e+00; EST_HUMAN HIT: BE326702.1, EVALUE 2.40e+00
cagtatgtggtattctcctgggatgccgggcagtggcagcgaggaacagaacccagtcagccacatgatcaggagg

SEQ ID NO: 24619 - DNA, 202 bp, Homo sapiens
  MAP TO AC010769.3; EXPRESSED IN BONE MARROW, SIGNAL = 3.4; EXPRESSED IN LUNG, SIGNAL = 3.4; EXPRESSED IN BRAIN, SIGNAL = 3.5; EXPRESSED IN HEART, SIGNAL = 4.3; EXPRESSED IN HELA, SIGNAL = 4.7; EXPRESSED IN ADULT LIVER, SIGNAL = 3.7; EXPRESSED IN PLACENTA, SIGNAL = 3.4; EXPRESSED IN FETAL LIVER, SIGNAL = 3.9; SWISSPROT HIT: Q01415, EVALUE 2.00e-34; NT HIT: gi11432732, EVALUE 1.00e-110; EST_HUMAN HIT: BE866967.1, EVALUE 1.00e-107
tgctcatcttcaaactctatcagcgggcaaagcatgtgtacagcgaggctgcgcgagtgctccagtttaagaagatatgtgaagaagcacctgaaaacatggtccagctgctgggagagttgatgaaccagagccacatgagctgccgggacatgtatgagtgcagctgccccgagctggatcagctggtggacatctgtcg

SEQ ID NO: 24620 - DNA, 85 bp, Homo sapiens
  MAP TO AC022758.3; EXPRESSED IN LUNG, SIGNAL =   4; EXPRESSED IN ADULT LIVER, SIGNAL =   3; EXPRESSED IN BRAIN, SIGNAL = 4.4; EXPRESSED IN PLACENTA, SIGNAL =   4; EXPRESSED IN HEART, SIGNAL = 2.8; EXPRESSED IN FETAL LIVER, SIGNAL = 4.2; EXPRESSED IN BONE MARROW, SIGNAL = 3.7; NT HIT: AJ010541.1, EVALUE 2.70e+00; EST_HUMAN HIT: AV758825.1, EVALUE 1.00e+00
ctggagtctggttgcagtgggtgcagatgacaaaggggaagtgaagtggggcccagggccccaggcagtaagaggaattgaggat

SEQ ID NO: 24621 - DNA, 112 bp, Homo sapiens
  MAP TO AC018528.3; EXPRESSED IN HEART, SIGNAL = 2.5; EXPRESSED IN BRAIN, SIGNAL = 1.5; EXPRESSED IN BONE MARROW, SIGNAL = 1.1; EXPRESSED IN LUNG, SIGNAL = 1.4; EXPRESSED IN PLACENTA, SIGNAL = 1.3; EXPRESSED IN ADULT LIVER, SIGNAL = 1.5; EXPRESSED IN FETAL LIVER, SIGNAL =   1; NT HIT: Z97067.1, EVALUE 2.10e-01; EST_HUMAN HIT: BE005728.1, EVALUE 9.80e-01
tgttgttactgttaacataaacaactcagcacagataaactctgtattgttctgtaccacattagcaaaattagttagaaattccaaagcatttagctcgccagtccttggt

SEQ ID NO: 24622 - DNA, 121 bp, Homo sapiens
  MAP TO AC013552.3; EXPRESSED IN ADULT LIVER, SIGNAL = 1.3; EXPRESSED IN PLACENTA, SIGNAL = 1.3; EXPRESSED IN BRAIN, SIGNAL = 0.89; EXPRESSED IN BONE MARROW, SIGNAL = 0.99; EXPRESSED IN LUNG, SIGNAL = 1.1; EXPRESSED IN HEART, SIGNAL = 1.3; EXPRESSED IN FETAL LIVER, SIGNAL = 1.1; EST_HUMAN HIT: BE792750.1, EVALUE 1.00e-01; SWISSPROT HIT: P57159, EVALUE 9.30e+00
aaccaccatcctgaattttgtggttataatttccttgctttcttttatagttaatctgcatgtggacgattttgtgatttgctttctttctcgcagtattttgcttttgagatgcatccat

SEQ ID NO: 24623 - DNA, 81 bp, Homo sapiens
  MAP TO AC021239.3; EXPRESSED IN ADULT LIVER, SIGNAL = 4.5; EXPRESSED IN HELA, SIGNAL = 3.8; EXPRESSED IN HEART, SIGNAL =   2; EXPRESSED IN BRAIN, SIGNAL =   2; EXPRESSED IN BONE MARROW, SIGNAL = 2.2; EXPRESSED IN LUNG, SIGNAL = 1.3; EXPRESSED IN PLACENTA, SIGNAL = 2.5; EXPRESSED IN FETAL LIVER, SIGNAL = 2.5; EST_HUMAN HIT: BE770874.1, EVALUE 9.70e-01; NT HIT: AF119676.1, EVALUE 6.50e-01
atgaataacccaagatattacaaggaagggtgggacacagacaggaccatgatgatggtgcataacttgaagattcgccag

SEQ ID NO: 24624 - DNA, 143 bp, Homo sapiens
  MAP TO AC018516.3; EXPRESSED IN HELA, SIGNAL = 7.6; EXPRESSED IN HEART, SIGNAL = 4.8; EXPRESSED IN FETAL LIVER, SIGNAL = 4.7; EXPRESSED IN BRAIN, SIGNAL = 5.5; EXPRESSED IN PLACENTA, SIGNAL = 4.1; EXPRESSED IN ADULT LIVER, SIGNAL = 5.4; EXPRESSED IN BONE MARROW, SIGNAL = 5.2; EXPRESSED IN LUNG, SIGNAL = 4.1; SWISSPROT HIT: P49365, EVALUE 3.10e+00; EST_HUMAN HIT: AV753229.1, EVALUE 7.50e+00; NT HIT: AB007855.1, EVALUE 5.00e+00
cacttgtctccaagacacttgacaacttgctcatggagtgctctagatgccactgccatccccgaaacctccttatctgctagcatagcctccactgtgtctgccacggctgagccagaggcgctccggtggacagaccccat

SEQ ID NO: 24625 - DNA, 238 bp, Homo sapiens
  MAP TO AC022714.2; EXPRESSED IN LUNG, SIGNAL = 2.6; EXPRESSED IN PLACENTA, SIGNAL = 2.2; EXPRESSED IN ADULT LIVER, SIGNAL = 2.9; EXPRESSED IN HEART, SIGNAL = 2.2; EXPRESSED IN FETAL LIVER, SIGNAL = 2.4; EXPRESSED IN BRAIN, SIGNAL = 2.7; EXPRESSED IN BONE MARROW, SIGNAL = 2.7; NT HIT: AF009921.1, EVALUE 5.70e-01; EST_HUMAN HIT: AA601493.1, EVALUE 3.00e-74
atgggacaaacatggggtctggttcgttccaccttggaactttctcacactgataatgaggaggaaggagagtataatgaagtaacagaagaggttacagagcaggtttatttgccagccaaagctaaagcggcaaaggagggagaggttcatccctacccttctagacgccctcattattattttgaagaaaaagaccctccagatctttcttttctggaggacactgggcgaaaac

SEQ ID NO: 24626 - DNA, 204 bp, Homo sapiens
  MAP TO AC021641.4; EXPRESSED IN BONE MARROW, SIGNAL = 2.6; EXPRESSED IN LUNG, SIGNAL = 2.2; EXPRESSED IN ADULT LIVER, SIGNAL = 2.4; EXPRESSED IN HEART, SIGNAL = 2.2; EXPRESSED IN BRAIN, SIGNAL = 2.3; EXPRESSED IN PLACENTA, SIGNAL = 2.2; EXPRESSED IN FETAL LIVER, SIGNAL = 2.1; SWISSPROT HIT: P00741, EVALUE 6.50e+00; NT HIT: X17191.1, EVALUE 1.90e+00; EST_HUMAN HIT: BF670061.1, EVALUE 7.20e-01
ctacctcttgtggtttatatttagctttattaaatagtgctgttcagttcctgaatgactcggtggggtaaacactggatgctttgtctcggatagtggcgggtctgtctgccacgcgtggcgaatttgaatggccaatgccagcagtgccagccgatcaagctggcaatgatggaacttctgcaggttctggaagaagtcctg

SEQ ID NO: 24627 - DNA, 231 bp, Homo sapiens
  MAP TO AC009334.3; EXPRESSED IN PLACENTA, SIGNAL = 0.99; EXPRESSED IN ADULT LIVER, SIGNAL = 1.7; EXPRESSED IN FETAL LIVER, SIGNAL = 2.2; EXPRESSED IN BONE MARROW, SIGNAL = 1.9; EXPRESSED IN LUNG, SIGNAL = 1.7; EXPRESSED IN HELA, SIGNAL = 3.6; EXPRESSED IN HEART, SIGNAL = 1.2; EXPRESSED IN BRAIN, SIGNAL = 1.3; EST_HUMAN HIT: BF087027.1, EVALUE 1.00e-117; NT HIT: gi11427235, EVALUE 1.00e-127; SWISSPROT HIT: Q99698, EVALUE 4.00e-25
atttgatctggaagatgtgagaaacatgggattgtttcagaagtggtctgtcattcctattctgggactaatagagacctctctatatgacaacatactcttgcataatgctcttttacttcttctccaaattttaaattcttgttctaaggtagcagatatgttgctggataatggtctactctatgtgttatgtaatacagtagcagccctgaatggattagaaaagaa

SEQ ID NO: 24628 - DNA, 101 bp, Homo sapiens
  MAP TO AC013657.3; EXPRESSED IN ADULT LIVER, SIGNAL = 2.6; EXPRESSED IN HELA, SIGNAL = 2.2; EXPRESSED IN HEART, SIGNAL = 1.4; EXPRESSED IN BRAIN, SIGNAL = 1.2; EXPRESSED IN BONE MARROW, SIGNAL = 1.4; EXPRESSED IN PLACENTA, SIGNAL = 1.5; EXPRESSED IN FETAL LIVER, SIGNAL = 1.4; NT HIT: AB006799.1, EVALUE 8.50e-01
ttgacatttatcctgcagcttgtgggggagcagcttcggctgttatgttcccaacggatgaggagggagctgcactccttgcggcggagaagccgcatcca

SEQ ID NO: 24629 - DNA, 145 bp, Homo sapiens
  MAP TO AC022637.3; EXPRESSED IN PLACENTA, SIGNAL = 1.1; EXPRESSED IN ADULT LIVER, SIGNAL = 1.4; EXPRESSED IN HEART, SIGNAL = 1.3; EXPRESSED IN FETAL LIVER, SIGNAL = 1.2; EXPRESSED IN BRAIN, SIGNAL = 1.4; EXPRESSED IN BONE MARROW, SIGNAL = 1.3; EXPRESSED IN LUNG, SIGNAL = 1.4; SWISSPROT HIT: P44834, EVALUE 6.90e+00
ttttcacttgtgagtttttgattactttccattttacaatgtaaactgagatgctgtgtgcggctgtttgatccaagatcatcaggtggccatgtgcggtttccacgggaaccagaactttatccagcatatcataggccaccat

SEQ ID NO: 24630 - DNA, 129 bp, Homo sapiens
  MAP TO AC007326.28; EXPRESSED IN HELA, SIGNAL = 2.6; EXPRESSED IN BONE MARROW, SIGNAL = 2.2; EXPRESSED IN LUNG, SIGNAL = 2.3; EXPRESSED IN ADULT LIVER, SIGNAL = 2.2; EXPRESSED IN BRAIN, SIGNAL = 1.9; EXPRESSED IN PLACENTA, SIGNAL = 2.1; EXPRESSED IN HEART, SIGNAL =   2; EXPRESSED IN FETAL LIVER, SIGNAL = 2.1; EST_HUMAN HIT: BE772866.1, EVALUE 4.30e-01; NT HIT: U82695.2, EVALUE 7.20e-02; SWISSPROT HIT: O06794, EVALUE 2.40e+00
gacaccctcctgggccttggattcctcctctgtgatgaaggccggggctgctggctcctccacaccacactcggcccccagcagacaggcaacaggggccttgtcccactgtagctgtggtcaggtggt

SEQ ID NO: 24631 - DNA, 92 bp, Homo sapiens
  MAP TO AC027350.1; EXPRESSED IN PLACENTA, SIGNAL = 1.9; EXPRESSED IN ADULT LIVER, SIGNAL =   2; EXPRESSED IN BRAIN, SIGNAL = 1.7; EXPRESSED IN LUNG, SIGNAL = 1.7; EXPRESSED IN FETAL LIVER, SIGNAL = 1.5; EXPRESSED IN BONE MARROW, SIGNAL = 1.6; EXPRESSED IN HEART, SIGNAL = 1.5; NT HIT: gi9055193, EVALUE 2.60e+00; EST_HUMAN HIT: AW884187.1, EVALUE 3.10e+00
tctgggaccagcagcctataaaaactagatgtcactaggatcactttgatgacaaggaaactgatgctttgagcaactagcaagcgcagcat

SEQ ID NO: 24632 - DNA, 210 bp, Homo sapiens
  MAP TO AC016113.4; EXPRESSED IN BONE MARROW, SIGNAL = 2.4; EXPRESSED IN LUNG, SIGNAL = 2.1; EXPRESSED IN ADULT LIVER, SIGNAL = 2.6; EXPRESSED IN HEART, SIGNAL = 1.8; EXPRESSED IN BRAIN, SIGNAL = 2.3; EXPRESSED IN PLACENTA, SIGNAL = 2.3; EXPRESSED IN FETAL LIVER, SIGNAL = 2.1; SWISSPROT HIT: P41969, EVALUE 9.70e-01; NT HIT: L30115.1, EVALUE 1.00e-47; EST_HUMAN HIT: AI190764.1, EVALUE 3.00e-40
atggtgtgtcgggagtttgttccttcagatgttcgacagtgtttggagtttcttccttctggtgggttcgtggtctcgctggcttcaggagtgaagccacagaccttcgcagtgttacagctcttaaaggtggcgcatccagagttgtccattcctcccggtgggtttgtggtctccctggcatcaggagtgaagctgcagaccttcgcg

SEQ ID NO: 24633 - DNA, 135 bp, Homo sapiens
  MAP TO AL139352.8; EXPRESSED IN HELA, SIGNAL = 2.5; EXPRESSED IN PLACENTA, SIGNAL =   2; EXPRESSED IN ADULT LIVER, SIGNAL = 2.1; EXPRESSED IN HEART, SIGNAL = 1.5; EXPRESSED IN FETAL LIVER, SIGNAL =   2; EXPRESSED IN LUNG, SIGNAL = 1.8; EXPRESSED IN BRAIN, SIGNAL = 2.5; EXPRESSED IN BONE MARROW, SIGNAL = 2.9; SWISSPROT HIT: P52824, EVALUE 2.10e-01
ttcctcagtgctggcctgggtctgcggggcaagctgagtgtcccggggcagaatgctttctggagaggactccgctaccagctgtggctgaaggacctggcacagggcctgttcctggggcccttggcacaccat

SEQ ID NO: 24634 - DNA, 98 bp, Homo sapiens
  MAP TO AC027304.1; EXPRESSED IN PLACENTA, SIGNAL = 1.8; EXPRESSED IN ADULT LIVER, SIGNAL = 2.1; EXPRESSED IN FETAL LIVER, SIGNAL = 1.6; EXPRESSED IN BRAIN, SIGNAL = 1.6; EXPRESSED IN BONE MARROW, SIGNAL = 1.5; EXPRESSED IN LUNG, SIGNAL = 1.8; EXPRESSED IN HEART, SIGNAL = 1.6; EST_HUMAN HIT: AI640342.1, EVALUE 2.00e-02; NT HIT: gi11416916, EVALUE 3.20e+00
cttgcagtgctctccaggttaatcagtgattctttgactggtgtcagggacatttggtgggtagtgattggcatgcctgtattttcctttgtcaccat

SEQ ID NO: 24635 - DNA, 105 bp, Homo sapiens
  MAP TO AL133232.9; EXPRESSED IN PLACENTA, SIGNAL = 1.8; EXPRESSED IN ADULT LIVER, SIGNAL = 1.9; EXPRESSED IN HEART, SIGNAL = 1.4; EXPRESSED IN FETAL LIVER, SIGNAL = 1.6; EXPRESSED IN BRAIN, SIGNAL = 1.8; EXPRESSED IN BONE MARROW, SIGNAL = 1.9; EXPRESSED IN LUNG, SIGNAL = 1.8; NT HIT: AL163201.2, EVALUE 2.30e-01; EST_HUMAN HIT: AI735184.1, EVALUE 8.40e-02
ttaattcttcccggagtgctgaggggccatgaccatgatgatctcaacactctgggcattttgggccagatgattctctgctggggtgcggtgggaacatctctt

SEQ ID NO: 24636 - DNA, 143 bp, Homo sapiens
  MAP TO AC026414.2; EXPRESSED IN LUNG, SIGNAL = 4.9; EXPRESSED IN HEART, SIGNAL = 4.1; EXPRESSED IN FETAL LIVER, SIGNAL = 4.5; EXPRESSED IN BONE MARROW, SIGNAL = 5.4; EXPRESSED IN HELA, SIGNAL = 5.8; EXPRESSED IN PLACENTA, SIGNAL = 5.5; EXPRESSED IN ADULT LIVER, SIGNAL = 7.3; EXPRESSED IN BRAIN, SIGNAL = 4.9; SWISSPROT HIT: P09053, EVALUE 2.30e+00; EST_HUMAN HIT: AI908587.1, EVALUE 5.00e-07; NT HIT: AL163246.2, EVALUE 8.00e-05
cgtctgtgcacctgcaggattaacacaatgtggaagctgccaaaacctttggcttgcattctctggagcagaagcttgagatgtatctgggtatctcttaaccaaggccaaagctggggcagctggaatgcagggagcagcat

SEQ ID NO: 24637 - DNA, 86 bp, Homo sapiens
  MAP TO AL157997.2; EXPRESSED IN ADULT LIVER, SIGNAL = 1.5; EXPRESSED IN BRAIN, SIGNAL = 1.5; EXPRESSED IN LUNG, SIGNAL = 1.5; EXPRESSED IN PLACENTA, SIGNAL = 1.5; EXPRESSED IN HEART, SIGNAL = 1.2; EXPRESSED IN FETAL LIVER, SIGNAL = 1.2; EXPRESSED IN BONE MARROW, SIGNAL = 1.6; NT HIT: X63440.1, EVALUE 1.80e-01; SWISSPROT HIT: P48634, EVALUE 5.60e+00; EST_HUMAN HIT: AW958572.1, EVALUE 2.60e-01
ctaggatctcctgtcactgtcctgcccacagtcctccatatctttcatgtcttggtttatttccttattgcactgaatcatctcct

SEQ ID NO: 24638 - DNA, 98 bp, Homo sapiens
  MAP TO AC021037.4; EXPRESSED IN ADULT LIVER, SIGNAL = 4.5; EXPRESSED IN BONE MARROW, SIGNAL = 3.9; EXPRESSED IN PLACENTA, SIGNAL = 4.2; EXPRESSED IN HEART, SIGNAL = 5.1; EXPRESSED IN FETAL LIVER, SIGNAL = 3.5; EXPRESSED IN LUNG, SIGNAL = 4.3; EXPRESSED IN BRAIN, SIGNAL = 4.1; SWISSPROT HIT: P06473, EVALUE 9.50e+00; EST_HUMAN HIT: AW272873.1, EVALUE 2.00e-48; NT HIT: gi11429808, EVALUE 1.00e-48
tactttggaagtgttgctgaaatcatcaggaatcatcaacatagtcctttggttcttattgacagtcagaataacacaaaagattccaccagactgaa

SEQ ID NO: 24639 - DNA, 187 bp, Homo sapiens
  MAP TO AC022429.2; EXPRESSED IN PLACENTA, SIGNAL = 1.8; EXPRESSED IN BONE MARROW, SIGNAL = 1.3; EXPRESSED IN LUNG, SIGNAL = 1.7; EXPRESSED IN ADULT LIVER, SIGNAL =   2; EXPRESSED IN FETAL LIVER, SIGNAL = 1.4; EXPRESSED IN BRAIN, SIGNAL = 1.3; EXPRESSED IN HEART, SIGNAL = 1.3; SWISSPROT HIT: P29719, EVALUE 2.90e+00; EST_HUMAN HIT: BF541109.1, EVALUE 6.50e-01; NT HIT: S76404.1, EVALUE 4.40e-01
aagaaagcatctatgcagatattgaaacagccaaagcgaggaagaactccatgatctcccctcgcctcacagacttaagccaggaaggcagtccaggaatccacaataaacaactgcagctggcctgttctgtttctcgcacagtggacctgagttcttttctagaatctgttctgcagcagggaag

SEQ ID NO: 24640 - DNA, 215 bp, Homo sapiens
  MAP TO AL161642.2; EXPRESSED IN HEART, SIGNAL = 1.2; EXPRESSED IN PLACENTA, SIGNAL = 1.8; EXPRESSED IN ADULT LIVER, SIGNAL = 1.7; EXPRESSED IN FETAL LIVER, SIGNAL = 1.6; EXPRESSED IN BRAIN, SIGNAL = 1.9; EXPRESSED IN BONE MARROW, SIGNAL = 2.3; EXPRESSED IN LUNG, SIGNAL = 1.4; NT HIT: gi11419257, EVALUE 1.00e-118; SWISSPROT HIT: P21754, EVALUE 2.00e-18; EST_HUMAN HIT: BF195407.1, EVALUE 1.00e-118
ttattcggaagcagacacagggtgggaggcagtgcgacacctcctggtgagaaccaggataacagcagtcagagtcagggacaccaccacagccaggcctacgcccagcagcaccactgaggtgtcagaaggcaaagcccactgctctacttcatggtcacccctcctgtccaggaagatcagtggccccacggtgacatctgcttcttctgtca

SEQ ID NO: 24641 - DNA, 231 bp, Homo sapiens
  MAP TO AL135936.10; EXPRESSED IN HELA, SIGNAL = 3.3; EXPRESSED IN PLACENTA, SIGNAL = 3.8; EXPRESSED IN ADULT LIVER, SIGNAL = 4.1; EXPRESSED IN FETAL LIVER, SIGNAL = 3.5; EXPRESSED IN BRAIN, SIGNAL = 3.7; EXPRESSED IN LUNG, SIGNAL = 3.4; EXPRESSED IN HEART, SIGNAL = 6.7; EXPRESSED IN BONE MARROW, SIGNAL = 3.8; SWISSPROT HIT: Q9JI70, EVALUE 8.20e-01; EST_HUMAN HIT: AU131079.1, EVALUE 3.20e+00
tcatggctcctgagggaagacagctctgcttcctgcaggattctccctgggcagcacctctccaaaagcatttgccagggtcaaggtgtctataaaagattgggaactagatggaagaagtgttgcagagggaatttgggagaaaaggtcttggaggtgccgcaggctgcaggtgcactggccaggaaggtagacaccaggggtgcggtgatggatttcagacacagaccg

SEQ ID NO: 24642 - DNA, 187 bp, Homo sapiens
  MAP TO AC005481.3; EXPRESSED IN HELA, SIGNAL = 2.5; EXPRESSED IN PLACENTA, SIGNAL = 4.7; EXPRESSED IN ADULT LIVER, SIGNAL = 4.4; EXPRESSED IN HEART, SIGNAL = 4.2; EXPRESSED IN FETAL LIVER, SIGNAL = 3.6; EXPRESSED IN BRAIN, SIGNAL = 3.9; EXPRESSED IN LUNG, SIGNAL = 3.7; EXPRESSED IN BONE MARROW, SIGNAL = 3.7; SWISSPROT HIT: Q03132, EVALUE 1.20e-01; NT HIT: M90814.1, EVALUE 7.00e-03; EST_HUMAN HIT: AI050027.1, EVALUE 4.00e-08
tgcctaagtgtgcagggctgcctgggtctgcagctacggtttgggcagctgtagctcctccccagcgtgggggtgggggtggggtcctgcctgccgcgtggaacaggatgcccaggttacgcctccctgctgcagctggtgtgatggtagtggccactccagagggcctgtcactgccatccctggc

SEQ ID NO: 24643 - DNA, 247 bp, Homo sapiens
  MAP TO AC022317.4; EXPRESSED IN ADULT LIVER, SIGNAL = 1.9; EXPRESSED IN FETAL LIVER, SIGNAL = 1.7; EXPRESSED IN PLACENTA, SIGNAL = 1.2; EXPRESSED IN HEART, SIGNAL = 1.5; EXPRESSED IN BRAIN, SIGNAL =   2; EXPRESSED IN BONE MARROW, SIGNAL = 2.2; EXPRESSED IN LUNG, SIGNAL = 1.3; SWISSPROT HIT: P13944, EVALUE 4.80e+00; EST_HUMAN HIT: T84890.1, EVALUE 2.20e-01; NT HIT: U40932.1, EVALUE 1.50e-01
gattccagcacaaatgtcacttcatccttccctgattcttccaggaagtaaaccccatttctctactatattttttattgtagcatctttcacttgtatttacctgtctcccttacctgggcacgggaaattcctaagagcatcaagactatcttatgcatctttacaactgatttctcaatccctctcctctctagctactatacagttcagaacaatgttttcacagagtagacacatgacaaaa

SEQ ID NO: 24644 - DNA, 389 bp, Homo sapiens
  MAP TO AL138954.5; EXPRESSED IN PLACENTA, SIGNAL = 1.3; EXPRESSED IN BRAIN, SIGNAL = 1.6; EXPRESSED IN LUNG, SIGNAL = 1.3; EXPRESSED IN ADULT LIVER, SIGNAL = 1.6; EXPRESSED IN HEART, SIGNAL = 1.3; EXPRESSED IN FETAL LIVER, SIGNAL = 1.3; EXPRESSED IN BONE MARROW, SIGNAL = 1.7; NT HIT: AJ271735.1, EVALUE 3.00e-22; EST_HUMAN HIT: W28189.1, EVALUE 5.00e-56; SWISSPROT HIT: P49777, EVALUE 8.50e+00
aaatgattaagtttagtgtggaaggcatgtttacggaaagaagccataacataaaagtgcaaggtgaagcaggaaatgttgatgtagacgctgcagcaagttatccaaaatttctagctaagaccattgaagaaagtggccacactaaacaacagattttcaatgtagacaaaacagtcctatgttggaagaagatgccatttaggacttttatagctagagaggagaagtcaatgccttgcttcaaagctttgaaggacagactgactctcttgtctgaggctaacgtagttgctgacttctgtttgacgccaatgcttatttaccattctgaaaatcctagggccactaataattgtgttaactccattctacctatggcctataaa

SEQ ID NO: 24645 - DNA, 147 bp, Homo sapiens
  MAP TO AC011824.4; EXPRESSED IN LUNG, SIGNAL = 1.3; EXPRESSED IN PLACENTA, SIGNAL = 1.2; EXPRESSED IN HEART, SIGNAL = 1.3; EXPRESSED IN BONE MARROW, SIGNAL = 1.4; EXPRESSED IN ADULT LIVER, SIGNAL = 0.86; EXPRESSED IN FETAL LIVER, SIGNAL =   1; EXPRESSED IN BRAIN, SIGNAL = 1.1; SWISSPROT HIT: P17678, EVALUE 5.30e+00; EST_HUMAN HIT: BE869218.1, EVALUE 5.00e-01
ttagaaaatgaacagcttcaacttcttgccgatgagaaccctctctctgctcacgaggcaggagcagtatgtgctgattgccaaacagatcatttttaaaatgatgcagatctgtgggggattggtccgtgtggtgatgtgtctcat

SEQ ID NO: 24646 - DNA, 85 bp, Homo sapiens
  MAP TO AC022813.3; EXPRESSED IN ADULT LIVER, SIGNAL = 1.3; EXPRESSED IN PLACENTA, SIGNAL = 1.6; EXPRESSED IN HEART, SIGNAL = 1.5; EXPRESSED IN FETAL LIVER, SIGNAL = 0.99; EXPRESSED IN BRAIN, SIGNAL = 1.4; EXPRESSED IN BONE MARROW, SIGNAL = 1.2; EXPRESSED IN LUNG, SIGNAL = 1.4; NT HIT: gi11427203, EVALUE 1.70e-01; EST_HUMAN HIT: BE929937.1, EVALUE 2.60e-01
gctgtttgtcatggagggtcatctgagagacatgttggttatgagaatgcagagtgcgattcaatttggcagacatttggatatt

SEQ ID NO: 24647 - DNA, 197 bp, Homo sapiens
  MAP TO AL133227.7; EXPRESSED IN LUNG, SIGNAL = 1.5; EXPRESSED IN PLACENTA, SIGNAL = 1.7; EXPRESSED IN ADULT LIVER, SIGNAL = 1.7; EXPRESSED IN HEART, SIGNAL = 1.6; EXPRESSED IN FETAL LIVER, SIGNAL = 1.7; EXPRESSED IN BRAIN, SIGNAL = 1.7; EXPRESSED IN BONE MARROW, SIGNAL = 1.6; EST_HUMAN HIT: AA627972.1, EVALUE 1.70e-01; SWISSPROT HIT: P01486, EVALUE 1.70e+00; NT HIT: Z75009.1, EVALUE 4.60e-01
attgttttcaggttttttcctcccattgcaatcatgatcactgttgatgtgaacatccatagacacatatattctggtgtttttatttctatgggaagaattcccatgcgtgggattgccgggtgaaagaatgtgtggagttgttttcttttgatatacgttgccagattgctctccaacaaggtcacagctgctgg

SEQ ID NO: 24648 - DNA, 133 bp, Homo sapiens
  MAP TO AL136300.5; EXPRESSED IN LUNG, SIGNAL = 2.3; EXPRESSED IN PLACENTA, SIGNAL = 2.5; EXPRESSED IN ADULT LIVER, SIGNAL = 2.3; EXPRESSED IN HEART, SIGNAL = 1.9; EXPRESSED IN FETAL LIVER, SIGNAL = 1.9; EXPRESSED IN BRAIN, SIGNAL = 1.9; EXPRESSED IN BONE MARROW, SIGNAL = 2.1; EXPRESSED IN HELA, SIGNAL = 2.8; SWISSPROT HIT: Q04347, EVALUE 4.10e+00; NT HIT: AB030231.1, EVALUE 3.00e-01
ctgatgtaggatctttgtcctggacagcttcagggatctccccatgaccctgatgatcccctttgcttctctttcttgaaatttgtttcctggagcttatcttctgatttctgtgttttttttcccccttcat

SEQ ID NO: 24649 - DNA, 89 bp, Homo sapiens
  MAP TO AC009334.3; EXPRESSED IN PLACENTA, SIGNAL = 2.6; EXPRESSED IN BONE MARROW, SIGNAL = 2.4; EXPRESSED IN ADULT LIVER, SIGNAL = 2.8; EXPRESSED IN FETAL LIVER, SIGNAL = 2.2; EXPRESSED IN BRAIN, SIGNAL = 2.3; EXPRESSED IN LUNG, SIGNAL = 2.4; EXPRESSED IN HELA, SIGNAL =   3; EXPRESSED IN HEART, SIGNAL = 2.2; NT HIT: AL163201.2, EVALUE 3.00e-09; EST_HUMAN HIT: AI733244.1, EVALUE 5.00e-43; SWISSPROT HIT: P39016, EVALUE 2.50e+00
atccaagaaatccaatgaacaccaagcagcataaacacaaagaaaaccacatcaaggcacatcataatcacactgttgaaaaccagtga

SEQ ID NO: 24650 - DNA, 335 bp, Homo sapiens
  MAP TO AL137141.7; EXPRESSED IN ADULT LIVER, SIGNAL = 1.3; EXPRESSED IN FETAL LIVER, SIGNAL = 1.3; EXPRESSED IN PLACENTA, SIGNAL = 1.6; EXPRESSED IN HEART, SIGNAL = 1.4; EXPRESSED IN BRAIN, SIGNAL = 1.5; EXPRESSED IN BONE MARROW, SIGNAL =   2; EXPRESSED IN LUNG, SIGNAL = 1.6; SWISSPROT HIT: P49466, EVALUE 2.20e+00; NT HIT: AF163865.1, EVALUE 3.20e+00; EST_HUMAN HIT: T03078.1, EVALUE 0.00e+00
aacatctttcatagttttaaactttcttgaactttccattttgtttgtttgtttcccaaaaattcgagtagaagctgaattacaatgtggaaaaaatatggaaccagtagcagtatctggaatctgctcacggacatgcttagtagatttctggggtgatgaaattgcagtcactctttcttgtacacagtgatcaagaaagatattttggatattgataggtgttagtgattgatttcttaaaacatcaggaaaacgagttctatccattttaatggaagtggtttcatcttcagtgaatgctacatgtagtgactcaattttaccagttttag

SEQ ID NO: 24651 - DNA, 192 bp, Homo sapiens
  MAP TO AC013593.3; EXPRESSED IN LUNG, SIGNAL = 1.5; EXPRESSED IN PLACENTA, SIGNAL = 1.5; EXPRESSED IN ADULT LIVER, SIGNAL = 1.5; EXPRESSED IN HEART, SIGNAL = 1.4; EXPRESSED IN BRAIN, SIGNAL = 1.3; EXPRESSED IN BONE MARROW, SIGNAL = 1.4; EXPRESSED IN FETAL LIVER, SIGNAL =   1; NT HIT: gi11423236, EVALUE 1.00e-104; EST_HUMAN HIT: AV728070.1, EVALUE 1.00e-104; SWISSPROT HIT: P14712, EVALUE 4.40e-01
gatatcctgtaccttcacaactctttagaggaggtaaacagtgccctagtggggtaccagagacagaatgatcttaaactcgagggaatgaacgagacagtcagtaatcttacccagagagtcaacctgatagaaagcgatgtggttgctatgagcaaggtagaaaagaaagcaaacctgtccttcagcatg

SEQ ID NO: 24652 - DNA, 175 bp, Homo sapiens
  MAP TO AL136984.7; EXPRESSED IN LUNG, SIGNAL = 5.8; EXPRESSED IN PLACENTA, SIGNAL = 5.4; EXPRESSED IN FETAL LIVER, SIGNAL = 4.1; EXPRESSED IN ADULT LIVER, SIGNAL = 4.9; EXPRESSED IN HEART, SIGNAL = 4.9; EXPRESSED IN BRAIN, SIGNAL = 4.4; EXPRESSED IN BONE MARROW, SIGNAL = 4.3; EST_HUMAN HIT: W23062.1, EVALUE 3.90e-02; NT HIT: AL163303.2, EVALUE 2.60e-02
gcttaccaccacgtggaagctgccaaggcttacaacttgccccatctggagcagcagcctgagacgtatctgggccccttttagccacaaagaattttctttctcttggcctcaggccagtaccttttatgccttgcctattatgtctggcagaagtgtggcagttgttgggaaa

SEQ ID NO: 24653 - DNA, 158 bp, Homo sapiens
  MAP TO AC025812.4; EXPRESSED IN PLACENTA, SIGNAL = 0.64; EXPRESSED IN ADULT LIVER, SIGNAL = 0.82; EXPRESSED IN HEART, SIGNAL = 1.5; EXPRESSED IN BRAIN, SIGNAL = 0.59; EXPRESSED IN BONE MARROW, SIGNAL = 0.68; EXPRESSED IN FETAL LIVER, SIGNAL = 0.63; NT HIT: X68366.1, EVALUE 6.00e-03
ctttagtttcctcaaacaaattgggactaaagtcaccagtgaaataatgcgggatgtattgacttaggggagatatgtttttaattttaacttcttgggaagttgagttgacgtaaatcctctttaccatagtctgctgagttttgcgtactctagtt

SEQ ID NO: 24654 - DNA, 187 bp, Homo sapiens
  MAP TO AL161450.2; EXPRESSED IN PLACENTA, SIGNAL = 1.9; EXPRESSED IN ADULT LIVER, SIGNAL =   2; EXPRESSED IN HEART, SIGNAL = 1.8; EXPRESSED IN FETAL LIVER, SIGNAL = 1.7; EXPRESSED IN BRAIN, SIGNAL = 1.5; EXPRESSED IN HELA, SIGNAL = 2.7; EXPRESSED IN LUNG, SIGNAL = 2.1; EXPRESSED IN BONE MARROW, SIGNAL =   2; SWISSPROT HIT: O60674, EVALUE 6.00e-33; NT HIT: gi11429127, EVALUE 1.00e-101; EST_HUMAN HIT: AA259122.1, EVALUE 1.00e-05
cgagaaaatgtcattgaatataaacactgtttgattacaaaaaatgagaatgaagagtacaacctcagtgggacaaagaagaacttcagcagtcttaaagatcttttgaattgttaccagatggaaactgttcgctcagacaatataattttccagtttactaaatgctgtcccccaaagccaaaag

SEQ ID NO: 24655 - DNA, 189 bp, Homo sapiens
  MAP TO AC026707.2; EXPRESSED IN PLACENTA, SIGNAL = 1.6; EXPRESSED IN BONE MARROW, SIGNAL = 1.2; EXPRESSED IN ADULT LIVER, SIGNAL = 1.9; EXPRESSED IN HEART, SIGNAL = 1.2; EXPRESSED IN BRAIN, SIGNAL = 1.4; EXPRESSED IN LUNG, SIGNAL = 1.3; EXPRESSED IN FETAL LIVER, SIGNAL = 1.3; NT HIT: gi7705868, EVALUE 2.00e-98; SWISSPROT HIT: P41163, EVALUE 7.60e-01; EST_HUMAN HIT: BE895021.1, EVALUE 4.00e-98
ctacgctgagcaggactgggtcacatacgctgcctccaccgcgtagcagaactctcttccgaacatggccatgctgtgcatgatgagtctgctggtgggtcttttaggcggctccacagagtcaaaggggccatcatcagctagggatttatagatgtggcggccagcctgcccactgttgctacccat

SEQ ID NO: 24656 - DNA, 78 bp, Homo sapiens
  MAP TO AC022637.3; EXPRESSED IN LUNG, SIGNAL = 1.7; EXPRESSED IN PLACENTA, SIGNAL = 1.6; EXPRESSED IN HEART, SIGNAL = 1.7; EXPRESSED IN FETAL LIVER, SIGNAL = 1.6; EXPRESSED IN BRAIN, SIGNAL = 1.9; EXPRESSED IN BONE MARROW, SIGNAL = 1.8; EXPRESSED IN ADULT LIVER, SIGNAL = 1.6; EST_HUMAN HIT: BF593251.1, EVALUE 9.20e-01
acaccagtctaccatatggataatatcatgttaatcagaccagatgggcaagaaatggaaagtatattggaaaccttg

SEQ ID NO: 24657 - DNA, 149 bp, Homo sapiens
  MAP TO AL135924.5; EXPRESSED IN LUNG, SIGNAL = 1.8; EXPRESSED IN ADULT LIVER, SIGNAL = 1.1; EXPRESSED IN BRAIN, SIGNAL = 1.7; EXPRESSED IN BONE MARROW, SIGNAL = 1.5; EXPRESSED IN PLACENTA, SIGNAL = 1.1; EXPRESSED IN HEART, SIGNAL = 1.3; EXPRESSED IN FETAL LIVER, SIGNAL = 2.3; NT HIT: AF062346.1, EVALUE 9.00e-79; EST_HUMAN HIT: AA926635.1, EVALUE 1.00e-78; SWISSPROT HIT: P11512, EVALUE 9.00e+00
ggtttgactgccgatgtggaaatttgttttgtggacttcaccgttactctgacaagcacaactgtccgtatgattacaaagcagaagctgcagcaaaaatcagaaaagagaatccagttgttgtggctgaaaaaattcagagaatataa

SEQ ID NO: 24658 - DNA, 82 bp, Homo sapiens
  MAP TO AC025443.2; EXPRESSED IN PLACENTA, SIGNAL = 1.6; EXPRESSED IN ADULT LIVER, SIGNAL = 1.7; EXPRESSED IN BRAIN, SIGNAL = 1.3; EXPRESSED IN BONE MARROW, SIGNAL = 1.2; EXPRESSED IN LUNG, SIGNAL = 1.5; EXPRESSED IN HEART, SIGNAL = 1.5; EXPRESSED IN FETAL LIVER, SIGNAL = 1.2; EST_HUMAN HIT: AA572818.1, EVALUE 1.60e-02
ttactctccttggccatttataaactgagggatgaagacgaccccatgctccttgagggttccacaatgagcctctgctttc

SEQ ID NO: 24659 - DNA, 78 bp, Homo sapiens
  MAP TO AC016212.3; EXPRESSED IN BONE MARROW, SIGNAL = 1.2; EXPRESSED IN ADULT LIVER, SIGNAL = 1.1; EXPRESSED IN LUNG, SIGNAL = 1.4; EXPRESSED IN PLACENTA, SIGNAL = 0.93; EXPRESSED IN HEART, SIGNAL = 1.3; EXPRESSED IN FETAL LIVER, SIGNAL = 1.2; EXPRESSED IN BRAIN, SIGNAL = 1.2; NT HIT: AF242432.1, EVALUE 9.60e+00
ctgtgggagcagacaccttccctcttcccttcccctccagcaatagaaaggcacaggcaacccgaagtcccagagggg

SEQ ID NO: 24660 - DNA, 140 bp, Homo sapiens
  MAP TO AL133324.7; EXPRESSED IN LUNG, SIGNAL = 1.5; EXPRESSED IN PLACENTA, SIGNAL = 1.3; EXPRESSED IN ADULT LIVER, SIGNAL = 1.2; EXPRESSED IN HEART, SIGNAL = 1.3; EXPRESSED IN FETAL LIVER, SIGNAL = 1.5; EXPRESSED IN BRAIN, SIGNAL = 1.2; EXPRESSED IN BONE MARROW, SIGNAL = 1.1; NT HIT: gi4504168, EVALUE 2.00e-73; SWISSPROT HIT: P48637, EVALUE 4.00e-20; EST_HUMAN HIT: BE733519.1, EVALUE 3.00e-73
cggtgcacagctggggtccgggaggccaggcccccaaagctggcagagatggtgttgatttcgatctgtttcagggctggggagccatctgcgctgcgctggaacatgtagtctgagcgattcaggcccaggaacacagt

SEQ ID NO: 24661 - DNA, 152 bp, Homo sapiens
  MAP TO AC019221.3; EXPRESSED IN ADULT LIVER, SIGNAL = 0.85; EXPRESSED IN PLACENTA, SIGNAL = 0.7; EXPRESSED IN HEART, SIGNAL = 1.2; EXPRESSED IN FETAL LIVER, SIGNAL = 0.93; EXPRESSED IN BONE MARROW, SIGNAL = 1.1; EXPRESSED IN LUNG, SIGNAL = 0.88; EXPRESSED IN BRAIN, SIGNAL = 0.95; NT HIT: D63479.2, EVALUE 1.00e-80; EST_HUMAN HIT: AA573922.1, EVALUE 2.00e-80; SWISSPROT HIT: Q16760, EVALUE 3.00e-24
ctgtgaatgaggacccctgctgcctgcccaaactggtccatctgggtggcctcctcctcggacagcatctccgggtgcagggaacaggatggagggcggggcagctcgcacttctgcttgtcttcccaggacttcagggtgctctcaaatgc

SEQ ID NO: 24662 - DNA, 112 bp, Homo sapiens
  MAP TO AC021366.3; EXPRESSED IN LUNG, SIGNAL = 2.5; EXPRESSED IN PLACENTA, SIGNAL = 1.5; EXPRESSED IN FETAL LIVER, SIGNAL = 1.4; EXPRESSED IN BRAIN, SIGNAL = 1.4; EXPRESSED IN HEART, SIGNAL = 1.7; EXPRESSED IN ADULT LIVER, SIGNAL = 1.6; EXPRESSED IN BONE MARROW, SIGNAL = 1.8; SWISSPROT HIT: P22137, EVALUE 9.30e+00; EST_HUMAN HIT: T02984.1, EVALUE 9.10e-02; NT HIT: AF088901.1, EVALUE 2.40e-01
gctcagtactggaatcaagactacccctgaggctgccactgtaaaattcaccgatcttgtgataccctctacaatgattcaaaaggccaagctaatgactgtttacaatatt

SEQ ID NO: 24663 - DNA, 164 bp, Homo sapiens
  MAP TO AC021880.2; EXPRESSED IN LUNG, SIGNAL = 3.8; EXPRESSED IN PLACENTA, SIGNAL = 2.9; EXPRESSED IN HEART, SIGNAL = 3.1; EXPRESSED IN FETAL LIVER, SIGNAL = 3.4; EXPRESSED IN BRAIN, SIGNAL = 3.1; EXPRESSED IN BONE MARROW, SIGNAL = 3.8; EXPRESSED IN ADULT LIVER, SIGNAL = 3.9; EXPRESSED IN HELA, SIGNAL = 4.8; NT HIT: AF162445.2, EVALUE 5.00e+00
atgacagtgatggtgacggtgacggtgacagtgatggtgatggtgatggtgatggtgatggtgacagtgatggtgacggtgacggtgatggtgacagtgatggtgacagcggagatgacagtaatggtaggggtcatgatgatgatgatgatggtagcaaacat

SEQ ID NO: 24664 - DNA, 138 bp, Homo sapiens
  MAP TO AC011666.18; EXPRESSED IN ADULT LIVER, SIGNAL = 1.2; EXPRESSED IN HEART, SIGNAL = 1.3; EXPRESSED IN LUNG, SIGNAL = 1.4; EXPRESSED IN PLACENTA, SIGNAL = 1.1; EXPRESSED IN FETAL LIVER, SIGNAL = 1.7; EXPRESSED IN BRAIN, SIGNAL = 1.2; EXPRESSED IN BONE MARROW, SIGNAL = 7.1; EST_HUMAN HIT: AW952195.1, EVALUE 4.00e-72; SWISSPROT HIT: P80511, EVALUE 1.00e-20; NT HIT: X98289.1, EVALUE 3.00e-72
atgacaaaacttgaagagcatctggagggaattgtcaatatcttccaccaatactcagttcggaaggggcattttgacaccctctctaagggtgagctgaagcagctgcttacaaaggagcttgcaaacaccatcaag

SEQ ID NO: 24665 - DNA, 188 bp, Homo sapiens
  MAP TO AC013550.4; EXPRESSED IN HEART, SIGNAL =   2; EXPRESSED IN PLACENTA, SIGNAL = 0.67; EXPRESSED IN BONE MARROW, SIGNAL = 0.43; SWISSPROT HIT: P54296, EVALUE 2.00e-34; EST_HUMAN HIT: AW072827.1, EVALUE 6.50e-01; NT HIT: gi11425430, EVALUE 1.00e-102
cgttaggattgtcggtttgctgggtgaggaattgacctcgtgccagtttttatggtgaacttcacgcttgtccaggtagtagcccaggatgggcgagccaccactgaatttcgggaccttccagccgagggtcatggagtggccgtcacagttgaggagcgtaatcccataaggatgggacgggacgg

SEQ ID NO: 24666 - DNA, 103 bp, Homo sapiens
  MAP TO AC021811.2; EXPRESSED IN ADULT LIVER, SIGNAL = 1.9; EXPRESSED IN HEART, SIGNAL = 1.7; EXPRESSED IN BRAIN, SIGNAL = 1.8; EXPRESSED IN LUNG, SIGNAL = 1.5; EXPRESSED IN PLACENTA, SIGNAL = 1.6; EXPRESSED IN FETAL LIVER, SIGNAL = 1.7; EXPRESSED IN BONE MARROW, SIGNAL = 1.5; SWISSPROT HIT: Q99081, EVALUE 3.00e-15; NT HIT: gi11433926, EVALUE 2.00e-51; EST_HUMAN HIT: AV682474.1, EVALUE 2.00e-51
ccatcagatttgagttcatgaaaggtgttggggacaagccttcatgggctcctaatcgactgtcattcaagtgatcactgtaatgagggctgtctgtaaaacc

SEQ ID NO: 24667 - DNA, 109 bp, Homo sapiens
  MAP TO AL122006.5; EXPRESSED IN BONE MARROW, SIGNAL = 2.4; EXPRESSED IN ADULT LIVER, SIGNAL =   3; EXPRESSED IN HELA, SIGNAL = 3.7; EXPRESSED IN BRAIN, SIGNAL = 3.1; EXPRESSED IN LUNG, SIGNAL = 2.4; EXPRESSED IN PLACENTA, SIGNAL = 2.3; EXPRESSED IN HEART, SIGNAL = 2.8; EXPRESSED IN FETAL LIVER, SIGNAL = 2.5; SWISSPROT HIT: P34408, EVALUE 5.50e+00; EST_HUMAN HIT: AW241958.1, EVALUE 7.00e-15; NT HIT: AL163282.2, EVALUE 4.00e-09
ctttgctcccgttcccagtaagttccttatctccatgtgaggccacctcagcctggacttcactatccgtatcaccatcagcactaggaagttctaaattctccttcat

SEQ ID NO: 24668 - DNA, 89 bp, Homo sapiens
  MAP TO AL109976.21; EXPRESSED IN LUNG, SIGNAL = 1.3; EXPRESSED IN PLACENTA, SIGNAL =   1; EXPRESSED IN FETAL LIVER, SIGNAL = 2.1; EXPRESSED IN HEART, SIGNAL = 1.4; EXPRESSED IN ADULT LIVER, SIGNAL = 1.1; EXPRESSED IN BRAIN, SIGNAL = 1.2; EXPRESSED IN BONE MARROW, SIGNAL = 1.4; NT HIT: U67598.1, EVALUE 7.30e-01; SWISSPROT HIT: P22380, EVALUE 2.50e+00; EST_HUMAN HIT: AL049110.1, EVALUE 5.00e-43
aatctcttttgttccacagataatccatcttcctggatcacttttaaagagatccctgagttatcctgctgtttccagagggagaagac

SEQ ID NO: 24669 - DNA, 216 bp, Homo sapiens
  MAP TO AL162387.2; EXPRESSED IN ADULT LIVER, SIGNAL = 1.7; EXPRESSED IN BRAIN, SIGNAL = 1.7; EXPRESSED IN HELA, SIGNAL = 2.4; EXPRESSED IN HEART, SIGNAL = 1.9; EXPRESSED IN BONE MARROW, SIGNAL = 1.7; EXPRESSED IN LUNG, SIGNAL = 1.9; EXPRESSED IN PLACENTA, SIGNAL = 1.8; EXPRESSED IN FETAL LIVER, SIGNAL =   2; NT HIT: AF195953.1, EVALUE 8.00e+00; SWISSPROT HIT: Q03692, EVALUE 2.40e-01
agcccaaggcaaggtgggagctgtgcctctgatgggagacctggagggttcaccatctccccaggcctgcaaatccccgagggccctccagggtggggttgttcccaaaccgtggtcagtagggcctgaggctgaggccgcagtgagactcccacccatcacattggcacaggaccaaggttttgtcccaccccagccctctgcagtgacacccat

SEQ ID NO: 24670 - DNA, 192 bp, Homo sapiens
  MAP TO AL121771.17; EXPRESSED IN ADULT LIVER, SIGNAL = 4.1; EXPRESSED IN BRAIN, SIGNAL = 4.5; EXPRESSED IN LUNG, SIGNAL =   5; EXPRESSED IN HELA, SIGNAL = 4.7; EXPRESSED IN PLACENTA, SIGNAL = 4.5; EXPRESSED IN HEART, SIGNAL = 4.5; EXPRESSED IN FETAL LIVER, SIGNAL =   5; EXPRESSED IN BONE MARROW, SIGNAL = 5.1; EST_HUMAN HIT: AU130765.1, EVALUE 1.00e-104; NT HIT: gi8922626, EVALUE 1.00e-104; SWISSPROT HIT: P56941, EVALUE 7.60e-01
tctgagtctgggtggcaggcactgtttcctccgatacaaactggaccgtgctgggggctgctgcggatgtgcctgtcagctggcagccactttgcttgtgagctacaaaggcatccaggttgttaaactgctgcttgcagatgccgcagatatggatgtcgggagtcagctccaccagcaccgttgtgccac

SEQ ID NO: 24671 - DNA, 184 bp, Homo sapiens
  MAP TO AL162458.1; EXPRESSED IN ADULT LIVER, SIGNAL = 1.7; EXPRESSED IN BRAIN, SIGNAL =   2; EXPRESSED IN LUNG, SIGNAL =   2; EXPRESSED IN HELA, SIGNAL = 2.2; EXPRESSED IN PLACENTA, SIGNAL =   2; EXPRESSED IN HEART, SIGNAL = 1.9; EXPRESSED IN FETAL LIVER, SIGNAL =   2; EXPRESSED IN BONE MARROW, SIGNAL =   2; SWISSPROT HIT: P10074, EVALUE 8.00e-05; NT HIT: gi11560151, EVALUE 4.00e-78; EST_HUMAN HIT: AA559203.1, EVALUE 8.00e-53
aggcccttcctgtgccgcatctgtggttctcgctttctgtcccacgaggacctgcgcttccacgtcaactcccatgaggctggcgatccccagctcttcaagtgcctgcagtgcagctatcgttcccgccgctggtcctcgctcaaggtgcgggagccaaagaggcttggggctcatgggaggg

SEQ ID NO: 24672 - DNA, 168 bp, Homo sapiens
  MAP TO AL136438.8; EXPRESSED IN PLACENTA, SIGNAL = 9.7; EXPRESSED IN ADULT LIVER, SIGNAL =  13; EXPRESSED IN FETAL LIVER, SIGNAL = 8.8; EXPRESSED IN BRAIN, SIGNAL = 9.2; EXPRESSED IN BONE MARROW, SIGNAL = 5.9; EXPRESSED IN LUNG, SIGNAL =   7; EXPRESSED IN HELA, SIGNAL =   5; EXPRESSED IN HEART, SIGNAL =  15; NT HIT: gi11433721, EVALUE 5.00e-90; EST_HUMAN HIT: H06307.1, EVALUE 5.80e-01; SWISSPROT HIT: P98200, EVALUE 1.00e-25
ctgtgcgatggcgtaatccgagttgttggtggcctgcatgccttcattcccactgattcccacacccacgtgggctgtctggatcatcccgacatcgttggcgccgtctccgatggcgagggtgatggccttcacccgcttcttcaccacatccactatctcagactt

SEQ ID NO: 24673 - DNA, 162 bp, Homo sapiens
  MAP TO AL139296.2; EXPRESSED IN LUNG, SIGNAL =   3; EXPRESSED IN PLACENTA, SIGNAL = 2.9; EXPRESSED IN HELA, SIGNAL = 3.7; EXPRESSED IN HEART, SIGNAL = 2.7; EXPRESSED IN FETAL LIVER, SIGNAL = 2.8; EXPRESSED IN ADULT LIVER, SIGNAL =   3; EXPRESSED IN BRAIN, SIGNAL = 2.9; EXPRESSED IN BONE MARROW, SIGNAL = 2.9; EST_HUMAN HIT: AI360153.1, EVALUE 6.00e-84; SWISSPROT HIT: Q24119, EVALUE 5.00e-21; NT HIT: gi11545846, EVALUE 2.00e-86
agatagctaattgtaagtcgaatgatggatgccttgtcgagctggctggtaatggctgcaggaagaggcaacaacttggccaattcatagaactcaaagttttcttttccccggcgggagcgagcagcatctcgggatttctcctttctcaatgcttgtaaa

SEQ ID NO: 24674 - DNA, 81 bp, Homo sapiens
  MAP TO AC019221.3; EXPRESSED IN LUNG, SIGNAL = 1.8; EXPRESSED IN ADULT LIVER, SIGNAL = 1.8; EXPRESSED IN BRAIN, SIGNAL = 1.7; EXPRESSED IN BONE MARROW, SIGNAL = 1.7; EXPRESSED IN PLACENTA, SIGNAL = 1.7; EXPRESSED IN HEART, SIGNAL = 1.7; EXPRESSED IN FETAL LIVER, SIGNAL =   2; EST_HUMAN HIT: AI247442.1, EVALUE 9.00e-32; NT HIT: D63479.2, EVALUE 2.00e-38; SWISSPROT HIT: Q16760, EVALUE 2.00e-08
tcaatcatatttgatgaggtggatctgacagatgccagcgtagctgaatccagtaccaaaaacgtcaacaacagttttacg

SEQ ID NO: 24675 - DNA, 172 bp, Homo sapiens
  MAP TO AL121903.13; EXPRESSED IN ADULT LIVER, SIGNAL = 2.5; EXPRESSED IN HELA, SIGNAL = 2.5; EXPRESSED IN BRAIN, SIGNAL = 2.5; EXPRESSED IN LUNG, SIGNAL = 2.7; EXPRESSED IN HEART, SIGNAL = 2.5; EXPRESSED IN BONE MARROW, SIGNAL = 2.5; EXPRESSED IN PLACENTA, SIGNAL = 6.4; EXPRESSED IN FETAL LIVER, SIGNAL = 2.5; EST_HUMAN HIT: AW878615.1, EVALUE 9.00e-68; SWISSPROT HIT: P98158, EVALUE 1.50e-01; NT HIT: gi11422086, EVALUE 6.00e-68
atcagaaactgtttgccagcctcctcatcaagtgtgtggtccagttggaattgatacagaccattgacaacattgtgttctaccctgcgacgagcaaaaaggaggatgcagagcacatggttgccgcccaggtaagaacaggaggcctcaggaagagcatccctgtccatag

SEQ ID NO: 24676 - DNA, 244 bp, Homo sapiens
  MAP TO AC017086.3; EXPRESSED IN LUNG, SIGNAL = 2.2; EXPRESSED IN HEART, SIGNAL = 2.3; EXPRESSED IN PLACENTA, SIGNAL = 2.2; EXPRESSED IN FETAL LIVER, SIGNAL = 2.7; EXPRESSED IN ADULT LIVER, SIGNAL = 2.4; EXPRESSED IN HELA, SIGNAL = 2.5; EXPRESSED IN BRAIN, SIGNAL = 2.5; EXPRESSED IN BONE MARROW, SIGNAL = 2.6; EST_HUMAN HIT: BF436218.1, EVALUE 0.00e+00; SWISSPROT HIT: P06700, EVALUE 1.20e+00; NT HIT: AB040926.1, EVALUE 1.00e-111
gttgatttgtcgtgtgacaaggctgaaaaaactctaagttactaccaagcacgtctattgtctttacggatgaagacctgcacgcaagctgcatctcacagtggcatggcagccacacaccagaaggcagtgaaaataattgcatacaaaaatggggatgggtatcgtaatgggaagttaattgtggctggaacattccccatggtaagtggctatcacttaaatgctgcttgcatcttcagag

SEQ ID NO: 24677 - DNA, 261 bp, Homo sapiens
  MAP TO AC011472.3; EXPRESSED IN LUNG, SIGNAL = 1.4; EXPRESSED IN ADULT LIVER, SIGNAL = 1.7; EXPRESSED IN BRAIN, SIGNAL = 0.97; EXPRESSED IN BONE MARROW, SIGNAL = 1.3; EXPRESSED IN PLACENTA, SIGNAL = 1.7; EXPRESSED IN HEART, SIGNAL =   2; EXPRESSED IN FETAL LIVER, SIGNAL = 1.6; SWISSPROT HIT: Q02388, EVALUE 4.00e-04; NT HIT: D50544.1, EVALUE 6.30e-01; EST_HUMAN HIT: AV654765.1, EVALUE 0.00e+00
tgtcgcagctacggtgcccacctgagtctccaacaggcttgcccgaagttcctgggctgcatcccggccccggctgacctcctgccccaggagttctattgtgcggccatagagacccaggctgttcctggcctttgtcagccgtccctccgtggtcctgtacacaccgttgagggcctggcccagctgcagggtcccatggaagagcagggtcagctcctcatgctgtgccagttctgggccgcccatgggggccgctga

SEQ ID NO: 24678 - DNA, 78 bp, Homo sapiens
  MAP TO AL121673.27; EXPRESSED IN ADULT LIVER, SIGNAL =   6; EXPRESSED IN HELA, SIGNAL = 5.9; EXPRESSED IN BRAIN, SIGNAL = 5.1; EXPRESSED IN LUNG, SIGNAL =   6; EXPRESSED IN BONE MARROW, SIGNAL = 6.1; EXPRESSED IN PLACENTA, SIGNAL = 5.9; EXPRESSED IN HEART, SIGNAL =   5; EXPRESSED IN FETAL LIVER, SIGNAL = 5.9; EST_HUMAN HIT: BF133577.1, EVALUE 2.30e-01; SWISSPROT HIT: P31388, EVALUE 9.60e+00; NT HIT: AJ003162.1, EVALUE 6.20e-01
catggcccccaggggccaactgtgtgcatctctccccacctcacacaccagtgtcacgttggtagtgacgtcagccat

SEQ ID NO: 24679 - DNA, 233 bp, Homo sapiens
  MAP TO AL161646.3; EXPRESSED IN ADULT LIVER, SIGNAL = 2.5; EXPRESSED IN HELA, SIGNAL = 3.2; EXPRESSED IN BRAIN, SIGNAL = 3.1; EXPRESSED IN BONE MARROW, SIGNAL = 3.1; EXPRESSED IN LUNG, SIGNAL = 2.7; EXPRESSED IN PLACENTA, SIGNAL = 2.6; EXPRESSED IN HEART, SIGNAL = 2.9; EXPRESSED IN FETAL LIVER, SIGNAL =   3; EST_HUMAN HIT: AV726527.1, EVALUE 3.30e+00; SWISSPROT HIT: P21519, EVALUE 3.30e+00; NT HIT: AF183416.1, EVALUE 2.20e+00
gctcctccaggaaatgacctggttggactcccaggaccctcccctggcccatgtagctggaattcttgctgatttgggcccagcccttgcatggaaggaatggaatctcatttttaagggagacatgaatagaaagaaaaaaaaaatttccctcttgaggcgaagagaatatggaaagggccacatcttaggcagaatatatagggctgtttctctggaggatactgggactg

SEQ ID NO: 24680 - DNA, 93 bp, Homo sapiens
  MAP TO AC021782.2; EXPRESSED IN LUNG, SIGNAL = 2.8; EXPRESSED IN PLACENTA, SIGNAL = 2.4; EXPRESSED IN ADULT LIVER, SIGNAL = 1.9; EXPRESSED IN HELA, SIGNAL = 3.5; EXPRESSED IN BRAIN, SIGNAL = 3.9; EXPRESSED IN BONE MARROW, SIGNAL = 4.5; EXPRESSED IN HEART, SIGNAL =   4; EXPRESSED IN FETAL LIVER, SIGNAL = 4.6; NT HIT: gi5031896, EVALUE 2.00e-13; EST_HUMAN HIT: R18580.1, EVALUE 3.00e-13
tcaaaaatgcctttcggaagtgctgcagcgttggtttccctgctgctgctgctgctgctgctgctgctgctgctgctgctgctgctgctgctg

SEQ ID NO: 24681 - DNA, 88 bp, Homo sapiens
  MAP TO AC025588.1; EXPRESSED IN HELA, SIGNAL = 7.5; EXPRESSED IN BONE MARROW, SIGNAL = 7.7; EXPRESSED IN LUNG, SIGNAL = 3.5; EXPRESSED IN ADULT LIVER, SIGNAL = 3.8; EXPRESSED IN HEART, SIGNAL = 3.7; EXPRESSED IN BRAIN, SIGNAL = 3.7; EXPRESSED IN PLACENTA, SIGNAL =   2; EXPRESSED IN FETAL LIVER, SIGNAL = 8.8; SWISSPROT HIT: Q29375, EVALUE 1.90e-02; NT HIT: AF257711.1, EVALUE 1.80e-01; EST_HUMAN HIT: AA781201.1, EVALUE 3.00e-04
ttcacacacagcaagaaggctcagctgatggtgactgcgtgtgacatggatcccagcaagctgtctgtcttcctgcctgccctggatt

SEQ ID NO: 24682 - DNA, 198 bp, Homo sapiens
  MAP TO AC012405.4; EXPRESSED IN ADULT LIVER, SIGNAL = 1.9; EXPRESSED IN BRAIN, SIGNAL = 1.5; EXPRESSED IN LUNG, SIGNAL = 2.1; EXPRESSED IN PLACENTA, SIGNAL =   2; EXPRESSED IN HELA, SIGNAL = 2.8; EXPRESSED IN BONE MARROW, SIGNAL = 1.7; EXPRESSED IN HEART, SIGNAL = 1.7; EXPRESSED IN FETAL LIVER, SIGNAL = 1.5; NT HIT: AE001797.1, EVALUE 3.00e-02; EST_HUMAN HIT: AW117187.1, EVALUE 6.90e-01; SWISSPROT HIT: Q50422, EVALUE 2.90e+00
ccttctcttcatcatctgtctccatccacttcttgggcaaaggataaaaggcagggaagcagacaatgaatgttctcctttttgccatattcatctctaagtgatgattttttttgcaaatggttatgaaagggcaggaatgataattcaaggaaatcatgatgagaaacatgagaagggtgtatttcagctccttac

SEQ ID NO: 24683 - DNA, 97 bp, Homo sapiens
  MAP TO AC018425.3; EXPRESSED IN ADULT LIVER, SIGNAL = 1.4; EXPRESSED IN BRAIN, SIGNAL = 2.4; EXPRESSED IN LUNG, SIGNAL = 1.9; EXPRESSED IN PLACENTA, SIGNAL =   2; EXPRESSED IN BONE MARROW, SIGNAL = 2.1; EXPRESSED IN HEART, SIGNAL = 2.6; EXPRESSED IN FETAL LIVER, SIGNAL = 2.1; NT HIT: AF111167.2, EVALUE 6.00e-08; EST_HUMAN HIT: T65891.1, EVALUE 3.00e-10; SWISSPROT HIT: O13710, EVALUE 5.50e+00
aaaagttcaagatcaaggggctgcatcagttgagggccttcttgccgatggggactctctgcagagaccagaggtggcacagggcaggcatcacatg

SEQ ID NO: 24684 - DNA, 160 bp, Homo sapiens
  MAP TO AC015750.4; EXPRESSED IN HELA, SIGNAL = 2.3; EXPRESSED IN BONE MARROW, SIGNAL = 2.5; EXPRESSED IN LUNG, SIGNAL = 1.5; EXPRESSED IN PLACENTA, SIGNAL = 1.2; EXPRESSED IN ADULT LIVER, SIGNAL = 1.5; EXPRESSED IN HEART, SIGNAL = 1.6; EXPRESSED IN BRAIN, SIGNAL = 1.3; EXPRESSED IN FETAL LIVER, SIGNAL = 3.5; SWISSPROT HIT: P08548, EVALUE 4.00e-06; NT HIT: AL163282.2, EVALUE 1.00e-07; EST_HUMAN HIT: AA776601.1, EVALUE 4.00e-05
gaagattgatgtcaaacacagtatcatttcagatgacaatggtatgaaactagaaattaataacaggatgaaatttttaaaaagtacaaatatatggaagttaaaccacatgttcctggacaacaaatgggtcaaagacctaatcaaaaggatttttctt

SEQ ID NO: 24685 - DNA, 202 bp, Homo sapiens
  MAP TO AC007325.51; EXPRESSED IN HELA, SIGNAL = 3.1; EXPRESSED IN BONE MARROW, SIGNAL =   3; EXPRESSED IN LUNG, SIGNAL = 2.8; EXPRESSED IN PLACENTA, SIGNAL = 3.3; EXPRESSED IN HEART, SIGNAL = 2.9; EXPRESSED IN FETAL LIVER, SIGNAL = 3.5; EXPRESSED IN ADULT LIVER, SIGNAL = 3.2; EXPRESSED IN BRAIN, SIGNAL = 3.7; SWISSPROT HIT: O43272, EVALUE 3.00e-10; EST_HUMAN HIT: AI905037.1, EVALUE 1.00e-102; NT HIT: gi5174644, EVALUE 1.00e-102
ctaggcagggcgatggaagaggttgccagttcggagccgcctcaagagctccagccacagcaactgccgctcccgatgggtgcccttcatgaggctgctgttctccagggcacggcgggacaagtagggcagcacctccatcacggggccatagggcacgtacttgtacacggggtagccggcctggcctgcatgggggcag

SEQ ID NO: 24686 - DNA, 390 bp, Homo sapiens
  MAP TO AC010474.2; EXPRESSED IN LUNG, SIGNAL = 4.6; EXPRESSED IN PLACENTA, SIGNAL = 3.1; EXPRESSED IN HEART, SIGNAL = 3.6; EXPRESSED IN FETAL LIVER, SIGNAL = 3.5; EXPRESSED IN ADULT LIVER, SIGNAL = 3.8; EXPRESSED IN HELA, SIGNAL = 5.3; EXPRESSED IN BRAIN, SIGNAL = 2.7; EXPRESSED IN BONE MARROW, SIGNAL =   5; NT HIT: gi4505256, EVALUE 0.00e+00; SWISSPROT HIT: P26038, EVALUE 8.00e-56; EST_HUMAN HIT: AW517960.1, EVALUE 0.00e+00
atggcagagctgacagctcaaatctctcagctggaactggcccgacagaagaaagagagtgaggctatggagtggcagcagaaggcccagatggtacaggaagacttggagaagacccgtgctgagctgaagactgccatgagtacatctcatgtggcagagcctgctgagaatgagcaggatgagcaggatgagaatggggcagaggctagtgctgacctacgggctgatgctatggccaaggaccgcagtgaggaggaatgtaacactgaggcagagaagaatgagcgtgtgcagaagcacctgaaggcccccacttcggagctggccagtgcccgagatgagtccaagaagactgccaatgacatgatccatgctgagaacatgtga

SEQ ID NO: 24687 - DNA, 92 bp, Homo sapiens
  MAP TO AC022206.2; EXPRESSED IN LUNG, SIGNAL = 5.4; EXPRESSED IN PLACENTA, SIGNAL = 5.6; EXPRESSED IN HEART, SIGNAL = 5.5; EXPRESSED IN FETAL LIVER, SIGNAL = 5.9; EXPRESSED IN BRAIN, SIGNAL = 5.5; EXPRESSED IN ADULT LIVER, SIGNAL = 4.9; EXPRESSED IN HELA, SIGNAL = 6.1; EXPRESSED IN BONE MARROW, SIGNAL = 5.4; SWISSPROT HIT: P27017, EVALUE 9.50e+00; NT HIT: U97329.1, EVALUE 7.60e-01; EST_HUMAN HIT: BE565003.1, EVALUE 7.20e-02
ccaacaaccacagtcttgtcagtgctggttttgtcacccttggtcaatttggtgtctgtgcagttaggttccagtttcccaatccgcaccac

SEQ ID NO: 24688 - DNA, 405 bp, Homo sapiens
  MAP TO AC015525.3; EXPRESSED IN ADULT LIVER, SIGNAL = 5.1; EXPRESSED IN BONE MARROW, SIGNAL =  18; EXPRESSED IN PLACENTA, SIGNAL = 2.9; EXPRESSED IN HELA, SIGNAL =  13; EXPRESSED IN HEART, SIGNAL = 6.1; EXPRESSED IN FETAL LIVER, SIGNAL =  21; EXPRESSED IN LUNG, SIGNAL = 5.5; EXPRESSED IN BRAIN, SIGNAL = 8.8; NT HIT: D23660.1, EVALUE 0.00e+00; SWISSPROT HIT: P36578, EVALUE 8.00e-56; EST_HUMAN HIT: BE549213.1, EVALUE 0.00e+00
aacacaacccaaaaacgatatgccatctgttctgccctggctgcctcagccctaccagcactggtcatgtctaaaggtcatcgtattgaggaagttcctgaacttcctttggtatttgaagataaagttgaaggctacaagaagaccaaggaagctgttttgctccttaagaaacttaaagcctggaatgatatcgaaaaggtctatgcctctcagcgaatgagagctggcaaaggcaaaatgagaaaccgtcgccgtatccagcgcaggggcctgtgcatcatctataatgaggataatggtatcatcaaggccttcagaaacatccctggaattactctgcttaatgtaagcaagctgaacattttgaagcttgctcctggtgggcatgtgggacgtttctgc

SEQ ID NO: 24689 - DNA, 85 bp, Homo sapiens
  MAP TO AC008506.4; EXPRESSED IN LUNG, SIGNAL =  20; EXPRESSED IN ADULT LIVER, SIGNAL =  22; EXPRESSED IN HEART, SIGNAL =  17; EXPRESSED IN BRAIN, SIGNAL =  16; EXPRESSED IN FETAL LIVER, SIGNAL =  20; EXPRESSED IN PLACENTA, SIGNAL =  20; EXPRESSED IN HELA, SIGNAL =  32; EXPRESSED IN BONE MARROW, SIGNAL =  20; NT HIT: AF188186.1, EVALUE 2.70e+00; EST_HUMAN HIT: AA004982.1, EVALUE 1.00e+00
ggtgaattatgcaataggcataattacagtgcctatcgttcaaatacggctttgcagacactggaaatttctgacagcagaggag

SEQ ID NO: 24690 - DNA, 154 bp, Homo sapiens
  MAP TO AC027273.2; EXPRESSED IN ADULT LIVER, SIGNAL = 8.8; EXPRESSED IN HELA, SIGNAL = 8.5; EXPRESSED IN HEART, SIGNAL = 7.9; EXPRESSED IN BRAIN, SIGNAL =  11; EXPRESSED IN BONE MARROW, SIGNAL = 9.1; EXPRESSED IN LUNG, SIGNAL = 7.7; EXPRESSED IN PLACENTA, SIGNAL = 6.9; EXPRESSED IN FETAL LIVER, SIGNAL =  10; NT HIT: AJ298105.1, EVALUE 4.00e-41; SWISSPROT HIT: P15144, EVALUE 6.80e+00; EST_HUMAN HIT: AW246964.1, EVALUE 9.00e-46
tgggttcgtggtctcactgacttcaggggtgaagctgcagaccttcgcagtgttacagttcataaaggtagtgtggacacaaagagtgagcagcagcaagatttattgtgaagagcgaaacaacaaagcttccacagcgcggaaggggacctga

SEQ ID NO: 24691 - DNA, 111 bp, Homo sapiens
  MAP TO AC007956.5; EXPRESSED IN BONE MARROW, SIGNAL = 1.6; EXPRESSED IN LUNG, SIGNAL = 1.6; EXPRESSED IN BRAIN, SIGNAL = 1.4; EXPRESSED IN HEART, SIGNAL = 1.5; EXPRESSED IN HELA, SIGNAL = 2.4; EXPRESSED IN ADULT LIVER, SIGNAL = 1.6; EXPRESSED IN PLACENTA, SIGNAL = 1.4; EXPRESSED IN FETAL LIVER, SIGNAL = 1.6; SWISSPROT HIT: P53119, EVALUE 2.40e+00; EST_HUMAN HIT: AA055870.1, EVALUE 4.00e-56; NT HIT: gi11434956, EVALUE 3.00e-56
cttgtaggctcctcctagagaggactcatagagacacttgcccacgagccgtcccgcaaactcatacattttcaggcgcagatgagcggggcgattagggttgggatgcac

SEQ ID NO: 24692 - DNA, 424 bp, Homo sapiens
  MAP TO AL135844.8; EXPRESSED IN FETAL LIVER, SIGNAL = 1.4; EXPRESSED IN BONE MARROW, SIGNAL = 1.5; EXPRESSED IN LUNG, SIGNAL = 1.7; EXPRESSED IN PLACENTA, SIGNAL = 1.8; EXPRESSED IN ADULT LIVER, SIGNAL = 1.8; EXPRESSED IN HEART, SIGNAL = 1.3; EXPRESSED IN BRAIN, SIGNAL = 1.4; SWISSPROT HIT: P38888, EVALUE 4.00e-03; NT HIT: gi11420549, EVALUE 1.00e-74; EST_HUMAN HIT: BE410790.1, EVALUE 2.00e-74
ctaggaacatggccatgagcttcttatcctgaagcaggatggctcctttcaccaagtactcaaagtaggagtccacgccagccccgatgcctgcgtcctgggccacccacttgccagtgagcacatcaatgtggttgccgacctgagagagagaaagacacacggtcccaacgggaaggccgatggccaaagaaggatctactcacccccaaccctgactgcccagggagatgcagggcaggtgccccagtgcttcttgggaaacatgcagaccctgagagggaagggcaatgctggatcatggccagccttcctgtacatctgcatagtagagatgcatctcatgcacatttatgaggacttaattatacacattgagcaaaaaatgaaaaagaaaaatgatttggagtgtttatgtcctgcc

SEQ ID NO: 24693 - DNA, 132 bp, Homo sapiens
  MAP TO AL121930.8; EXPRESSED IN PLACENTA, SIGNAL = 2.2; EXPRESSED IN ADULT LIVER, SIGNAL = 2.3; EXPRESSED IN HEART, SIGNAL = 1.5; EXPRESSED IN BRAIN, SIGNAL = 1.7; EXPRESSED IN LUNG, SIGNAL = 1.7; EXPRESSED IN FETAL LIVER, SIGNAL = 1.6; EXPRESSED IN BONE MARROW, SIGNAL =   2; NT HIT: AL163203.2, EVALUE 1.00e-06; EST_HUMAN HIT: AV730860.1, EVALUE 5.00e-04
ctatataatggcataggaagcagagatacctattttggatatagatttgccttccttgcctgtaatacttctgcaagcaccaccatccatggactcacagaatgccttaatcactatcatggaagtttccat

SEQ ID NO: 24694 - DNA, 146 bp, Homo sapiens
  MAP TO AC022562.3; EXPRESSED IN PLACENTA, SIGNAL = 0.97; EXPRESSED IN BONE MARROW, SIGNAL = 0.82; EXPRESSED IN ADULT LIVER, SIGNAL = 0.7; EXPRESSED IN HEART, SIGNAL =   2; EXPRESSED IN FETAL LIVER, SIGNAL = 0.51; EXPRESSED IN LUNG, SIGNAL =   1; EXPRESSED IN BRAIN, SIGNAL = 1.2; EST_HUMAN HIT: AI394070.1, EVALUE 4.90e-01; NT HIT: AB002297.1, EVALUE 5.00e-77; SWISSPROT HIT: P41892, EVALUE 4.00e+00
tcaaagcgcaggtgggagccccggaaccggtcaatggggataggcaatttgataatttctccccagcgaggactattactgtggtagaggacaaaggagtggtaggaactcctatttggctctcctgaacccaagctgatgcaatc

SEQ ID NO: 24695 - DNA, 135 bp, Homo sapiens
  MAP TO AC013396.4; EXPRESSED IN LUNG, SIGNAL =  25; EXPRESSED IN ADULT LIVER, SIGNAL =  25; EXPRESSED IN HELA, SIGNAL =  16; EXPRESSED IN HEART, SIGNAL =  25; EXPRESSED IN FETAL LIVER, SIGNAL =  24; EXPRESSED IN BRAIN, SIGNAL =  25; EXPRESSED IN PLACENTA, SIGNAL =  26; EXPRESSED IN BONE MARROW, SIGNAL =  26; SWISSPROT HIT: Q03605, EVALUE 7.00e+00; EST_HUMAN HIT: M86006.1, EVALUE 4.50e-01; NT HIT: M76857.1, EVALUE 1.20e+00
gatgtcggtccagcagtgtgccgtatgctgtcattgtggtttccagtcccatctcctccactgtggacatttttactgctagcaaaccaggtatcacctactatgtttgccctacttggttaactccaagtggct

SEQ ID NO: 24696 - DNA, 127 bp, Homo sapiens
  MAP TO AC013593.3; EXPRESSED IN BONE MARROW, SIGNAL = 1.5; EXPRESSED IN PLACENTA, SIGNAL = 1.4; EXPRESSED IN ADULT LIVER, SIGNAL = 1.7; EXPRESSED IN HEART, SIGNAL = 1.5; EXPRESSED IN LUNG, SIGNAL = 1.8; EXPRESSED IN FETAL LIVER, SIGNAL = 1.4; EXPRESSED IN BRAIN, SIGNAL = 1.8; EST_HUMAN HIT: AW863666.1, EVALUE 4.20e-01; SWISSPROT HIT: P32086, EVALUE 1.10e+00; NT HIT: AL163213.2, EVALUE 4.40e+00
atgtgtactgaattgcaatgtaaaatatatttcttattgtggtcatggtcaaaaagtttgaaaaacactgcattagaataatcttcccagacacagttttcaacatgcttttcctcagctttgattc

SEQ ID NO: 24697 - DNA, 140 bp, Homo sapiens
  MAP TO AL160060.3; EXPRESSED IN PLACENTA, SIGNAL = 1.4; EXPRESSED IN ADULT LIVER, SIGNAL = 1.6; EXPRESSED IN FETAL LIVER, SIGNAL = 1.2; EXPRESSED IN HEART, SIGNAL = 2.5; EXPRESSED IN BRAIN, SIGNAL = 1.3; EXPRESSED IN BONE MARROW, SIGNAL = 1.7; EXPRESSED IN LUNG, SIGNAL = 1.7; EST_HUMAN HIT: AU133721.1, EVALUE 1.00e-53; SWISSPROT HIT: Q06846, EVALUE 9.10e+00; NT HIT: gi11496980, EVALUE 2.00e-73
gagatggaaaaatcttttgatgaacaaaatgttccaaagcgacgctcaagaaacacagctgtggagcagaggctacgccgtctgcaggacaggtccctcacccagcccatcaccactgaagaggtggtcatcgcagccac

SEQ ID NO: 24698 - DNA, 92 bp, Homo sapiens
  MAP TO AL137143.6; EXPRESSED IN PLACENTA, SIGNAL = 3.5; EXPRESSED IN FETAL LIVER, SIGNAL = 3.2; EXPRESSED IN ADULT LIVER, SIGNAL = 3.9; EXPRESSED IN BONE MARROW, SIGNAL = 3.2; EXPRESSED IN LUNG, SIGNAL = 3.4; EXPRESSED IN HELA, SIGNAL = 3.3; EXPRESSED IN HEART, SIGNAL = 3.2; EXPRESSED IN BRAIN, SIGNAL = 3.7; NT HIT: AL161538.2, EVALUE 7.60e-01; EST_HUMAN HIT: BE539214.1, EVALUE 7.20e-02
aaacttgtcttgttttcttcctcgaatgacatctcccacatctggatcttcgtcaccatcacctctgccaaggcctggttccaggtctgcat

SEQ ID NO: 24699 - DNA, 158 bp, Homo sapiens
  MAP TO AC019101.3; EXPRESSED IN LUNG, SIGNAL = 1.6; EXPRESSED IN PLACENTA, SIGNAL = 1.1; EXPRESSED IN HEART, SIGNAL = 1.2; EXPRESSED IN FETAL LIVER, SIGNAL = 1.4; EXPRESSED IN BONE MARROW, SIGNAL = 1.9; EXPRESSED IN ADULT LIVER, SIGNAL = 1.5; EXPRESSED IN BRAIN, SIGNAL = 1.3; NT HIT: AL163207.2, EVALUE 2.00e-09; EST_HUMAN HIT: AW937469.1, EVALUE 4.00e-20
ctggatctgggacttccagcctccaagacttgggagaatcaatgtctgttgtttataagccactaagtctatggtattctgtgctagcagcctgaaatggactaagacatcccataagcagaggagatgaagattcagacgcacacagagggacgacc

SEQ ID NO: 24700 - DNA, 195 bp, Homo sapiens
  MAP TO AC007595.3; EXPRESSED IN LUNG, SIGNAL = 2.1; EXPRESSED IN ADULT LIVER, SIGNAL = 1.7; EXPRESSED IN HEART, SIGNAL = 2.2; EXPRESSED IN FETAL LIVER, SIGNAL = 1.5; EXPRESSED IN BRAIN, SIGNAL = 1.7; EXPRESSED IN PLACENTA, SIGNAL = 1.9; EXPRESSED IN BONE MARROW, SIGNAL = 1.7; EST_HUMAN HIT: BE063527.1, EVALUE 2.70e+00; SWISSPROT HIT: P06192, EVALUE 3.80e+00
agaaagtgcacagcacttctgtgatattgttcctgatttccaggggaggagaaggtgatatgactgtcaaaattgcaggaagtgtatacctgtctgtgatgtggttcctaatatccaagagtggaaaaaaagatattatttccattatctcagagggtctaaaccccctcctggtgatattgttcgtaatatcca

SEQ ID NO: 24701 - DNA, 247 bp, Homo sapiens
  MAP TO AL117381.9; EXPRESSED IN BONE MARROW, SIGNAL =   2; EXPRESSED IN PLACENTA, SIGNAL = 1.4; EXPRESSED IN ADULT LIVER, SIGNAL = 1.1; EXPRESSED IN HEART, SIGNAL = 1.5; EXPRESSED IN LUNG, SIGNAL = 1.8; EXPRESSED IN FETAL LIVER, SIGNAL = 1.8; EXPRESSED IN BRAIN, SIGNAL = 1.2; EST_HUMAN HIT: F28784.1, EVALUE 3.00e-68; NT HIT: AF042769.1, EVALUE 6.00e-07; SWISSPROT HIT: P19783, EVALUE 3.00e-13
tacgtgctcagtaagaatttgctgaatgaacagcatctgctgcagggagggggaagccgggatcacttagagtggacgcacctgaggccccttccccacacccaactgcctccagtgtaccggctccagttcaatgagacctttgcggagatgaaccgtcgctccaatgagtggaagacagtgatgggttgtgtcttcttcttcattggattcgcagctctggtgatttggtggcagcgggtctacg

SEQ ID NO: 24702 - DNA, 217 bp, Homo sapiens
  MAP TO AC025749.2; EXPRESSED IN PLACENTA, SIGNAL = 1.1; EXPRESSED IN ADULT LIVER, SIGNAL = 0.76; EXPRESSED IN FETAL LIVER, SIGNAL = 0.92; EXPRESSED IN BRAIN, SIGNAL = 1.3; EXPRESSED IN BONE MARROW, SIGNAL = 1.1; EXPRESSED IN LUNG, SIGNAL = 1.1; EXPRESSED IN HEART, SIGNAL = 1.4; NT HIT: AJ297701.1, EVALUE 1.00e-119; SWISSPROT HIT: P42701, EVALUE 4.00e-33; EST_HUMAN HIT: BE243764.1, EVALUE 1.00e-85
acttggcagtggatcaacccagtggacttccaggaagaggcatccctgcaggaggccctggtggtagagatgtcctgggacaaaggcgagaggactgagcctctcgagaagacagagctacctgagggtgcccctgagctggccctggatacagagttgtccttggaggatggagacaggtgcaaggccaaggtcctggggcccagtgggccagacg

SEQ ID NO: 24703 - DNA, 130 bp, Homo sapiens
  MAP TO AC024252.3; EXPRESSED IN ADULT LIVER, SIGNAL = 1.4; EXPRESSED IN PLACENTA, SIGNAL = 1.7; EXPRESSED IN HEART, SIGNAL = 1.2; EXPRESSED IN FETAL LIVER, SIGNAL = 1.2; EXPRESSED IN BONE MARROW, SIGNAL = 3.9; EXPRESSED IN LUNG, SIGNAL =   2; EXPRESSED IN BRAIN, SIGNAL =   2; NT HIT: AF043349.1, EVALUE 4.00e-56; EST_HUMAN HIT: AW405630.1, EVALUE 1.00e-53; SWISSPROT HIT: P33241, EVALUE 8.00e-16
aacccccaaggtagcccaccaggcctccatagagctgcccagcatggccatggccagtaccaagagtcggtgggagacgggtgaggtacaggctcagtctgcggccaagactccgtcctgcaagatgaag

SEQ ID NO: 24704 - DNA, 154 bp, Homo sapiens
  MAP TO AL133354.8; EXPRESSED IN LUNG, SIGNAL = 1.6; EXPRESSED IN PLACENTA, SIGNAL = 1.4; EXPRESSED IN ADULT LIVER, SIGNAL = 1.4; EXPRESSED IN FETAL LIVER, SIGNAL = 1.5; EXPRESSED IN BRAIN, SIGNAL = 1.6; EXPRESSED IN HEART, SIGNAL = 1.5; EXPRESSED IN BONE MARROW, SIGNAL = 1.7; EST_HUMAN HIT: AW897550.1, EVALUE 1.00e-81; SWISSPROT HIT: P50749, EVALUE 3.00e-25; NT HIT: gi11421160, EVALUE 1.00e-81
gggcctgaagcccctgcaggaggacaccccacagctgatgcgcacacgcagtgatgttggggtgcgtcgccgtggcaatgtgaggacgcctagtgaccagcggcgaatcagacgccaccgcttctccatcaacggccatttctacaaccataag

SEQ ID NO: 24705 - DNA, 399 bp, Homo sapiens
  MAP TO AC018774.3; EXPRESSED IN ADULT LIVER, SIGNAL = 2.1; EXPRESSED IN BRAIN, SIGNAL = 2.8; EXPRESSED IN PLACENTA, SIGNAL = 3.4; EXPRESSED IN FETAL LIVER, SIGNAL =   3; EXPRESSED IN BONE MARROW, SIGNAL = 4.1; EXPRESSED IN LUNG, SIGNAL = 2.4; EXPRESSED IN HELA, SIGNAL = 2.9; EXPRESSED IN HEART, SIGNAL = 1.6; SWISSPROT HIT: Q01844, EVALUE 3.00e-28; NT HIT: gi11417927, EVALUE 0.00e+00; EST_HUMAN HIT: BE781742.1, EVALUE 0.00e+00
atggcatccatggattacagtacctatagccaagctgcagcgcagcagggctacagtgcttacaacacccagcccactcaaggatatgcacagaccacccaggcatatgggcaacaaagctatggaacctatggacagcccattgatgtcagctatacccaggctcagaccactgcaatctatgggcagaccgcctatgcaacttcttatggacagcctcccactggttatactactccaactgccccccaggcatacagccagcctgtccaggggtatggcactggtgcttatgataccaccactgctacagtcaccaccacccaggcctcctatgcagctcaatctgcatatggcactcagcctgcttatccagcttatgggcagcagccagtagcc

SEQ ID NO: 24706 - DNA, 147 bp, Homo sapiens
  MAP TO AC013591.3; EXPRESSED IN LUNG, SIGNAL =   1; EXPRESSED IN PLACENTA, SIGNAL =   1; EXPRESSED IN HEART, SIGNAL = 1.2; EXPRESSED IN FETAL LIVER, SIGNAL =   1; EXPRESSED IN BONE MARROW, SIGNAL = 0.92; EXPRESSED IN ADULT LIVER, SIGNAL = 1.1; EXPRESSED IN BRAIN, SIGNAL = 3.1; NT HIT: AB029396.1, EVALUE 1.00e-77; EST_HUMAN HIT: AI929010.1, EVALUE 2.00e-77; SWISSPROT HIT: P34268, EVALUE 4.60e-01
gtaatgaggagccgtgggtgcagccagccttggagatgccgaagagacgggacatcctagcgatcgtcctcatcgtgctgccctggactctgctcatcactgtctggcaccagagcaccctcgcacccctgctcgcggtacataagg

SEQ ID NO: 24707 - DNA, 178 bp, Homo sapiens
  MAP TO AC008572.6; EXPRESSED IN ADULT LIVER, SIGNAL = 1.5; EXPRESSED IN BONE MARROW, SIGNAL = 1.5; EXPRESSED IN HEART, SIGNAL = 2.5; EXPRESSED IN LUNG, SIGNAL = 1.8; EXPRESSED IN PLACENTA, SIGNAL = 1.3; EXPRESSED IN FETAL LIVER, SIGNAL = 1.3; EXPRESSED IN BRAIN, SIGNAL = 1.2; EST_HUMAN HIT: BF365554.1, EVALUE 2.00e-59; SWISSPROT HIT: Q27969, EVALUE 2.00e-09; NT HIT: U04706.1, EVALUE 3.00e-08
agcttcagcatcccatccagtgtgctcacggcaaagatgccagagccactactctcagtgccatggccttgtttgttgttgccagttaggtgagtggagatattcttgttgtggatatggccagatgtctggtgcagtaccacatctcgggcagctagggtctccctactgccatcca

SEQ ID NO: 24708 - DNA, 79 bp, Homo sapiens
  MAP TO AL121884.5; EXPRESSED IN LUNG, SIGNAL = 0.92; EXPRESSED IN PLACENTA, SIGNAL =   1; EXPRESSED IN HEART, SIGNAL = 1.4; EXPRESSED IN FETAL LIVER, SIGNAL = 0.87; EXPRESSED IN BONE MARROW, SIGNAL = 0.96; EXPRESSED IN ADULT LIVER, SIGNAL = 0.72; EXPRESSED IN BRAIN, SIGNAL = 1.2; NT HIT: AE000313.1, EVALUE 6.30e-01; EST_HUMAN HIT: BF358258.1, EVALUE 9.40e-01
actgtcacttttcgtatgaattacagcgcgttggaaattaacaaaatggcttttgcaaacaatatcttaggtgaggcag

SEQ ID NO: 24709 - DNA, 189 bp, Homo sapiens
  MAP TO AC006159.3; EXPRESSED IN BONE MARROW, SIGNAL = 1.1; EXPRESSED IN ADULT LIVER, SIGNAL = 1.1; EXPRESSED IN BRAIN, SIGNAL = 1.2; EXPRESSED IN LUNG, SIGNAL = 2.2; EXPRESSED IN PLACENTA, SIGNAL = 1.5; EXPRESSED IN HEART, SIGNAL = 2.3; EXPRESSED IN FETAL LIVER, SIGNAL = 1.6; NT HIT: gi4557412, EVALUE 1.00e-102; EST_HUMAN HIT: AA970786.1, EVALUE 1.00e-102; SWISSPROT HIT: P51636, EVALUE 3.00e-32
ctgggcttcgaggatgtgatcgcagagccggtgactacgcactcctttgacaaagtgtggatctgcagccatgccctctttgaaatcagcaaatacgtaatgtacaagttcctgacggtgttcctggccattcccctggccttcattgcgggaattctctttgccaccctcagctgtctgcacatctgg

SEQ ID NO: 24710 - DNA, 166 bp, Homo sapiens
  MAP TO AC019126.3; EXPRESSED IN BONE MARROW, SIGNAL = 1.3; EXPRESSED IN PLACENTA, SIGNAL = 1.3; EXPRESSED IN ADULT LIVER, SIGNAL = 1.1; EXPRESSED IN FETAL LIVER, SIGNAL = 1.3; EXPRESSED IN BRAIN, SIGNAL = 1.1; EXPRESSED IN LUNG, SIGNAL = 1.2; EXPRESSED IN HEART, SIGNAL = 1.4; EST_HUMAN HIT: AU133814.1, EVALUE 7.00e-87; SWISSPROT HIT: P30291, EVALUE 2.00e-27; NT HIT: X62048.1, EVALUE 7.00e-89
aattatacccatctaccaaaagcagatatttttgcgcttgccctcacagtggtatgtgctgctggtgctgaacctcttccgagaaatggagatcaatggcatgaaatcagacagggtagattacctcggataccacaagtgctttcccaagaatttacagagttgc

SEQ ID NO: 24711 - DNA, 119 bp, Homo sapiens
  MAP TO AC019263.4; EXPRESSED IN BONE MARROW, SIGNAL = 5.3; EXPRESSED IN PLACENTA, SIGNAL = 5.7; EXPRESSED IN ADULT LIVER, SIGNAL = 5.7; EXPRESSED IN FETAL LIVER, SIGNAL = 3.8; EXPRESSED IN BRAIN, SIGNAL = 5.2; EXPRESSED IN LUNG, SIGNAL = 6.1; EXPRESSED IN HELA, SIGNAL = 5.1; EXPRESSED IN HEART, SIGNAL =   5; EST_HUMAN HIT: AI873348.1, EVALUE 6.00e+00; SWISSPROT HIT: P27410, EVALUE 6.20e-01
ctggcttttggaaatgcctgtttggatgcactgaagatgagaaagctatgtggagtggccagcacaaaggatgctttttcttccttgtgcatctgtattcgtgtgaggatacagtctcc

SEQ ID NO: 24712 - DNA, 247 bp, Homo sapiens
  MAP TO AC026407.1; EXPRESSED IN HELA, SIGNAL = 2.5; EXPRESSED IN LUNG, SIGNAL = 2.2; EXPRESSED IN PLACENTA, SIGNAL = 2.3; EXPRESSED IN HEART, SIGNAL = 2.2; EXPRESSED IN BONE MARROW, SIGNAL = 3.1; EXPRESSED IN ADULT LIVER, SIGNAL = 2.3; EXPRESSED IN FETAL LIVER, SIGNAL = 2.9; EXPRESSED IN BRAIN, SIGNAL = 1.9; EST_HUMAN HIT: BE082720.1, EVALUE 0.00e+00; SWISSPROT HIT: Q01778, EVALUE 6.30e+00; NT HIT: gi11417258, EVALUE 0.00e+00
cttaactgaagactgaggtgtgtgggttgaagcattctgatctggacttgctttgtcccctgtgtaatgtgctgctgctccaagatcaatggttttggaaggatttgctgtgcgcttgtgtctggttgtggtggtctctgtggcctgtgtgatatgaatatgctttgtcgtcacagtctcctcttcatctttgaattcacctttgggagatctgcctcttctcgctttcttttcctcatcgctgtcg

SEQ ID NO: 24713 - DNA, 75 bp, Homo sapiens
  MAP TO AC015649.5; EXPRESSED IN BONE MARROW, SIGNAL = 2.1; EXPRESSED IN LUNG, SIGNAL = 1.4; EXPRESSED IN ADULT LIVER, SIGNAL = 1.5; EXPRESSED IN HEART, SIGNAL = 1.4; EXPRESSED IN BRAIN, SIGNAL = 1.4; EXPRESSED IN PLACENTA, SIGNAL = 1.7; EXPRESSED IN FETAL LIVER, SIGNAL =   2; NT HIT: AJ011964.1, EVALUE 1.50e-01
ttaaatagaggagtccactatgtagacaacttcctccttatcacaggcaagatcttctgcctggatctttgctgc

SEQ ID NO: 24714 - DNA, 82 bp, Homo sapiens
  MAP TO AC021677.3; EXPRESSED IN LUNG, SIGNAL = 1.7; EXPRESSED IN ADULT LIVER, SIGNAL = 1.8; EXPRESSED IN BRAIN, SIGNAL = 2.1; EXPRESSED IN PLACENTA, SIGNAL = 1.4; EXPRESSED IN FETAL LIVER, SIGNAL = 1.5; EXPRESSED IN BONE MARROW, SIGNAL = 1.6; EXPRESSED IN HEART, SIGNAL = 1.6; NT HIT: AB029947.1, EVALUE 6.60e-01; EST_HUMAN HIT: AW152246.1, EVALUE 2.50e-01
atggagcactcatttactgtccccttggtaaccttcagctctactgggctggagggcagggggacgtctttgtgcagtgcag

SEQ ID NO: 24715 - DNA, 115 bp, Homo sapiens
  MAP TO AC007956.5; EXPRESSED IN PLACENTA, SIGNAL = 1.6; EXPRESSED IN ADULT LIVER, SIGNAL = 1.8; EXPRESSED IN FETAL LIVER, SIGNAL = 1.3; EXPRESSED IN BRAIN, SIGNAL = 1.2; EXPRESSED IN BONE MARROW, SIGNAL = 1.4; EXPRESSED IN LUNG, SIGNAL = 1.6; EXPRESSED IN HELA, SIGNAL = 2.2; EXPRESSED IN HEART, SIGNAL = 1.7; NT HIT: X58491.1, EVALUE 2.50e-01; SWISSPROT HIT: P31332, EVALUE 7.10e+00
ttcttgagtatccctttgtcaggcatcagagttgccaagaagaataaggctaaggacggtccctaccctcaagcagctgccagtatagtaggaaaggcagacagtacatatcatg

SEQ ID NO: 24716 - DNA, 166 bp, Homo sapiens
  MAP TO AL121889.3; EXPRESSED IN PLACENTA, SIGNAL = 1.4; EXPRESSED IN ADULT LIVER, SIGNAL = 2.1; EXPRESSED IN FETAL LIVER, SIGNAL = 0.97; EXPRESSED IN BRAIN, SIGNAL = 2.3; EXPRESSED IN BONE MARROW, SIGNAL = 1.1; EXPRESSED IN LUNG, SIGNAL = 1.6; EXPRESSED IN HEART, SIGNAL = 1.2; EST_HUMAN HIT: AI820688.1, EVALUE 1.00e-88; NT HIT: AB020630.1, EVALUE 7.00e-89; SWISSPROT HIT: P14585, EVALUE 3.90e+00
gaaggtggtgcggcgagccagcctgtcggacaggaccaacctgtataggaaggagtatgagggagaggccatcctgtggcagcggagtgcagctgaggatcagcggacctccacctacaacggggacatcagggagaccaggacagaccaagagaataaggaccct

SEQ ID NO: 24717 - DNA, 233 bp, Homo sapiens
  MAP TO AC019214.2; EXPRESSED IN LUNG, SIGNAL =   3; EXPRESSED IN HEART, SIGNAL = 2.5; EXPRESSED IN BONE MARROW, SIGNAL =   3; EXPRESSED IN PLACENTA, SIGNAL = 2.8; EXPRESSED IN ADULT LIVER, SIGNAL = 3.2; EXPRESSED IN FETAL LIVER, SIGNAL = 2.4; EXPRESSED IN BRAIN, SIGNAL = 2.6; SWISSPROT HIT: P70085, EVALUE 2.90e-01; NT HIT: AE004636.1, EVALUE 8.70e+00; EST_HUMAN HIT: AW753302.1, EVALUE 9.00e-78
ccttgtggggagaggggcttggaggtcgcccaggcaggaagccgcgccctcaaactgcagcagcagctcggaggcaggcaggctgacctggctgtagtgggtgctgatgtaggtggagttatcgaagtgcagtggggtctcccagtggagccgccggctgtgcaggctcacgtcctggtccactaccacgctgttgaggtattcggcgggctgcaggggccgcaccagctggc

SEQ ID NO: 24718 - DNA, 192 bp, Homo sapiens
  MAP TO AC019214.2; EXPRESSED IN PLACENTA, SIGNAL = 5.4; EXPRESSED IN FETAL LIVER, SIGNAL = 3.9; EXPRESSED IN LUNG, SIGNAL =   5; EXPRESSED IN ADULT LIVER, SIGNAL = 5.2; EXPRESSED IN BRAIN, SIGNAL = 4.4; EXPRESSED IN BONE MARROW, SIGNAL = 4.5; EXPRESSED IN HELA, SIGNAL = 5.6; EXPRESSED IN HEART, SIGNAL = 4.2; EST_HUMAN HIT: BE001596.1, EVALUE 6.00e-97; NT HIT: U66535.1, EVALUE 1.00e-104; SWISSPROT HIT: P16144, EVALUE 7.00e-33
ccagctctgtggggttgatgctggcggcatgagtggcaaagccaggccgctgcatgttgttggtgaccttccagcggaccacgtcacggcccttgaggttcccgctgcgcagcatgggcgtgtccaagtggtcagaggccatcaggttctcccgcagcatgtagtggtcttccttaaagcccaccatgtgac

SEQ ID NO: 24719 - DNA, 444 bp, Homo sapiens
  MAP TO AL121712.19; EXPRESSED IN LUNG, SIGNAL = 4.1; EXPRESSED IN HELA, SIGNAL = 5.2; EXPRESSED IN HEART, SIGNAL = 1.7; EXPRESSED IN PLACENTA, SIGNAL = 9.1; EXPRESSED IN ADULT LIVER, SIGNAL =   3; EXPRESSED IN FETAL LIVER, SIGNAL = 5.5; EXPRESSED IN BRAIN, SIGNAL = 1.3; EXPRESSED IN BONE MARROW, SIGNAL = 1.6; NT HIT: gi11434787, EVALUE 0.00e+00; SWISSPROT HIT: P05783, EVALUE 1.00e-51; EST_HUMAN HIT: BE743215.1, EVALUE 0.00e+00
ctacttgactgtaaagtcatcagcagcaagacaggcattgttgatctgcagaacaatgcaggcattgtccacagtatttgtgaagatctgagccctcaggtcctcgatggttttgaagtgatggctccagtctctgacctggggtcccttcttctccaggtgctcccggattttgctctccggcttccagttcttggtctccaggctcctcattctgtccaggtaggaggccagatggtcgttcaggctttgcatggtctccttctcgttctggatgcctcccattcctgccagatccccagccatccccccggccaggtccccggaccccatgccgccccagaagctggtggagtgggactcggagatccgggaaccagagccccgggcacctgcatagacgctaaccatactgctgaccggccgggcgccatagctgggcgc

SEQ ID NO: 24720 - DNA, 193 bp, Homo sapiens
  MAP TO AC015525.3; EXPRESSED IN LUNG, SIGNAL = 1.6; EXPRESSED IN PLACENTA, SIGNAL = 1.4; EXPRESSED IN ADULT LIVER, SIGNAL = 2.2; EXPRESSED IN FETAL LIVER, SIGNAL = 1.4; EXPRESSED IN BRAIN, SIGNAL = 2.2; EXPRESSED IN HEART, SIGNAL = 1.3; EXPRESSED IN BONE MARROW, SIGNAL = 1.6; NT HIT: Y10391.1, EVALUE 1.00e-100; SWISSPROT HIT: P10266, EVALUE 2.00e-29; EST_HUMAN HIT: BF512210.1, EVALUE 1.00e-88
gatcatccatgctatatttaattagagctgtctcaacatcccttgtagcctgtactacataggcagaatctgatataatattgataggttggtcaaaatcttgtaacactgtaatgactgcaaccaactctgctctttgagcagattgatatggagttttgattactcgttctttcggccctgtgtaagctgc

SEQ ID NO: 24721 - DNA, 168 bp, Homo sapiens
  MAP TO AC021976.3; EXPRESSED IN ADULT LIVER, SIGNAL = 1.9; EXPRESSED IN BONE MARROW, SIGNAL = 1.3; EXPRESSED IN HELA, SIGNAL = 2.6; EXPRESSED IN HEART, SIGNAL = 1.7; EXPRESSED IN LUNG, SIGNAL = 1.5; EXPRESSED IN PLACENTA, SIGNAL = 1.8; EXPRESSED IN FETAL LIVER, SIGNAL = 1.6; EXPRESSED IN BRAIN, SIGNAL = 1.3; NT HIT: X61382.1, EVALUE 2.00e-06; EST_HUMAN HIT: BE079263.1, EVALUE 4.00e-85
atgatttcttacaagcagaagttcctgaacaatattttgaccagtagttattttaatatctgcaagagcttttgcccaagcgagcttttgaagtgctcaccaatcgcaaaagatggcaacaagagtaatgacaaagccaatcatgggaagtttatgactaccctgata

SEQ ID NO: 24722 - DNA, 124 bp, Homo sapiens
  MAP TO AL121898.10; EXPRESSED IN LUNG, SIGNAL = 1.2; EXPRESSED IN HEART, SIGNAL = 1.6; EXPRESSED IN BRAIN, SIGNAL = 1.3; EXPRESSED IN PLACENTA, SIGNAL = 1.1; EXPRESSED IN FETAL LIVER, SIGNAL = 2.3; EXPRESSED IN BONE MARROW, SIGNAL = 2.1; EXPRESSED IN ADULT LIVER, SIGNAL =   1; SWISSPROT HIT: P54443, EVALUE 7.10e+00; EST_HUMAN HIT: BF349382.1, EVALUE 4.10e-01
ctcttcaaaccacctccatccctccaaacctcgttaaaatcaatatcccccaatctcccttgattacacaggaacataacctcctgattctccttcttctggacgtgctccctcacagtgtact

SEQ ID NO: 24723 - DNA, 235 bp, Homo sapiens
  MAP TO AC024252.3; EXPRESSED IN BONE MARROW, SIGNAL = 3.5; EXPRESSED IN ADULT LIVER, SIGNAL = 2.4; EXPRESSED IN HELA, SIGNAL = 2.8; EXPRESSED IN LUNG, SIGNAL = 3.3; EXPRESSED IN PLACENTA, SIGNAL = 4.3; EXPRESSED IN HEART, SIGNAL = 3.7; EXPRESSED IN FETAL LIVER, SIGNAL = 3.3; EXPRESSED IN BRAIN, SIGNAL = 2.8; SWISSPROT HIT: P15325, EVALUE 6.40e-01; NT HIT: AL163202.2, EVALUE 1.00e-106; EST_HUMAN HIT: AL041782.1, EVALUE 4.00e-86
agccgcctcctcctcctgcagccccggctcaggcacggtctggtacctcttcttcgcatctcttatgttcaggtccattgtcgtcttcttcatcatcctctccagcttccaggcttggccacgggaggcagctttgtggatcttcctgagatccccatggtgaatcacgtaagagccattgttggtgtagaccagctgactgaaggggctccggcgctccgggcccgtctggccc

SEQ ID NO: 24724 - DNA, 126 bp, Homo sapiens
  MAP TO AC019126.3; EXPRESSED IN BONE MARROW, SIGNAL = 2.7; EXPRESSED IN LUNG, SIGNAL = 1.9; EXPRESSED IN ADULT LIVER, SIGNAL = 1.6; EXPRESSED IN PLACENTA, SIGNAL = 2.1; EXPRESSED IN HEART, SIGNAL = 2.2; EXPRESSED IN FETAL LIVER, SIGNAL = 2.6; EXPRESSED IN BRAIN, SIGNAL =   2; EST_HUMAN HIT: AA609633.1, EVALUE 4.00e-38; NT HIT: AJ277546.2, EVALUE 4.00e-65; SWISSPROT HIT: P41997, EVALUE 9.40e-02
caactgactaccacttctacaagcatctcaacaactttttgtacggaaaacgcttccacaaccagcaggatgcagaaaatgatttccaagagtttgttgaatcctgaagcatggatttttacacca

SEQ ID NO: 24725 - DNA, 117 bp, Homo sapiens
  MAP TO AC013771.3; EXPRESSED IN BONE MARROW, SIGNAL = 1.7; EXPRESSED IN ADULT LIVER, SIGNAL = 1.6; EXPRESSED IN HEART, SIGNAL = 1.5; EXPRESSED IN LUNG, SIGNAL = 1.6; EXPRESSED IN PLACENTA, SIGNAL = 1.3; EXPRESSED IN BRAIN, SIGNAL = 1.1; EXPRESSED IN FETAL LIVER, SIGNAL = 1.5; NT HIT: gi5730038, EVALUE 1.00e-21; SWISSPROT HIT: O75949, EVALUE 9.30e+00; EST_HUMAN HIT: AA872060.1, EVALUE 2.00e-21
tcaactttcgaagtattgcttgtgtgacatgcagtcaggcattgtggtggagaagaatttggccctttctgttgaccagtgccggctgttggcgttgcagtttttggtgcagctcat

SEQ ID NO: 24726 - DNA, 231 bp, Homo sapiens
  MAP TO AC013698.3; EXPRESSED IN BONE MARROW, SIGNAL = 4.2; EXPRESSED IN PLACENTA, SIGNAL = 2.1; EXPRESSED IN ADULT LIVER, SIGNAL =   3; EXPRESSED IN HELA, SIGNAL = 4.7; EXPRESSED IN HEART, SIGNAL = 2.6; EXPRESSED IN LUNG, SIGNAL = 2.8; EXPRESSED IN FETAL LIVER, SIGNAL =   3; EXPRESSED IN BRAIN, SIGNAL = 3.9; NT HIT: AF095703.1, EVALUE 2.00e-71; EST_HUMAN HIT: AI251752.1, EVALUE 1.00e-61; SWISSPROT HIT: P31104, EVALUE 1.40e+00
ctttctcagcattccacaagttacttcctccttcctttgttctcctctgcctttgcctcttttagaaagttctaagttgctatccaattgggacaaatacagaatgtgaggtcccgttccagccaatggaaaccggacacagcagtagggtgaacgcgtcaggttataaattaccctgtcccctttgttcgctgtactcttgtagcaaaactgccggcaagtgtactcttt

SEQ ID NO: 24727 - DNA, 386 bp, Homo sapiens
  MAP TO AC011841.3; EXPRESSED IN PLACENTA, SIGNAL = 1.1; EXPRESSED IN HEART, SIGNAL = 1.6; EXPRESSED IN BRAIN, SIGNAL = 1.4; EXPRESSED IN FETAL LIVER, SIGNAL = 0.78; EXPRESSED IN ADULT LIVER, SIGNAL = 1.2; EXPRESSED IN BONE MARROW, SIGNAL = 1.1; NT HIT: AL163202.2, EVALUE 1.00e-52; EST_HUMAN HIT: AW976364.1, EVALUE 4.00e-47; SWISSPROT HIT: P18175, EVALUE 2.00e-04
acacaggattctggtacactgctatgagggtcagaatgtttgtccctcacattggattccagaacaatgctaccaatgtctgaatgtttgtccctcacatagaattccagatcactgctatgagggtctgaatgtttgtccctcacataggattccagaacactcctgctatggtctgtatatttgtccctcacatatgattccagaacactgctacgagagtctaaacgtttgtccctcacacaggatttcaaaacctttctgctgggttcggagtgttggtccctcacataggtttccagaacaatcctggcatggtctgaatgtttatccctcacatagggttccagaacactgctgctggtttcagtgtgtttgtcgctcat

SEQ ID NO: 24728 - DNA, 104 bp, Homo sapiens
  MAP TO AC022758.3; EXPRESSED IN LUNG, SIGNAL = 2.6; EXPRESSED IN PLACENTA, SIGNAL = 3.5; EXPRESSED IN HEART, SIGNAL = 2.4; EXPRESSED IN FETAL LIVER, SIGNAL = 2.6; EXPRESSED IN BRAIN, SIGNAL =   2; EXPRESSED IN ADULT LIVER, SIGNAL = 2.7; EXPRESSED IN HELA, SIGNAL = 5.1; EXPRESSED IN BONE MARROW, SIGNAL = 2.1; EST_HUMAN HIT: N41751.1, EVALUE 2.00e-05
gcttgtgggacttgcccttacgactgctgtgcatgtgcaggctggtgctggattcaaatccttcctttggcagcattgctcattactgccactccaggaagatg

SEQ ID NO: 24729 - DNA, 405 bp, Homo sapiens
  MAP TO AC022714.2; EXPRESSED IN ADULT LIVER, SIGNAL = 1.4; EXPRESSED IN BONE MARROW, SIGNAL = 1.2; EXPRESSED IN HEART, SIGNAL = 1.2; EXPRESSED IN LUNG, SIGNAL = 0.86; EXPRESSED IN PLACENTA, SIGNAL = 1.1; EXPRESSED IN FETAL LIVER, SIGNAL = 1.2; EXPRESSED IN BRAIN, SIGNAL =   1; SWISSPROT HIT: P27401, EVALUE 4.00e-10; NT HIT: AL163209.2, EVALUE 8.00e-94; EST_HUMAN HIT: AA403053.1, EVALUE 6.00e-71
atggtgggaaaggccaaatggaagccattagagctgcctctacctaaaaaactagtaaatccaaaacaatattacatccctggagagactgcagagattagtgcaaccatcaaggacttgaaagatgcagaggtggtgattcctatcacatccctgtttaactctcccatttggcctgtacagaagaaagagggattttggagaatgatggtggactattgtaagcttaaccaagtgttgactccaattgtacctgctataccagatgtggtttcgttgcttgaacaaattaatacatttcctggtacctggtatgcagccattgacttgggaaatacctttttctccattcctgtccataagacccaccagaagcaatatgccttctgctggcaaggtcaataa

SEQ ID NO: 24730 - DNA, 281 bp, Homo sapiens
  MAP TO AC013625.3; EXPRESSED IN PLACENTA, SIGNAL = 0.96; EXPRESSED IN HELA, SIGNAL = 2.2; EXPRESSED IN HEART, SIGNAL = 1.5; EXPRESSED IN FETAL LIVER, SIGNAL = 1.7; EXPRESSED IN LUNG, SIGNAL = 1.1; EXPRESSED IN BRAIN, SIGNAL = 1.3; EXPRESSED IN ADULT LIVER, SIGNAL = 1.4; EXPRESSED IN BONE MARROW, SIGNAL = 1.8; EST_HUMAN HIT: AA769294.1, EVALUE 3.00e-10; NT HIT: V00585.1, EVALUE 5.00e-08
aattgggtcctggctggtgtggtgtttacaactaattgattacaaccaattatatatttctttgtccattctcttattgattcacttgactagccttaaaaagagagagagagagaagatgaagaggaagaagaagaggaaaaggaagaggaagaggaagaagaaggagaaggagaaggaggagaaggagaagaagaagaagaagaagaagaagaagaagaagaagaagaagaagaagaagaagaagaagaagaattggctcctttatctactattctata

SEQ ID NO: 24731 - DNA, 256 bp, Homo sapiens
  MAP TO AL135787.3; EXPRESSED IN BONE MARROW, SIGNAL = 8.6; EXPRESSED IN HEART, SIGNAL = 9.7; EXPRESSED IN PLACENTA, SIGNAL = 8.4; EXPRESSED IN BRAIN, SIGNAL =  11; EXPRESSED IN HELA, SIGNAL =  16; EXPRESSED IN ADULT LIVER, SIGNAL =  11; EXPRESSED IN FETAL LIVER, SIGNAL =  13; EXPRESSED IN LUNG, SIGNAL = 8.2; SWISSPROT HIT: Q44697, EVALUE 9.00e+00; EST_HUMAN HIT: AA430006.1, EVALUE 3.00e-65; NT HIT: gi11426002, EVALUE 3.00e-55
gtgaccagtttgaaattcagctaaaccagcagctatggtccctcatccccaacaacgatgtgagaaggcttgtttctcatgttatccggaccttgaagacggactgcactgagacccatttgcaactggcctgtgccaagctcatctctaggacaggcctcctaatgaagcttctcagtgagcagcaagaattgagaactgtatcaatgacagcatggaagcccagaatgaacagaaagagcagaagtcgaatgag

SEQ ID NO: 24732 - DNA, 388 bp, Homo sapiens
  MAP TO AC008929.3; EXPRESSED IN ADULT LIVER, SIGNAL = 2.2; EXPRESSED IN PLACENTA, SIGNAL = 2.1; EXPRESSED IN BRAIN, SIGNAL =   2; EXPRESSED IN HEART, SIGNAL =   3; EXPRESSED IN FETAL LIVER, SIGNAL = 2.8; EXPRESSED IN HELA, SIGNAL = 2.9; NT HIT: AL163247.2, EVALUE 1.00e-30; EST_HUMAN HIT: BE784971.1, EVALUE 6.00e-46; SWISSPROT HIT: P21535, EVALUE 2.80e+00
atgtagaggtagctttggaaagaggtaatgaaaagaggttggaagagtttggagggctcagaagaagacaggaagatgagggaaagtttggaatttctcaaagactagttaatgattgtgaacaaaatgctgatggtgataggggcagtgaaggccagattgatgaggtctcagatggaaatgaggaacttcttggaaactggagcaaaggccacccttgttatgctctagcaaaacacttggctgcattctgttcatgccctagcgatctgtggaagtttgaacttcagagtgatgatttagggtatctggcaaaagaaatttctaagcagcaaagtgttcaagatgtggtgtggctgcttctaattgcctatggtcagacatggga

SEQ ID NO: 24733 - DNA, 115 bp, Homo sapiens
  MAP TO AL035705.22; EXPRESSED IN BRAIN, SIGNAL = 3.3; EXPRESSED IN HELA, SIGNAL = 3.2; EXPRESSED IN BONE MARROW, SIGNAL = 2.9; EXPRESSED IN PLACENTA, SIGNAL = 2.8; EXPRESSED IN LUNG, SIGNAL = 4.9; EXPRESSED IN HEART, SIGNAL = 3.1; EXPRESSED IN FETAL LIVER, SIGNAL = 3.3; EXPRESSED IN ADULT LIVER, SIGNAL = 4.1; NT HIT: Y18000.1, EVALUE 3.90e+00; SWISSPROT HIT: P53713, EVALUE 7.10e+00; EST_HUMAN HIT: BF678493.1, EVALUE 5.80e+00
gtccacacaggtagaaggaacatgttggctggaaagcaagaggccatgattgacatcatccagacaaatccctgccctgagggcccaaagctggccaggcactcccaaggccact

SEQ ID NO: 24734 - DNA, 244 bp, Homo sapiens
  MAP TO AC007058.2; EXPRESSED IN BRAIN, SIGNAL =   2; EXPRESSED IN HELA, SIGNAL = 2.9; EXPRESSED IN HEART, SIGNAL = 2.8; EXPRESSED IN ADULT LIVER, SIGNAL = 2.1; EXPRESSED IN FETAL LIVER, SIGNAL = 3.6; EXPRESSED IN LUNG, SIGNAL = 1.7; EXPRESSED IN PLACENTA, SIGNAL = 1.9; NT HIT: gi11466174, EVALUE 2.30e+00; EST_HUMAN HIT: AW862222.1, EVALUE 8.70e-01; SWISSPROT HIT: Q09470, EVALUE 4.10e-01
gcaggttcctgaatagtcagataggaattgaattcttggaaatcatgccattgtttaaggatgaggaagaacttactattttaatgaactttattataaaccttttttctaagcaaataatcaccccttactttatcttatctcctatgcaaatcctgattttcacatttaagctttacttaacagtgtcaatttgtatagttatctttaaacaatggtcagtccccactcttataattgaaaa

SEQ ID NO: 24735 - DNA, 208 bp, Homo sapiens
  MAP TO AC009542.2; EXPRESSED IN BRAIN, SIGNAL =   6; EXPRESSED IN HELA, SIGNAL = 4.7; EXPRESSED IN HEART, SIGNAL = 4.2; EXPRESSED IN PLACENTA, SIGNAL = 4.3; EXPRESSED IN LUNG, SIGNAL = 5.7; EXPRESSED IN FETAL LIVER, SIGNAL = 4.7; EXPRESSED IN BONE MARROW, SIGNAL = 2.4; EXPRESSED IN ADULT LIVER, SIGNAL = 5.3; SWISSPROT HIT: P09761, EVALUE 1.00e-02; EST_HUMAN HIT: BE298391.1, EVALUE 9.00e-56; NT HIT: gi11419701, EVALUE 1.00e-107
ctgcagtgcatgatggatgagtggtgttccccgtactcctcctgtcccagcacaataaagggctgctcggggcggactcctccaccctcagggcctgccgaggatgcccgagtcagtggctccactggctccgtgtggagctctgggcagggctcagcctctgggccactggcttctggtttcttctctgcacactgtcacaagcagg

SEQ ID NO: 24736 - DNA, 180 bp, Homo sapiens
  MAP TO AC016372.2; EXPRESSED IN BRAIN, SIGNAL = 3.6; EXPRESSED IN ADULT LIVER, SIGNAL = 1.7; EXPRESSED IN HEART, SIGNAL =  16; EXPRESSED IN LUNG, SIGNAL = 3.1; EXPRESSED IN PLACENTA, SIGNAL = 4.5; SWISSPROT HIT: O64245, EVALUE 1.30e+00; EST_HUMAN HIT: BE465803.1, EVALUE 3.00e-95; NT HIT: AB042557.1, EVALUE 4.00e-97
gaatccaggctagcaaagaatgaagctgcgcggatggcagctctggtggaagcagagaaggagtgtaacctggagctctcagagaaactgaagggagtcaccaaaaactgggaagatgtaccaggagaccaggtcaagcccgaccaatacactgaggccctggcccagagggacaagtag

SEQ ID NO: 24737 - DNA, 162 bp, Homo sapiens
  MAP TO AC000097.1; EXPRESSED IN ADULT LIVER, SIGNAL = 5.3; EXPRESSED IN HEART, SIGNAL =   9; EXPRESSED IN BRAIN, SIGNAL = 5.1; EXPRESSED IN PLACENTA, SIGNAL = 4.9; EXPRESSED IN BONE MARROW, SIGNAL = 5.6; EXPRESSED IN FETAL LIVER, SIGNAL =  11; EXPRESSED IN HELA, SIGNAL =  10; EXPRESSED IN LUNG, SIGNAL = 4.6; EST_HUMAN HIT: AI659240.1, EVALUE 3.00e-86; NT HIT: D78577.1, EVALUE 3.70e-01; SWISSPROT HIT: P25303, EVALUE 5.20e+00
gaaaaagaaagatttggacacggacggatacgcgcacaggaagaacaccgtgtaaagactggaattctgctccacgagccaaggcatcaccagaagctgggagaggggcctgcttcagagcctctcttagagccttcagagggagcagacctgctgtcactc

SEQ ID NO: 24738 - DNA, 130 bp, Homo sapiens
  MAP TO AC018826.3; EXPRESSED IN PLACENTA, SIGNAL = 1.8; EXPRESSED IN FETAL LIVER, SIGNAL = 1.8; EXPRESSED IN HELA, SIGNAL = 1.9; EXPRESSED IN HEART, SIGNAL = 1.8; EXPRESSED IN BRAIN, SIGNAL = 2.3; EXPRESSED IN LUNG, SIGNAL = 2.1; EXPRESSED IN BONE MARROW, SIGNAL = 1.7; EXPRESSED IN ADULT LIVER, SIGNAL =   2; NT HIT: AB002337.2, EVALUE 1.80e-02; EST_HUMAN HIT: AV760993.1, EVALUE 6.70e+00
caatgttgaggatgacgaggacaatgaggagggggaagagcatggtgatgatgataatcataatgaacgtttattgagtagttattatatagaaggcactgttttacattgctttgtacatgttttctaa

SEQ ID NO: 24739 - DNA, 180 bp, Homo sapiens
  MAP TO AC012683.3; EXPRESSED IN BRAIN, SIGNAL = 1.6; EXPRESSED IN HEART, SIGNAL = 2.3; NT HIT: AB033116.1, EVALUE 4.00e-97; SWISSPROT HIT: Q02218, EVALUE 5.00e-26; EST_HUMAN HIT: AU142192.1, EVALUE 2.00e-71
cttcttgccctgggcatctccacggtagaactgctctgcctttgtcttcccctgcaccacagggtccactgcctccaggtgggaggggttggcaaccagcgacagagtgatgttccggttggtgacgcggttgatcctctcatggtacatgcccaggtggtacttgacatccccggagcc

SEQ ID NO: 24740 - DNA, 543 bp, Homo sapiens; identical to SEQ ID NO: 16847
  MAP TO AC007263.4; EXPRESSED IN BRAIN, SIGNAL = 7.9; EXPRESSED IN HEART, SIGNAL = 5.7; EXPRESSED IN LUNG, SIGNAL =  12; EXPRESSED IN PLACENTA, SIGNAL =  12; EXPRESSED IN HELA, SIGNAL = 6.5; EXPRESSED IN FETAL LIVER, SIGNAL = 7.2; EXPRESSED IN BONE MARROW, SIGNAL = 5.4; EXPRESSED IN ADULT LIVER, SIGNAL =   5; SWISSPROT HIT: O00409, EVALUE 5.00e-97; NT HIT: gi4885136, EVALUE 0.00e+00; EST_HUMAN HIT: BE676347.1, EVALUE 0.00e+00

SEQ ID NO: 24741 - DNA, 150 bp, Homo sapiens
  MAP TO AP001341.1; EXPRESSED IN BRAIN, SIGNAL =   6; EXPRESSED IN PLACENTA, SIGNAL = 7.7; EXPRESSED IN ADULT LIVER, SIGNAL =   6; EXPRESSED IN HELA, SIGNAL = 6.3; EXPRESSED IN FETAL LIVER, SIGNAL = 7.6; EXPRESSED IN HEART, SIGNAL = 4.7; EXPRESSED IN BONE MARROW, SIGNAL = 9.2; EXPRESSED IN LUNG, SIGNAL =  28; SWISSPROT HIT: P35197, EVALUE 6.90e+00; EST_HUMAN HIT: R07097.1, EVALUE 7.90e+00; NT HIT: AE001073.1, EVALUE 8.60e-02
cttccttcatcctgaggttttctctggcttgaaagattctgttggagcaggtgcaggtgagcatcctctccttccctactttgcttttcttctcaacttcctcctccattcaccagcttaggttctaccccatgcagggtcaggccaaga

SEQ ID NO: 24742 - DNA, 335 bp, Homo sapiens
  MAP TO AC020557.2; EXPRESSED IN ADULT LIVER, SIGNAL = 3.5; EXPRESSED IN FETAL LIVER, SIGNAL =   4; EXPRESSED IN HEART, SIGNAL = 4.5; EXPRESSED IN PLACENTA, SIGNAL = 3.3; EXPRESSED IN BRAIN, SIGNAL = 3.5; EXPRESSED IN BONE MARROW, SIGNAL = 3.2; EXPRESSED IN HELA, SIGNAL = 4.6; EXPRESSED IN LUNG, SIGNAL = 4.9; EST_HUMAN HIT: AW502995.1, EVALUE 4.80e+00; NT HIT: gi9257194, EVALUE 3.20e+00; SWISSPROT HIT: P07911, EVALUE 2.20e+00
agctgcgggtggaggtgctcgggaacgaacccacacccggcatgccagagaagttccaattcaggtggaatttaagccacgatgcaggaccagttcagttctgggcaaagaaaaccctgctgctgagtgctctgaggctcgttttgtgggtttttttctgttgtgcttcctgcggtctccacagaagcagcttccctggagaacagcaagctcgtcagctgccacaacagctatgccaccaccctagcatggcctgggggctgccttgccatcagaacactgctggtgccaacccacacctcttcctggggtgctactcaacctccagcctacag

SEQ ID NO: 24743 - DNA, 203 bp, Homo sapiens
  MAP TO AC018720.2; EXPRESSED IN BONE MARROW, SIGNAL = 2.5; EXPRESSED IN HELA, SIGNAL = 2.8; EXPRESSED IN HEART, SIGNAL = 2.4; EXPRESSED IN LUNG, SIGNAL = 2.7; EXPRESSED IN BRAIN, SIGNAL = 2.5; EXPRESSED IN PLACENTA, SIGNAL = 1.7; EXPRESSED IN ADULT LIVER, SIGNAL = 2.2; EXPRESSED IN FETAL LIVER, SIGNAL = 3.3; NT HIT: gi4503730, EVALUE 2.00e-96; EST_HUMAN HIT: AA446529.1, EVALUE 1.00e-110; SWISSPROT HIT: P27124, EVALUE 9.00e-10
agctgagagagcacaaaacttgtctgactcagcacagtctaggaagtcaagcagctcaatcttgaacaggacagtggtgtttggggggatcaagggaggggagcccagcgttccataggcgtagttcggtttgaacagaaacctggccagctctcctctctgcatgctcagaaggcccagctccatgccccacaatgtaatat

SEQ ID NO: 24744 - DNA, 159 bp, Homo sapiens
  MAP TO AP001328.1; EXPRESSED IN BONE MARROW, SIGNAL = 5.8; EXPRESSED IN FETAL LIVER, SIGNAL = 4.1; EXPRESSED IN LUNG, SIGNAL = 7.4; EXPRESSED IN PLACENTA, SIGNAL = 4.4; EXPRESSED IN ADULT LIVER, SIGNAL = 2.7; EXPRESSED IN HEART, SIGNAL = 3.6; EXPRESSED IN BRAIN, SIGNAL = 3.4; EXPRESSED IN HELA, SIGNAL = 3.8; SWISSPROT HIT: O27743, EVALUE 6.80e+00; NT HIT: AE000856.1, EVALUE 3.60e-01
atcctttcctggctagtctctgtgtgctcatggctctctgtacttatgaccgctgtggcacatggtatactgaaattgtaactgagccgctttaaggtagggaccatgctctttacgtttttattgtcctgcattacttgtagcaggtgctcagtattt

SEQ ID NO: 24745 - DNA, 187 bp, Homo sapiens
  MAP TO AL135744.2; EXPRESSED IN ADULT LIVER, SIGNAL = 3.3; EXPRESSED IN HEART, SIGNAL = 2.3; EXPRESSED IN BRAIN, SIGNAL =   3; EXPRESSED IN PLACENTA, SIGNAL = 3.4; EXPRESSED IN BONE MARROW, SIGNAL = 3.9; EXPRESSED IN LUNG, SIGNAL = 4.7; EXPRESSED IN FETAL LIVER, SIGNAL = 6.1; EXPRESSED IN HELA, SIGNAL = 3.9; SWISSPROT HIT: P07910, EVALUE 8.70e+00; NT HIT: M29063.1, EVALUE 3.00e-88; EST_HUMAN HIT: AA991479.1, EVALUE 1.00e-88
ctggtcatccccccgatcttcattatcatcatcatccagtaggtccccctcctcagcagagtcatctgcacccccctcagactccatcttcacattagtctcatctttcttcacggagctgctgctctgctcctcttctgacttatcattcttcatctctactgcggatgagaaggacaagtctgtc

SEQ ID NO: 24746 - DNA, 210 bp, Homo sapiens
  MAP TO AC002039.1; EXPRESSED IN HELA, SIGNAL = 5.3; EXPRESSED IN HEART, SIGNAL = 6.5; EXPRESSED IN LUNG, SIGNAL =  17; EXPRESSED IN BRAIN, SIGNAL =  11; EXPRESSED IN PLACENTA, SIGNAL = 4.1; EXPRESSED IN ADULT LIVER, SIGNAL = 3.5; EXPRESSED IN BONE MARROW, SIGNAL = 7.6; EXPRESSED IN FETAL LIVER, SIGNAL = 5.4; EST_HUMAN HIT: BF528554.1, EVALUE 9.00e-87; NT HIT: L43610.1, EVALUE 1.00e-103; SWISSPROT HIT: P98161, EVALUE 3.00e-27
agcgtggcttctttgacaagcacatctggctctccatatgggaccggccgcctcggagctgtttcactcgcatccagagggccacctgctgcgttctcctcatctgtctcttcctgggcgccaacgccgtgtggtacggggctgttggagactctgcctacaggtgggtgccgtaggggtcgggacagcctcttcctgcccagcccttcc

SEQ ID NO: 24747 - DNA, 88 bp, Homo sapiens
  MAP TO AC011467.3; EXPRESSED IN BRAIN, SIGNAL = 2.5; EXPRESSED IN PLACENTA, SIGNAL = 1.9; EXPRESSED IN FETAL LIVER, SIGNAL =   2; EXPRESSED IN HELA, SIGNAL = 2.1; EXPRESSED IN HEART, SIGNAL =   2; EXPRESSED IN BONE MARROW, SIGNAL = 1.9; EXPRESSED IN LUNG, SIGNAL = 2.5; EXPRESSED IN ADULT LIVER, SIGNAL = 2.7; NT HIT: AF266285.1, EVALUE 3.00e-03; EST_HUMAN HIT: BE926719.1, EVALUE 4.00e-03
gaacaccaaggctgttcctccactgatagtttcttatctgtggaaaagaagagcaggaattctcatgagaagtccctgcagtcgcatc

SEQ ID NO: 24748 - DNA, 110 bp, Homo sapiens
  MAP TO AL133211.1; EXPRESSED IN BRAIN, SIGNAL = 2.5; EXPRESSED IN HELA, SIGNAL = 2.6; EXPRESSED IN ADULT LIVER, SIGNAL = 1.8; EXPRESSED IN FETAL LIVER, SIGNAL = 2.2; EXPRESSED IN BONE MARROW, SIGNAL = 1.7; EXPRESSED IN HEART, SIGNAL = 2.6; EXPRESSED IN LUNG, SIGNAL = 2.9; EXPRESSED IN PLACENTA, SIGNAL = 1.9; SWISSPROT HIT: Q9UBD5, EVALUE 1.00e-15; EST_HUMAN HIT: AV730325.1, EVALUE 2.00e-55; NT HIT: U50950.1, EVALUE 1.00e-55
cagtccacgaggttgatgagcctgctacactctaggtgcagtttgtatgctatgcagatgtctggggcgatattcggaatgcagccttcttcgcttttcagtgcttcatt

SEQ ID NO: 24749 - DNA, 112 bp, Homo sapiens
  MAP TO AL157996.1; EXPRESSED IN HEART, SIGNAL = 3.7; EXPRESSED IN LUNG, SIGNAL = 4.6; EXPRESSED IN BONE MARROW, SIGNAL = 2.9; EXPRESSED IN PLACENTA, SIGNAL =   4; EXPRESSED IN BRAIN, SIGNAL = 4.2; EXPRESSED IN HELA, SIGNAL =   4; EXPRESSED IN ADULT LIVER, SIGNAL = 4.6; EXPRESSED IN FETAL LIVER, SIGNAL = 3.8; NT HIT: AB007955.1, EVALUE 4.00e-06; SWISSPROT HIT: P08547, EVALUE 3.00e-04; EST_HUMAN HIT: BF576899.1, EVALUE 6.00e-06
atgtccacaaaaaacttgtacaagaatattcatagaagctacatcaagaatagccacaatctggatcagatgtccattgacaggagaatggataaacaaattgtggtatatt

SEQ ID NO: 24750 - DNA, 255 bp, Homo sapiens
  MAP TO AC008102.16; EXPRESSED IN ADULT LIVER, SIGNAL = 1.6; EXPRESSED IN BONE MARROW, SIGNAL = 2.1; EXPRESSED IN HEART, SIGNAL = 2.7; EXPRESSED IN LUNG, SIGNAL = 6.2; EXPRESSED IN PLACENTA, SIGNAL = 3.7; EXPRESSED IN FETAL LIVER, SIGNAL = 3.9; EXPRESSED IN HELA, SIGNAL = 3.8; EXPRESSED IN BRAIN, SIGNAL = 2.9; NT HIT: gi11441258, EVALUE 1.00e-73; EST_HUMAN HIT: BE385477.1, EVALUE 1.00e-73; SWISSPROT HIT: Q13435, EVALUE 6.00e-04
caccaaagctctgtaagagttcaccatggtccctctctggatgcatctcagccacctgtgcccagagtccctgcttcccaccaggagggctgggcctgacctgctcgtcatcactgctgtcatcatcactgtccttgtgctcctcttcaaatcccttcttcttgggggctgcagagttctccagtttgtcaagtttctctggctccttctctttctccttcttcacatcatcagtgagctaaggaggcagacaag

SEQ ID NO: 24751 - DNA, 92 bp, Homo sapiens
  MAP TO AC024006.2; EXPRESSED IN BRAIN, SIGNAL = 2.3; EXPRESSED IN BONE MARROW, SIGNAL = 1.9; EXPRESSED IN FETAL LIVER, SIGNAL = 2.7; EXPRESSED IN ADULT LIVER, SIGNAL = 2.3; EXPRESSED IN HELA, SIGNAL = 3.1; EXPRESSED IN LUNG, SIGNAL = 1.9; EXPRESSED IN HEART, SIGNAL = 2.9; EXPRESSED IN PLACENTA, SIGNAL = 1.5; NT HIT: AL163278.2, EVALUE 1.20e-02; EST_HUMAN HIT: BE175801.1, EVALUE 2.00e-05; SWISSPROT HIT: P06726, EVALUE 9.50e+00
gcaacaagaccaacccttcctcattctcctccttctcaacatgaagacaaggatgagcaccttgatgatgatccatctccacttaatgaaga

SEQ ID NO: 24752 - DNA, 205 bp, Homo sapiens
  MAP TO AL034380.25; EXPRESSED IN BONE MARROW, SIGNAL = 1.8; EXPRESSED IN LUNG, SIGNAL = 2.5; EXPRESSED IN ADULT LIVER, SIGNAL = 1.4; EXPRESSED IN FETAL LIVER, SIGNAL = 1.6; EXPRESSED IN HELA, SIGNAL = 1.7; EXPRESSED IN HEART, SIGNAL = 1.7; EXPRESSED IN BRAIN, SIGNAL = 1.5; EST_HUMAN HIT: BE867776.1, EVALUE 6.00e-94; SWISSPROT HIT: P03203, EVALUE 1.10e-01; NT HIT: gi11545792, EVALUE 4.00e-94
gacgatgaccggggtgaggaatgggaacggcatgaagcgctgcatgaggacgtgaccgggcaggagcggaccactgagcagctctttgaggaggagattgagctcaagtgggagaagggtggctctggcctggtgttttatactgatgcccagttctggcaggaggaagaaggaggtaatgctggtacccaggcaaaggcagggg

SEQ ID NO: 24753 - DNA, 217 bp, Homo sapiens
  MAP TO AC010620.3; EXPRESSED IN BRAIN, SIGNAL = 1.5; EXPRESSED IN PLACENTA, SIGNAL = 1.5; EXPRESSED IN FETAL LIVER, SIGNAL = 3.3; EXPRESSED IN HELA, SIGNAL =   4; EXPRESSED IN HEART, SIGNAL = 1.8; SWISSPROT HIT: P03355, EVALUE 5.00e-06; NT HIT: AL163284.2, EVALUE 2.00e-50; EST_HUMAN HIT: AW813567.1, EVALUE 6.00e-54
gcatcctccccttgtaactctccaccttaatccgcaagtatgggatacctctactccctctttggcaactgaccatgcaccccttaccattccattaaaacctaatcacccttaccccactcaatgccagtatctcatcccacagcaggctttaaagggactgaagcctgttatcactcgcctgctacagcatgggcttctaaagcctacaaattct

SEQ ID NO: 24754 - DNA, 130 bp, Homo sapiens
  MAP TO AC019205.2; EXPRESSED IN PLACENTA, SIGNAL = 2.4; EXPRESSED IN BRAIN, SIGNAL = 1.9; EXPRESSED IN BONE MARROW, SIGNAL = 1.6; EXPRESSED IN FETAL LIVER, SIGNAL =   2; EXPRESSED IN HELA, SIGNAL = 2.1; EXPRESSED IN ADULT LIVER, SIGNAL = 2.4; EXPRESSED IN LUNG, SIGNAL = 1.7; EXPRESSED IN HEART, SIGNAL = 2.3; SWISSPROT HIT: P49237, EVALUE 9.20e+00; NT HIT: gi11418786, EVALUE 2.00e-67; EST_HUMAN HIT: BF377169.1, EVALUE 2.00e-67
ataatacaagaacaaccagaatcattagtcaaaatttttggcagcaaggcaatgcaaacgaaagcaaaagcagtgatagacaattttgttaaaaagctagaagaaaattacaattcagaatgcggaattg

SEQ ID NO: 24755 - DNA, 140 bp, Homo sapiens
  MAP TO AC009565.7; EXPRESSED IN BRAIN, SIGNAL = 4.4; EXPRESSED IN ADULT LIVER, SIGNAL = 5.2; EXPRESSED IN BONE MARROW, SIGNAL = 2.6; EXPRESSED IN HELA, SIGNAL = 3.5; EXPRESSED IN LUNG, SIGNAL = 2.7; EXPRESSED IN HEART, SIGNAL = 4.9; EXPRESSED IN PLACENTA, SIGNAL = 3.1; EXPRESSED IN FETAL LIVER, SIGNAL = 3.8; NT HIT: U50147.1, EVALUE 1.20e+00; SWISSPROT HIT: Q38661, EVALUE 6.90e+00; EST_HUMAN HIT: AL035953.1, EVALUE 7.30e+00
cattgaggaaccaaccgtaaattcacaccagacagttttgcggtttgtagctgtacccaaaaggaagacagggtagaaagtcccatacatcaccagaaacagacaagcttcatagcagccttctacaaggtaggtttctc

SEQ ID NO: 24756 - DNA, 139 bp, Homo sapiens
  MAP TO AL117694.3; EXPRESSED IN HELA, SIGNAL = 2.3; EXPRESSED IN BONE MARROW, SIGNAL = 3.5; EXPRESSED IN FETAL LIVER, SIGNAL = 1.7; EXPRESSED IN LUNG, SIGNAL = 4.2; EXPRESSED IN HEART, SIGNAL = 2.6; SWISSPROT HIT: Q99001, EVALUE 4.00e-10; NT HIT: X15804.1, EVALUE 5.00e-43; EST_HUMAN HIT: BE732453.1, EVALUE 8.00e-43
cttccacggagatgtcctggatggcaaagcgcaggatgatggtccagatcatgcccagggtcatcttcacattcccatccacgatttctacagaaacagcagcagcacacatcagaaagggcctcagcggggacagaat

SEQ ID NO: 24757 - DNA, 236 bp, Homo sapiens
  MAP TO AC007221.2; EXPRESSED IN PLACENTA, SIGNAL = 2.7; EXPRESSED IN FETAL LIVER, SIGNAL = 3.4; EXPRESSED IN ADULT LIVER, SIGNAL = 3.4; EXPRESSED IN HEART, SIGNAL = 3.7; EXPRESSED IN BRAIN, SIGNAL = 3.6; EXPRESSED IN LUNG, SIGNAL = 2.9; EXPRESSED IN HELA, SIGNAL = 3.5; EXPRESSED IN BONE MARROW, SIGNAL = 3.2; SWISSPROT HIT: O14357, EVALUE 6.70e-01
atgggacgcttcattgcccatcactgtgacttgaaatgcatagcagtcgcaggaaccagaacctccttagaagccagcataaacgctcaggcattctcttcagagctattattcgtttttttaaaagcccatagattcagaattcctacaggtattgttaaactagatgtcagttccaggtcaacccctctgactattacagtcataattctgataccgagagggagcaaaatcag

SEQ ID NO: 24758 - DNA, 119 bp, Homo sapiens
  MAP TO AC022377.1; EXPRESSED IN BRAIN, SIGNAL =   2; EXPRESSED IN PLACENTA, SIGNAL = 1.7; EXPRESSED IN ADULT LIVER, SIGNAL =   2; EXPRESSED IN BONE MARROW, SIGNAL = 1.8; EXPRESSED IN FETAL LIVER, SIGNAL = 2.3; EXPRESSED IN HELA, SIGNAL = 2.2; EXPRESSED IN LUNG, SIGNAL = 1.8; EXPRESSED IN HEART, SIGNAL = 2.1; NT HIT: gi10092626, EVALUE 2.60e-01; SWISSPROT HIT: P10220, EVALUE 2.40e+00; EST_HUMAN HIT: BF037421.1, EVALUE 9.80e-02
tttaataacaatgctccacaagtcaaccagcccaagaatctacctccatctctgcctgtgggtggaccccaggctgcgatgtgtagtctggtccacagtatacactgtctttcccagag

SEQ ID NO: 24759 - DNA, 102 bp, Homo sapiens
  MAP TO AC025251.1; EXPRESSED IN BRAIN, SIGNAL = 5.2; EXPRESSED IN ADULT LIVER, SIGNAL = 3.9; EXPRESSED IN HELA, SIGNAL =   3; EXPRESSED IN BONE MARROW, SIGNAL = 3.4; EXPRESSED IN PLACENTA, SIGNAL = 3.7; EXPRESSED IN LUNG, SIGNAL = 3.8; EXPRESSED IN HEART, SIGNAL = 2.9; EXPRESSED IN FETAL LIVER, SIGNAL = 3.2; NT HIT: gi7706215, EVALUE 2.20e-01; EST_HUMAN HIT: AA017271.1, EVALUE 3.20e-01
ctgatgaaatagtaaggtataggttttgacttaaaacataagattgttttattagacacaccaaccatgttaattcttctattactccgaggaatggggttt

SEQ ID NO: 24760 - DNA, 471 bp, Homo sapiens
  MAP TO AP001347.1; EXPRESSED IN HEART, SIGNAL = 1.7; EXPRESSED IN PLACENTA, SIGNAL = 1.4; EXPRESSED IN FETAL LIVER, SIGNAL = 1.9; EXPRESSED IN HELA, SIGNAL =   2; EXPRESSED IN LUNG, SIGNAL = 1.9
cactatcaccaccatcatcatcaacatcaccatcactatcaccaccatcatcaccatcaccatcactatcaccaccatcatcatcaccatcaccatcatcacatcaccatcaacactatcatcaccaccatcaccatcaccatcatcacatcaccatcaacactatcaccaccatcaccatcactgtcactaccattattaccatcaccatcattaccatcgctatcaccatcataccaccatcaccatcatcaccatcactatcaccaccatcaccaatcatcaccatcactatcaccaccatcaccaccatcaccataatcatcagcaccatcaccatcacccatcaccatcaccaccatcactatcaccaccatcatcttcaccaccaccatcatcataccatcaccattatcattgccaccaccaccatcatcagcatcaccatcacatcatcatcaccatgttaag

SEQ ID NO: 24761 - DNA, 88 bp, Homo sapiens
  MAP TO AC023128.2; EXPRESSED IN ADULT LIVER, SIGNAL = 3.9; EXPRESSED IN BONE MARROW, SIGNAL = 3.1; EXPRESSED IN LUNG, SIGNAL = 3.3; EXPRESSED IN BRAIN, SIGNAL =   4; EXPRESSED IN PLACENTA, SIGNAL = 8.9; EXPRESSED IN FETAL LIVER, SIGNAL = 4.3; EXPRESSED IN HELA, SIGNAL = 4.6; EXPRESSED IN HEART, SIGNAL =   4; NT HIT: X57033.1, EVALUE 1.80e-01
tcagacatcacctgctttcttcttctccaactgctcctcctccacatcatcatcattatcatcatcatcacttttagaccaatactct

SEQ ID NO: 24762 - DNA, 133 bp, Homo sapiens
  MAP TO AC018839.3; EXPRESSED IN PLACENTA, SIGNAL = 2.4; EXPRESSED IN FETAL LIVER, SIGNAL = 2.9; EXPRESSED IN HELA, SIGNAL = 2.9; EXPRESSED IN HEART, SIGNAL = 3.8; EXPRESSED IN BRAIN, SIGNAL = 2.7; EXPRESSED IN LUNG, SIGNAL = 2.8; EXPRESSED IN BONE MARROW, SIGNAL =   2; EXPRESSED IN ADULT LIVER, SIGNAL = 2.5; NT HIT: gi7427516, EVALUE 4.60e+00; SWISSPROT HIT: P33515, EVALUE 3.10e+00
gctgggagtgagaactgcccacgtggtcctggtgctgaaagacagtacccctggggaggacaaagctggcagtggggaactggcttccctgggagctgtcctcaagggcacagtgctgattagggaggtggag

SEQ ID NO: 24763 - DNA, 121 bp, Homo sapiens
  MAP TO AC011475.2; EXPRESSED IN BRAIN, SIGNAL = 5.3; EXPRESSED IN PLACENTA, SIGNAL = 8.2; EXPRESSED IN HELA, SIGNAL = 5.9; EXPRESSED IN HEART, SIGNAL = 5.9; EXPRESSED IN BONE MARROW, SIGNAL = 8.4; EXPRESSED IN FETAL LIVER, SIGNAL =   6; EXPRESSED IN LUNG, SIGNAL =  13; EXPRESSED IN ADULT LIVER, SIGNAL = 7.7; SWISSPROT HIT: P38321, EVALUE 5.40e+00; EST_HUMAN HIT: BE733215.1, EVALUE 5.00e-50; NT HIT: AJ245621.1, EVALUE 3.00e-50
ttggcgcctccaccaggtctgtgatgtttttccgggagccatgcccatcctcatagtcgtctcattgcccaccatcaggacacccttgtaggcgtggatagcgggaagcatctccgggcca

SEQ ID NO: 24764 - DNA, 260 bp, Homo sapiens
  MAP TO AC009242.2; EXPRESSED IN BONE MARROW, SIGNAL = 2.4; EXPRESSED IN FETAL LIVER, SIGNAL =   3; EXPRESSED IN HEART, SIGNAL = 2.7; EXPRESSED IN LUNG, SIGNAL = 2.2; EXPRESSED IN BRAIN, SIGNAL = 3.8; EXPRESSED IN PLACENTA, SIGNAL = 2.5; EXPRESSED IN HELA, SIGNAL = 3.2; EXPRESSED IN ADULT LIVER, SIGNAL = 2.9; NT HIT: AB029157.1, EVALUE 1.00e-02; EST_HUMAN HIT: BE273201.1, EVALUE 6.00e-76; SWISSPROT HIT: Q04652, EVALUE 6.00e-12
ctgtgtgcgtgtcgcggggtccttcttgatccacttgatgactgtctcgtacaccagctcctcagccttggtgttgaggctgtcgttggagacgtaggcgatgaagtcgtccttggagatgctgaggatctcctcctgggcggccacctcggggaagatctgcagcgcgaaggccttggccatgtggtagagctcgctgcactgcatggcctcggccatggccagcacgcccaggcagttgctggccgtcagctgcttct

SEQ ID NO: 24765 - DNA, 162 bp, Homo sapiens
  MAP TO AC025289.1; EXPRESSED IN BRAIN, SIGNAL = 2.8; EXPRESSED IN PLACENTA, SIGNAL = 2.7; EXPRESSED IN HELA, SIGNAL = 4.8; EXPRESSED IN ADULT LIVER, SIGNAL = 2.5; EXPRESSED IN FETAL LIVER, SIGNAL = 4.8; EXPRESSED IN HEART, SIGNAL = 4.2; EXPRESSED IN BONE MARROW, SIGNAL = 2.3; EXPRESSED IN LUNG, SIGNAL =   3; SWISSPROT HIT: P38650, EVALUE 5.20e+00; NT HIT: X04122.1, EVALUE 3.70e-01
ttagtagcgcagtgacctatgctggtaagaaagcaggatttctctaatggggagctggacaaagtagataagctgacataatgcaggaagcttcagataccagatcctgagtgtggagctccatgaagaatccaccttcacattcatcaccttcctaggtac

SEQ ID NO: 24766 - DNA, 261 bp, Homo sapiens
  MAP TO AC010278.3; EXPRESSED IN BRAIN, SIGNAL =  14; EXPRESSED IN PLACENTA, SIGNAL = 8.3; EXPRESSED IN BONE MARROW, SIGNAL =  36; EXPRESSED IN FETAL LIVER, SIGNAL =  19; EXPRESSED IN LUNG, SIGNAL =  52; EXPRESSED IN ADULT LIVER, SIGNAL = 6.9; EXPRESSED IN HELA, SIGNAL =  18; EXPRESSED IN HEART, SIGNAL =  14; EST_HUMAN HIT: BE314799.1, EVALUE 2.00e-97; SWISSPROT HIT: P11174, EVALUE 2.00e-36; NT HIT: gi11426272, EVALUE 1.00e-97
ctatgctaggccaagaaggaggcgccgaccatagagaagcaggaagtggtgaagacgcacctgcgggatatgatcatccctcccaagatggtgggcagcagggtgggcgtctacaacggcaagaccttcaaccaggtggagatcaagctggagatgatcggccacgacctgggcgagttctccatcacctacaagcccgtgaagcacggccggcctggcattgggtccacccactcctcccgcttcatctccctcaagtag

SEQ ID NO: 24767 - DNA, 230 bp, Homo sapiens
  MAP TO AC010093.2; EXPRESSED IN ADULT LIVER, SIGNAL = 2.1; EXPRESSED IN FETAL LIVER, SIGNAL = 2.4; EXPRESSED IN HEART, SIGNAL = 2.2; EXPRESSED IN PLACENTA, SIGNAL = 2.1; EXPRESSED IN BONE MARROW, SIGNAL = 2.4; EXPRESSED IN LUNG, SIGNAL = 2.7; EXPRESSED IN BRAIN, SIGNAL = 2.4; EXPRESSED IN HELA, SIGNAL = 2.4; SWISSPROT HIT: P16878, EVALUE 4.10e+00; EST_HUMAN HIT: BF329637.1, EVALUE 3.20e+00; NT HIT: U28760.1, EVALUE 1.40e-01
ctatgctccatcaccaggataaagaaagtgattggattctgaagatacaattggatcctgttttcagtgctcccaagggggaatgacaagatgtcaacaaagacaagacagcagtccttacagagaatgtcacagaatgtcagggcagagacgcgaaataaagggttatgcagagcaaaaaggagacacagtgctacagatgctcggagcaaaaggatattacttctcac

SEQ ID NO: 24768 - DNA, 234 bp, Homo sapiens
  MAP TO AC005323.1; EXPRESSED IN ADULT LIVER, SIGNAL = 3.7; EXPRESSED IN FETAL LIVER, SIGNAL = 4.1; EXPRESSED IN BRAIN, SIGNAL = 2.8; EXPRESSED IN PLACENTA, SIGNAL = 3.1; EXPRESSED IN BONE MARROW, SIGNAL = 5.5; EXPRESSED IN HELA, SIGNAL = 3.9; EXPRESSED IN HEART, SIGNAL =  49; EXPRESSED IN LUNG, SIGNAL = 2.6; SWISSPROT HIT: P13538, EVALUE 3.00e-25; NT HIT: gi11024711, EVALUE 2.00e-90; EST_HUMAN HIT: AA192977.1, EVALUE 1.00e-86
gtttaccagtttggctgtaactggccacaaggaattgagtgaagttgtggagacctaccctggcctccagtttctggatctgcttcttcccacccttcagcgccagctgctcagcctcatccagacggagctgcagatccttcacggtctgctccatgttcttcttcatccgctccaggtgggcgctggtgtcctgttccttcttcagctcctcagccatcatggcagcctagt

SEQ ID NO: 24769 - DNA, 197 bp, Homo sapiens
  MAP TO AC011625.2; EXPRESSED IN BRAIN, SIGNAL = 5.3; EXPRESSED IN PLACENTA, SIGNAL = 4.3; EXPRESSED IN ADULT LIVER, SIGNAL = 5.8; EXPRESSED IN BONE MARROW, SIGNAL = 4.4; EXPRESSED IN FETAL LIVER, SIGNAL = 5.5; EXPRESSED IN HELA, SIGNAL =   6; EXPRESSED IN LUNG, SIGNAL = 7.4; EXPRESSED IN HEART, SIGNAL = 5.5; NT HIT: AF019369.1, EVALUE 4.60e-01; SWISSPROT HIT: P12545, EVALUE 9.90e-01
tgccctcactggcatcagatttggcactccggtgctggctttccaagctctcttttggccacagtgtgcacccagctcccggttccatggttttctggccaccgtagtgtacccacattgctgtccctggggcccagctcaccttatccatcttggttggcatctctgccatgcctgtcccagctgcccagggtggg

SEQ ID NO: 24770 - DNA, 225 bp, Homo sapiens
  MAP TO AC008686.3; EXPRESSED IN BONE MARROW, SIGNAL = 2.1; EXPRESSED IN HEART, SIGNAL = 1.9; EXPRESSED IN LUNG, SIGNAL = 4.3; EXPRESSED IN BRAIN, SIGNAL =   3; EXPRESSED IN PLACENTA, SIGNAL = 2.2; EXPRESSED IN ADULT LIVER, SIGNAL = 2.2; EXPRESSED IN FETAL LIVER, SIGNAL = 2.3; EXPRESSED IN HELA, SIGNAL = 3.3; NT HIT: AE004741.1, EVALUE 3.40e-02; SWISSPROT HIT: Q9UZ16, EVALUE 3.00e-20; EST_HUMAN HIT: AI446455.1, EVALUE 1.00e-124
caggtgctgcaatccggaccccattaacatcggtcagctcctggcccggtcgctcttcaataatgatctccttgccggtctccagacggaggtcacatgaagagctgggggcagccacgtagaagggaatgccatggtgcttggcgacaatggccagctggtaggtgcccaccttgttggctgtgtcgccgttggcaaccacgcggtcagctcccacgaccacag

SEQ ID NO: 24771 - DNA, 151 bp, Homo sapiens
  MAP TO AC017025.3; EXPRESSED IN BRAIN, SIGNAL = 1.5; EXPRESSED IN BONE MARROW, SIGNAL = 1.7; EXPRESSED IN HELA, SIGNAL = 1.7; EXPRESSED IN LUNG, SIGNAL = 1.8; EXPRESSED IN ADULT LIVER, SIGNAL = 1.8; EXPRESSED IN HEART, SIGNAL = 2.2; EXPRESSED IN PLACENTA, SIGNAL = 1.6; SWISSPROT HIT: P14546, EVALUE 4.00e+00; NT HIT: gi9631294, EVALUE 5.40e+00
aatatttattaaacatattctatatttcagtctattgttaatgacagtaatattgttattctgttcctttagtgaggcagtgcacagaattattttacaaataaaattgtattttatttttcttgagagcattcgaggcaggagaatgatt

SEQ ID NO: 24772 - DNA, 103 bp, Homo sapiens
  MAP TO AC017067.2; EXPRESSED IN BRAIN, SIGNAL = 3.1; EXPRESSED IN HELA, SIGNAL =   3; EXPRESSED IN FETAL LIVER, SIGNAL = 3.8; EXPRESSED IN HEART, SIGNAL = 2.7; EXPRESSED IN PLACENTA, SIGNAL = 2.3; EXPRESSED IN LUNG, SIGNAL = 2.2; EXPRESSED IN BONE MARROW, SIGNAL = 2.3; EXPRESSED IN ADULT LIVER, SIGNAL = 5.1; SWISSPROT HIT: P11990, EVALUE 5.50e+00
atggacgtctccaaggtttaccacctggggccatctaagctacagctggagaggccaaggagtgctgtgccagaatgtatggagcagaaccttgaggcgatgc

SEQ ID NO: 24773 - DNA, 78 bp, Homo sapiens
  MAP TO AP001330.1; EXPRESSED IN PLACENTA, SIGNAL = 2.5; EXPRESSED IN BRAIN, SIGNAL = 2.6; EXPRESSED IN BONE MARROW, SIGNAL =   3; EXPRESSED IN FETAL LIVER, SIGNAL = 2.7; EXPRESSED IN HELA, SIGNAL = 2.4; EXPRESSED IN ADULT LIVER, SIGNAL = 2.5; EXPRESSED IN LUNG, SIGNAL = 4.5; EXPRESSED IN HEART, SIGNAL = 2.4; SWISSPROT HIT: Q55276, EVALUE 5.60e+00
ctctctggggcctggaagagaacaagatgttggcttcctcagcatggagagggcactggcccactctgcaggtcaaat

SEQ ID NO: 24774 - DNA, 347 bp, Homo sapiens
  MAP TO AL135931.4; EXPRESSED IN PLACENTA, SIGNAL =   2; EXPRESSED IN BRAIN, SIGNAL =   2; EXPRESSED IN BONE MARROW, SIGNAL = 3.2; EXPRESSED IN HELA, SIGNAL = 2.9; EXPRESSED IN ADULT LIVER, SIGNAL = 3.3; EXPRESSED IN FETAL LIVER, SIGNAL = 2.8; EXPRESSED IN HEART, SIGNAL =   2; NT HIT: gi11426272, EVALUE 7.00e-26; SWISSPROT HIT: P11174, EVALUE 3.00e-31; EST_HUMAN HIT: BE409100.1, EVALUE 4.00e-28
ggtgatcgaggtaatggccaatcctctcgggcttgccctccacttggttgaaggccttgccattgtagacgcccaccatgctacccaccgtcttgtctcccatctcgggcaggatgatcatatcctgcaggtgcgcgttcaccacctccagcttctgcataggcagtgcccacttcttgcccttgcgcaggcgcttcagcagcgagtgctgcttctgccacaggccacggtgcagcttcattcgctgctcgcatgacaagtccagcagtgggtcggggtgcacgccacaggaggtgaacttgcagaaggtctgcttcttctgctttgctgctttttctgctccactt

SEQ ID NO: 24775 - DNA, 148 bp, Homo sapiens
  MAP TO AC008920.4; EXPRESSED IN BRAIN, SIGNAL = 2.9; EXPRESSED IN PLACENTA, SIGNAL = 2.3; EXPRESSED IN FETAL LIVER, SIGNAL = 3.3; EXPRESSED IN ADULT LIVER, SIGNAL = 2.7; EXPRESSED IN BONE MARROW, SIGNAL = 2.6; EXPRESSED IN HELA, SIGNAL = 3.3; EXPRESSED IN HEART, SIGNAL = 2.9; EXPRESSED IN LUNG, SIGNAL =   2; SWISSPROT HIT: O00408, EVALUE 9.00e+00; EST_HUMAN HIT: BF330999.1, EVALUE 1.30e-01; NT HIT: Y10129.1, EVALUE 3.40e-01
acgcagtgttctgtccatgcgtgctcacctcctgccccctcaggggcagccagtcctccctcaaggtcctatcatcagaacatcttttccccttcccattcttctcggattctgtagtcagcaaggtgcatttcttgtgctctgtgtc

SEQ ID NO: 24776 - DNA, 188 bp, Homo sapiens
  MAP TO AC008395.3; EXPRESSED IN FETAL LIVER, SIGNAL = 3.4; EXPRESSED IN HEART, SIGNAL = 3.2; EXPRESSED IN BRAIN, SIGNAL = 2.7; EXPRESSED IN PLACENTA, SIGNAL = 2.6; EXPRESSED IN ADULT LIVER, SIGNAL = 2.9; EXPRESSED IN BONE MARROW, SIGNAL = 2.2; EXPRESSED IN HELA, SIGNAL = 3.7; EXPRESSED IN LUNG, SIGNAL = 4.6; EST_HUMAN HIT: H87583.1, EVALUE 6.50e-01; SWISSPROT HIT: P09957, EVALUE 2.90e+00
gccaaatagtcacaagcagacgtctgctaaagatttcagggaaggctttggcttcttgatacaggtgctgtctcctttccttagagccctggttctgcctgcccatcacaaggatatcaggctggaggtagagcaaccattttatgaatatgaggctaaggatggtgacctggagcagcagagagagg

SEQ ID NO: 24777 - DNA, 120 bp, Homo sapiens
  MAP TO AC008649.3; EXPRESSED IN FETAL LIVER, SIGNAL = 2.8; EXPRESSED IN HEART, SIGNAL =   2; EXPRESSED IN BRAIN, SIGNAL = 2.8; EXPRESSED IN PLACENTA, SIGNAL = 5.6; EXPRESSED IN ADULT LIVER, SIGNAL = 1.9; EXPRESSED IN BONE MARROW, SIGNAL = 3.4; EXPRESSED IN HELA, SIGNAL = 3.5; EXPRESSED IN LUNG, SIGNAL =  10; NT HIT: gi11425578, EVALUE 1.00e-61; SWISSPROT HIT: Q90734, EVALUE 4.00e-15; EST_HUMAN HIT: BE315190.1, EVALUE 2.00e-61
cttctgccccgatggagaccagcttgacgcctttgctggcaataaagtccagcgctttgttcacattgttgattttgtgcactctcatcttcccccgctccggcttaggtaaccgctccc

SEQ ID NO: 24778 - DNA, 273 bp, Homo sapiens
  MAP TO AC009144.4; EXPRESSED IN BRAIN, SIGNAL = 2.8; EXPRESSED IN PLACENTA, SIGNAL = 1.8; EXPRESSED IN FETAL LIVER, SIGNAL = 2.8; EXPRESSED IN ADULT LIVER, SIGNAL = 3.4; EXPRESSED IN BONE MARROW, SIGNAL = 1.7; EXPRESSED IN HELA, SIGNAL = 2.9; EXPRESSED IN HEART, SIGNAL = 2.3; NT HIT: M31153.1, EVALUE 0.00e+00; SWISSPROT HIT: P05093, EVALUE 6.00e-47; EST_HUMAN HIT: AV711075.1, EVALUE 0.00e+00
agcgtttcttgaatccagcggggacccagctcatctcaccgtcagtaagctatttgcccttcggagcaggacctcgctcctgtataggtgagatcctggcccgccaggagctcttcctcatcatggcctggctgctgcagaggttcgacctggaggtgccagatgatgggcagctgccctccctggaaggcatccccaaggtggtctttctgatcgactctttcaaagtgaagatcaaggtgcgccaggcctggagggaagcccaggctgagg

SEQ ID NO: 24779 - DNA, 86 bp, Homo sapiens
  MAP TO AL110505.3; EXPRESSED IN PLACENTA, SIGNAL =   2; EXPRESSED IN HELA, SIGNAL = 2.6; EXPRESSED IN HEART, SIGNAL = 3.2; EXPRESSED IN BRAIN, SIGNAL = 3.1; EXPRESSED IN LUNG, SIGNAL = 3.2; EXPRESSED IN FETAL LIVER, SIGNAL = 2.4; EXPRESSED IN BONE MARROW, SIGNAL = 2.1; EXPRESSED IN ADULT LIVER, SIGNAL = 3.4; EST_HUMAN HIT: BE965783.2, EVALUE 2.60e-01; NT HIT: X77336.1, EVALUE 1.80e-01
ggtgcatttgtttatcttctctttcagatcgatgactctttgggacaatttgataaactttctaattatggttcctgttaaggttt

SEQ ID NO: 24780 - DNA, 444 bp, Homo sapiens
  MAP TO AC011991.2; EXPRESSED IN BRAIN, SIGNAL = 2.1; EXPRESSED IN PLACENTA, SIGNAL = 2.6; EXPRESSED IN HELA, SIGNAL = 6.9; EXPRESSED IN ADULT LIVER, SIGNAL = 2.1; EXPRESSED IN BONE MARROW, SIGNAL = 3.3; EXPRESSED IN FETAL LIVER, SIGNAL = 6.1; EXPRESSED IN LUNG, SIGNAL = 2.1; EXPRESSED IN HEART, SIGNAL = 6.1; SWISSPROT HIT: P44162, EVALUE 2.60e+00; NT HIT: AL163227.2, EVALUE 0.00e+00; EST_HUMAN HIT: AW813783.1, EVALUE 0.00e+00
atgtgggaaagtttggaactccagagagacttgttgaatggctttgaccaaaatgctgataatgatatggacaatgaaatccaggctgaggtggtctcagatggagcagaggaacttgttgggaactggagcaaaggtgactcttgttatgttttagcaaagagactggtggcatttttcccctgtcctagagatttatggaactttgaacttgagagagatgatttagggtatctggtagaagaaatttctaagctgcaaagcattcaagaggtgacttgggtgctgttaaagacattcagttttaaaagggaaacagaatataaaagtttggaaaatttgcagcctgacaatgtgatagaaaataaaatcccattttctgaggaaaaattcaagcctgctgaagaaatttgcataagtaacaaggagccgaatgttaatcac

SEQ ID NO: 24781 - DNA, 283 bp, Homo sapiens
  MAP TO AC020912.3; EXPRESSED IN BRAIN, SIGNAL = 5.6; EXPRESSED IN HELA, SIGNAL = 6.3; EXPRESSED IN HEART, SIGNAL = 5.6; EXPRESSED IN PLACENTA, SIGNAL = 4.4; EXPRESSED IN LUNG, SIGNAL = 4.4; EXPRESSED IN FETAL LIVER, SIGNAL = 5.9; EXPRESSED IN BONE MARROW, SIGNAL = 4.5; EXPRESSED IN ADULT LIVER, SIGNAL = 6.8; SWISSPROT HIT: Q98930, EVALUE 2.80e+00; EST_HUMAN HIT: AA195648.1, EVALUE 6.50e-02
caggcacagatataacaggcaccccataagcatgggcaatgtgtgtaggcctgcccaactccaactgcacgtacttgtcctgttctccatgtggtttccaatccttggatgtgtacacagcatacagactgctgacagcatgcagactgctggcaccatgagaacactcaccatcttcccccaacacctcacggtaacaagcagaggtccaaacaaaccacggagtcctgacaagaagctgactgctctgacaatcttcttcctgacacagaagtccatttcg

SEQ ID NO: 24782 - DNA, 133 bp, Homo sapiens
  MAP TO AC025289.1; EXPRESSED IN PLACENTA, SIGNAL = 2.7; EXPRESSED IN BONE MARROW, SIGNAL = 3.3; EXPRESSED IN FETAL LIVER, SIGNAL = 3.9; EXPRESSED IN ADULT LIVER, SIGNAL = 2.1; EXPRESSED IN HEART, SIGNAL = 3.1; EXPRESSED IN BRAIN, SIGNAL = 1.4; EXPRESSED IN LUNG, SIGNAL =  11; EXPRESSED IN HELA, SIGNAL = 4.9; NT HIT: gi11432120, EVALUE 3.00e-69; SWISSPROT HIT: P39027, EVALUE 1.00e-18; EST_HUMAN HIT: BE738533.1, EVALUE 4.00e-69
catgcttcatcatcacagtgagaaaccggacgatgactttggagcacggcctaataagcacctggcgtttgcctctcttttcggcattgttgatactcttgagagcatctgccaggacattcatgcgcaccat

SEQ ID NO: 24783 - DNA, 141 bp, Homo sapiens
  MAP TO AC002041.1; EXPRESSED IN ADULT LIVER, SIGNAL = 5.6; EXPRESSED IN FETAL LIVER, SIGNAL =   2; EXPRESSED IN PLACENTA, SIGNAL = 1.7; EXPRESSED IN BONE MARROW, SIGNAL = 1.6; EXPRESSED IN LUNG, SIGNAL = 3.2; EXPRESSED IN HEART, SIGNAL =   2; EXPRESSED IN BRAIN, SIGNAL = 1.8; EXPRESSED IN HELA, SIGNAL = 2.1; SWISSPROT HIT: P14658, EVALUE 4.70e-01; NT HIT: Z73966.1, EVALUE 2.00e-02
agtgtcccttgtgaatcaggtccaggtgcggctgctccacatggggccgttcttccatttcctcagtgtttgcagaagtcctgtgtgaaatttattgatggagtcagagggggaaaaattgtacacccagtggctcactga

SEQ ID NO: 24784 - DNA, 91 bp, Homo sapiens
  MAP TO AC012566.3; EXPRESSED IN ADULT LIVER, SIGNAL =   2; EXPRESSED IN FETAL LIVER, SIGNAL =   2; EXPRESSED IN HEART, SIGNAL = 2.2; EXPRESSED IN BRAIN, SIGNAL = 2.5; EXPRESSED IN PLACENTA, SIGNAL = 1.4; EXPRESSED IN HELA, SIGNAL =   2; NT HIT: AL161503.2, EVALUE 1.90e-01; EST_HUMAN HIT: AI424610.1, EVALUE 1.10e+00
attccagttgtgactcacaattcagaattcatgctgatagcctacaggaaaaattctccattactgagataaatttcaacattaacaaaaa

SEQ ID NO: 24785 - DNA, 275 bp, Homo sapiens
  MAP TO AL121985.13; EXPRESSED IN BONE MARROW, SIGNAL = 6.1; EXPRESSED IN HELA, SIGNAL = 7.8; EXPRESSED IN LUNG, SIGNAL = 5.9; EXPRESSED IN BRAIN, SIGNAL =   7; EXPRESSED IN PLACENTA, SIGNAL = 5.5; EXPRESSED IN ADULT LIVER, SIGNAL = 6.5; EXPRESSED IN FETAL LIVER, SIGNAL = 7.5; EXPRESSED IN HEART, SIGNAL = 6.4; NT HIT: AJ271869.1, EVALUE 0.00e+00; EST_HUMAN HIT: AW963563.1, EVALUE 0.00e+00
tggggccgtgactttccccctgaagtccaaagtaaagcaagttgactctattgtctggaccttcaacacaacccctcttgtcaccatacagccagaagggggcactatcatagtgacccaaaatcgtaatagggagagagtagacttcccagatggaggctactccctgaagctcagcaaactgaagaagaatgactcagggatctactatgtggggatatacagctcatcactccagcagccctccacccaggagtacgtgctgcatgtctacg

SEQ ID NO: 24786 - DNA, 158 bp, Homo sapiens
  MAP TO AC018552.2; EXPRESSED IN PLACENTA, SIGNAL = 2.3; EXPRESSED IN BRAIN, SIGNAL = 1.6; EXPRESSED IN HEART, SIGNAL = 2.1; EXPRESSED IN HELA, SIGNAL = 1.8; EXPRESSED IN BONE MARROW, SIGNAL = 1.9; EXPRESSED IN FETAL LIVER, SIGNAL = 1.8; EXPRESSED IN ADULT LIVER, SIGNAL = 2.9; EST_HUMAN HIT: AW818630.1, EVALUE 4.00e-42; NT HIT: gi11420119, EVALUE 2.00e-39; SWISSPROT HIT: P36194, EVALUE 4.00e-15
catctggattcttcctgttctgttcagaattctgccccgaggacaaatccacaaaccctggcatctctattggagatgtggcaaaaaggctgagtgagatatggaataacttgagtgacagtgcaaagctgcctgacatcactacggcagcaagctga

SEQ ID NO: 24787 - DNA, 127 bp, Homo sapiens
  MAP TO AL133124.2; EXPRESSED IN BRAIN, SIGNAL = 1.6; EXPRESSED IN PLACENTA, SIGNAL = 1.9; EXPRESSED IN HEART, SIGNAL = 2.2; EXPRESSED IN ADULT LIVER, SIGNAL = 2.2; EXPRESSED IN BONE MARROW, SIGNAL = 7.6; EXPRESSED IN HELA, SIGNAL = 2.1; EXPRESSED IN LUNG, SIGNAL = 2.7; EXPRESSED IN FETAL LIVER, SIGNAL = 3.6; EST_HUMAN HIT: AA152486.1, EVALUE 9.00e-64; NT HIT: M26167.1, EVALUE 1.00e-65; SWISSPROT HIT: P02776, EVALUE 7.00e-19
ctgaagctgaagaagatggggacctgcagtgcctgtgtgtgaagaccacctcccaggtccgtcccaggcacatcaccagcctggaggtgatcaaggccggaccccactgccccactgcccaactcat

SEQ ID NO: 24788 - DNA, 123 bp, Homo sapiens
  MAP TO AC022377.1; EXPRESSED IN PLACENTA, SIGNAL =   2; EXPRESSED IN HEART, SIGNAL = 2.7; EXPRESSED IN BRAIN, SIGNAL = 2.3; EXPRESSED IN LUNG, SIGNAL = 1.7; EXPRESSED IN HELA, SIGNAL = 2.9; EXPRESSED IN FETAL LIVER, SIGNAL = 2.9; EXPRESSED IN BONE MARROW, SIGNAL =   2; EXPRESSED IN ADULT LIVER, SIGNAL = 2.5; NT HIT: gi11067364, EVALUE 1.10e+00; SWISSPROT HIT: Q64691, EVALUE 7.10e+00; EST_HUMAN HIT: BE958029.1, EVALUE 6.30e+00
tgtcacacagaaccaaacgttctaatgcaagtaccttgtaatagtcacaatactgagcgaacatgatcacagttataatatggtagaactgactgtttcgatggaaatgtagatcaaataata

SEQ ID NO: 24789 - DNA, 152 bp, Homo sapiens
  MAP TO AC016372.2; EXPRESSED IN BRAIN, SIGNAL = 5.2; EXPRESSED IN HELA, SIGNAL =   2; EXPRESSED IN FETAL LIVER, SIGNAL = 2.6; EXPRESSED IN LUNG, SIGNAL = 4.3; EXPRESSED IN PLACENTA, SIGNAL = 4.9; EXPRESSED IN HEART, SIGNAL = 7.4; EXPRESSED IN BONE MARROW, SIGNAL = 1.7; EXPRESSED IN ADULT LIVER, SIGNAL = 3.3; NT HIT: gi11641276, EVALUE 1.00e-80; SWISSPROT HIT: P37913, EVALUE 1.00e+00; EST_HUMAN HIT: BF529535.1, EVALUE 2.00e-80
cttttcttagtgacactaaagatcgaggccctccagtgcagtcacagatctggagaagtggtgaaaaggtcccgtttgtgcagacatattccttgagagcatttgagaaaccccctcaggtacagacccaggctcttcgagactttgagaag

SEQ ID NO: 24790 - DNA, 76 bp, Homo sapiens
  MAP TO AC005411.1; EXPRESSED IN BRAIN, SIGNAL = 2.6; EXPRESSED IN PLACENTA, SIGNAL = 1.7; EXPRESSED IN BONE MARROW, SIGNAL =   2; EXPRESSED IN LUNG, SIGNAL = 2.1; EXPRESSED IN ADULT LIVER, SIGNAL = 2.4; EXPRESSED IN HELA, SIGNAL = 2.3; EXPRESSED IN FETAL LIVER, SIGNAL = 2.2; EXPRESSED IN HEART, SIGNAL = 2.5; EST_HUMAN HIT: AI627859.1, EVALUE 5.70e-02; NT HIT: AF143952.2, EVALUE 3.80e-02
ctgcctgcctgcggctgccactgagagcaacactgccctcttcagtagcagctgttgctaccccccagctgaacat

SEQ ID NO: 24791 - DNA, 146 bp, Homo sapiens
  MAP TO AC012664.3; EXPRESSED IN BRAIN, SIGNAL = 2.2; EXPRESSED IN ADULT LIVER, SIGNAL = 2.3; EXPRESSED IN BONE MARROW, SIGNAL =   2; EXPRESSED IN LUNG, SIGNAL = 4.2; EXPRESSED IN PLACENTA, SIGNAL =   2; EXPRESSED IN HEART, SIGNAL = 2.1; EXPRESSED IN HELA, SIGNAL = 2.2; EXPRESSED IN FETAL LIVER, SIGNAL = 2.3; EST_HUMAN HIT: BE618442.1, EVALUE 7.00e-34; SWISSPROT HIT: Q14191, EVALUE 6.90e+00; NT HIT: AB037856.1, EVALUE 5.00e-34
cattacagctccattatcctggcccacaaatatccgtctgctgtcatgatggtaagccatagcagagcaaggagctgccagaaagacaaagaccacattaccagcaaagctaagcactttaagttgttcttcaaagtgattaagaa

SEQ ID NO: 24792 - DNA, 79 bp, Homo sapiens
  MAP TO AC011483.2; EXPRESSED IN ADULT LIVER, SIGNAL = 3.2; EXPRESSED IN FETAL LIVER, SIGNAL = 3.3; EXPRESSED IN LUNG, SIGNAL = 2.9; EXPRESSED IN PLACENTA, SIGNAL = 2.3; EXPRESSED IN BRAIN, SIGNAL =   3; EXPRESSED IN BONE MARROW, SIGNAL = 2.7; EXPRESSED IN HELA, SIGNAL = 3.5; EXPRESSED IN HEART, SIGNAL = 3.1; SWISSPROT HIT: P48046, EVALUE 9.60e+00; NT HIT: U37672.1, EVALUE 3.00e-12
atacgaggactgtgccagcatcagcttcatctgtaccacatcttgtaacagggactaccagggccctgatgaacaccat

SEQ ID NO: 24793 - DNA, 219 bp, Homo sapiens
  MAP TO AC021097.3; EXPRESSED IN BRAIN, SIGNAL =   2; EXPRESSED IN PLACENTA, SIGNAL = 1.5; EXPRESSED IN HELA, SIGNAL = 1.7; EXPRESSED IN LUNG, SIGNAL = 2.9; EXPRESSED IN HEART, SIGNAL = 2.8; EST_HUMAN HIT: AA291613.1, EVALUE 3.00e-65; NT HIT: gi11419247, EVALUE 2.00e-65; SWISSPROT HIT: Q61466, EVALUE 1.00e-06
cctgaatcccctcacctgcccctggagtacaacgtttactctctttcccgctgtgcttgtcttccactccagtactccctgagtctccctcttcaccttgaggtcccggctctgggagcggagcaggtcttggacatagcctttggggtctctggagaagcttagcatgaagtccctctggatcttgagctggtttatggactcaatcgtctcatggat

SEQ ID NO: 24794 - DNA, 179 bp, Homo sapiens
  MAP TO AC011298.2; EXPRESSED IN BRAIN, SIGNAL = 3.3; EXPRESSED IN ADULT LIVER, SIGNAL =   3; EXPRESSED IN HELA, SIGNAL = 3.1; EXPRESSED IN BONE MARROW, SIGNAL = 2.6; EXPRESSED IN LUNG, SIGNAL = 2.9; EXPRESSED IN PLACENTA, SIGNAL = 2.3; EXPRESSED IN HEART, SIGNAL = 2.7; EXPRESSED IN FETAL LIVER, SIGNAL = 2.7; EST_HUMAN HIT: AW850853.1, EVALUE 1.60e-01; SWISSPROT HIT: Q02080, EVALUE 3.00e+00; NT HIT: Z97182.1, EVALUE 4.20e-01
gatccagaaacgggagggtacagcctggaggtgagccagcgttgccaagacctcgacactggcagcactgcccagctggtgaaaggtggtctggctgaggctgcgccggcccagacccagagagctgccagttcagagacagcagtgcaggcctggacccgagacctcatgccccagtg

SEQ ID NO: 24795 - DNA, 121 bp, Homo sapiens
  MAP TO AC023000.2; EXPRESSED IN BRAIN, SIGNAL = 1.9; EXPRESSED IN PLACENTA, SIGNAL = 1.8; EXPRESSED IN HELA, SIGNAL = 2.5; EXPRESSED IN BONE MARROW, SIGNAL = 1.6; EXPRESSED IN FETAL LIVER, SIGNAL = 2.1; EXPRESSED IN ADULT LIVER, SIGNAL = 1.7; EXPRESSED IN HEART, SIGNAL =   2; NT HIT: AF109906.1, EVALUE 2.70e-01; EST_HUMAN HIT: AU159127.1, EVALUE 1.00e-01; SWISSPROT HIT: P33371, EVALUE 5.40e+00
tactacctttgccagggtagagctgggtctgcttccaagcgtagttagccacaatctttgcccagaggcagacagatgctctgaggcgctcaatcaagctgattttggccctaatcctgcc

SEQ ID NO: 24796 - DNA, 319 bp, Homo sapiens
  MAP TO AC005212.1; EXPRESSED IN BRAIN, SIGNAL = 3.2; EXPRESSED IN PLACENTA, SIGNAL = 2.5; EXPRESSED IN BONE MARROW, SIGNAL = 1.8; EXPRESSED IN FETAL LIVER, SIGNAL = 1.9; EXPRESSED IN HELA, SIGNAL = 2.4; EXPRESSED IN HEART, SIGNAL = 2.5; EXPRESSED IN LUNG, SIGNAL = 9.9; EXPRESSED IN ADULT LIVER, SIGNAL = 2.3; EST_HUMAN HIT: BE798107.1, EVALUE 2.90e-01; SWISSPROT HIT: Q99758, EVALUE 6.00e-38; NT HIT: gi11431124, EVALUE 0.00e+00
cccatcaccgtgccctattgtatctcttccagaagcggaaggtcctggtgacggtcctggaactcttcctgccattgctgttttctgggatcctcatctggctccgcttgaagattcagtcggaaaatgtgcccaacgccaccatctacccgggccagtccatccaggagctgcctctgttcttcaccttccctccgccaggagacacctgggagcttgcctacatcccttctcacagtgacgctgccaagaccgtcactgagacagtgcgcagggcacttgtgatcaacatgcgaggtgagacatgccggggctctcg

SEQ ID NO: 24797 - DNA, 141 bp, Homo sapiens
  MAP TO AC015971.2; EXPRESSED IN BRAIN, SIGNAL =   2; EXPRESSED IN PLACENTA, SIGNAL = 1.5; EXPRESSED IN BONE MARROW, SIGNAL = 1.8; EXPRESSED IN HEART, SIGNAL =   2; EXPRESSED IN LUNG, SIGNAL = 4.3; EST_HUMAN HIT: BF507493.1, EVALUE 4.00e-66; NT HIT: gi11430035, EVALUE 2.00e-27; SWISSPROT HIT: P48984, EVALUE 1.80e+00
cagttctttgggcggcttctcctgggtctttccaaacagccccatgacgaactgaacccgtcttgccccttccggctttcagttccccgcgcccaggcaggtcacgggcagccgcctgggcggggcccgcggaaaaggagg

SEQ ID NO: 24798 - DNA, 126 bp, Homo sapiens
  MAP TO AC008469.4; EXPRESSED IN BRAIN, SIGNAL = 2.7; EXPRESSED IN PLACENTA, SIGNAL = 2.8; EXPRESSED IN FETAL LIVER, SIGNAL = 3.7; EXPRESSED IN LUNG, SIGNAL = 4.3; EXPRESSED IN ADULT LIVER, SIGNAL = 3.1; EXPRESSED IN BONE MARROW, SIGNAL = 2.9; EXPRESSED IN HELA, SIGNAL = 4.2; EXPRESSED IN HEART, SIGNAL = 3.7; NT HIT: X07749.1, EVALUE 1.80e-02; EST_HUMAN HIT: BE266187.1, EVALUE 4.00e-26
cacccaaggctgccagaggtccttcagcagctgccacggctgacagtgactctatgtttcctaggcttcttctaccgccagaattggcggtttctctcgctggattcttgggacctgatccaggca

SEQ ID NO: 24799 - DNA, 446 bp, Homo sapiens
  MAP TO AL049829.3; EXPRESSED IN ADULT LIVER, SIGNAL = 1.9; EXPRESSED IN BONE MARROW, SIGNAL = 1.8; EXPRESSED IN LUNG, SIGNAL = 2.4; EXPRESSED IN PLACENTA, SIGNAL = 1.7; EXPRESSED IN FETAL LIVER, SIGNAL = 1.8; EXPRESSED IN HELA, SIGNAL = 2.2; EXPRESSED IN HEART, SIGNAL =   2; EXPRESSED IN BRAIN, SIGNAL = 2.1; NT HIT: AB037864.1, EVALUE 0.00e+00; EST_HUMAN HIT: AW057621.1, EVALUE 0.00e+00; SWISSPROT HIT: P48002, EVALUE 1.60e-02
ttgctctggagctggcactggaggaggaggcacctcctctgggggccgtcccgcatgatgagtaaaagagagaagggatttgaaatggagttggtcccgacggtagactactcgggctcgagtctcttctatttcttcagatgaccagctaataccacagcggaggcgctgggccataaaccaagtcttgactttctccatctgcaacccataacgtaggcagagaagggcaatgtctgctaggctgggatagggaaagtagctgaaggttttgagcaggtgttcattgctgtctagctcactggtctgggctgcttgcgtccacacaagctgtagctcctcagagattggagggaggcagatgagccccgctggtgaactactgagaccgctggcctctttattaggaggcatggtgccttctgatttgtgcccttcagagatag

SEQ ID NO: 24800 - DNA, 339 bp, Homo sapiens
  MAP TO AC020557.2; EXPRESSED IN BONE MARROW, SIGNAL = 1.6; EXPRESSED IN FETAL LIVER, SIGNAL = 1.8; EXPRESSED IN HEART, SIGNAL = 2.1; EXPRESSED IN BRAIN, SIGNAL = 1.9; EXPRESSED IN PLACENTA, SIGNAL = 1.6; EXPRESSED IN HELA, SIGNAL = 2.1; EXPRESSED IN ADULT LIVER, SIGNAL = 1.9; NT HIT: AL163280.2, EVALUE 4.00e-09; EST_HUMAN HIT: AA255519.1, EVALUE 8.00e-05; SWISSPROT HIT: P11369, EVALUE 3.00e-20
ataaaagaggaaaaaaatcacatgatcatgccaattgatgcagaaaaagcacttgacaaaattctttacccattcatggttaaaacactcagaaaaatcggaatagagaagttccacttgataaacagcatcaagaaatctacagttaataatataattaatagtgaacaactcaatgcttcctccttaatatcaaaaataatgcaaggatgtttgctttcaccactcttattcaacatgatgctggaatttccagccagtgtggtaaagcaagaaaaggaaataaatggcagacagattggaaagggaaaaaaaagcaaaactgtttctattttcaaa

SEQ ID NO: 24801 - DNA, 91 bp, Homo sapiens
  MAP TO AL133380.3; EXPRESSED IN FETAL LIVER, SIGNAL = 1.7; EXPRESSED IN HEART, SIGNAL =  22; EXPRESSED IN PLACENTA, SIGNAL =   2; EXPRESSED IN BRAIN, SIGNAL = 1.8; EXPRESSED IN HELA, SIGNAL = 1.9; EXPRESSED IN ADULT LIVER, SIGNAL = 1.9; EXPRESSED IN BONE MARROW, SIGNAL = 1.6; EXPRESSED IN LUNG, SIGNAL = 2.7; NT HIT: gi11432066, EVALUE 4.80e-02; EST_HUMAN HIT: AW362393.1, EVALUE 1.00e-03; SWISSPROT HIT: P51410, EVALUE 2.00e-03
agctgcttctttgtttgccaaggagactgagttctacattgatgcagctgaagctcctctgcagggttcccctgtggccctatacaattaa

SEQ ID NO: 24802 - DNA, 144 bp, Homo sapiens
  MAP TO AL133246.1; EXPRESSED IN BRAIN, SIGNAL = 4.8; EXPRESSED IN PLACENTA, SIGNAL = 4.3; EXPRESSED IN HEART, SIGNAL = 6.4; EXPRESSED IN BONE MARROW, SIGNAL = 4.1; EXPRESSED IN ADULT LIVER, SIGNAL = 5.3; EXPRESSED IN HELA, SIGNAL = 8.5; EXPRESSED IN LUNG, SIGNAL =   5; EXPRESSED IN FETAL LIVER, SIGNAL = 7.3; EST_HUMAN HIT: AW955810.1, EVALUE 3.00e-73; NT HIT: gi10442821, EVALUE 8.00e-76; SWISSPROT HIT: Q24574, EVALUE 2.30e+00
gtgaaaaatgctaatgatgcgaacagtgctgccagagctcgccgccttgcccaggaagctgtgacgctttcaacctcactgcctctgtcttcatcctctagtgtgtttgtacgctgtgatgaggagcgacttgatatcatgaag

SEQ ID NO: 24803 - DNA, 101 bp, Homo sapiens
  MAP TO AC024006.2; EXPRESSED IN BRAIN, SIGNAL = 3.9; EXPRESSED IN HELA, SIGNAL = 3.5; EXPRESSED IN FETAL LIVER, SIGNAL = 3.3; EXPRESSED IN PLACENTA, SIGNAL = 3.1; EXPRESSED IN LUNG, SIGNAL =   6; EXPRESSED IN HEART, SIGNAL = 2.7; EXPRESSED IN BONE MARROW, SIGNAL =   3; EXPRESSED IN ADULT LIVER, SIGNAL = 3.3; EST_HUMAN HIT: T06813.1, EVALUE 3.20e-01; NT HIT: AJ237848.2, EVALUE 8.50e-01
gttaacataagacctgcacattctatcacaatctaccttcagagcaatggagagaaagataagattaaactttcaaacacagcaagtctgcttatcccatt

SEQ ID NO: 24804 - DNA, 288 bp, Homo sapiens
  MAP TO AL136418.1; EXPRESSED IN BRAIN, SIGNAL = 1.6; EXPRESSED IN FETAL LIVER, SIGNAL = 2.3; EXPRESSED IN HELA, SIGNAL = 2.1; EXPRESSED IN ADULT LIVER, SIGNAL = 1.8; EXPRESSED IN BONE MARROW, SIGNAL =   2; EXPRESSED IN HEART, SIGNAL = 1.9; EXPRESSED IN LUNG, SIGNAL = 2.8; EXPRESSED IN PLACENTA, SIGNAL = 8.6; EST_HUMAN HIT: BE243270.1, EVALUE 0.00e+00; SWISSPROT HIT: P93673, EVALUE 2.90e+00
gatcttctgaggtcggagcttccagattcaattgaaagtgcattgcagggtgatgaaagatgtgtgcttgatactatgcgtttggttgaccttctcttggtgctattatttgaaggacgaaaagctttgccaaagtctagtgctggatctacaggcagaatcccaggactccggagattagatagttctggggagcgctcacatcggcagcttatagattgtattcgaagtaaagataccgatgcacttatagatgcaattgacacaggaggtcagaaaatatttttt

SEQ ID NO: 24805 - DNA, 290 bp, Homo sapiens
  MAP TO AC019205.2; EXPRESSED IN BRAIN, SIGNAL = 2.8; EXPRESSED IN HEART, SIGNAL = 4.9; EXPRESSED IN ADULT LIVER, SIGNAL = 3.2; EXPRESSED IN BONE MARROW, SIGNAL = 2.5; EXPRESSED IN FETAL LIVER, SIGNAL = 2.7; EXPRESSED IN HELA, SIGNAL = 5.6; EXPRESSED IN PLACENTA, SIGNAL = 2.7; NT HIT: AB046666.1, EVALUE 7.00e-01; SWISSPROT HIT: P08125, EVALUE 2.60e-01; EST_HUMAN HIT: AI652239.1, EVALUE 0.00e+00
gctcaggaaaggccctcgcccaggatgtcgccactcagaaggccgagacccagcggtcttcaatagaagtccgggaggccgggacgcagcgttcggtggaggtccgggaggccgggacccagcgttcggtggaagtccaggaggtcgggacacagggttctccggtggaggtgcaggaggccgggacccagcagtctctccaggctgccaacaagtcggggacccagcgatcccccgaagctgccagcaaggcagtgacccagcggtttcgcgaggatgcccgggaccca

SEQ ID NO: 24806 - DNA, 167 bp, Homo sapiens
  MAP TO AC011505.2; EXPRESSED IN PLACENTA, SIGNAL = 2.2; EXPRESSED IN BRAIN, SIGNAL = 2.5; EXPRESSED IN BONE MARROW, SIGNAL = 2.5; EXPRESSED IN HEART, SIGNAL = 2.7; EXPRESSED IN ADULT LIVER, SIGNAL = 2.8; EXPRESSED IN FETAL LIVER, SIGNAL = 3.2; EXPRESSED IN HELA, SIGNAL = 3.2; SWISSPROT HIT: Q9X0I3, EVALUE 5.90e-01; NT HIT: X03822.1, EVALUE 1.50e+00
gtctcccagctcctgctcccacagagcttcctgctctagaacaagctttcttagagtctccccgccctgcctcgacccaggctggcctttgagtggaggcagccccacccagagccagagcttcaccacctctgccaactcaagcagcccccgccttgtgctggcag

SEQ ID NO: 24807 - DNA, 113 bp, Homo sapiens
  MAP TO AC017024.3; EXPRESSED IN BRAIN, SIGNAL = 3.3; EXPRESSED IN PLACENTA, SIGNAL = 2.2; EXPRESSED IN FETAL LIVER, SIGNAL = 2.9; EXPRESSED IN HELA, SIGNAL = 2.7; EXPRESSED IN ADULT LIVER, SIGNAL = 2.6; EXPRESSED IN BONE MARROW, SIGNAL =   3; EXPRESSED IN HEART, SIGNAL = 2.5; EXPRESSED IN LUNG, SIGNAL = 3.3; NT HIT: AE000903.1, EVALUE 8.30e-01
aaatacaaaagcaaattccagataactaactcctcagaaatgatggcaaaagctgatatttatcctgtgaatgtcttcagagtcaaaaaaaaggacacatactacctcttaaa

SEQ ID NO: 24808 - DNA, 90 bp, Homo sapiens
  MAP TO AC008770.3; EXPRESSED IN BRAIN, SIGNAL = 2.4; EXPRESSED IN FETAL LIVER, SIGNAL = 2.7; EXPRESSED IN BONE MARROW, SIGNAL = 2.3; EXPRESSED IN HELA, SIGNAL = 1.9; EXPRESSED IN HEART, SIGNAL = 2.2; EXPRESSED IN LUNG, SIGNAL = 2.3; SWISSPROT HIT: Q08303, EVALUE 2.50e+00; EST_HUMAN HIT: AV730056.1, EVALUE 5.00e-15; NT HIT: AB014607.1, EVALUE 4.70e-02
catgtgtgggtcttgaacccaggtcaaagtgtcaccggagtaacagttggagaatgtggaactaagctggaggacacccgagtactctaa

SEQ ID NO: 24809 - DNA, 83 bp, Homo sapiens
  MAP TO AL121870.9; EXPRESSED IN FETAL LIVER, SIGNAL = 4.1; EXPRESSED IN HELA, SIGNAL = 3.7; EXPRESSED IN BRAIN, SIGNAL = 3.6; EXPRESSED IN PLACENTA, SIGNAL = 3.1; EXPRESSED IN LUNG, SIGNAL = 5.1; EXPRESSED IN HEART, SIGNAL =   4; EXPRESSED IN BONE MARROW, SIGNAL = 2.7; EXPRESSED IN ADULT LIVER, SIGNAL = 3.5; EST_HUMAN HIT: AI064768.1, EVALUE 3.00e-13; NT HIT: U66059.1, EVALUE 7.00e-07; SWISSPROT HIT: Q10941, EVALUE 5.60e+00
ccatatcactattagcattttggtcacaacaatttatggttttaggaagttccaaactttccctcatattcttgtcttcttcc

SEQ ID NO: 24810 - DNA, 87 bp, Homo sapiens
  MAP TO AL158148.1; EXPRESSED IN BRAIN, SIGNAL = 7.3; EXPRESSED IN PLACENTA, SIGNAL =   5; EXPRESSED IN ADULT LIVER, SIGNAL = 5.9; EXPRESSED IN BONE MARROW, SIGNAL = 4.6; EXPRESSED IN FETAL LIVER, SIGNAL = 7.5; EXPRESSED IN HELA, SIGNAL = 7.4; EXPRESSED IN HEART, SIGNAL = 6.6; EXPRESSED IN LUNG, SIGNAL =   6; NT HIT: U38906.1, EVALUE 1.80e-01
atggtcaagcccaactccaacagcaagctcctaagacggtttctcaccctggtccgtttcctctctgccctggacacacgccaagag

SEQ ID NO: 24811 - DNA, 116 bp, Homo sapiens
  MAP TO AC013707.2; EXPRESSED IN ADULT LIVER, SIGNAL = 2.9; EXPRESSED IN LUNG, SIGNAL = 3.4; EXPRESSED IN HEART, SIGNAL = 3.3; EXPRESSED IN BRAIN, SIGNAL = 2.4; EXPRESSED IN PLACENTA, SIGNAL = 4.1; EXPRESSED IN HELA, SIGNAL =   4; EXPRESSED IN BONE MARROW, SIGNAL = 2.3; EXPRESSED IN FETAL LIVER, SIGNAL = 3.2; EST_HUMAN HIT: BF035861.1, EVALUE 9.50e-02; NT HIT: AF096835.1, EVALUE 2.50e-01
atgtacagcccacagtgcatatttattgaattcaccaattaccattatgcattctatctgtcaaataatattactttgaactgtgaaagcacctttaaactgagggaaaataacag

SEQ ID NO: 24812 - DNA, 84 bp, Homo sapiens
  MAP TO AC008786.6; EXPRESSED IN HEART, SIGNAL = 9.1; EXPRESSED IN PLACENTA, SIGNAL = 9.5; EXPRESSED IN BRAIN, SIGNAL = 8.8; EXPRESSED IN LUNG, SIGNAL = 8.8; EXPRESSED IN ADULT LIVER, SIGNAL = 7.9; EXPRESSED IN BONE MARROW, SIGNAL = 8.2; EXPRESSED IN FETAL LIVER, SIGNAL = 9.2; EXPRESSED IN HELA, SIGNAL = 9.8; NT HIT: L39064.1, EVALUE 5.80e-01; EST_HUMAN HIT: BE390835.1, EVALUE 1.70e-01
atatgcctggagttctgtgaggcactgggcctacaagaagagctggtcttcaggcgactcacagttctgaaagcaaaacaagcc

SEQ ID NO: 24813 - DNA, 467 bp, Homo sapiens
  MAP TO AC007608.2; EXPRESSED IN BRAIN, SIGNAL = 5.1; EXPRESSED IN PLACENTA, SIGNAL = 3.6; EXPRESSED IN FETAL LIVER, SIGNAL = 4.3; EXPRESSED IN HELA, SIGNAL = 4.3; EXPRESSED IN BONE MARROW, SIGNAL = 3.8; EXPRESSED IN LUNG, SIGNAL = 4.7; EXPRESSED IN ADULT LIVER, SIGNAL = 4.3; EXPRESSED IN HEART, SIGNAL = 2.9; SWISSPROT HIT: P07984, EVALUE 2.20e-02; EST_HUMAN HIT: AW845499.1, EVALUE 3.00e-91; NT HIT: gi11545911, EVALUE 0.00e+00
cctctgggacggtgtgaagatcggcaacctgatttcatcacattcatactggctgacgaaaccccgctcccatgccaggtccagcatgttctccacatggctgtggagcctcctgacaatggctggccggtgactctgcaggtctcgggctgggtggagcgagtgggggtcccagcagccatgcagcttgggggactggctgtcggcctgggcttcttgggcagccgcgatgagcttctgacaggcccaagtacccttattccagacggtgtccagaaggcgcctggccaagtgggagagaggctggcccaggaggtggaagccctcgtagtcctcccaggagaggacctcccaggacagcagccagtccaggacactctcgaagccttccagggaccctgagaccagcagctcgaccagctggctcctctgtgcctgaaaagcctcctgcgagcacatttcacaac

SEQ ID NO: 24814 - DNA, 228 bp, Homo sapiens
  MAP TO AC011489.3; EXPRESSED IN BRAIN, SIGNAL = 3.2; EXPRESSED IN PLACENTA, SIGNAL =   3; EXPRESSED IN FETAL LIVER, SIGNAL = 3.8; EXPRESSED IN HELA, SIGNAL = 3.5; EXPRESSED IN ADULT LIVER, SIGNAL = 2.9; EXPRESSED IN BONE MARROW, SIGNAL = 2.5; EXPRESSED IN HEART, SIGNAL = 3.2; EXPRESSED IN LUNG, SIGNAL =   4; NT HIT: AF043458.1, EVALUE 1.00e-125; SWISSPROT HIT: Q01201, EVALUE 7.00e-29
ctccgggattgtggagggctgcgggaggtggaggtgactgcctgcctggtgtggaaggactggcctcaccgagtccacccccacagcctcgtggggaaagactgcaccgacggcatctgcagggtgcggctccggcctcacgtcagcccccggcacaggtacccaccccctgacctccgacctctcatccttgatcatggagattctaagcgactggaggccacccat

SEQ ID NO: 24815 - DNA, 287 bp, Homo sapiens
  MAP TO AC017016.3; EXPRESSED IN ADULT LIVER, SIGNAL = 3.5; EXPRESSED IN BONE MARROW, SIGNAL = 2.1; EXPRESSED IN HEART, SIGNAL = 3.7; EXPRESSED IN LUNG, SIGNAL = 8.1; EXPRESSED IN PLACENTA, SIGNAL = 2.3; EXPRESSED IN HELA, SIGNAL = 2.7; EXPRESSED IN BRAIN, SIGNAL = 2.5; EXPRESSED IN FETAL LIVER, SIGNAL = 3.1
atgaagaaagagaagaaaagggagaagaaggagaaggaggaggaggaggaggaggagggggaggaggaggaggggaagaagaagaagaagaagaagaagaagaagaagaagaagaagaagaagaagaagaagagaaggagaagaagaggaggaggaagaagaagaagagggggaagaagaggaggaggaggaggaaagaaggaggaggaggcagaggaggaggaagagaggggagggggagggggagaagaagaagaggagaagaagaaagtagtatcaagtcccaa

SEQ ID NO: 24816 - DNA, 217 bp, Homo sapiens
  MAP TO AC010198.8; EXPRESSED IN BRAIN, SIGNAL = 1.5; EXPRESSED IN PLACENTA, SIGNAL = 1.9; EXPRESSED IN HELA, SIGNAL = 3.3; EXPRESSED IN FETAL LIVER, SIGNAL = 3.6; EXPRESSED IN HEART, SIGNAL = 2.3; EXPRESSED IN LUNG, SIGNAL = 1.9; SWISSPROT HIT: Q02960, EVALUE 2.10e+00; NT HIT: AF095703.1, EVALUE 3.00e-64; EST_HUMAN HIT: AI251752.1, EVALUE 8.00e-81
cacaagttacttcctccttcttttgttctcctctacctttgcctcttttaaaaagttctaagttgctagccaatcgggacaaatacagaatgtgaggtcccattccagctattggaaactggacacagcagtagggtggacgcgtcaggttataaatgaccctgtctcctttgttcagtgtactctcctggcaaaactgctggcgagtgtacccttt

SEQ ID NO: 24817 - DNA, 161 bp, Homo sapiens
  MAP TO AC005323.1; EXPRESSED IN BRAIN, SIGNAL =  18; EXPRESSED IN BONE MARROW, SIGNAL =  15; EXPRESSED IN FETAL LIVER, SIGNAL = 8.2; EXPRESSED IN LUNG, SIGNAL =  22; EXPRESSED IN HEART, SIGNAL = 8.7; EXPRESSED IN PLACENTA, SIGNAL =  11; EXPRESSED IN HELA, SIGNAL = 8.7; EXPRESSED IN ADULT LIVER, SIGNAL =  16; SWISSPROT HIT: P13538, EVALUE 3.00e-22; NT HIT: gi7669505, EVALUE 4.00e-75; EST_HUMAN HIT: F00725.1, EVALUE 1.00e-23
tagatcatccaggctgcgtagcgctctttgaggttgtacagcacagcaggctcgtgtagatgagtcatcatggccatgtcctcgatcttgtcatatttgggagggttcatggggaagacttggtcatctttcactgttacagtctgtccagtcaaacaaga

SEQ ID NO: 24818 - DNA, 186 bp, Homo sapiens
  MAP TO AC015755.4; EXPRESSED IN BRAIN, SIGNAL = 3.5; EXPRESSED IN PLACENTA, SIGNAL =   3; EXPRESSED IN ADULT LIVER, SIGNAL = 3.7; EXPRESSED IN BONE MARROW, SIGNAL = 2.9; EXPRESSED IN FETAL LIVER, SIGNAL = 4.3; EXPRESSED IN HELA, SIGNAL = 4.8; EXPRESSED IN HEART, SIGNAL =   4; EXPRESSED IN LUNG, SIGNAL = 2.2; EST_HUMAN HIT: AA601287.1, EVALUE 6.50e-01; NT HIT: AJ243654.1, EVALUE 1.70e+00; SWISSPROT HIT: Q9PQI5, EVALUE 2.90e+00
cctggtcacgagtcccgtgaaggggtcaagaaaacaccctgcatcattgttataacacagcttaatgcttttggggctggcagatctcttgtgaatattttcataaattctttgaagctctgcccagttactgggagtgttttgtttgtttttgttgttgttgttgttgttattgttgttgtttcc

SEQ ID NO: 24819 - DNA, 220 bp, Homo sapiens
  MAP TO AL133243.1; EXPRESSED IN FETAL LIVER, SIGNAL = 3.9; EXPRESSED IN PLACENTA, SIGNAL = 2.4; EXPRESSED IN BRAIN, SIGNAL = 2.4; EXPRESSED IN HEART, SIGNAL = 3.7; EXPRESSED IN ADULT LIVER, SIGNAL =   3; EXPRESSED IN BONE MARROW, SIGNAL = 2.4; EXPRESSED IN HELA, SIGNAL = 4.2; EST_HUMAN HIT: BF335849.1, EVALUE 1.00e-116; NT HIT: gi10442821, EVALUE 1.00e-85; SWISSPROT HIT: P54676, EVALUE 5.40e-01
caacagctgggatgaacatgtatttgaattagtactacctaaagcttgtatggttggacatgtggacttcaaattcgttttgaactcaaacatcaccaatattccacagatacaagtgacactgctgaaaaataaagctccaggattagggaaagtcaatggtaagaatgtatcaaaatttatctttgaagattttattttgtggttgatttctgaaaac

SEQ ID NO: 24820 - DNA, 75 bp, Homo sapiens
  MAP TO AC017025.3; EXPRESSED IN BRAIN, SIGNAL = 2.4; EXPRESSED IN PLACENTA, SIGNAL = 1.5; EXPRESSED IN HELA, SIGNAL = 2.3; EXPRESSED IN ADULT LIVER, SIGNAL = 2.2; EXPRESSED IN BONE MARROW, SIGNAL = 1.8; EXPRESSED IN FETAL LIVER, SIGNAL = 1.8; EXPRESSED IN HEART, SIGNAL =   3; NT HIT: U87630.1, EVALUE 9.10e+00; EST_HUMAN HIT: BE378480.1, EVALUE 8.00e-35
gttttcagggacatgtctgaccgaagcatcctcagtcacaacaccataactgaaggcactgcatggtatatctcc

SEQ ID NO: 24821 - DNA, 99 bp, Homo sapiens
  MAP TO AL109662.2; EXPRESSED IN BRAIN, SIGNAL =   2; EXPRESSED IN FETAL LIVER, SIGNAL = 2.5; EXPRESSED IN HELA, SIGNAL = 2.2; EXPRESSED IN ADULT LIVER, SIGNAL = 1.9; EXPRESSED IN LUNG, SIGNAL = 1.9; EXPRESSED IN BONE MARROW, SIGNAL = 1.9; EXPRESSED IN HEART, SIGNAL = 2.5; EXPRESSED IN PLACENTA, SIGNAL = 1.6; NT HIT: gi7212472, EVALUE 8.30e-01; EST_HUMAN HIT: AA625235.1, EVALUE 1.20e+00
atgctgctagaataaaccatcctttagaaagaattaaaaatagacattcaaatactaatgtgaatcttaacacttttgttgtgaagttgttaattccaa

SEQ ID NO: 24822 - DNA, 232 bp, Homo sapiens
  MAP TO AC007340.3; EXPRESSED IN BRAIN, SIGNAL = 3.4; EXPRESSED IN PLACENTA, SIGNAL = 3.3; EXPRESSED IN ADULT LIVER, SIGNAL =   4; EXPRESSED IN BONE MARROW, SIGNAL = 2.8; EXPRESSED IN FETAL LIVER, SIGNAL = 4.1; EXPRESSED IN HELA, SIGNAL = 4.3; EXPRESSED IN HEART, SIGNAL = 3.3; EXPRESSED IN LUNG, SIGNAL = 2.5; SWISSPROT HIT: P40442, EVALUE 7.20e-02; EST_HUMAN HIT: AA557683.1, EVALUE 3.00e-71; NT HIT: AL163249.2, EVALUE 3.00e-55
aatcttgctgctgctcactctttgggtccacactgcctttatgagctgtaacaccaagaaggtctgcagcttcactcctgaggccatcgagaccacgaacccaccgcgaggaatgaacaactccagatgtgccaccttaagagctgtaacactaactgccaaggtctgcagcttcactcctgaagccagcgagaccatgagcccaccagaaggaagaaactctgcacacgtc

SEQ ID NO: 24823 - DNA, 163 bp, Homo sapiens
  MAP TO AC020763.3; EXPRESSED IN BRAIN, SIGNAL = 4.6; EXPRESSED IN ADULT LIVER, SIGNAL = 4.6; EXPRESSED IN HELA, SIGNAL = 4.8; EXPRESSED IN PLACENTA, SIGNAL = 4.1; EXPRESSED IN LUNG, SIGNAL = 6.4; EXPRESSED IN HEART, SIGNAL = 4.3; EXPRESSED IN FETAL LIVER, SIGNAL = 4.7; EXPRESSED IN BONE MARROW, SIGNAL = 3.6; SWISSPROT HIT: Q14117, EVALUE 1.30e+00; NT HIT: AL163202.2, EVALUE 5.80e+00
ggcagctagctacaccaggagagctggtgtcactgaagacatcatgacccttggcaacagcctgagcctcatagtggggacttcatacaacacctgtttgagaactcctaaatcaaatgagttagggaggccaactgcaaaagtggaactctccaactgcaac

SEQ ID NO: 24824 - DNA, 171 bp, Homo sapiens
  MAP TO AL137852.2; EXPRESSED IN BRAIN, SIGNAL = 3.2; EXPRESSED IN ADULT LIVER, SIGNAL = 1.6; EXPRESSED IN PLACENTA, SIGNAL = 4.4; EXPRESSED IN LUNG, SIGNAL = 6.1; EXPRESSED IN HEART, SIGNAL = 2.3; EXPRESSED IN HELA, SIGNAL = 2.8; EXPRESSED IN FETAL LIVER, SIGNAL = 3.7; EXPRESSED IN BONE MARROW, SIGNAL = 3.4; NT HIT: gi11429198, EVALUE 2.00e-71; EST_HUMAN HIT: BE018477.1, EVALUE 2.00e-71; SWISSPROT HIT: P54727, EVALUE 6.00e-10
atgggatatcttaaagcttggaaattctattacagggaatccctggagatagagaaagtcaggctgtggttgacccccctcaagcagctagtactggggctcctcagtcttcagcagtggctgcagctgcagcaactacgacagcaacaactacaacaacaagttctggag

SEQ ID NO: 24825 - DNA, 109 bp, Homo sapiens
  MAP TO AC008394.3; EXPRESSED IN BRAIN, SIGNAL = 2.2; EXPRESSED IN PLACENTA, SIGNAL = 1.9; EXPRESSED IN BONE MARROW, SIGNAL = 1.7; EXPRESSED IN ADULT LIVER, SIGNAL = 1.9; EXPRESSED IN FETAL LIVER, SIGNAL = 3.2; EXPRESSED IN HELA, SIGNAL = 3.3; EXPRESSED IN HEART, SIGNAL = 2.9; NT HIT: AL163249.2, EVALUE 7.00e-14; EST_HUMAN HIT: AA723404.1, EVALUE 7.00e-21
ttccacatggctggggaggactcgggaaacttacaatcatggctgaaggtgaaggagaagcaaggcataacttacatggcagcagcagagagagaaagtaatacagggg

SEQ ID NO: 24826 - DNA, 320 bp, Homo sapiens
  MAP TO AP001243.1; EXPRESSED IN PLACENTA, SIGNAL = 1.5; EXPRESSED IN BRAIN, SIGNAL =   2; EXPRESSED IN HELA, SIGNAL = 2.4; EXPRESSED IN ADULT LIVER, SIGNAL =   2; EXPRESSED IN BONE MARROW, SIGNAL = 5.3; EXPRESSED IN LUNG, SIGNAL = 5.4; EXPRESSED IN FETAL LIVER, SIGNAL =   2; EXPRESSED IN HEART, SIGNAL =   2; SWISSPROT HIT: P06310, EVALUE 1.00e-46; NT HIT: X12684.1, EVALUE 0.00e+00; EST_HUMAN HIT: AW404795.1, EVALUE 0.00e+00
gatccagtggggatattgtgatgacccagactccactctcctcacctgtcacccttggacagccggcctccatctcctgcaggtctagtcaaagcctcgtacacagtgatggaaacacctacttgagttggcttcagcagaggccaggccagcctccaagactcctaatttataagatttctaaccggttctctggggtcccagacagattcagtggcagtggggcagggacagatttcacactgaaaatcagcagggtggaagctgaggatgtcggggtttattactgcacgcaagctacacaatttcctcacacagtg

SEQ ID NO: 24827 - DNA, 117 bp, Homo sapiens
  MAP TO AC021881.2; EXPRESSED IN FETAL LIVER, SIGNAL = 5.5; EXPRESSED IN HEART, SIGNAL =  21; EXPRESSED IN LUNG, SIGNAL = 2.5; EXPRESSED IN BRAIN, SIGNAL =   3; EXPRESSED IN ADULT LIVER, SIGNAL = 2.2; EXPRESSED IN BONE MARROW, SIGNAL = 2.1; EXPRESSED IN HELA, SIGNAL = 6.5; EXPRESSED IN PLACENTA, SIGNAL = 2.2; SWISSPROT HIT: P00008, EVALUE 8.00e-14; NT HIT: M22878.1, EVALUE 1.00e-37; EST_HUMAN HIT: BF665190.1, EVALUE 4.00e-35
gagacaggtgaggccgttggatactcttacacagacaccaataagaacaaaggcatcacctggggaaaggatacactgatgcactatttggagactcccaagaagaacatccctgga

SEQ ID NO: 24828 - DNA, 100 bp, Homo sapiens
  MAP TO AC008843.4; EXPRESSED IN FETAL LIVER, SIGNAL = 1.9; EXPRESSED IN HEART, SIGNAL = 1.8; EXPRESSED IN PLACENTA, SIGNAL = 1.9; EXPRESSED IN BRAIN, SIGNAL =   2; EXPRESSED IN BONE MARROW, SIGNAL = 1.5; EXPRESSED IN LUNG, SIGNAL = 1.9; EXPRESSED IN ADULT LIVER, SIGNAL = 2.5; EXPRESSED IN HELA, SIGNAL = 2.7; NT HIT: U20790.1, EVALUE 5.40e-02
cccaatcttcatctcctcatctctgtaatcctctactgggacccctcccttggccatgaccaaatggagcccattttttgtggtccaagcagtcatcctt

SEQ ID NO: 24829 - DNA, 331 bp, Homo sapiens
  MAP TO AC008752.3; EXPRESSED IN BRAIN, SIGNAL = 3.2; EXPRESSED IN PLACENTA, SIGNAL = 2.9; EXPRESSED IN FETAL LIVER, SIGNAL = 5.9; EXPRESSED IN ADULT LIVER, SIGNAL = 3.7; EXPRESSED IN BONE MARROW, SIGNAL = 2.7; EXPRESSED IN HELA, SIGNAL = 5.7; EXPRESSED IN HEART, SIGNAL = 4.8; NT HIT: gi11424829, EVALUE 0.00e+00; SWISSPROT HIT: P51522, EVALUE 4.00e-07; EST_HUMAN HIT: BE293305.1, EVALUE 1.00e-126
acaagaagctacagtggatggaaactctgtaagaattgtgaagaggtcttcagggagctgtttttccttaagacacacatgagagctcagaatggagggaacacttttgagggtaattgttatggaaaagacacccttagtgtgcacaaagaagcctctattggacaggaactttctaaatttaatccatgtggaaaagtcttcaccctaactccaggccttgctgaacatcttgaagttctcaatgcaagacaaccgtacaaatgtaaggaatgtggaaaaggctttaagtgttttgcaagccttgataatcacatgggaattcacgctg

SEQ ID NO: 24830 - DNA, 347 bp, Homo sapiens
  MAP TO AL138827.2; EXPRESSED IN BRAIN, SIGNAL = 7.5; EXPRESSED IN PLACENTA, SIGNAL = 8.4; EXPRESSED IN HELA, SIGNAL =  10; EXPRESSED IN ADULT LIVER, SIGNAL = 8.6; EXPRESSED IN BONE MARROW, SIGNAL = 7.3; EXPRESSED IN HEART, SIGNAL = 9.2; EXPRESSED IN LUNG, SIGNAL = 7.1; EXPRESSED IN FETAL LIVER, SIGNAL =  10; SWISSPROT HIT: P28566, EVALUE 4.00e-62; NT HIT: gi4504536, EVALUE 0.00e+00; EST_HUMAN HIT: AI140902.1, EVALUE 3.20e-01
accctaccacagagtttgaaaagttccatgcctccatcaggatcccccccttcgacaatgatctagatcacccaggagaacgtcagcagatctctagcaccagggaacggaaggcagcacgcatcctggggctgattctgggtgcattcattttatcctggctgccatttttcatcaaagagttgattgtgggtctgagcatctacaccgtgtcctcggaagtggccgactttctgacgtggctcggttatgtgaattctctgatcaaccctctgctctatacgagttttaatgaagactttaagctggcttttaaaaagctcattagatgccgagagcatacttag

SEQ ID NO: 24831 - DNA, 272 bp, Homo sapiens
  MAP TO AL135931.4; EXPRESSED IN BRAIN, SIGNAL = 3.7; EXPRESSED IN HELA, SIGNAL = 2.8; EXPRESSED IN PLACENTA, SIGNAL = 2.7; EXPRESSED IN LUNG, SIGNAL = 2.6; EXPRESSED IN HEART, SIGNAL = 2.7; EXPRESSED IN FETAL LIVER, SIGNAL = 2.9; EXPRESSED IN BONE MARROW, SIGNAL = 2.7; EXPRESSED IN ADULT LIVER, SIGNAL = 3.5; SWISSPROT HIT: O73691, EVALUE 6.80e-01; NT HIT: AB020666.2, EVALUE 0.00e+00; EST_HUMAN HIT: AI991827.1, EVALUE 0.00e+00
gtgtttttattctcaaccttgtgtgccgagacttggggctaaaagactcagtgctggctgggctcaaggcagtgttccccctcctatatgtccggcgaattgagggtgaagtgaatgagatcctgttctgtcagctgcaccctgagcaaaaacttgccacaccagagctcctagaaacagcccaggctttggagcggaccctgaggaagcctgggaggggttgggatgacacgtatgtcttgtcagatatgctcaagacggtgaaaattgtg

SEQ ID NO: 24832 - DNA, 311 bp, Homo sapiens
  MAP TO AC016026.12; EXPRESSED IN BRAIN, SIGNAL = 3.2; EXPRESSED IN PLACENTA, SIGNAL =   3; EXPRESSED IN ADULT LIVER, SIGNAL = 3.3; EXPRESSED IN BONE MARROW, SIGNAL = 2.9; EXPRESSED IN HELA, SIGNAL = 3.8; EXPRESSED IN HEART, SIGNAL = 2.7; EXPRESSED IN FETAL LIVER, SIGNAL = 3.4; EST_HUMAN HIT: AI392850.1, EVALUE 1.00e-107; SWISSPROT HIT: P05095, EVALUE 8.00e-08; NT HIT: AB037785.1, EVALUE 1.00e-107
ttggtggcactgctgcgggacagtcggaaggaaggaagaacagccgggccacagcacagcagcagggggccgcaaagcagctccttccaggccttaccgctagaggggagggagtccttaaacatctcgtagaactgagtcaggtacatcaccatggacagcttatcaggctcccccacggaggccatttctttgcctgtcatgatgggagaaatgcccaattccttctcagcaatgtcaaaggccagttggttattcttctccacattttgctcatccaaagaatcaaaatctctgagaaacaggacaag

SEQ ID NO: 24833 - DNA, 244 bp, Homo sapiens
  MAP TO AC023490.4; EXPRESSED IN PLACENTA, SIGNAL = 2.8; EXPRESSED IN BONE MARROW, SIGNAL = 3.1; EXPRESSED IN HELA, SIGNAL = 4.3; EXPRESSED IN ADULT LIVER, SIGNAL = 3.9; EXPRESSED IN BRAIN, SIGNAL = 3.4; EXPRESSED IN LUNG, SIGNAL = 2.3; EXPRESSED IN HEART, SIGNAL = 3.4; EXPRESSED IN FETAL LIVER, SIGNAL = 4.1; NT HIT: gi11427757, EVALUE 1.00e-97; SWISSPROT HIT: P29400, EVALUE 1.40e-01; EST_HUMAN HIT: BE531263.1, EVALUE 2.00e-20
cccgggctgtgcggctccactctttaccttcaggtactcctggatggcctcctcaatgtcccggtccacggaatcgtcactgtctgaatctagcaccaatgggccaaagtctgcagtttcctcctcccccacggggtcaaagtcagcaacaagaccacaggcagccaacgcaggcagctccttgtgcatggtgggcttggcagcaggcctggcgtcgtggcatccctctgccccctctgcgcag

SEQ ID NO: 24834 - DNA, 409 bp, Homo sapiens
  MAP TO AF233390.1; EXPRESSED IN BRAIN, SIGNAL = 4.5; EXPRESSED IN PLACENTA, SIGNAL = 3.2; EXPRESSED IN ADULT LIVER, SIGNAL =   2; EXPRESSED IN BONE MARROW, SIGNAL = 1.6; EXPRESSED IN FETAL LIVER, SIGNAL = 2.6; EXPRESSED IN HELA, SIGNAL =   3; EXPRESSED IN HEART, SIGNAL =   3; EXPRESSED IN LUNG, SIGNAL = 5.4; EST_HUMAN HIT: BE882109.1, EVALUE 0.00e+00; NT HIT: gi11424187, EVALUE 0.00e+00; SWISSPROT HIT: P03291, EVALUE 1.60e-01
aagatggtgccaatttcaatctcgtgagaagccatgcgtccttccagagactcaaacctctccacagtgcggttctgggcgtagtgggtatggtactgaagatcatgcatgttctcttcgtggtcatccaggaaggacgagatgttatccagctgcagctgcaagcccatgacctggagtaccaggtcgtgcatgctctctgagttctggctgatgcgctgtgaggaggcccccagggtggcctggatgttcttgaccgcctctccagtcttggtggaggtggtgcgcaggccgctgaagagccgtgtgtagttctgccagtcggtgacaatcttctggagggtcagggtctcctcgtctgtcttccgctggatcccgtggatccactcggaagtctgccccacggtga

SEQ ID NO: 24835 - DNA, 131 bp, Homo sapiens
  MAP TO AC023392.2; EXPRESSED IN BONE MARROW, SIGNAL = 3.8; EXPRESSED IN FETAL LIVER, SIGNAL = 4.1; EXPRESSED IN HEART, SIGNAL = 3.4; EXPRESSED IN LUNG, SIGNAL = 4.4; EXPRESSED IN PLACENTA, SIGNAL = 3.1; EXPRESSED IN BRAIN, SIGNAL = 3.1; EXPRESSED IN HELA, SIGNAL = 4.1; EXPRESSED IN ADULT LIVER, SIGNAL = 3.1; SWISSPROT HIT: P14359, EVALUE 1.80e+00; NT HIT: AF068942.1, EVALUE 1.10e+00
atgaaaaagatccaggttgaaaatgttgctttcaactggagtgatgagataacatttcgggaaacaactgtgaaccaaccttggaaaggcaagcaagattgtaatcagaatattaagctggtggggaggaa

SEQ ID NO: 24836 - DNA, 157 bp, Homo sapiens
  MAP TO AC010253.2; EXPRESSED IN ADULT LIVER, SIGNAL = 1.8; EXPRESSED IN HEART, SIGNAL =   2; EXPRESSED IN BRAIN, SIGNAL = 1.6; EXPRESSED IN PLACENTA, SIGNAL = 1.3; EXPRESSED IN FETAL LIVER, SIGNAL = 1.9; EXPRESSED IN HELA, SIGNAL = 1.9; NT HIT: X15233.1, EVALUE 3.60e-01; SWISSPROT HIT: P80046, EVALUE 5.20e+00; EST_HUMAN HIT: AA811480.1, EVALUE 1.40e-01
aggctgccggccttttctaccccaaagtgacagccactgtgcttatcatccgggaacagcctcaccacacaaagccacccatgtttgcagacctcatcatcactgccatggtggtcataacagcagccactcccaccactcactgggaggagctcca

SEQ ID NO: 24837 - DNA, 233 bp, Homo sapiens
  MAP TO AC008403.3; EXPRESSED IN ADULT LIVER, SIGNAL = 3.2; EXPRESSED IN HELA, SIGNAL = 5.1; EXPRESSED IN HEART, SIGNAL = 5.9; EXPRESSED IN BRAIN, SIGNAL = 3.5; EXPRESSED IN PLACENTA, SIGNAL = 3.5; EXPRESSED IN BONE MARROW, SIGNAL = 3.4; EXPRESSED IN FETAL LIVER, SIGNAL = 5.5; EXPRESSED IN LUNG, SIGNAL = 2.7; NT HIT: gi11425254, EVALUE 1.00e-128; SWISSPROT HIT: Q03391, EVALUE 3.00e-41; EST_HUMAN HIT: AW090307.1, EVALUE 1.00e-49
cctggagaaggccagcaggaagtccatgcggtgggtgggccccaggcagtgccgcaggcgccagtacaccaggtgctcccaggcgaagaccagcagggacaggcccatggccaccaggagcatgtagaagacgcccgccatgttgtcgatgtccagcttgctgctcatcacctcgattttgtcattgtggcagatcccagagagccacagccgctccagcatctcgatctcat

SEQ ID NO: 24838 - DNA, 360 bp, Homo sapiens
  MAP TO AC018711.2; EXPRESSED IN ADULT LIVER, SIGNAL = 7.8; EXPRESSED IN FETAL LIVER, SIGNAL =  16; EXPRESSED IN HELA, SIGNAL =  14; EXPRESSED IN PLACENTA, SIGNAL = 6.1; EXPRESSED IN BONE MARROW, SIGNAL =  21; EXPRESSED IN HEART, SIGNAL =  11; EXPRESSED IN LUNG, SIGNAL =  21; EXPRESSED IN BRAIN, SIGNAL = 8.2; SWISSPROT HIT: P24049, EVALUE 2.00e-38; NT HIT: gi4506616, EVALUE 0.00e+00; EST_HUMAN HIT: BE891630.1, EVALUE 0.00e+00
atggttgcgttggttggtgtgcccaggccaagcagtggggctggacaaggtcagtggcccaaaaagcttgctgaatttttgctacacatgcttaaaaatgcagagagtaatgctgaacttaagggtttagatgtagattctctggtcgttgggcatatcaaagtgaacaaagcacctaagatgcgccgctggacctgcagagctcatggtcggattaacccatacgtgagctctctctgccacattgagatgatccttactgaaaaggaacagattgttcctaaaccagaagaggagggtgcccagaagaaaaagttatcccagaagaaactgaagaaacaaaaacttatgacacaggag

SEQ ID NO: 24839 - DNA, 152 bp, Homo sapiens
  MAP TO AC003676.1; EXPRESSED IN BRAIN, SIGNAL = 2.5; EXPRESSED IN PLACENTA, SIGNAL =   2; EXPRESSED IN HELA, SIGNAL = 2.8; EXPRESSED IN ADULT LIVER, SIGNAL = 2.5; EXPRESSED IN BONE MARROW, SIGNAL = 2.2; EXPRESSED IN LUNG, SIGNAL = 3.5; EXPRESSED IN FETAL LIVER, SIGNAL = 2.7; EXPRESSED IN HEART, SIGNAL = 2.6; NT HIT: L04758.1, EVALUE 8.70e-02; SWISSPROT HIT: O60610, EVALUE 1.80e+00
atggccacattccccgcccagaggatgacttggaggagcccagagagaccctccaaggcaaggcggtggcttatgcaagagaaggcaagatatggtactcttgggaccacttacagacacactcctctcaaatgaaggagcactcgctaaaa

SEQ ID NO: 24840 - DNA, 307 bp, Homo sapiens
  MAP TO AC005323.1; EXPRESSED IN BRAIN, SIGNAL = 1.7; EXPRESSED IN FETAL LIVER, SIGNAL = 2.4; EXPRESSED IN HELA, SIGNAL = 1.9; EXPRESSED IN BONE MARROW, SIGNAL = 4.6; EXPRESSED IN LUNG, SIGNAL = 1.7; EXPRESSED IN PLACENTA, SIGNAL = 1.6; EXPRESSED IN HEART, SIGNAL =  22; EXPRESSED IN ADULT LIVER, SIGNAL = 2.4; NT HIT: gi8923939, EVALUE 0.00e+00; SWISSPROT HIT: P13535, EVALUE 5.00e-50; EST_HUMAN HIT: F00185.1, EVALUE 1.00e-86
cttcagcagtttgagccccagagaagagctgagctagagttttcattgcagacttctggtacagtccaaccacggtctcattcagggggtccttgttcttctccagccagccagtaatgttgtagtccacaacaccagcatagtgaatcagagcgaagtgggcctcggccttgcctttgaccaccttgggcttctggaagttggcagacttgcccaggtgctggtcatacagcttgttcttgaaggaggtgtctgttgccttagggaacatgcactcctcttccaggatggagaagatgcccatagg

SEQ ID NO: 24841 - DNA, 176 bp, Homo sapiens
  MAP TO AL049872.3; EXPRESSED IN BRAIN, SIGNAL = 1.3; EXPRESSED IN PLACENTA, SIGNAL = 1.6; EXPRESSED IN HEART, SIGNAL = 2.4; EXPRESSED IN LUNG, SIGNAL = 6.4; EXPRESSED IN ADULT LIVER, SIGNAL = 1.6; EXPRESSED IN HELA, SIGNAL = 1.8; EXPRESSED IN FETAL LIVER, SIGNAL = 1.8; SWISSPROT HIT: Q9WVH9, EVALUE 1.00e-17; EST_HUMAN HIT: BF331510.1, EVALUE 3.00e-55; NT HIT: AF112152.1, EVALUE 8.00e-95
tgagagtggtggggcagctgctgggtacggacctgagtagggggtcgagtaggggttcgagtagggccctcgatacacagggtttgtccggggaatgcataaatacccgccattttggttaacacacatcatgtctcctcggcaggcctcggggatggttcggcattcatcaatat

SEQ ID NO: 24842 - DNA, 114 bp, Homo sapiens
  MAP TO AC021097.3; EXPRESSED IN BRAIN, SIGNAL = 2.4; EXPRESSED IN ADULT LIVER, SIGNAL = 2.5; EXPRESSED IN BONE MARROW, SIGNAL = 1.5; EXPRESSED IN FETAL LIVER, SIGNAL = 1.7; EXPRESSED IN HEART, SIGNAL = 2.9; EXPRESSED IN LUNG, SIGNAL = 2.1; NT HIT: AJ005029.1, EVALUE 9.90e-01; SWISSPROT HIT: P31651, EVALUE 2.40e+00; EST_HUMAN HIT: BE384957.1, EVALUE 5.70e+00
  unsure 29
ctgcagagtttcaggagtcaccaggccgncggcctcctcgggaagctgcacaacactgtaggtgttcatcaggacctcgatggtccgagggcacgtgctccagcgctccagcac

SEQ ID NO: 24843 - DNA, 84 bp, Homo sapiens
  MAP TO AC008752.3; EXPRESSED IN BRAIN, SIGNAL =   3; EXPRESSED IN PLACENTA, SIGNAL =   2; EXPRESSED IN FETAL LIVER, SIGNAL = 3.1; EXPRESSED IN LUNG, SIGNAL = 5.7; EXPRESSED IN BONE MARROW, SIGNAL = 1.7; EXPRESSED IN HELA, SIGNAL = 1.9; EXPRESSED IN HEART, SIGNAL = 4.1; NT HIT: AF318186.1, EVALUE 2.00e-07; EST_HUMAN HIT: AW841585.1, EVALUE 4.00e-40
cacttcttcaggacaatcttgttccaacgggtaccagtttgggctgcaatcagcttcttaaggtccccgatggtatcatccgtg

SEQ ID NO: 24844 - DNA, 210 bp, Homo sapiens
  MAP TO AC008860.5; EXPRESSED IN BRAIN, SIGNAL = 7.6; EXPRESSED IN ADULT LIVER, SIGNAL = 3.7; EXPRESSED IN BONE MARROW, SIGNAL = 3.4; EXPRESSED IN FETAL LIVER, SIGNAL = 3.8; EXPRESSED IN LUNG, SIGNAL = 4.5; EXPRESSED IN HEART, SIGNAL = 3.5; EXPRESSED IN PLACENTA, SIGNAL = 4.2; EXPRESSED IN HELA, SIGNAL = 3.5; SWISSPROT HIT: P10463, EVALUE 2.00e-21; EST_HUMAN HIT: AW571544.1, EVALUE 1.00e-115; NT HIT: gi11416769, EVALUE 3.20e-02
caatccatctttgtcatagggtgaatcaaagttatccagaaatttcctaaatacttgttcctcactccattccccattctggtactttgggtggtgttttgcattatatacttcacgaaggtcttcgattgttataacaccatctccagtcttgtctaactttctaaaagcttgcatgattacctcttttctggctctggacattggagg

SEQ ID NO: 24845 - DNA, 237 bp, Homo sapiens
  MAP TO AC008917.3; EXPRESSED IN BRAIN, SIGNAL = 3.2; EXPRESSED IN PLACENTA, SIGNAL = 3.5; EXPRESSED IN HELA, SIGNAL = 8.5; EXPRESSED IN ADULT LIVER, SIGNAL = 3.8; EXPRESSED IN BONE MARROW, SIGNAL = 3.9; EXPRESSED IN FETAL LIVER, SIGNAL = 5.1; EXPRESSED IN LUNG, SIGNAL = 3.8; EXPRESSED IN HEART, SIGNAL = 3.9; NT HIT: gi11424140, EVALUE 1.00e-128; SWISSPROT HIT: P33551, EVALUE 4.00e-36; EST_HUMAN HIT: AA926959.1, EVALUE 1.00e-128
atgtcgcacaaacaaatttactattcggacaaatacgatgacgaggagtttgagtatcgacatgtcatgctgcccaaggacatagccaagctggtccctaaaacccatctgatgtctgaatctgaatggaggaatcttggcgttcagcagagtcagggatgggtccattatatgatccatgaaccagaacctcacatcttgctgttccggcgcccactacccaagaaaccaaagaaa

SEQ ID NO: 24846 - DNA, 197 bp, Homo sapiens
  MAP TO AC007845.12; EXPRESSED IN BONE MARROW, SIGNAL = 3.3; EXPRESSED IN FETAL LIVER, SIGNAL = 4.2; EXPRESSED IN HEART, SIGNAL = 3.7; EXPRESSED IN BRAIN, SIGNAL = 3.9; EXPRESSED IN ADULT LIVER, SIGNAL = 3.8; EXPRESSED IN HELA, SIGNAL = 4.5; EXPRESSED IN LUNG, SIGNAL = 3.9; EXPRESSED IN PLACENTA, SIGNAL = 3.1; NT HIT: gi11526299, EVALUE 6.00e-99; EST_HUMAN HIT: R09650.1, EVALUE 9.00e-99; SWISSPROT HIT: P55957, EVALUE 1.00e-21
ggttctggttaataaaattcactgttgtgtgaaagacatcacggagcaaggacggcgtgtgactggccaccttcttggccagcagcagggccagcaccagcatggtcttctccttctccatgtctctagggtaggcctgcagcagctgctccagggcagtggccaggtccctgttccggtcctgcacagaggggcac

SEQ ID NO: 24847 - DNA, 105 bp, Homo sapiens
  MAP TO AC023153.2; EXPRESSED IN BRAIN, SIGNAL =   5; EXPRESSED IN PLACENTA, SIGNAL = 4.8; EXPRESSED IN HELA, SIGNAL = 7.4; EXPRESSED IN ADULT LIVER, SIGNAL = 5.1; EXPRESSED IN BONE MARROW, SIGNAL = 4.2; EXPRESSED IN FETAL LIVER, SIGNAL =  10; EXPRESSED IN HEART, SIGNAL = 7.4; EXPRESSED IN LUNG, SIGNAL = 3.5; NT HIT: U47862.1, EVALUE 3.50e+00; SWISSPROT HIT: Q63425, EVALUE 4.20e+00; EST_HUMAN HIT: T19586.1, EVALUE 5.00e-03
tatcatctactttgtggtagatagaatcatggaagagagaaatattcaattcaacagtaatggttggaaattttaatataccatcttcaatgatgagtgagtcaa

SEQ ID NO: 24848 - DNA, 145 bp, Homo sapiens
  MAP TO AC008873.4; EXPRESSED IN BRAIN, SIGNAL = 3.1; EXPRESSED IN PLACENTA, SIGNAL = 3.3; EXPRESSED IN BONE MARROW, SIGNAL = 2.9; EXPRESSED IN HEART, SIGNAL = 2.7; EXPRESSED IN ADULT LIVER, SIGNAL = 2.4; EXPRESSED IN FETAL LIVER, SIGNAL = 2.9; EXPRESSED IN HELA, SIGNAL = 2.7; EXPRESSED IN LUNG, SIGNAL = 3.2; SWISSPROT HIT: Q52883, EVALUE 2.30e+00; NT HIT: X63953.1, EVALUE 3.30e-01; EST_HUMAN HIT: AA913789.1, EVALUE 4.90e-01
agccagccagggtgctcaagtccagctaggcctggcatgctgttccctggacagggttggtattcagtccagcaaacgtatgaggcatgtatggtgtcaaatactgtggaggacacgacaatgtccaagtcatagttcctgccct

SEQ ID NO: 24849 - DNA, 300 bp, Homo sapiens
  MAP TO AC015971.2; EXPRESSED IN BRAIN, SIGNAL = 2.5; EXPRESSED IN PLACENTA, SIGNAL =   2; EXPRESSED IN FETAL LIVER, SIGNAL = 2.9; EXPRESSED IN ADULT LIVER, SIGNAL = 2.4; EXPRESSED IN BONE MARROW, SIGNAL = 2.2; EXPRESSED IN HELA, SIGNAL = 2.6; EXPRESSED IN HEART, SIGNAL =   3; EXPRESSED IN LUNG, SIGNAL = 3.2; EST_HUMAN HIT: BF218030.1, EVALUE 4.00e-22; SWISSPROT HIT: P98167, EVALUE 3.70e-01
ggaggacggagaacagacggctcctccggcagacgcgacccggcccgctccaaacaacgcttcgggcaggagaaggttctccgggtggtccgcagccgggctggaggggtggggcctacgctgggaaaaggttccgggcgggtcgtaccaacgcgcgcagggggaagaggtttccgaggccaggacggtgtcgctgcctacgcgctcagtggcgaggtggagaaactcttcatccaccctcggctacctgttcgagagccatggcaccaggagctctcgcgtcccacagccgactcctaa

SEQ ID NO: 24850 - DNA, 199 bp, Homo sapiens
  MAP TO AC021036.3; EXPRESSED IN PLACENTA, SIGNAL =   2; EXPRESSED IN ADULT LIVER, SIGNAL = 1.9; EXPRESSED IN FETAL LIVER, SIGNAL = 2.2; EXPRESSED IN HELA, SIGNAL = 2.3; EXPRESSED IN HEART, SIGNAL = 2.4; EXPRESSED IN BRAIN, SIGNAL = 2.5; EXPRESSED IN LUNG, SIGNAL = 4.9; EXPRESSED IN BONE MARROW, SIGNAL = 1.7; NT HIT: gi4757853, EVALUE 2.00e-95; SWISSPROT HIT: P36894, EVALUE 3.00e-30; EST_HUMAN HIT: BE011659.1, EVALUE 4.00e-95
tcagaaactactcaaactcccacctcctgtgatacaacgacgagccatctcccaaatgattaggccgaagctgtagatgtcagccatgatgtagggctggaagtggtttttgttcaggctttcgtccagcacttcgggagccatgtagcgtttggtgcccaccctggtattcaagggcacatcaacttcatttgtgtca

SEQ ID NO: 24851 - DNA, 212 bp, Homo sapiens
  MAP TO AC008905.3; EXPRESSED IN BRAIN, SIGNAL = 4.1; EXPRESSED IN PLACENTA, SIGNAL = 4.5; EXPRESSED IN BONE MARROW, SIGNAL = 6.1; EXPRESSED IN LUNG, SIGNAL = 5.2; EXPRESSED IN ADULT LIVER, SIGNAL = 3.6; EXPRESSED IN FETAL LIVER, SIGNAL = 6.8; EXPRESSED IN HELA, SIGNAL = 8.1; EXPRESSED IN HEART, SIGNAL = 3.5; EST_HUMAN HIT: AA313621.1, EVALUE 2.00e-84; NT HIT: gi11432444, EVALUE 6.00e-87; SWISSPROT HIT: Q01105, EVALUE 6.00e-32
aagaggtcagaattgatctccaaaatcccagatttttgggtaacaatatttgtcaatcatccagaagtgtctgcactgcctggggaggaggacgaagaggcactgcattatttgaccagagttgaaatgacagactttgatgatattaaatcaggttacagaatagatttttattttgatgaaaatccttactttgaaaataacattctcgc

SEQ ID NO: 24852 - DNA, 166 bp, Homo sapiens
  MAP TO AL157822.2; EXPRESSED IN BRAIN, SIGNAL = 1.4; EXPRESSED IN FETAL LIVER, SIGNAL =   2; EXPRESSED IN HELA, SIGNAL =   2; EXPRESSED IN HEART, SIGNAL = 2.2; SWISSPROT HIT: O59823, EVALUE 1.50e-01; NT HIT: AF036405.1, EVALUE 3.00e-26; EST_HUMAN HIT: AW887541.1, EVALUE 5.00e-23
acaaacagatatatgtataccctgaagcatgtctttgaagaattggaacaggtgatgaaatatgactttaccaggatgatcctgaagacaaagcacaatcaacacaaggctaccaagaggtggaagtggtccagtcaaagtagaaatagcctggtcaagggcaaat

SEQ ID NO: 24853 - DNA, 119 bp, Homo sapiens
  MAP TO AC020714.2; EXPRESSED IN BRAIN, SIGNAL = 2.8; EXPRESSED IN PLACENTA, SIGNAL = 3.2; EXPRESSED IN ADULT LIVER, SIGNAL = 2.7; EXPRESSED IN BONE MARROW, SIGNAL =  11; EXPRESSED IN FETAL LIVER, SIGNAL =  12; EXPRESSED IN HELA, SIGNAL =  25; EXPRESSED IN HEART, SIGNAL = 6.2; EXPRESSED IN LUNG, SIGNAL = 4.5; NT HIT: M26697.1, EVALUE 6.00e-27; EST_HUMAN HIT: BE785327.1, EVALUE 8.00e-27
aagtatatctggaaagcagtctacccctggaggtggtagcaaggttccaaagaaaaaagtaaaacttgctgctgctgaagatgatgaagatgatgatgatgagtttgatgatgaggaag

SEQ ID NO: 24854 - DNA, 404 bp, Homo sapiens
  MAP TO AC010369.3; EXPRESSED IN ADULT LIVER, SIGNAL = 3.3; EXPRESSED IN HELA, SIGNAL =  12; EXPRESSED IN PLACENTA, SIGNAL =  22; EXPRESSED IN BRAIN, SIGNAL = 1.3; EXPRESSED IN FETAL LIVER, SIGNAL = 6.9; EXPRESSED IN HEART, SIGNAL = 1.9; EXPRESSED IN LUNG, SIGNAL =  13; SWISSPROT HIT: P05787, EVALUE 6.00e-47; EST_HUMAN HIT: BE903304.1, EVALUE 0.00e+00; NT HIT: M26512.1, EVALUE 0.00e+00
gggacccagaagtcctacaaggtgtccacctctggcccccgggccttcagcagccactcctacacaagtgggcccggtgcccacatcagctcctcaagcttctcccaagtgggcagcagctgctttcggggtggcctgggcggcggctgtggtggggccagcggcatgggaggcatcaccgcggtcacagtcaaccagagcctgctgagcccccttgtcctggaggtggaccccgacatccaggctgtgtgcacccaggagaaggagcagatcaagaccctcaacaacaagtttgcctccttcatagacaaggtacggttcctggagcagcagaacaagatgctggagaccaagtggagcctcctgcagcagcagaagacggccgggagcaacatggacaacat

SEQ ID NO: 24855 - DNA, 202 bp, Homo sapiens
  MAP TO AC018897.2; EXPRESSED IN BONE MARROW, SIGNAL = 1.7; EXPRESSED IN HEART, SIGNAL =   2; EXPRESSED IN BRAIN, SIGNAL = 1.9; EXPRESSED IN ADULT LIVER, SIGNAL = 2.4; EXPRESSED IN FETAL LIVER, SIGNAL =   2; EXPRESSED IN HELA, SIGNAL =   2; EXPRESSED IN LUNG, SIGNAL = 1.8; EXPRESSED IN PLACENTA, SIGNAL = 1.9; SWISSPROT HIT: P42687, EVALUE 6.50e+00; NT HIT: X83502.1, EVALUE 4.80e-01
atgccaactgaacagaagagctttggtgagatgacagaggctagaatttttagcatccctccctctagcctttctggcccagcagattcctttgctatcactcattctatagcttcagtgtcacagggtcaagctggcctcagtgtgaacaagaaacaatctcactatgtcattcatgaagctgacgttctgtgtgtgacag

SEQ ID NO: 24856 - DNA, 80 bp, Homo sapiens
  MAP TO AL121913.4; EXPRESSED IN ADULT LIVER, SIGNAL = 4.8; EXPRESSED IN HELA, SIGNAL = 6.2; EXPRESSED IN PLACENTA, SIGNAL = 3.9; EXPRESSED IN BONE MARROW, SIGNAL = 3.4; EXPRESSED IN FETAL LIVER, SIGNAL = 6.3; EXPRESSED IN HEART, SIGNAL = 5.4; EXPRESSED IN LUNG, SIGNAL = 3.6; EXPRESSED IN BRAIN, SIGNAL = 4.9; EST_HUMAN HIT: BE179543.1, EVALUE 6.10e-02
aactgtgggaggatcaatgctgcttgaagccatcggtttctgggaatttgtcacagcagcccaggaaacacatgcagaag

SEQ ID NO: 24857 - DNA, 200 bp, Homo sapiens
  MAP TO AC002041.1; EXPRESSED IN BRAIN, SIGNAL = 1.6; EXPRESSED IN PLACENTA, SIGNAL = 2.1; EXPRESSED IN BONE MARROW, SIGNAL = 1.8; EXPRESSED IN HEART, SIGNAL = 2.1; EXPRESSED IN LUNG, SIGNAL = 5.8; EXPRESSED IN FETAL LIVER, SIGNAL = 2.8; EST_HUMAN HIT: AI224931.1, EVALUE 5.00e-85; NT HIT: gi5729867, EVALUE 1.00e-87; SWISSPROT HIT: Q02817, EVALUE 8.70e-02
agaaccctgaagtggggggcctcatggcggtcctggctgtgattggaggcatcgatggtcgcctgtgcctgggcggccaaattgtgcacgatgagtttggagaaggcactgtgactggcatcaccccgaagggcaaaatcaccgtgcagttctctgacatgcggacgtgtcacatttgcccattgaatcagctgaaacca

SEQ ID NO: 24858 - DNA, 462 bp, Homo sapiens
  MAP TO AC020559.2; EXPRESSED IN BRAIN, SIGNAL = 3.6; EXPRESSED IN PLACENTA, SIGNAL = 9.5; EXPRESSED IN HELA, SIGNAL = 7.3; EXPRESSED IN LUNG, SIGNAL = 5.6; EXPRESSED IN ADULT LIVER, SIGNAL = 4.8; EXPRESSED IN BONE MARROW, SIGNAL =   4; EXPRESSED IN FETAL LIVER, SIGNAL = 3.5; EXPRESSED IN HEART, SIGNAL = 3.1; EST_HUMAN HIT: AI792759.1, EVALUE 1.00e-103; NT HIT: X91195.1, EVALUE 1.00e-99; SWISSPROT HIT: Q50634, EVALUE 6.00e-03
ctgcaccaaaggcatatcctagctttattaaaggtcctgcgccacagagtcaacataaaaacacaaaaagtctcatcggtttaataacaatgaagaaccccaaaaatggaaaacgaagggggcaggggaagagacctgctcatggcactgagcctggccacagggtccgctggtattgctcttgctatgaggtcggggggacagtgattgtcctgagccaccattcacctgggtcaaggaccctcacttcttctggggtgtgctcagcttctgcatgccccggatcttgtccagcaggtcagggatgaaggcctcggtgggtttgtaacagtcaaccagcagctcctcgaccctggcagcctgggcatcctcactctccatgtccaggagttcatccacgtcaatctccagttctgggatctccttttcctggcagtcggggagttgtgtcagctgctccat

SEQ ID NO: 24859 - DNA, 152 bp, Homo sapiens
  MAP TO AL137858.1; EXPRESSED IN ADULT LIVER, SIGNAL = 3.7; EXPRESSED IN HELA, SIGNAL = 3.5; EXPRESSED IN HEART, SIGNAL =   3; EXPRESSED IN LUNG, SIGNAL = 2.3; EXPRESSED IN BRAIN, SIGNAL = 2.8; EXPRESSED IN BONE MARROW, SIGNAL = 2.5; EXPRESSED IN PLACENTA, SIGNAL = 2.6; EXPRESSED IN FETAL LIVER, SIGNAL =   4; EST_HUMAN HIT: BE906695.1, EVALUE 5.10e-01; NT HIT: X61084.1, EVALUE 3.50e-01; SWISSPROT HIT: P15833, EVALUE 1.40e+00
ataattggcagccacctgggagacaaatcttgggggatgagcaggaatcaaaggggctctgatgggaagaagactcagacagcagggagctcaacaaatatcctgaagttaattgggcctttcccacgactgctgctgctgctgctgctgag

SEQ ID NO: 24860 - DNA, 141 bp, Homo sapiens
  MAP TO AC018720.2; EXPRESSED IN PLACENTA, SIGNAL = 1.7; EXPRESSED IN BONE MARROW, SIGNAL = 4.1; EXPRESSED IN FETAL LIVER, SIGNAL =   2; EXPRESSED IN HELA, SIGNAL =   2; EXPRESSED IN ADULT LIVER, SIGNAL = 2.1; EXPRESSED IN HEART, SIGNAL = 1.9; EXPRESSED IN BRAIN, SIGNAL = 2.6; EXPRESSED IN LUNG, SIGNAL = 5.4; NT HIT: Y09420.1, EVALUE 5.00e-74; EST_HUMAN HIT: AW119175.1, EVALUE 6.00e-62; SWISSPROT HIT: P47806, EVALUE 2.40e+00
aacccacccaacttcctgcgagcctcagccctgtcagaacatatcagccctgtggtggtgatccctgcagaggcctcatcccccgacagcgagccagtcctagagaaggatgacctcatggacatggatgcctctcagcag

SEQ ID NO: 24861 - DNA, 89 bp, Homo sapiens
  MAP TO AL138770.1; EXPRESSED IN BONE MARROW, SIGNAL = 5.1; EXPRESSED IN HELA, SIGNAL = 4.6; EXPRESSED IN LUNG, SIGNAL = 4.9; EXPRESSED IN BRAIN, SIGNAL = 5.7; EXPRESSED IN PLACENTA, SIGNAL = 4.4; EXPRESSED IN ADULT LIVER, SIGNAL = 5.5; EXPRESSED IN FETAL LIVER, SIGNAL = 4.5; EXPRESSED IN HEART, SIGNAL = 3.9; EST_HUMAN HIT: AW966778.1, EVALUE 2.80e-01; NT HIT: AF019107.1, EVALUE 1.80e-01
aaatgccattgaaattattttctttgatccttttattggtgctaaacgatggtgcttcttagttgcaataatagctacagacaagaaag

SEQ ID NO: 24862 - DNA, 120 bp, Homo sapiens
  MAP TO AL159141.1; EXPRESSED IN FETAL LIVER, SIGNAL = 1.7; EXPRESSED IN PLACENTA, SIGNAL = 1.4; EXPRESSED IN ADULT LIVER, SIGNAL = 1.7; EXPRESSED IN BONE MARROW, SIGNAL = 1.9; EXPRESSED IN HELA, SIGNAL =   2; EXPRESSED IN HEART, SIGNAL = 2.1; SWISSPROT HIT: P97680, EVALUE 2.40e+00; EST_HUMAN HIT: AU119105.1, EVALUE 6.00e-31
ctcacccagggcccttcttgtgtctccccagtattgtacctggaaggctcggctcttgtgtttgaggacatcttcagattgattgcgttctactgtgtcagtaggtgagtagacccggcc

SEQ ID NO: 24863 - DNA, 88 bp, Homo sapiens
  MAP TO AC022432.2; EXPRESSED IN BRAIN, SIGNAL =   4; EXPRESSED IN FETAL LIVER, SIGNAL = 5.2; EXPRESSED IN PLACENTA, SIGNAL = 3.3; EXPRESSED IN LUNG, SIGNAL = 2.9; EXPRESSED IN HEART, SIGNAL = 4.8; EXPRESSED IN HELA, SIGNAL = 6.7; EXPRESSED IN BONE MARROW, SIGNAL = 3.4; EXPRESSED IN ADULT LIVER, SIGNAL = 3.6; SWISSPROT HIT: P53756, EVALUE 3.20e+00; NT HIT: U82623.1, EVALUE 7.20e-01
tcaacaggggcaactttttttctcctttccatggtatcttattctctgactggccaacgtgggtttttcccatggagatggcagcatt

SEQ ID NO: 24864 - DNA, 258 bp, Homo sapiens
  MAP TO AC011467.3; EXPRESSED IN BRAIN, SIGNAL = 2.5; EXPRESSED IN BONE MARROW, SIGNAL = 2.4; EXPRESSED IN FETAL LIVER, SIGNAL = 2.5; EXPRESSED IN LUNG, SIGNAL =   2; EXPRESSED IN HEART, SIGNAL = 4.5; EXPRESSED IN PLACENTA, SIGNAL = 5.5; EXPRESSED IN HELA, SIGNAL = 2.6; EXPRESSED IN ADULT LIVER, SIGNAL = 2.5; SWISSPROT HIT: P14282, EVALUE 1.80e+00; EST_HUMAN HIT: AA789277.1, EVALUE 2.00e-72; NT HIT: AF266285.1, EVALUE 5.00e-54
atggccgagatggcccaccaagagttgcgggggacccaggtgtgggagttgctgagggcgggtcccaagggggacgacctggcagcctctgtgccttcaactctctttccccgccccttaggagcacctggaagctgccagccagagaaccagcagctacaggcccagctgagcctcatggctctccctgaggaaggtacgggagatcactcagaggaagaggagggagcccaggaggaaggggggactgttagcaga

SEQ ID NO: 24865 - DNA, 135 bp, Homo sapiens
  MAP TO AP001208.1; EXPRESSED IN BRAIN, SIGNAL =  22; EXPRESSED IN ADULT LIVER, SIGNAL =  14; EXPRESSED IN BONE MARROW, SIGNAL =  18; EXPRESSED IN PLACENTA, SIGNAL =  16; EXPRESSED IN LUNG, SIGNAL =  29; EXPRESSED IN HEART, SIGNAL =  11; EXPRESSED IN HELA, SIGNAL =  12; EXPRESSED IN FETAL LIVER, SIGNAL =  20; SWISSPROT HIT: Q00911, EVALUE 9.10e+00; NT HIT: AF054187.1, EVALUE 2.00e-58; EST_HUMAN HIT: BF307745.1, EVALUE 2.00e-58
atgcctggcgaagccacagaaaccgtccctgctatagagcagcagttgctgcagccccaggctgagacagggtctggaacagaatctgacagtgatgagtcagtaccagagcttgaagaacaggattccacccag

SEQ ID NO: 24866 - DNA, 111 bp, Homo sapiens
  MAP TO AC016372.2; EXPRESSED IN BRAIN, SIGNAL = 1.7; EXPRESSED IN PLACENTA, SIGNAL = 2.6; EXPRESSED IN LUNG, SIGNAL = 2.2; EXPRESSED IN HEART, SIGNAL =  11; SWISSPROT HIT: P54623, EVALUE 1.40e-02; EST_HUMAN HIT: BE564009.1, EVALUE 4.00e-56; NT HIT: AB042556.1, EVALUE 3.00e-56
ccgcttgtagatgtcctcccggctggcctcatacttctgttgcatgcgctcctccaggaagtagatgcgcagcttgaggctgaagttctccttcttcaggtcattgaggtg

SEQ ID NO: 24867 - DNA, 165 bp, Homo sapiens
  MAP TO AL121981.8; EXPRESSED IN BRAIN, SIGNAL = 7.2; EXPRESSED IN HELA, SIGNAL = 7.1; EXPRESSED IN BONE MARROW, SIGNAL = 5.3; EXPRESSED IN HEART, SIGNAL = 6.5; EXPRESSED IN PLACENTA, SIGNAL = 5.3; EXPRESSED IN FETAL LIVER, SIGNAL = 7.3; EXPRESSED IN ADULT LIVER, SIGNAL = 6.9; EXPRESSED IN LUNG, SIGNAL = 7.9; EST_HUMAN HIT: BF693196.1, EVALUE 2.20e+00; NT HIT: Z79702.1, EVALUE 9.60e-02
atgtttttcttaagctcttaatggatttcttttgaccactggtgagctgcaggcacagcaagtgaactattttgccgaagctccagagacatgaccgtgggcctgcgctacctggactgattggaacagcattgctgctggtcatgctcagaagccacctgctgc

SEQ ID NO: 24868 - DNA, 91 bp, Homo sapiens
  MAP TO AC011428.2; EXPRESSED IN PLACENTA, SIGNAL = 1.9; EXPRESSED IN HEART, SIGNAL = 2.3; EXPRESSED IN BRAIN, SIGNAL = 2.4; EXPRESSED IN LUNG, SIGNAL = 3.3; EXPRESSED IN HELA, SIGNAL = 2.3; EXPRESSED IN FETAL LIVER, SIGNAL = 2.3; EXPRESSED IN BONE MARROW, SIGNAL = 1.9; EXPRESSED IN ADULT LIVER, SIGNAL = 2.6; EST_HUMAN HIT: BF241062.1, EVALUE 2.80e-01; NT HIT: AE000579.1, EVALUE 3.00e+00
caggagcatcttctgtgctaaaatcttcaccttggtctctttggtgttgaactttgcagccttgattccctgcttggctgggttggagcaa

SEQ ID NO: 24869 - DNA, 108 bp, Homo sapiens
  MAP TO AC018702.2; EXPRESSED IN BONE MARROW, SIGNAL = 1.6; EXPRESSED IN HEART, SIGNAL = 2.2; EXPRESSED IN PLACENTA, SIGNAL = 1.6; EXPRESSED IN BRAIN, SIGNAL = 1.7; EXPRESSED IN ADULT LIVER, SIGNAL = 1.7; EXPRESSED IN FETAL LIVER, SIGNAL =   2; EXPRESSED IN HELA, SIGNAL = 2.3; NT HIT: gi9635581, EVALUE 3.70e+00; SWISSPROT HIT: P12111, EVALUE 5.50e+00; EST_HUMAN HIT: AW962164.1, EVALUE 6.00e-03
atcaagaacggccagatagaagcctctaccaactgtcctcaccacaggagcacccaatttgacaactatctgcacaaaaaaagcaccttcatgggaaccaagaatctg

SEQ ID NO: 24870 - DNA, 277 bp, Homo sapiens
  MAP TO AL132655.5; EXPRESSED IN PLACENTA, SIGNAL = 2.5; EXPRESSED IN FETAL LIVER, SIGNAL = 2.4; EXPRESSED IN BRAIN, SIGNAL = 2.3; EXPRESSED IN BONE MARROW, SIGNAL = 1.9; EXPRESSED IN ADULT LIVER, SIGNAL = 1.7; EXPRESSED IN HELA, SIGNAL = 2.6; EXPRESSED IN HEART, SIGNAL = 2.6; NT HIT: AL163209.2, EVALUE 1.00e-82; EST_HUMAN HIT: AA055018.1, EVALUE 4.00e-77; SWISSPROT HIT: P70213, EVALUE 2.00e-22
tggacaaagtgatgaaagaaaatgatgaactcagggattctgtctcccagcttcagcagcggatcctgagccttgaatctgcgaagattgccctgagtgagagtcttatttcctatagagaaagagctgaaattgtggaaaaacagacacaagctcttactatgcgagtggctgacccgcaaagaaaagtggatgcacagcctcgccaggtgtctactgttaaagtgagggcattgattggaaaagaacagaaccctgcaacttggaatggggacat

SEQ ID NO: 24871 - DNA, 213 bp, Homo sapiens
  MAP TO AC008585.4; EXPRESSED IN BRAIN, SIGNAL = 6.4; EXPRESSED IN PLACENTA, SIGNAL =  11; EXPRESSED IN BONE MARROW, SIGNAL =  14; EXPRESSED IN HELA, SIGNAL =  28; EXPRESSED IN LUNG, SIGNAL =  26; EXPRESSED IN ADULT LIVER, SIGNAL =   7; EXPRESSED IN FETAL LIVER, SIGNAL =  23; EXPRESSED IN HEART, SIGNAL =  13; EST_HUMAN HIT: N78945.1, EVALUE 2.00e-63; NT HIT: gi4506718, EVALUE 4.00e-63; SWISSPROT HIT: P15880, EVALUE 4.00e-28
acaacccgatgttgtagccaccgctggagcctgggtcctctgcacggagactctggtgtgggtcttgaggaggtggtcagtgaattcctgatagggagacttggtgaatacagtctccttccagaggtcagggttcagcctgctgtagaccttagagatggcataaaaaatgaccatgacgaagttgcccaggatggcagtgcagcccctggc

SEQ ID NO: 24872 - DNA, 219 bp, Homo sapiens
  MAP TO AC000134.14; EXPRESSED IN BRAIN, SIGNAL = 3.6; EXPRESSED IN PLACENTA, SIGNAL = 3.2; EXPRESSED IN ADULT LIVER, SIGNAL = 3.4; EXPRESSED IN FETAL LIVER, SIGNAL = 3.9; EXPRESSED IN BONE MARROW, SIGNAL = 2.8; EXPRESSED IN HELA, SIGNAL = 4.2; EXPRESSED IN LUNG, SIGNAL = 4.8; EXPRESSED IN HEART, SIGNAL = 3.7; SWISSPROT HIT: Q09013, EVALUE 2.00e-22; EST_HUMAN HIT: R52045.1, EVALUE 9.00e-16; NT HIT: Y12337.1, EVALUE 1.00e-110
ctcgtggttcatgatcttgccgtaggtttccaccaaggactcagcatagaagggcgtctccccaaagagcagctcataggcgcagactccaagcgaccaccagtcacactgtgggccgtagtggcccttgccctcctccatggcctgcaggatctcaggggagatatagtccggcgtccctactgccactgatgaatccacctgtgggtggtggtggtg

SEQ ID NO: 24873 - DNA, 76 bp, Homo sapiens
  MAP TO AC018760.4; EXPRESSED IN BRAIN, SIGNAL = 3.1; EXPRESSED IN PLACENTA, SIGNAL = 2.4; EXPRESSED IN HELA, SIGNAL = 4.3; EXPRESSED IN LUNG, SIGNAL = 3.2; EXPRESSED IN ADULT LIVER, SIGNAL = 2.4; EXPRESSED IN BONE MARROW, SIGNAL = 2.3; EXPRESSED IN FETAL LIVER, SIGNAL =   4; EXPRESSED IN HEART, SIGNAL = 3.7; NT HIT: U34879.1, EVALUE 6.00e-04; EST_HUMAN HIT: R75639.1, EVALUE 6.00e-05
ctccagatgtagggagttttgcctccggagggcctgttcgatggtcaccaggtggtcgctgctggcttctaaactc

SEQ ID NO: 24874 - DNA, 137 bp, Homo sapiens
  MAP TO AP001206.1; EXPRESSED IN BRAIN, SIGNAL = 4.3; EXPRESSED IN PLACENTA, SIGNAL = 3.7; EXPRESSED IN BONE MARROW, SIGNAL = 3.2; EXPRESSED IN ADULT LIVER, SIGNAL = 4.5; EXPRESSED IN HELA, SIGNAL = 4.9; EXPRESSED IN HEART, SIGNAL = 4.2; EXPRESSED IN LUNG, SIGNAL = 4.6; EXPRESSED IN FETAL LIVER, SIGNAL = 4.4; EST_HUMAN HIT: AA721005.1, EVALUE 2.00e-21; SWISSPROT HIT: P38321, EVALUE 6.90e+00; NT HIT: AJ271735.1, EVALUE 7.00e-27
tggcttcgtggtctcgctggcctcaaaagtgaggctgcagaccttcactgtgagtgttacagctcataaagacagtacagacccaaagagcaagcaacagcaagagctgcaaaagggaaaaacacaaaaccaccact

SEQ ID NO: 24875 - DNA, 106 bp, Homo sapiens
  MAP TO AC011444.2; EXPRESSED IN BONE MARROW, SIGNAL = 2.9; EXPRESSED IN LUNG, SIGNAL = 4.9; EXPRESSED IN HEART, SIGNAL = 2.4; EXPRESSED IN BRAIN, SIGNAL = 2.8; EXPRESSED IN PLACENTA, SIGNAL = 2.5; EXPRESSED IN HELA, SIGNAL = 3.1; EXPRESSED IN ADULT LIVER, SIGNAL =   3; EXPRESSED IN FETAL LIVER, SIGNAL = 3.2; SWISSPROT HIT: P39881, EVALUE 5.50e+00; EST_HUMAN HIT: BE170859.1, EVALUE 1.00e-03
ctcgaaaccctccatggctcccatctcatctgcagcaaaagccaaagtcacccctaactccatccccgccaagcctaatacctctttgacctcatcgccaagctag

SEQ ID NO: 24876 - DNA, 531 bp, Homo sapiens
  MAP TO AC016939.8; EXPRESSED IN BRAIN, SIGNAL = 5.5; EXPRESSED IN PLACENTA, SIGNAL = 4.5; EXPRESSED IN HELA, SIGNAL = 6.6; EXPRESSED IN HEART, SIGNAL = 4.7; EXPRESSED IN ADULT LIVER, SIGNAL = 5.7; EXPRESSED IN BONE MARROW, SIGNAL = 4.2; EXPRESSED IN LUNG, SIGNAL = 4.8; EXPRESSED IN FETAL LIVER, SIGNAL = 5.4; SWISSPROT HIT: P43362, EVALUE 4.00e-22; NT HIT: U10694.1, EVALUE 0.00e+00; EST_HUMAN HIT: BE793498.1, EVALUE 0.00e+00
gttctcgggacaggctaaccaggaggacaggagccccaagaggccccagagcagcactgacgaagacctgtaagtcagcctttgttagaacctccaaggttcggttctcagctgaagtctctcacacactccctctctccccaggcctgtgggtctccatcgcccagctcctgcccacgctcctgactgctgccctgaccagagtcatcatgtctctcgagcagaggagtccgcactgcaagcctgatgaagaccttgaagcccaaggagaggacttgggcctgatgggtgcacaggaacccacaggcgaggaggaggagactacctcctcctctgacagcaaggaggaggaggtgtctgctgctgggtcatcaagtcctccccagagtcctcagggaggcgcttcctcctccatttccgtctactacactttatggagccaattcgatgagggctccagcagtcaagaagaggaagagccaagctcctcggtcgacccagctcagctggagttcatgttccaagaagcac

SEQ ID NO: 24877 - DNA, 111 bp, Homo sapiens
  MAP TO AC020714.2; EXPRESSED IN BRAIN, SIGNAL = 2.7; EXPRESSED IN PLACENTA, SIGNAL = 1.9; EXPRESSED IN BONE MARROW, SIGNAL = 2.4; EXPRESSED IN FETAL LIVER, SIGNAL = 3.4; EXPRESSED IN HELA, SIGNAL = 3.3; EXPRESSED IN HEART, SIGNAL = 2.9; EXPRESSED IN ADULT LIVER, SIGNAL = 2.8; NT HIT: D87675.1, EVALUE 2.00e-26; EST_HUMAN HIT: N24942.1, EVALUE 2.00e-24
ctaaatctttgttgtcatctcaacagtgttcacaacatctttaccaagagtagactccatctcaagagaccactttctttgctcattcataagaagcaactcctcatccat

SEQ ID NO: 24878 - DNA, 299 bp, Homo sapiens
  MAP TO AC020557.2; EXPRESSED IN HELA, SIGNAL = 1.9; EXPRESSED IN BRAIN, SIGNAL = 1.4; EXPRESSED IN FETAL LIVER, SIGNAL = 1.6; EXPRESSED IN HEART, SIGNAL = 1.8; EST_HUMAN HIT: AI905431.1, EVALUE 6.90e-02; SWISSPROT HIT: Q06725, EVALUE 4.80e-01; NT HIT: gi6754565, EVALUE 4.70e-02
tcaggcgtctcgacggcaagggtggccccgcaccagcccagcagccctggactcacgcaagacacagtagaggccgagctgttcatagccctcacagcagtcagtcacgttcctggactcggggacctccactaccaggtactgtgtccggtaaaccatcttagggcaccgcctccaggggatccagccgccgcaggacacataggacgtgtaggacgtctgcacggcctccaccttctgtacagtgtgggtcacacggtggctgcatagctggtagcccaacagggagaggccttttt

SEQ ID NO: 24879 - DNA, 92 bp, Homo sapiens
  MAP TO AL157957.1; EXPRESSED IN BRAIN, SIGNAL = 2.1; EXPRESSED IN BONE MARROW, SIGNAL = 1.9; EXPRESSED IN PLACENTA, SIGNAL = 2.2; EXPRESSED IN LUNG, SIGNAL = 2.5; EXPRESSED IN HEART, SIGNAL = 1.8; EXPRESSED IN HELA, SIGNAL = 2.1; EXPRESSED IN FETAL LIVER, SIGNAL = 2.1; EXPRESSED IN ADULT LIVER, SIGNAL =   3; EST_HUMAN HIT: AL039470.1, EVALUE 2.80e-01; NT HIT: AF223391.1, EVALUE 1.90e-01
tttgctgagagcacatagctcttgagggtagtgggggatttaaacacaggtagagtctgactccagagcctgctgtacgtgaaacatgacat

SEQ ID NO: 24880 - DNA, 156 bp, Homo sapiens
  MAP TO AC002400.1; EXPRESSED IN BONE MARROW, SIGNAL = 1.5; EXPRESSED IN HEART, SIGNAL = 4.1; EXPRESSED IN LUNG, SIGNAL = 2.4; EST_HUMAN HIT: AW500361.1, EVALUE 3.00e-73; NT HIT: gi11431598, EVALUE 2.00e-73; SWISSPROT HIT: P46825, EVALUE 8.90e+00
gaacaagaaaaatcggagaaggtgtccaagagggtcagtgcggtggaggaagtgcgaagccatgtgaaggtgctgcaggagatgctgagcatgtaccgcaggccagggcaggccccgcccgaccaggaggccctgcaggtaatacaggtgtaacac

SEQ ID NO: 24881 - DNA, 166 bp, Homo sapiens
  MAP TO AC024496.2; EXPRESSED IN PLACENTA, SIGNAL =  23; EXPRESSED IN BRAIN, SIGNAL = 7.6; EXPRESSED IN BONE MARROW, SIGNAL =  28; EXPRESSED IN LUNG, SIGNAL =  37; EXPRESSED IN ADULT LIVER, SIGNAL =  16; EXPRESSED IN FETAL LIVER, SIGNAL =  23; EXPRESSED IN HELA, SIGNAL =  21; EXPRESSED IN HEART, SIGNAL = 9.5; NT HIT: AF223391.1, EVALUE 3.00e-45; EST_HUMAN HIT: AI872137.1, EVALUE 7.00e-50; SWISSPROT HIT: Q57676, EVALUE 3.50e-01
ctgaaaaagaattcagaagtttagttatcaagctaatcagggaggcaccagagaaaggcaaagcccaatgcaaggaaatccaaaaaacaatacaggaagtgaagggagaaatattcaaggaaatagatagcttaaagaaaaaaacaatcaaaacttcaggaaacat

SEQ ID NO: 24882 - DNA, 133 bp, Homo sapiens
  MAP TO AL121955.4; EXPRESSED IN BRAIN, SIGNAL = 8.7; EXPRESSED IN FETAL LIVER, SIGNAL = 7.8; EXPRESSED IN HELA, SIGNAL = 9.3; EXPRESSED IN PLACENTA, SIGNAL = 8.7; EXPRESSED IN LUNG, SIGNAL =  11; EXPRESSED IN HEART, SIGNAL = 6.8; EXPRESSED IN BONE MARROW, SIGNAL = 8.4; EXPRESSED IN ADULT LIVER, SIGNAL = 3.6; SWISSPROT HIT: P02452, EVALUE 3.60e-01; EST_HUMAN HIT: AI817700.1, EVALUE 7.00e-37; NT HIT: L78810.1, EVALUE 4.00e-31
atggcgggctgcgggttccgagccccgctccgcgggaaggcagctaaggcccgccgagatatcgagcgcagcgctggtgggctggcactgctggaggacccagtacactctccgcagctgctggcccgggtgc

SEQ ID NO: 24883 - DNA, 243 bp, Homo sapiens
  MAP TO AC018506.3; EXPRESSED IN BRAIN, SIGNAL = 6.3; EXPRESSED IN PLACENTA, SIGNAL = 6.6; EXPRESSED IN BONE MARROW, SIGNAL = 7.5; EXPRESSED IN HELA, SIGNAL = 6.7; EXPRESSED IN LUNG, SIGNAL = 6.5; EXPRESSED IN ADULT LIVER, SIGNAL =   7; EXPRESSED IN FETAL LIVER, SIGNAL = 7.3; EXPRESSED IN HEART, SIGNAL = 5.2; SWISSPROT HIT: P35251, EVALUE 8.60e-02; EST_HUMAN HIT: BF327292.1, EVALUE 1.00e-100; NT HIT: gi9626433, EVALUE 2.30e+00
aattctccctctgaagcacagaatttagatgagaatacaactgagggctgggaaaatcggataagactatggactgaccagtatgaagaagctttcactaatcagtacagtgcagatgtacagaacgcgcttgaacaacacctacattctagcaaggaatttgtgggcaaacctactattttagacactattaataagactgaattggcctgtaataacacagttattggttcccaaatgcag

SEQ ID NO: 24884 - DNA, 172 bp, Homo sapiens
  MAP TO AC010582.6; EXPRESSED IN BRAIN, SIGNAL = 4.9; EXPRESSED IN PLACENTA, SIGNAL = 4.7; EXPRESSED IN BONE MARROW, SIGNAL = 4.7; EXPRESSED IN HELA, SIGNAL =   7; EXPRESSED IN LUNG, SIGNAL = 2.4; EXPRESSED IN ADULT LIVER, SIGNAL = 6.1; EXPRESSED IN FETAL LIVER, SIGNAL =   7; EXPRESSED IN HEART, SIGNAL = 5.9; NT HIT: gi11434900, EVALUE 2.00e-92; SWISSPROT HIT: P16473, EVALUE 1.00e-27; EST_HUMAN HIT: AW873461.1, EVALUE 4.00e-76
gtgtcactgcccttccatccaaaggcctggagcacctgaaggaactgatagcaagaaacacctggactcttaagaaacttccactttccttgagtttccttcacctcacacgggctgacctttcttacccaagccactgctgtgcttttaagaatcagaagaaaatcagagg

SEQ ID NO: 24885 - DNA, 513 bp, Homo sapiens
  MAP TO AL138806.5; EXPRESSED IN BRAIN, SIGNAL =  34; EXPRESSED IN PLACENTA, SIGNAL =  12; EXPRESSED IN BONE MARROW, SIGNAL =  16; EXPRESSED IN FETAL LIVER, SIGNAL =  19; EXPRESSED IN LUNG, SIGNAL =  32; EXPRESSED IN ADULT LIVER, SIGNAL =  19; EXPRESSED IN HELA, SIGNAL =  25; EXPRESSED IN HEART, SIGNAL = 6.8; EST_HUMAN HIT: AV727362.1, EVALUE 0.00e+00; NT HIT: AF023860.1, EVALUE 0.00e+00; SWISSPROT HIT: P04374, EVALUE 2.00e-79
aaatggaagtcaaacttatcgaagttgtctgcagtcagcaatgattatcttcttgctggtcttgccattcctggacccagagtactccatggcctccacaatcttcatgccttctttcaccttgccgaagaccacatgcttgccatccaaccactcagtcttggcagtgcagatgaaaaactgggaatcgtttgtgttgggtccagcatttgtcatggacaagatgccaggacctgtatgctttaggatgaagttcttatcatcaaatttctccctgcagatgggcttgccaccagtgccaatttggcgtgtgaagtcaccaccctggcacataaaccctggaataattctgtgaaagcaggaacccttataaccaaatcctttctctccagtgctcagagcatgaaaattttctgccgtctttggaatcttgtttgcaaacagctcaaaggagacacagcccaaggactcggtgttgatagcaatgtcgaaggacacagtggggttgaccat

SEQ ID NO: 24886 - DNA, 125 bp, Homo sapiens
  MAP TO AC006549.28; EXPRESSED IN PLACENTA, SIGNAL = 2.2; EXPRESSED IN BONE MARROW, SIGNAL = 3.7; EXPRESSED IN FETAL LIVER, SIGNAL = 2.4; EXPRESSED IN HELA, SIGNAL = 2.9; EXPRESSED IN ADULT LIVER, SIGNAL = 2.3; EXPRESSED IN HEART, SIGNAL = 2.8; EXPRESSED IN BRAIN, SIGNAL = 3.7; EXPRESSED IN LUNG, SIGNAL = 4.1; EST_HUMAN HIT: BF528114.1, EVALUE 2.00e-64; SWISSPROT HIT: Q9X3X1, EVALUE 3.10e+00; NT HIT: AB033118.1, EVALUE 2.00e-64
cccggctgccgctcgcggtgagtttgaagccgcctttccttaggcctgaactcctggaccgagctgcaccgctcaaggtcaagcttagtgacaacgggctgaaggctggcctgggccgtagcaag

SEQ ID NO: 24887 - DNA, 89 bp, Homo sapiens
  MAP TO AL158823.1; EXPRESSED IN ADULT LIVER, SIGNAL = 5.3; EXPRESSED IN LUNG, SIGNAL = 7.3; EXPRESSED IN PLACENTA, SIGNAL = 4.5; EXPRESSED IN BONE MARROW, SIGNAL = 4.9; EXPRESSED IN FETAL LIVER, SIGNAL = 5.1; EXPRESSED IN HEART, SIGNAL = 5.5; EXPRESSED IN BRAIN, SIGNAL = 5.3; EXPRESSED IN HELA, SIGNAL = 5.4; SWISSPROT HIT: P71564, EVALUE 3.20e+00; NT HIT: AF112535.1, EVALUE 7.30e-01; EST_HUMAN HIT: AW863007.1, EVALUE 5.00e-43
gttcgagcacaacagcagggatcctacaatagcagagagctgccattccgttctggccatggacccctccccaacatgcagggcagaag

SEQ ID NO: 24888 - DNA, 250 bp, Homo sapiens
  MAP TO AL132986.2; EXPRESSED IN BRAIN, SIGNAL = 2.7; EXPRESSED IN PLACENTA, SIGNAL = 3.3; EXPRESSED IN ADULT LIVER, SIGNAL =   2; EXPRESSED IN BONE MARROW, SIGNAL = 5.3; EXPRESSED IN FETAL LIVER, SIGNAL = 2.9; EXPRESSED IN HEART, SIGNAL = 5.7; EXPRESSED IN HELA, SIGNAL = 4.3; EXPRESSED IN LUNG, SIGNAL =  10; SWISSPROT HIT: P12814, EVALUE 4.00e-28; EST_HUMAN HIT: BE701567.1, EVALUE 4.00e-92; NT HIT: X15804.1, EVALUE 3.00e-92
atgcatgccatgcaacagaagctggaggacttccgggactaccggcgcctgcacaagccgcccaaggtgcaggagaagtgccagctggagatcaacttcaacacgctgcagaccaagctgcggctcagcaaccggcctgccttcatgccctctgagggcaggatggtctcggtgagcactgggggtgagcctgggcccccagactggactgcctccacctctgagctgctcctagttgtggtcaaattca

SEQ ID NO: 24889 - DNA, 105 bp, Homo sapiens
  MAP TO AL135905.2; EXPRESSED IN BRAIN, SIGNAL = 1.6; EXPRESSED IN PLACENTA, SIGNAL = 2.1; EXPRESSED IN BONE MARROW, SIGNAL = 1.8; EXPRESSED IN ADULT LIVER, SIGNAL = 1.9; EXPRESSED IN FETAL LIVER, SIGNAL =  10; EXPRESSED IN LUNG, SIGNAL = 3.4; EXPRESSED IN HEART, SIGNAL = 1.8; EXPRESSED IN HELA, SIGNAL =  16; EST_HUMAN HIT: AV756311.1, EVALUE 2.00e-52; NT HIT: U48296.1, EVALUE 1.00e-52
atggctcgaatgaaccgcccagctcctgtggaagtcacatacaagaacatgagatttcttattacacacaatccaaccaatgcgaccttaaacaaatttatagag

SEQ ID NO: 24890 - DNA, 141 bp, Homo sapiens
  MAP TO AL133262.2; EXPRESSED IN BRAIN, SIGNAL = 1.4; EXPRESSED IN PLACENTA, SIGNAL =   2; EXPRESSED IN ADULT LIVER, SIGNAL = 1.8; EXPRESSED IN BONE MARROW, SIGNAL =   2; EXPRESSED IN HEART, SIGNAL = 1.9; EXPRESSED IN LUNG, SIGNAL = 5.7; NT HIT: gi11417128, EVALUE 3.20e-01; EST_HUMAN HIT: BE788441.1, EVALUE 8.00e-03; SWISSPROT HIT: Q9Z8N9, EVALUE 1.80e+00
ggagacagctgttgtctctacaactgagtgtaccacagtgatggaacggcctccagaagcacagaggacagttgaccaactcattcagaggattgagaaggctgttcccaacagacacacatttccactggtcccagacag

SEQ ID NO: 24891 - DNA, 109 bp, Homo sapiens
  MAP TO AF233390.1; EXPRESSED IN ADULT LIVER, SIGNAL = 2.6; EXPRESSED IN BONE MARROW, SIGNAL = 2.7; EXPRESSED IN HEART, SIGNAL = 3.6; EXPRESSED IN PLACENTA, SIGNAL = 2.1; EXPRESSED IN FETAL LIVER, SIGNAL = 3.3; EXPRESSED IN LUNG, SIGNAL = 2.7; EXPRESSED IN BRAIN, SIGNAL = 4.6; EXPRESSED IN HELA, SIGNAL = 3.3; NT HIT: AL161494.2, EVALUE 2.40e-01; EST_HUMAN HIT: AW408778.1, EVALUE 5.40e+00
gttaccacttgtattatgttgttcgttggtgtcgttctcatgtttattgatatcagcatcaacatctatagctatacccacatctatagctatacccacatctgtatct

SEQ ID NO: 24892 - DNA, 157 bp, Homo sapiens
  MAP TO AC008929.3; EXPRESSED IN BONE MARROW, SIGNAL = 3.9; EXPRESSED IN LUNG, SIGNAL = 4.3; EXPRESSED IN PLACENTA, SIGNAL = 4.1; EXPRESSED IN ADULT LIVER, SIGNAL = 4.6; EXPRESSED IN FETAL LIVER, SIGNAL =   5; EXPRESSED IN HELA, SIGNAL =   5; EXPRESSED IN HEART, SIGNAL = 4.6; EXPRESSED IN BRAIN, SIGNAL = 4.2; EST_HUMAN HIT: AW627946.1, EVALUE 4.00e-05; SWISSPROT HIT: P18091, EVALUE 5.20e+00; NT HIT: AL163247.2, EVALUE 1.00e-03
gcaaacaagtgagttggccaatttcttccaggatgctggcagaaaatgtgagattcctggtgccgagataggagagtttattactcaatgcaatagcagtagccagagtatgagcatttgtgctggttctctgagccccaattcctgcagggcaatg

SEQ ID NO: 24893 - DNA, 124 bp, Homo sapiens
  MAP TO AC018720.2; EXPRESSED IN PLACENTA, SIGNAL = 4.7; EXPRESSED IN BRAIN, SIGNAL =   6; EXPRESSED IN HELA, SIGNAL = 9.7; EXPRESSED IN LUNG, SIGNAL = 5.2; EXPRESSED IN HEART, SIGNAL = 7.6; EXPRESSED IN FETAL LIVER, SIGNAL = 7.9; EXPRESSED IN BONE MARROW, SIGNAL = 4.5; EXPRESSED IN ADULT LIVER, SIGNAL = 4.9; NT HIT: gi11420197, EVALUE 6.00e-64; SWISSPROT HIT: O13816, EVALUE 2.00e-06; EST_HUMAN HIT: AL040219.1, EVALUE 9.00e-64
cttatcatgcagagtccaaccaatatattttaaatagctgtcggtgaggaaagacgtgctgtagctttgcatccaacacccaatttcctcaatgcagatagcacggatctcaggaaggacatcc

SEQ ID NO: 24894 - DNA, 228 bp, Homo sapiens
  MAP TO AC025289.1; EXPRESSED IN ADULT LIVER, SIGNAL = 1.5; EXPRESSED IN BONE MARROW, SIGNAL =   2; EXPRESSED IN HEART, SIGNAL = 1.9; EXPRESSED IN LUNG, SIGNAL = 1.6; NT HIT: U32581.2, EVALUE 1.00e-125; EST_HUMAN HIT: AW131202.1, EVALUE 1.00e-125; SWISSPROT HIT: P39055, EVALUE 1.40e+00
cttagccatagctttcaagagatgtttgacatctccaagctgtcggttatgaccagtgagcacagtctttatattatcaaccagattctgaattgtttcacagaccgtttctatctgctgctctttctctgtctgaattgccctctgagtagacatatcctgggtcaactgtttgtgtgctgacaaaagccattcagagctgccaataggatgttcaagaccagtgtc

SEQ ID NO: 24895 - DNA, 89 bp, Homo sapiens
  MAP TO AC012578.5; EXPRESSED IN BONE MARROW, SIGNAL =   3; EXPRESSED IN HEART, SIGNAL =   3; EXPRESSED IN BRAIN, SIGNAL = 3.8; EXPRESSED IN PLACENTA, SIGNAL =   3; EXPRESSED IN HELA, SIGNAL = 3.2; EXPRESSED IN ADULT LIVER, SIGNAL =   3; EXPRESSED IN FETAL LIVER, SIGNAL = 2.8; EXPRESSED IN LUNG, SIGNAL = 3.4; SWISSPROT HIT: P50336, EVALUE 7.30e+00; EST_HUMAN HIT: BF695970.1, EVALUE 2.80e-01; NT HIT: AP001513.1, EVALUE 7.30e-01
ccctgtggagcctagcacatcgctgggctcaatacatacttgcaggagggctgagtgaccgtccacaaaggccactctgcagtccatgg

SEQ ID NO: 24896 - DNA, 123 bp, Homo sapiens
  MAP TO AC007955.4; EXPRESSED IN BRAIN, SIGNAL =   3; EXPRESSED IN PLACENTA, SIGNAL = 2.9; EXPRESSED IN HELA, SIGNAL = 2.9; EXPRESSED IN ADULT LIVER, SIGNAL = 3.2; EXPRESSED IN BONE MARROW, SIGNAL = 2.3; EXPRESSED IN FETAL LIVER, SIGNAL = 2.8; EXPRESSED IN HEART, SIGNAL =   3; EXPRESSED IN LUNG, SIGNAL = 3.8; NT HIT: AF099810.1, EVALUE 2.00e-63; EST_HUMAN HIT: AA928546.1, EVALUE 1.00e-01; SWISSPROT HIT: P14728, EVALUE 1.80e+00
cagcttcctgctgggatctgcctccctcaatttgcacaggggtctttgtaatgattgccatgagtagtgatctgggagaatgcctgatgttgttgtgtgcatgagtgtccatgaaggatgaat

SEQ ID NO: 24897 - DNA, 200 bp, Homo sapiens
  MAP TO AL139392.1; EXPRESSED IN PLACENTA, SIGNAL = 1.8; EXPRESSED IN BRAIN, SIGNAL = 1.7; EXPRESSED IN ADULT LIVER, SIGNAL = 2.2; EXPRESSED IN BONE MARROW, SIGNAL = 2.4; EXPRESSED IN FETAL LIVER, SIGNAL = 2.7; EXPRESSED IN LUNG, SIGNAL = 3.6; EXPRESSED IN HEART, SIGNAL = 2.9; NT HIT: gi11419016, EVALUE 1.00e-109; SWISSPROT HIT: Q99808, EVALUE 2.00e-17; EST_HUMAN HIT: BE540909.1, EVALUE 1.00e-109
ttgggcccgaagcacatgcagaggctggcgaggtagccgttggagaaggcaaaggcagccatgaagaagatgaaccaggcatcgtgctcgaagaccacagtcaggtagcggcggggcttaatgttgcacagcagcagcagtggcacaaacaccagccgggccagcaccaggcttggcagccagcggctgtccttcccagg

SEQ ID NO: 24898 - DNA, 441 bp, Homo sapiens
  MAP TO AC011447.2; EXPRESSED IN ADULT LIVER, SIGNAL =  24; EXPRESSED IN FETAL LIVER, SIGNAL =  18; EXPRESSED IN HEART, SIGNAL =  18; EXPRESSED IN BRAIN, SIGNAL = 9.6; EXPRESSED IN PLACENTA, SIGNAL =  12; EXPRESSED IN BONE MARROW, SIGNAL =  24; EXPRESSED IN HELA, SIGNAL =  19; EXPRESSED IN LUNG, SIGNAL =  58; SWISSPROT HIT: P17008, EVALUE 1.00e-64; NT HIT: gi11426146, EVALUE 0.00e+00; EST_HUMAN HIT: AW516055.1, EVALUE 0.00e+00
ttatcggtaggatttctggtagcaagcacgggcaccaggacctccaaactttttggacttgcagcgacggggatcagctaccagcagggtccggtcatactggatgaggatgtctttgatctccttcttggaagcctcatccacatatttctggtaataggccaccagggctttggaggtggactgacggatagcataaatctgggccacatgagcaccacccttcacacggacacggatgtccacaccagcaaatcgctccttgccaagaagcagaactggctccagcagctcgtattgtagcatgcgcggctcagtcatctccaggggctgcccgttcaccttgatgagaccattgccgcgtctgcagtgcgccacagctgtggctgtcttcttgcgtccgaagacttgcaccgattgcagcgggcccttggacggcat

SEQ ID NO: 24899 - DNA, 265 bp, Homo sapiens
  MAP TO AC005678.1; EXPRESSED IN BONE MARROW, SIGNAL = 1.9; EXPRESSED IN HEART, SIGNAL = 4.4; EXPRESSED IN LUNG, SIGNAL = 3.3; EXPRESSED IN PLACENTA, SIGNAL = 3.5; EXPRESSED IN FETAL LIVER, SIGNAL = 3.5; EXPRESSED IN HELA, SIGNAL = 3.2; EXPRESSED IN BRAIN, SIGNAL = 2.9; EXPRESSED IN ADULT LIVER, SIGNAL = 2.4; SWISSPROT HIT: Q9Y6N1, EVALUE 1.00e-42; NT HIT: gi11427788, EVALUE 1.00e-121; EST_HUMAN HIT: BE882783.1, EVALUE 1.00e-120
ctgggggcgtcctacgctgccgttcccctttatcggctctattgccagactactggacttggaggatcagcagtttcaggtcatgcctcagaccagattgaaaacatggtgcctgttaaggatcgaatcattaaaattaactttgatgcagatgtgcatgcaagtcttcagtggaactttagacttcagcaaacagaaatatatgtggtgccaggagacactgcactggggttttacagagctaagaatcctgctgacaaaccac

SEQ ID NO: 24900 - DNA, 178 bp, Homo sapiens
  MAP TO AL136226.2; EXPRESSED IN PLACENTA, SIGNAL = 9.4; EXPRESSED IN HEART, SIGNAL =  13; EXPRESSED IN BRAIN, SIGNAL = 8.5; EXPRESSED IN HELA, SIGNAL =  26; EXPRESSED IN LUNG, SIGNAL =  25; EXPRESSED IN FETAL LIVER, SIGNAL =  22; EXPRESSED IN BONE MARROW, SIGNAL =  10; EXPRESSED IN ADULT LIVER, SIGNAL = 2.9; EST_HUMAN HIT: AI499993.1, EVALUE 3.00e-64; SWISSPROT HIT: P12970, EVALUE 2.00e-23; NT HIT: gi4506660, EVALUE 1.00e-65
gttaactcggaagacaaaggcgctttggctaaactggtggaagctatcaggaccaattatgatgacagatacgatgagatccactgtcactggggaggcaatgtcctgggtcacaagtctgtggctcatgtcaccaagctcgaaaaggcaaaggctagagaacttgccactaaactgg

SEQ ID NO: 24901 - DNA, 206 bp, Homo sapiens
  MAP TO AC016911.2; EXPRESSED IN PLACENTA, SIGNAL =  17; EXPRESSED IN FETAL LIVER, SIGNAL = 3.5; EXPRESSED IN LUNG, SIGNAL =  64; EXPRESSED IN BRAIN, SIGNAL = 2.9; EXPRESSED IN HEART, SIGNAL = 4.2; EXPRESSED IN HELA, SIGNAL = 2.7; EXPRESSED IN BONE MARROW, SIGNAL = 2.9; EXPRESSED IN ADULT LIVER, SIGNAL = 2.9; SWISSPROT HIT: Q99814, EVALUE 8.00e-39; NT HIT: U51626.1, EVALUE 1.00e-112; EST_HUMAN HIT: AW863327.1, EVALUE 1.00e-112
ctgtcatcacagtaggtgaacttcatgtccatgctgtggcggctcaggaaggtcttgctatccagggggatgtccatgtgggatgggtgctggattggttcacacatgatgatgaggcaggacagcaggggctccttgtagccacacagactattgtgaggagggcagttgttgtagactttcacctggcccgtgcagtgcaagac

SEQ ID NO: 24902 - DNA, 96 bp, Homo sapiens
  MAP TO AP001208.1; EXPRESSED IN BRAIN, SIGNAL = 4.9; EXPRESSED IN FETAL LIVER, SIGNAL = 4.6; EXPRESSED IN HELA, SIGNAL = 5.4; EXPRESSED IN ADULT LIVER, SIGNAL = 4.3; EXPRESSED IN BONE MARROW, SIGNAL = 3.9; EXPRESSED IN HEART, SIGNAL = 4.8; EXPRESSED IN PLACENTA, SIGNAL = 3.6; EXPRESSED IN LUNG, SIGNAL = 6.6; EST_HUMAN HIT: AW139800.1, EVALUE 2.00e-14; NT HIT: AF111167.2, EVALUE 4.00e-12; SWISSPROT HIT: P37970, EVALUE 5.50e+00
aggctgagaagtccaaggtcgagggcctgcatctggtgatggccttcttactggtggggactctgaagcatcctgaggtaggcagggcatcacatg

SEQ ID NO: 24903 - DNA, 511 bp, Homo sapiens
  MAP TO AC009330.5; EXPRESSED IN BRAIN, SIGNAL = 3.2; EXPRESSED IN ADULT LIVER, SIGNAL = 1.6; EXPRESSED IN HELA, SIGNAL =   2; EXPRESSED IN BONE MARROW, SIGNAL = 1.9; EXPRESSED IN HEART, SIGNAL = 2.2; EXPRESSED IN LUNG, SIGNAL = 6.5; EXPRESSED IN PLACENTA, SIGNAL = 4.4; EXPRESSED IN FETAL LIVER, SIGNAL = 3.2; SWISSPROT HIT: O09112, EVALUE 4.90e-01; NT HIT: gi11419704, EVALUE 0.00e+00; EST_HUMAN HIT: AU135741.1, EVALUE 0.00e+00
ggtctcggtggcgcgaccagctgctgttcatgagcatcatagtcctcgtgattgtggtcatctgcctgatgttatacgctcttctctgggaggctggcaacctcactgacctgcccaacctgagaatcggcttctataacttctgcctgtggaatgaggacaccagcaccctacagtgtcaccagttccctgagctggaagccctgggggtgcctcgggttggcctgggcctggccaggcttggcgtgtacgggtccctggtcctcaccctctttgccccccagcctctcctcctagcccagtgcaacagtgatgagagagtgtggcggctggcagtgggcttcctggctgtgtcctctgtgctgctggcaggcggcctgggcctcttcctctcctatgtgtggaagtgggtcaggctctccctcccggggcctgggtttctagctctgggcagcgcccaggccttactcatcctcttgcttatagccatggctgtgttccctctgagggc

SEQ ID NO: 24904 - DNA, 176 bp, Homo sapiens
  MAP TO AC018801.2; EXPRESSED IN BRAIN, SIGNAL = 2.2; EXPRESSED IN HELA, SIGNAL = 2.2; EXPRESSED IN HEART, SIGNAL = 2.2; EXPRESSED IN LUNG, SIGNAL = 2.6; EXPRESSED IN PLACENTA, SIGNAL = 2.4; EXPRESSED IN FETAL LIVER, SIGNAL = 2.4; EXPRESSED IN BONE MARROW, SIGNAL = 1.7; EXPRESSED IN ADULT LIVER, SIGNAL =   2; SWISSPROT HIT: P08640, EVALUE 2.30e-02; NT HIT: AF022729.1, EVALUE 4.10e-01
gctgtcctggaggttcctacgcctgcagtgggagctaagaggtcagctgttgccccagagccgaccccagtaacctttgcagcttccctgagggcttcagggacctgcaccctgtttagtgggcacagagaaaatggctcatgtcctggaaatacccagcctggctccattgggct

SEQ ID NO: 24905 - DNA, 220 bp, Homo sapiens
  MAP TO AC025488.1; EXPRESSED IN BRAIN, SIGNAL = 1.3; EXPRESSED IN PLACENTA, SIGNAL = 1.9; EXPRESSED IN ADULT LIVER, SIGNAL =  14; EXPRESSED IN BONE MARROW, SIGNAL = 1.5; EXPRESSED IN FETAL LIVER, SIGNAL = 4.2; EXPRESSED IN HELA, SIGNAL = 2.2; EXPRESSED IN HEART, SIGNAL = 2.3; SWISSPROT HIT: P06133, EVALUE 1.00e-37; NT HIT: AF064200.1, EVALUE 1.00e-121; EST_HUMAN HIT: BF689099.1, EVALUE 5.00e-82
gtcacccaaaaaccagagcttttataactcatggtggagccaatggcatctatgaggcaatctaccatggaatccctatggtgggcgttccattgtttgcagatcaacctgataacattgcacacatgaaggccaagggagcagctgttagtttggacttccacacaatgtcgagtacagacttactcaatgcactgaagacagtaattaatgatccttt

SEQ ID NO: 24906 - DNA, 348 bp, Homo sapiens
  MAP TO AL138827.2; EXPRESSED IN ADULT LIVER, SIGNAL = 3.2; EXPRESSED IN HELA, SIGNAL = 6.7; EXPRESSED IN HEART, SIGNAL = 4.9; EXPRESSED IN BRAIN, SIGNAL = 2.6; EXPRESSED IN PLACENTA, SIGNAL = 2.5; EXPRESSED IN BONE MARROW, SIGNAL = 2.4; EXPRESSED IN FETAL LIVER, SIGNAL = 6.4; EXPRESSED IN LUNG, SIGNAL = 2.7; SWISSPROT HIT: P18124, EVALUE 6.00e-37; EST_HUMAN HIT: AV761217.1, EVALUE 1.00e-71; NT HIT: X52967.1, EVALUE 2.00e-69
tcagaacacctttgtgtgcacaccattggaacttctgatcctgatgacaaatgccagtttggattctgcaggtatatagaggttgccagcttttcttgccattctggccattcgaatctccattctgtccatctgtgtatatttcttgtgaaagtgcttcagtttttcacagataagctttctccttgcctttacaagcaccttttgggcaaacttctttctcaggtgcttgatcttcagctctgcaaaacttctttgctttttcttgagggtttttggcaaagcaggaaccttcttctctttggcacactccttggttccggcaataaaagagggtatcatcaccat

SEQ ID NO: 24907 - DNA, 107 bp, Homo sapiens
  MAP TO AC007533.2; EXPRESSED IN BRAIN, SIGNAL = 3.2; EXPRESSED IN FETAL LIVER, SIGNAL = 3.4; EXPRESSED IN HELA, SIGNAL = 3.4; EXPRESSED IN BONE MARROW, SIGNAL = 3.2; EXPRESSED IN LUNG, SIGNAL = 2.1; EXPRESSED IN PLACENTA, SIGNAL = 7.4; EXPRESSED IN HEART, SIGNAL = 2.7; EXPRESSED IN ADULT LIVER, SIGNAL = 3.9; NT HIT: gi6679870, EVALUE 5.90e-02; SWISSPROT HIT: P20027, EVALUE 9.40e+00
tgcgtgatgaggggtgtataagcaagcaagtgcagggcagctgccccaggcgccaactccatgcaaggctgaggctcaaccgggcatactacaagcagcttctgact

SEQ ID NO: 24908 - DNA, 406 bp, Homo sapiens
  MAP TO AL133375.3; EXPRESSED IN PLACENTA, SIGNAL = 2.6; EXPRESSED IN BRAIN, SIGNAL = 3.4; EXPRESSED IN FETAL LIVER, SIGNAL = 2.9; EXPRESSED IN HELA, SIGNAL = 3.1; EXPRESSED IN BONE MARROW, SIGNAL = 3.4; EXPRESSED IN HEART, SIGNAL = 3.5; EXPRESSED IN LUNG, SIGNAL =   5; EXPRESSED IN ADULT LIVER, SIGNAL = 3.1; NT HIT: M18396.1, EVALUE 4.00e+00; SWISSPROT HIT: Q14999, EVALUE 2.00e-04; EST_HUMAN HIT: AW593333.1, EVALUE 0.00e+00
accctgggtgaaaaggccctaggtgagatctctgtgtccgtggaaatggccgagagtctgctgcaggttctcagtagtcgatttgagggcagcactctcaatgacctgctcaactcccagatctacaccaagtatgggctgctgtctaatgaaccaagcagctcgtctacttcacgaaatcactcctgtaccccagatccagaagaggagtccaagtcggaggccagcttctcagaggaagagactgagtccctcaaagcaaaggccgaggcccctaagacagaggccgagcccaccaagacaaggaccgagacccccatggcacagagtgattctcagctgtttaaccagcttctggtgactgaggggatgaccctgcccactgagatgaaggaggcagccagtg

SEQ ID NO: 24909 - DNA, 330 bp, Homo sapiens
  MAP TO AL158047.2; EXPRESSED IN ADULT LIVER, SIGNAL = 5.7; EXPRESSED IN HELA, SIGNAL =  15; EXPRESSED IN HEART, SIGNAL = 7.1; EXPRESSED IN PLACENTA, SIGNAL = 4.3; EXPRESSED IN BONE MARROW, SIGNAL =  15; EXPRESSED IN FETAL LIVER, SIGNAL =  14; EXPRESSED IN LUNG, SIGNAL =  12; EXPRESSED IN BRAIN, SIGNAL = 3.1; EST_HUMAN HIT: BE302666.1, EVALUE 1.00e-114; NT HIT: gi4506718, EVALUE 1.00e-112; SWISSPROT HIT: O18789, EVALUE 6.00e-47
atgaagatcaagtccctggaggagatctgtctcttttccctgcccatcaaggagtctgagatcattgactttttcctgggggcctctctcaaggatgaggttttgaagattatgctggtgcagaagcagatctgtgcaggccagcgcaccaggttcaaggcatttgttgccatcagggactacaatggccacgttggcctgggtgttaagtgctccaaggtggtggcccctgccatctgtggggccatcaacctagccaagctctccattgttcccgtgcacaaaggctactggaggaataagatcggcaagccccacgccatcccttga

SEQ ID NO: 24910 - DNA, 244 bp, Homo sapiens
  MAP TO AC024166.1; EXPRESSED IN HEART, SIGNAL = 1.8; EXPRESSED IN LUNG, SIGNAL = 1.8; EXPRESSED IN ADULT LIVER, SIGNAL = 1.9; EXPRESSED IN BRAIN, SIGNAL = 1.9; EXPRESSED IN PLACENTA, SIGNAL = 1.7; EXPRESSED IN FETAL LIVER, SIGNAL =   2; EXPRESSED IN BONE MARROW, SIGNAL = 1.7; EXPRESSED IN HELA, SIGNAL = 1.8; NT HIT: Z34897.1, EVALUE 0.00e+00; SWISSPROT HIT: P35367, EVALUE 7.00e-39
ttggacatgagcaggtagaggatgttcataggcatgacgacggcacccacgatcaagtccgccaccgagaggctgacgatgtacaggttccccacagtgtggagcttccgctcactccgtacggcatacagcaccagcaggttgagccctactgtgaccaagcagatagtgctcaggaccaccaccaggggcatcagctgggggctggccatagtggtcttgttgccctcacacatcttgtctt

SEQ ID NO: 24911 - DNA, 391 bp, Homo sapiens
  MAP TO AC007954.6; EXPRESSED IN PLACENTA, SIGNAL = 2.8; EXPRESSED IN ADULT LIVER, SIGNAL = 3.1; EXPRESSED IN BRAIN, SIGNAL =   3; EXPRESSED IN LUNG, SIGNAL = 2.8; EXPRESSED IN HEART, SIGNAL = 2.8; EXPRESSED IN HELA, SIGNAL = 3.2; EXPRESSED IN FETAL LIVER, SIGNAL = 3.2; EXPRESSED IN BONE MARROW, SIGNAL = 2.5; EST_HUMAN HIT: F13069.1, EVALUE 0.00e+00; SWISSPROT HIT: P39925, EVALUE 1.70e-02; NT HIT: AJ245944.1, EVALUE 0.00e+00
ctcatcccacctctgccaccaaaacactcatcgcggggtcagagggagtgccaaaaaaggtaaaaagaaacgcaagaaagaggctactggggatgaggggacacccagaagccccttcctggaggaaaagccactccttctgcagctggactctaggatactgagacccagccctgccccatcacctctccagtgtggccaaggggacaaggaccaagatgcagggaagcttggggagcctgggctacaacagatacaggccaacagacagacacagatggatgggggctgccgggcggggtcgcctcttactcgccatcccagcctcgactcatggcctgcactacggccccgtagagttggctccaggcagcccgtgtggctggtgtga

SEQ ID NO: 24912 - DNA, 188 bp, Homo sapiens
  MAP TO AP001206.1; EXPRESSED IN ADULT LIVER, SIGNAL =   4; EXPRESSED IN BONE MARROW, SIGNAL = 3.4; EXPRESSED IN HEART, SIGNAL = 4.3; EXPRESSED IN PLACENTA, SIGNAL = 3.4; EXPRESSED IN BRAIN, SIGNAL = 3.9; EXPRESSED IN HELA, SIGNAL = 4.7; EXPRESSED IN FETAL LIVER, SIGNAL = 4.3; EXPRESSED IN LUNG, SIGNAL = 3.9; EST_HUMAN HIT: AU138078.1, EVALUE 6.50e-01; SWISSPROT HIT: P07321, EVALUE 1.30e+00
atgacagccatttttaactctgaaaatgccagctggggcaaccaataacagctgtgccatccctccaggccccttgaggtcaaatgcaggctccacattcttaaagatcaacacctttttcaccaccataatgaggctaagaaaactcaggcaaacagggtctttatgcaccagaacttcagaacagg

SEQ ID NO: 24913 - DNA, 195 bp, Homo sapiens
  MAP TO AC009399.5; EXPRESSED IN BRAIN, SIGNAL = 2.6; EXPRESSED IN FETAL LIVER, SIGNAL = 5.1; EXPRESSED IN ADULT LIVER, SIGNAL = 3.2; EXPRESSED IN LUNG, SIGNAL = 2.4; EXPRESSED IN PLACENTA, SIGNAL = 3.1; EXPRESSED IN HEART, SIGNAL = 3.6; EXPRESSED IN HELA, SIGNAL = 5.1; EXPRESSED IN BONE MARROW, SIGNAL = 3.1; NT HIT: gi4506718, EVALUE 6.00e-19; SWISSPROT HIT: P25444, EVALUE 2.00e-08; EST_HUMAN HIT: AV761874.1, EVALUE 9.00e-22
ctgtgagagggtgtccccagaaatgtcgatgatctcagattccttgatgggcagggagaagagagagatctgctccagggacttgattttcatgttcttgtccaggcagcccagcatgcggatggtgacacactccttgtacttggtcttgcttctgtgagctctgtggtgtgggccctgagcacacctgcggtc

SEQ ID NO: 24914 - DNA, 140 bp, Homo sapiens
  MAP TO AL133312.2; EXPRESSED IN ADULT LIVER, SIGNAL = 2.5; EXPRESSED IN BONE MARROW, SIGNAL = 2.2; EXPRESSED IN HEART, SIGNAL = 7.4; EXPRESSED IN PLACENTA, SIGNAL = 2.6; EXPRESSED IN BRAIN, SIGNAL = 2.3; EXPRESSED IN HELA, SIGNAL = 3.7; EXPRESSED IN FETAL LIVER, SIGNAL = 3.7; EST_HUMAN HIT: AW968374.1, EVALUE 1.20e-01; SWISSPROT HIT: P52746, EVALUE 5.30e+00; NT HIT: AF217796.1, EVALUE 8.00e-02
gctgctggaggtggcagaagttgaatcaacagatgcttgctcccaaacaccctctggcttcttctcctcagttcccactgcattgtgccttgcaatctgtgcaaaggctctagaaagagctggggtagaagcctggaaaa

SEQ ID NO: 24915 - DNA, 81 bp, Homo sapiens
  MAP TO AC016663.2; EXPRESSED IN BONE MARROW, SIGNAL = 3.4; EXPRESSED IN HELA, SIGNAL = 3.8; EXPRESSED IN HEART, SIGNAL = 2.7; EXPRESSED IN LUNG, SIGNAL = 2.7; EXPRESSED IN PLACENTA, SIGNAL = 8.1; EXPRESSED IN BRAIN, SIGNAL = 2.5; EXPRESSED IN FETAL LIVER, SIGNAL = 3.4; EXPRESSED IN ADULT LIVER, SIGNAL = 1.8; NT HIT: AB026898.1, EVALUE 3.00e-15; SWISSPROT HIT: P13508, EVALUE 6.50e-01; EST_HUMAN HIT: BF591249.1, EVALUE 2.00e-14
tgcagcagacaccctgccagatccggaggggtggaagtcagcagcggtgtctgcaacgacagctatcagcagtggtggatg

SEQ ID NO: 24916 - DNA, 128 bp, Homo sapiens
  MAP TO AC019191.2; EXPRESSED IN PLACENTA, SIGNAL = 5.6; EXPRESSED IN HEART, SIGNAL = 3.9; EXPRESSED IN BRAIN, SIGNAL = 5.3; EXPRESSED IN LUNG, SIGNAL = 5.6; EXPRESSED IN HELA, SIGNAL = 6.4; EXPRESSED IN FETAL LIVER, SIGNAL = 4.9; EXPRESSED IN BONE MARROW, SIGNAL = 4.6; EXPRESSED IN ADULT LIVER, SIGNAL = 3.6; SWISSPROT HIT: Q9WXF2, EVALUE 5.40e+00; NT HIT: AL163249.2, EVALUE 3.00e-38; EST_HUMAN HIT: M78590.1, EVALUE 5.00e-47
cgtgaagaagatctgcagcttcactcctgagcccagcgagaccacgagcccaccgggagaaacgaacaactccagacgcactgccttaagagctgtaacactcaccgccaaggtctgcagcttcactc

SEQ ID NO: 24917 - DNA, 100 bp, Homo sapiens
  MAP TO AL133163.2; EXPRESSED IN BONE MARROW, SIGNAL =  11; EXPRESSED IN HEART, SIGNAL = 3.7; EXPRESSED IN PLACENTA, SIGNAL = 2.9; EXPRESSED IN FETAL LIVER, SIGNAL = 4.1; EXPRESSED IN HELA, SIGNAL = 5.5; EXPRESSED IN LUNG, SIGNAL =  14; EXPRESSED IN BRAIN, SIGNAL = 2.2; EXPRESSED IN ADULT LIVER, SIGNAL = 2.9; SWISSPROT HIT: Q9QUM9, EVALUE 9.00e-13; EST_HUMAN HIT: BE797925.1, EVALUE 3.00e-35; NT HIT: X59417.1, EVALUE 2.00e-35
taaagccactgcagcgggagttaaacaaactgagtcaaccagcttccttgaaaaaaaagtgaagaagaaatttgattggacatttgaacagacagtggaa

SEQ ID NO: 24918 - DNA, 421 bp, Homo sapiens
  MAP TO AL132641.2; EXPRESSED IN PLACENTA, SIGNAL = 2.3; EXPRESSED IN HELA, SIGNAL =   2; EXPRESSED IN LUNG, SIGNAL =   5; EXPRESSED IN FETAL LIVER, SIGNAL = 3.9; EXPRESSED IN HEART, SIGNAL = 2.1; EXPRESSED IN BRAIN, SIGNAL = 1.8; NT HIT: D10083.1, EVALUE 0.00e+00; EST_HUMAN HIT: BE150340.1, EVALUE 1.00e-126; SWISSPROT HIT: P10272, EVALUE 1.00e-28
tgaggtaaccgctctgcccccctccactacctctcagcaagccaaactagttgccttaactcaagccctcactcttgcaaaaggactatgtatcaatatttatagtgactctaaatatgcctttcatattctgcaccaccatgctgttatacaggctgaaagaggtttcctcactacgcaagggtcctccatcattaatgcctctttaataaaagctctgctcaaggctactttacttccaaaggaagctggagtcattcactgcaaaggccatcaaaaggcgtcagatcccattgctctagacaacgcttatgctgataaggtggctagacaagcaggtagctttccaacttctgtccctcacagccagtttttctccttcacatcagtcactcccacctacccccccgcccccccgctg

SEQ ID NO: 24919 - DNA, 163 bp, Homo sapiens
  MAP TO AL133124.2; EXPRESSED IN BRAIN, SIGNAL = 5.2; EXPRESSED IN ADULT LIVER, SIGNAL = 4.5; EXPRESSED IN HELA, SIGNAL = 7.3; EXPRESSED IN BONE MARROW, SIGNAL = 4.1; EXPRESSED IN HEART, SIGNAL = 5.9; EXPRESSED IN PLACENTA, SIGNAL = 4.5; EXPRESSED IN LUNG, SIGNAL = 3.5; EXPRESSED IN FETAL LIVER, SIGNAL = 6.4; NT HIT: AL163280.2, EVALUE 9.00e-33; SWISSPROT HIT: P08547, EVALUE 1.00e-13; EST_HUMAN HIT: AW418752.1, EVALUE 5.00e-26
aagacaacttaggcaataccatcttggacgtaggagtgggcaaagatttcatgacaaagataacaaaagcaatctcaacgaaagcaaatgttgacaaacgatatctaattaaacttaagagcttctgtgcagcaagagaaactatcaacagagtagacagagg

SEQ ID NO: 24920 - DNA, 288 bp, Homo sapiens
  MAP TO AC008865.3; EXPRESSED IN BRAIN, SIGNAL = 4.3; EXPRESSED IN PLACENTA, SIGNAL = 2.9; EXPRESSED IN FETAL LIVER, SIGNAL = 4.9; EXPRESSED IN HELA, SIGNAL = 5.4; EXPRESSED IN ADULT LIVER, SIGNAL = 3.7; EXPRESSED IN BONE MARROW, SIGNAL =   3; EXPRESSED IN HEART, SIGNAL = 4.2; EXPRESSED IN LUNG, SIGNAL = 2.2; EST_HUMAN HIT: AI824829.1, EVALUE 3.00e-93; SWISSPROT HIT: P75831, EVALUE 5.00e+00
ctagtgatagccacacagggccgtaaggctcagctgatcatcactgggtgaggaagtgtcagggtcactgcagatctgagtcagggctaagctcaatatttctttcttttctttgtaaaaccgtagttcttgtcctgctttcctggcttcctccaactgcctcagggccattcgtagctcttgagagacaattcctggtgagtcccgctccttcatgatccagtccagggccatgtggctgcgcatcttttcatctagagaatactgagaatagtaggagatgacttc

SEQ ID NO: 24921 - DNA, 171 bp, Homo sapiens
  MAP TO AL133454.2; EXPRESSED IN HELA, SIGNAL = 5.3; EXPRESSED IN LUNG, SIGNAL =   2; EXPRESSED IN BONE MARROW, SIGNAL = 3.3; EXPRESSED IN FETAL LIVER, SIGNAL = 5.2; EXPRESSED IN ADULT LIVER, SIGNAL = 3.5; EXPRESSED IN HEART, SIGNAL = 4.5; EXPRESSED IN BRAIN, SIGNAL = 3.2; EXPRESSED IN PLACENTA, SIGNAL = 2.9; EST_HUMAN HIT: BE538812.1, EVALUE 1.00e-91; NT HIT: AF074393.1, EVALUE 8.00e-92; SWISSPROT HIT: Q14012, EVALUE 6.00e-13
ctcaggtttcagatccctgtgcaccactccaacatcatgcatgtggcttacagctgaaacaagcttcctcatgatgtagctggcttccgtctcactgaagtgcttctttttcttaatgcgctcaaacagttctcctccattcagaagttccatcactagaaacgtgtgaag

SEQ ID NO: 24922 - DNA, 193 bp, Homo sapiens
  MAP TO AC008444.3; EXPRESSED IN BRAIN, SIGNAL = 2.6; EXPRESSED IN HELA, SIGNAL = 3.2; EXPRESSED IN HEART, SIGNAL = 2.5; EXPRESSED IN ADULT LIVER, SIGNAL = 2.4; EXPRESSED IN FETAL LIVER, SIGNAL = 2.6; EXPRESSED IN PLACENTA, SIGNAL = 2.1; EXPRESSED IN LUNG, SIGNAL = 3.6; EXPRESSED IN BONE MARROW, SIGNAL = 2.5; SWISSPROT HIT: P24504, EVALUE 2.20e+00; EST_HUMAN HIT: AA814617.1, EVALUE 1.70e-01
gatctagcttctgtttcagaagagaaacaatcctcaagtgacagggagtctggtgaaatggtcctcacacatttcaaaggggataagagccaacccacttatgagggctactcagatcctcagcagggcaaaaagcaagcttttttcccagataaaatttgtcttttggcaatgggggtctccttggccaaaa

SEQ ID NO: 24923 - DNA, 264 bp, Homo sapiens
  MAP TO AC010305.3; EXPRESSED IN BRAIN, SIGNAL =  16; EXPRESSED IN ADULT LIVER, SIGNAL =  15; EXPRESSED IN HELA, SIGNAL =  25; EXPRESSED IN HEART, SIGNAL =  14; EXPRESSED IN PLACENTA, SIGNAL =  20; EXPRESSED IN LUNG, SIGNAL =  26; EXPRESSED IN FETAL LIVER, SIGNAL =  36; EXPRESSED IN BONE MARROW, SIGNAL =  32; NT HIT: D50104.1, EVALUE 1.00e-106; EST_HUMAN HIT: BF694831.1, EVALUE 1.00e-109; SWISSPROT HIT: P79103, EVALUE 3.00e-40
gtagcagatggtgtgagcatcatgagtcaccacatgagggattccttttgtgcccacaaagatttttctcactttgcacaacttgtacttggcttcctcaggtgtaatacaatgtaaagcaaagtgacccttggtgtcatagatcagacaaaaattctctcccatcttgtcaatgctgatgacatccatgaatccagcagggtaggttttgtcagttcggaccttgccatcgatcttaatgaactgctgcatgcaactcttctt

SEQ ID NO: 24924 - DNA, 82 bp, Homo sapiens
  MAP TO AC021881.2; EXPRESSED IN PLACENTA, SIGNAL = 2.4; EXPRESSED IN HELA, SIGNAL = 2.7; EXPRESSED IN BRAIN, SIGNAL = 2.2; EXPRESSED IN LUNG, SIGNAL = 2.7; EXPRESSED IN HEART, SIGNAL = 2.1; EXPRESSED IN FETAL LIVER, SIGNAL = 2.3; EXPRESSED IN BONE MARROW, SIGNAL = 1.8; EXPRESSED IN ADULT LIVER, SIGNAL =   2; EST_HUMAN HIT: BF331829.1, EVALUE 6.00e-39; NT HIT: gi11423233, EVALUE 6.60e-01; SWISSPROT HIT: Q48960, EVALUE 9.60e+00
gattaggagggataaaatacgaactacaaagaataaagaagctcggtcatttattcaacaaacactggctatctaccatact

SEQ ID NO: 24925 - DNA, 355 bp, Homo sapiens
  MAP TO AC023074.2; EXPRESSED IN PLACENTA, SIGNAL = 1.7; EXPRESSED IN BONE MARROW, SIGNAL = 2.2; EXPRESSED IN LUNG, SIGNAL = 1.8; EXPRESSED IN BRAIN, SIGNAL =   2; EXPRESSED IN HEART, SIGNAL = 2.5; EXPRESSED IN HELA, SIGNAL = 2.4; EXPRESSED IN FETAL LIVER, SIGNAL =   2; EXPRESSED IN ADULT LIVER, SIGNAL = 2.4; SWISSPROT HIT: Q10335, EVALUE 2.50e-02; NT HIT: gi4885214, EVALUE 5.60e-02
accttgtgctatcctgcaaaatcctttgtcttctcacatgcaattcttgcaatatctacttgaattaaagaacttgacagaatcaggtaatcttaaaagagacttaacccactttgaaaaagactcttccacagtctctgattctgtttttcaattgctggatggcctgatcactttttaccgtaatcccaaacttcctttttcaagattttggacagaagctgttggtactttagctagtctgatcagtgactataacttatctagtcatattcttaaaaagtgttccaagaagttggaagaatttgagaaaaccctactacatgctattttaggaaacaatcatataaatcag

SEQ ID NO: 24926 - DNA, 161 bp, Homo sapiens
  MAP TO AC016313.5; EXPRESSED IN HELA, SIGNAL = 2.2; EXPRESSED IN HEART, SIGNAL = 2.2; EXPRESSED IN BRAIN, SIGNAL = 2.5; EXPRESSED IN PLACENTA, SIGNAL = 1.9; EXPRESSED IN ADULT LIVER, SIGNAL = 2.3; EXPRESSED IN BONE MARROW, SIGNAL = 1.6; EXPRESSED IN FETAL LIVER, SIGNAL = 2.2; EXPRESSED IN LUNG, SIGNAL = 1.9; NT HIT: gi11545814, EVALUE 6.00e-03; SWISSPROT HIT: P00532, EVALUE 5.20e+00; EST_HUMAN HIT: AW302178.1, EVALUE 9.00e-03
gaacacagtgctaggtgttcaaatgattataaaggaatgtgggaagatgttttttccctatgttatccgtgctattgacctcctgagttctcagatgacctctataaggcagagctctcctgacaatgcacatatgggcacatctgtggatcccataaatg

SEQ ID NO: 24927 - DNA, 88 bp, Homo sapiens
  MAP TO AC022035.2; EXPRESSED IN BRAIN, SIGNAL = 1.6; EXPRESSED IN PLACENTA, SIGNAL =   2; EXPRESSED IN FETAL LIVER, SIGNAL = 2.3; EXPRESSED IN HELA, SIGNAL = 2.2; EXPRESSED IN ADULT LIVER, SIGNAL = 1.6; EXPRESSED IN BONE MARROW, SIGNAL = 4.9; EXPRESSED IN LUNG, SIGNAL = 1.7; EXPRESSED IN HEART, SIGNAL = 1.8; SWISSPROT HIT: P03114, EVALUE 9.60e+00; EST_HUMAN HIT: AV705043.1, EVALUE 2.70e-01; NT HIT: AJ274558.1, EVALUE 2.80e+00
cttattccactggataagacaagtttattgaattggggaagtgtactctgcttccatgacgccaaggcaaggttgtggatgcatcctc

SEQ ID NO: 24928 - DNA, 211 bp, Homo sapiens
  MAP TO AC022274.3; EXPRESSED IN BRAIN, SIGNAL = 2.2; EXPRESSED IN PLACENTA, SIGNAL = 2.3; EXPRESSED IN HELA, SIGNAL = 4.1; EXPRESSED IN ADULT LIVER, SIGNAL = 2.1; EXPRESSED IN BONE MARROW, SIGNAL = 1.5; EXPRESSED IN FETAL LIVER, SIGNAL = 3.9; EXPRESSED IN LUNG, SIGNAL = 2.5; EXPRESSED IN HEART, SIGNAL = 3.9; SWISSPROT HIT: Q9Z265, EVALUE 3.30e-01; EST_HUMAN HIT: AW813783.1, EVALUE 4.00e-64; NT HIT: AL163210.2, EVALUE 1.00e-54
gaatatggacaatgaagtccaggttgaggtggtctcagatggagatgaggaacttcttgggaactggagcaaaagccactcttgctatgctttagcaaagagactggtggcattgtgcccctgccatagagatatgtggaactttgaaactgagagagattatttagagtatctggcagaagaaatttctaagcagcaaagcattcaagag

SEQ ID NO: 24929 - DNA, 87 bp, Homo sapiens
  MAP TO AL121820.2; EXPRESSED IN BRAIN, SIGNAL = 1.7; EXPRESSED IN ADULT LIVER, SIGNAL =   2; EXPRESSED IN HELA, SIGNAL = 7.9; EXPRESSED IN LUNG, SIGNAL = 2.6; EXPRESSED IN HEART, SIGNAL = 4.6; EXPRESSED IN PLACENTA, SIGNAL = 1.7; EXPRESSED IN FETAL LIVER, SIGNAL = 6.5; EXPRESSED IN BONE MARROW, SIGNAL = 2.3; NT HIT: gi4506596, EVALUE 1.00e-05; SWISSPROT HIT: P50884, EVALUE 1.70e-01; EST_HUMAN HIT: AI535743.1, EVALUE 7.00e-08
atcactgcagaggcagaagatgccacttgaatctggcctgtgtgttctgcaccgtcagtttcactgggatcctctggcccttccagt

SEQ ID NO: 24930 - DNA, 141 bp, Homo sapiens
  MAP TO AL121769.2; EXPRESSED IN BRAIN, SIGNAL =  13; EXPRESSED IN FETAL LIVER, SIGNAL = 5.5; EXPRESSED IN ADULT LIVER, SIGNAL = 2.6; EXPRESSED IN PLACENTA, SIGNAL = 3.3; EXPRESSED IN LUNG, SIGNAL =  11; EXPRESSED IN HEART, SIGNAL = 3.2; EXPRESSED IN HELA, SIGNAL =   6; EXPRESSED IN BONE MARROW, SIGNAL =   8; SWISSPROT HIT: Q15701, EVALUE 2.00e-07; NT HIT: gi4505812, EVALUE 9.00e-48; EST_HUMAN HIT: AA312079.1, EVALUE 6.00e-50
cgcctgaggagcgcactccaccgagttctgctgcgtctcttccgacatgtccgcatttttgatcacggccttttggtcgcacatggttacccatggagaagggggctggctgactgcaacggtctcctggggaggtgctaa

SEQ ID NO: 24931 - DNA, 395 bp, Homo sapiens
  MAP TO AL122127.3; EXPRESSED IN BRAIN, SIGNAL = 2.1; EXPRESSED IN PLACENTA, SIGNAL = 1.7; EXPRESSED IN FETAL LIVER, SIGNAL = 3.6; EXPRESSED IN ADULT LIVER, SIGNAL = 3.1; EXPRESSED IN BONE MARROW, SIGNAL =  40; EXPRESSED IN HELA, SIGNAL = 2.7; EXPRESSED IN HEART, SIGNAL = 2.9; EXPRESSED IN LUNG, SIGNAL =  30; NT HIT: X57331.1, EVALUE 0.00e+00; EST_HUMAN HIT: AW338094.1, EVALUE 0.00e+00; SWISSPROT HIT: P01871, EVALUE 1.00e-73
tcagtagcaggtgccagctgtgtcggacatgaccagggacacgttgtacagggtgggtttaccggtggacttgtccacggtcctctcggtgaccctgttgggcagggcctcatgggccaccacgcaggtgtaggtctcccccgtgttccattcctcttcggacacggtcaggatgctgtgggcgaagtaccggcctggggcctggggctcaggcattggggcgctggtcacatacttctccggggacaagggctgccccctctgcatccactgcacgaagacgtccgcgggagagaagcccgtcaccaggcacgtgatggtggccgactcccgcaggttcagctgctcccgggctggtggcagcaagtagacatcgggcctgtgcagggccaccc

SEQ ID NO: 24932 - DNA, 295 bp, Homo sapiens
  MAP TO AL049781.4; EXPRESSED IN ADULT LIVER, SIGNAL = 4.4; EXPRESSED IN HEART, SIGNAL = 5.6; EXPRESSED IN BRAIN, SIGNAL = 4.6; EXPRESSED IN PLACENTA, SIGNAL = 3.8; EXPRESSED IN BONE MARROW, SIGNAL = 3.5; EXPRESSED IN FETAL LIVER, SIGNAL = 5.8; EXPRESSED IN HELA, SIGNAL = 5.9; EXPRESSED IN LUNG, SIGNAL = 1.8; SWISSPROT HIT: P19561, EVALUE 1.40e+00; NT HIT: gi5729892, EVALUE 1.00e-119; EST_HUMAN HIT: AW451230.1, EVALUE 0.00e+00
tccctctgtcgtgaaatcaagcaacgacgtcgaggagttgcctccattctgcgactatgccagcatcttttggatgaccgggagacttgcaatctgaatgcagaccaccagcccatgcagctgatcattgtaaatcttgaaagaaggtgggaagccattgtcatgcaagccgtccagtggcaaacacgtctacaaaagaagatgggaaaggaatctgtgagtgatgctttttttaagcataattgtctgtcattttctcagacaaaaaataattctttcaggcttggaaacggtg

SEQ ID NO: 24933 - DNA, 117 bp, Homo sapiens
  MAP TO AC023392.2; EXPRESSED IN BONE MARROW, SIGNAL = 4.2; EXPRESSED IN LUNG, SIGNAL = 3.1; EXPRESSED IN BRAIN, SIGNAL = 3.6; EXPRESSED IN PLACENTA, SIGNAL =   3; EXPRESSED IN ADULT LIVER, SIGNAL = 3.1; EXPRESSED IN FETAL LIVER, SIGNAL = 6.9; EXPRESSED IN HELA, SIGNAL = 6.9; EXPRESSED IN HEART, SIGNAL = 6.8; NT HIT: AF044083.1, EVALUE 1.00e-15; EST_HUMAN HIT: BE677411.1, EVALUE 2.00e-15; SWISSPROT HIT: Q04948, EVALUE 5.40e+00
gaaacttacagtcatggaggaagacaaagctggagtgggacatttcacatggctggagctggaggaagagagagaagtgggaggtgctacacactttcaaaacaaccagatctgctg

SEQ ID NO: 24934 - DNA, 120 bp, Homo sapiens
  MAP TO AC018651.4; EXPRESSED IN BRAIN, SIGNAL =   2; EXPRESSED IN PLACENTA, SIGNAL = 1.4; EXPRESSED IN HELA, SIGNAL = 1.6; EXPRESSED IN LUNG, SIGNAL = 8.7; EXPRESSED IN ADULT LIVER, SIGNAL = 2.6; EXPRESSED IN FETAL LIVER, SIGNAL = 1.8; EXPRESSED IN HEART, SIGNAL = 2.2; EST_HUMAN HIT: AV695974.1, EVALUE 3.90e-01; SWISSPROT HIT: P81021, EVALUE 7.10e+00
tcaggggaggtagaattcattatctcccatagtcagggattccgggacggcattctgaagatggctctttaggtgagttttcatgttggagacaggggaggagaccaggaagtggaaaca

SEQ ID NO: 24935 - DNA, 299 bp, Homo sapiens
  MAP TO AC018836.2; EXPRESSED IN PLACENTA, SIGNAL = 1.8; EXPRESSED IN ADULT LIVER, SIGNAL = 1.7; EXPRESSED IN FETAL LIVER, SIGNAL = 2.2; EXPRESSED IN HELA, SIGNAL = 2.2; EXPRESSED IN LUNG, SIGNAL = 2.3; EXPRESSED IN HEART, SIGNAL =   2; EXPRESSED IN BRAIN, SIGNAL = 2.5; EST_HUMAN HIT: AW956205.1, EVALUE 2.00e-85; NT HIT: AB014567.1, EVALUE 0.00e+00; SWISSPROT HIT: Q9X4F7, EVALUE 4.20e+00
gcccacctgtccacgtagcatatggaggttgctgccggtctgggtgggttcctccatggcctccagccatcccttcgggggctgtgtttgccgcagcagcacgatgtaagcagtgaagacgtcagccttgacgttctcctcgcgttctttgaagcggcggatgagcacaggtgccagggtgcagtggaaatcgggcagcaggtcaggccgcgagctgatcaaggctgcgatgcacttggcagctgcccggcgcaccttccagctcatgtcatcgtcatcgctgtactcgtcttcactct

SEQ ID NO: 24936 - DNA, 122 bp, Homo sapiens
  MAP TO AC004808.1; EXPRESSED IN BRAIN, SIGNAL = 3.1; EXPRESSED IN PLACENTA, SIGNAL = 2.6; EXPRESSED IN LUNG, SIGNAL = 1.9; EXPRESSED IN HEART, SIGNAL = 4.1; EXPRESSED IN HELA, SIGNAL = 4.3; EXPRESSED IN FETAL LIVER, SIGNAL = 3.6; EXPRESSED IN BONE MARROW, SIGNAL = 2.3; EXPRESSED IN ADULT LIVER, SIGNAL = 3.3; NT HIT: AJ133269.1, EVALUE 2.70e-01; EST_HUMAN HIT: BF576965.1, EVALUE 4.00e-01
ataagtggaatcatattataaatacaaaggctgactttgaaaagtatgtctttggtggattcctttatgaagctgagaaaatggttgtaaagggaatgattatttccaatttatctgttaca

SEQ ID NO: 24937 - DNA, 94 bp, Homo sapiens
  MAP TO AL132796.2; EXPRESSED IN BRAIN, SIGNAL = 3.3; EXPRESSED IN PLACENTA, SIGNAL =   2; EXPRESSED IN ADULT LIVER, SIGNAL = 2.9; EXPRESSED IN BONE MARROW, SIGNAL = 2.2; EXPRESSED IN FETAL LIVER, SIGNAL = 3.2; EXPRESSED IN HELA, SIGNAL = 3.4; EXPRESSED IN HEART, SIGNAL = 2.7; EXPRESSED IN LUNG, SIGNAL = 3.5; EST_HUMAN HIT: AI583847.1, EVALUE 1.00e-03; NT HIT: AJ003021.1, EVALUE 5.00e-02
taagaaaggaaaggagggaaggagagagaataagagtgagaataaaaaggcattgttcatgatcctgttcggggtgcctctcatgcctgacaaa

SEQ ID NO: 24938 - DNA, 251 bp, Homo sapiens
  MAP TO AC011989.3; EXPRESSED IN BRAIN, SIGNAL = 7.3; EXPRESSED IN PLACENTA, SIGNAL = 4.5; EXPRESSED IN HELA, SIGNAL = 6.5; EXPRESSED IN FETAL LIVER, SIGNAL = 5.5; EXPRESSED IN HEART, SIGNAL = 5.2; EXPRESSED IN LUNG, SIGNAL = 4.2; EXPRESSED IN ADULT LIVER, SIGNAL = 5.4; EXPRESSED IN BONE MARROW, SIGNAL = 4.4; EST_HUMAN HIT: AW844613.1, EVALUE 2.30e-01; NT HIT: AL163280.2, EVALUE 1.50e-01; SWISSPROT HIT: Q58361, EVALUE 8.70e+00
cttagaacaatggtcactgagaaggtgacattgtaagctgacactggaaggataaaaacgacacaagcctgaaagagcctagagaggtgggttccaggcagaacgcacaggagggtaaaagtcagaagcaggaaagagtgtgctgtgttttcataactaagagtagctgctgatggctggatcttagaaaaggggaacatggcatgagtgaggtcagagaggttggtagggaccaggtcatacagaaattt

SEQ ID NO: 24939 - DNA, 184 bp, Homo sapiens
  MAP TO AC003692.1; EXPRESSED IN BRAIN, SIGNAL = 2.2; EXPRESSED IN ADULT LIVER, SIGNAL = 2.9; EXPRESSED IN BONE MARROW, SIGNAL = 2.5; EXPRESSED IN LUNG, SIGNAL = 1.9; EXPRESSED IN PLACENTA, SIGNAL = 1.9; EXPRESSED IN HEART, SIGNAL =   3; EXPRESSED IN HELA, SIGNAL = 2.2; EXPRESSED IN FETAL LIVER, SIGNAL = 2.1; NT HIT: gi11439599, EVALUE 5.00e-93; SWISSPROT HIT: P80303, EVALUE 7.00e-14; EST_HUMAN HIT: AI758221.1, EVALUE 8.00e-93
ctgatgatattccagcttctgagcctccagttgatcatgctgacgttgtagctcttctttttgtttctgaagctcatctgccttcttcttaagttcattttcttgtaaagcaataatattttcatattcttttagttcttcctctgtgaagaactgttgctcatctaatgtctaaaagaaaaaa

SEQ ID NO: 24940 - DNA, 192 bp, Homo sapiens
  MAP TO AC011683.3; EXPRESSED IN BONE MARROW, SIGNAL = 2.2; EXPRESSED IN FETAL LIVER, SIGNAL = 3.5; EXPRESSED IN HEART, SIGNAL = 3.4; EXPRESSED IN PLACENTA, SIGNAL = 2.4; EXPRESSED IN BRAIN, SIGNAL = 2.6; EXPRESSED IN HELA, SIGNAL = 3.3; EXPRESSED IN ADULT LIVER, SIGNAL = 2.5; EXPRESSED IN LUNG, SIGNAL = 2.4; SWISSPROT HIT: P53334, EVALUE 3.80e+00; NT HIT: AB008852.1, EVALUE 7.00e-03; EST_HUMAN HIT: AA830026.1, EVALUE 4.30e-02
tttccagtgtcatcttcagcagcaggggagcaggattagcattaatgacaggagacacaatgccagaggcctgggagggcaggtcctagtgctaacagcaggaacttgtaacagcagtgacctcaagagctgggaaagatctgcttctcttttgctccttcaactctggagtccacagttactaagcatctg

SEQ ID NO: 24941 - DNA, 307 bp, Homo sapiens
  MAP TO AL122021.3; EXPRESSED IN ADULT LIVER, SIGNAL = 2.2; EXPRESSED IN FETAL LIVER, SIGNAL = 4.7; EXPRESSED IN BRAIN, SIGNAL = 2.4; EXPRESSED IN PLACENTA, SIGNAL = 1.9; EXPRESSED IN BONE MARROW, SIGNAL = 2.9; EXPRESSED IN HELA, SIGNAL = 4.9; EXPRESSED IN HEART, SIGNAL = 3.9; SWISSPROT HIT: Q09562, EVALUE 3.30e+00; NT HIT: AL163303.2, EVALUE 5.00e-11; EST_HUMAN HIT: BF347229.1, EVALUE 7.00e-33
aaatacatttcataaggctgtagctgccatacataatgattcctctgatgagtctgagcaaagtgatttgaacatcttctggaaaggagtcatcattgtagatgccattaagaacatttgtgatgaattggaagaggtcaaaataccaacattaacaagagtttggaagaagttgattccaaggctcatggatgactttgagagcttcaagacttcactagaggatgccactgctgatgtgttggaattagaagtagagtgtgaagatgtgactgaaatgctgcatctcatgataaaacttgaatga

SEQ ID NO: 24942 - DNA, 96 bp, Homo sapiens
  MAP TO AL122010.2; EXPRESSED IN ADULT LIVER, SIGNAL = 2.5; EXPRESSED IN HEART, SIGNAL = 2.4; EXPRESSED IN BRAIN, SIGNAL = 2.4; EXPRESSED IN PLACENTA, SIGNAL = 1.8; EXPRESSED IN BONE MARROW, SIGNAL = 2.2; EXPRESSED IN HELA, SIGNAL =   3; EXPRESSED IN LUNG, SIGNAL = 2.8; EXPRESSED IN FETAL LIVER, SIGNAL = 2.9; SWISSPROT HIT: Q65399, EVALUE 1.90e+00; NT HIT: AF083930.1, EVALUE 5.10e-02; EST_HUMAN HIT: AW139443.1, EVALUE 7.50e-02
aaagtttgaggagaatggagaaattgaggaaactgccaccatgtacaacagcagagagaccaaagcagaattcgtcaggtggcaccgagcgcccag

SEQ ID NO: 24943 - DNA, 149 bp, Homo sapiens
  MAP TO AC002401.1; EXPRESSED IN BONE MARROW, SIGNAL = 2.3; EXPRESSED IN FETAL LIVER, SIGNAL = 2.5; EXPRESSED IN LUNG, SIGNAL = 3.5; EXPRESSED IN BRAIN, SIGNAL = 2.6; EXPRESSED IN PLACENTA, SIGNAL = 2.2; EXPRESSED IN ADULT LIVER, SIGNAL = 1.8; EXPRESSED IN HELA, SIGNAL = 2.3; EXPRESSED IN HEART, SIGNAL = 1.8; SWISSPROT HIT: Q01484, EVALUE 4.10e-02; NT HIT: AF027181.1, EVALUE 5.00e-34; EST_HUMAN HIT: AW410698.1, EVALUE 2.00e-59
gtgttcagcacttactccaacgaggattacgatcgtcgcaacgaggatgtggatcccatggcagcctctgctgagtacgagctggagaagcgtgtggagaggttggagctgttccctgtggagctggagaagggtgagaggccaggagg

SEQ ID NO: 24944 - DNA, 75 bp, Homo sapiens
  MAP TO AC009680.5; EXPRESSED IN FETAL LIVER, SIGNAL = 5.8; EXPRESSED IN HEART, SIGNAL = 5.5; EXPRESSED IN BRAIN, SIGNAL = 5.2; EXPRESSED IN PLACENTA, SIGNAL = 5.9; EXPRESSED IN LUNG, SIGNAL = 7.3; EXPRESSED IN ADULT LIVER, SIGNAL =   6; EXPRESSED IN BONE MARROW, SIGNAL = 4.6; EXPRESSED IN HELA, SIGNAL = 6.2; NT HIT: AL161554.2, EVALUE 2.30e+00; EST_HUMAN HIT: BF363970.1, EVALUE 8.70e-01
attcaagtttacatccacacggtctttaatttttagtgtaatgaggataactttcagtgtaatcacgtacatgtt

SEQ ID NO: 24945 - DNA, 117 bp, Homo sapiens
  MAP TO AL050303.2; EXPRESSED IN ADULT LIVER, SIGNAL =   5; EXPRESSED IN BONE MARROW, SIGNAL = 4.6; EXPRESSED IN HEART, SIGNAL = 5.4; EXPRESSED IN BRAIN, SIGNAL = 6.4; EXPRESSED IN PLACENTA, SIGNAL = 4.2; EXPRESSED IN HELA, SIGNAL = 5.8; EXPRESSED IN FETAL LIVER, SIGNAL = 5.9; EXPRESSED IN LUNG, SIGNAL = 7.5; SWISSPROT HIT: P31258, EVALUE 4.10e+00; NT HIT: AL163204.2, EVALUE 8.00e-60; EST_HUMAN HIT: AW502186.1, EVALUE 9.60e-02
agcgggttgtgcgggctctgggctctgtgccggcgctgggctctgtgcagccgccgagatggggctgagcagcggatttcctccctgctgcagctggaggacgattacctgcactag

SEQ ID NO: 24946 - DNA, 463 bp, Homo sapiens
  MAP TO AC007227.3; EXPRESSED IN BRAIN, SIGNAL =   2; EXPRESSED IN PLACENTA, SIGNAL = 1.9; EXPRESSED IN ADULT LIVER, SIGNAL = 1.7; EXPRESSED IN BONE MARROW, SIGNAL = 2.1; EXPRESSED IN FETAL LIVER, SIGNAL = 2.3; EXPRESSED IN HELA, SIGNAL = 2.8; EXPRESSED IN LUNG, SIGNAL = 2.9; EXPRESSED IN HEART, SIGNAL = 2.3; EST_HUMAN HIT: BE298449.1, EVALUE 0.00e+00; SWISSPROT HIT: P35269, EVALUE 3.00e-04; NT HIT: AB029012.1, EVALUE 0.00e+00
ccacccaaagttggtgatgacagtgacctgagtgaaggctttgaatcggactcaagccatgactcagcccgggccagtgagggctcagacagtggctctgacaagagtcttgaaggtgggggaacggcctttgatgctgaaacagactcggaaatgaatagccaggagtcccgatcagacttggaagatatggaggaagaggaggggacacggtcaccaaccctggagccccctcggggcagatcagaggctcccgattccctcaatggcccactgggccccagtgaggctagcattgccagcaatctacaagccatgtccacccagatgttccagactaagcgctgcttccgactggcccccacctttagcaacctgctcctccagcccaccaccaaccctcatacctcggccagccacaggccttgcgtcaatggggatgtagacaagccttcagagccag

SEQ ID NO: 24947 - DNA, 110 bp, Homo sapiens
  MAP TO AL121819.1; EXPRESSED IN BRAIN, SIGNAL = 1.4; EXPRESSED IN PLACENTA, SIGNAL =   2; EXPRESSED IN BONE MARROW, SIGNAL = 1.8; EXPRESSED IN FETAL LIVER, SIGNAL = 2.9; EXPRESSED IN HELA, SIGNAL = 2.7; EXPRESSED IN HEART, SIGNAL =   2; EXPRESSED IN ADULT LIVER, SIGNAL = 2.2; SWISSPROT HIT: P09713, EVALUE 3.20e+00; NT HIT: AF030199.1, EVALUE 2.40e-01; EST_HUMAN HIT: BE743721.1, EVALUE 1.40e+00
ctctctggcctttatgggtttggctgtgggaatctgcaccagaaggcctagaccctggaagggaatcatgtcagctgccttggaggcaacaccttcatgagagtaagtac

SEQ ID NO: 24948 - DNA, 105 bp, Homo sapiens
  MAP TO AL157951.1; EXPRESSED IN FETAL LIVER, SIGNAL = 2.4; EXPRESSED IN HEART, SIGNAL =   2; EXPRESSED IN LUNG, SIGNAL =   7; EXPRESSED IN PLACENTA, SIGNAL = 1.7; EXPRESSED IN BRAIN, SIGNAL = 2.1; EXPRESSED IN HELA, SIGNAL = 2.7; SWISSPROT HIT: P49721, EVALUE 3.00e-14; NT HIT: gi11426321, EVALUE 1.00e-52; EST_HUMAN HIT: AA534684.1, EVALUE 2.00e-52
ctccagaaacgcttcatcctgaatctgccaaccttcagtgttcgaatcattgacaaaaatggcatccatgacctggataacatttccttccccaaacagggctcc

SEQ ID NO: 24949 - DNA, 98 bp, Homo sapiens
  MAP TO AC013533.3; EXPRESSED IN BRAIN, SIGNAL = 1.3; EXPRESSED IN PLACENTA, SIGNAL = 1.8; EXPRESSED IN BONE MARROW, SIGNAL = 2.4; EXPRESSED IN HELA, SIGNAL = 1.9; EXPRESSED IN HEART, SIGNAL =   2; EXPRESSED IN FETAL LIVER, SIGNAL = 1.9; EST_HUMAN HIT: BF216117.1, EVALUE 3.10e-01; SWISSPROT HIT: P03070, EVALUE 5.50e+00
ctgcaacactggttctgagcaagtgaaaaacttgcaaatgtgttgtggaagagaatggcaatgcttatccccagcagggaacgttcccgagtttccat

SEQ ID NO: 24950 - DNA, 151 bp, Homo sapiens
  MAP TO AL117667.2; EXPRESSED IN BRAIN, SIGNAL = 5.6; EXPRESSED IN PLACENTA, SIGNAL = 3.7; EXPRESSED IN HELA, SIGNAL = 3.7; EXPRESSED IN ADULT LIVER, SIGNAL = 5.1; EXPRESSED IN BONE MARROW, SIGNAL = 4.1; EXPRESSED IN FETAL LIVER, SIGNAL = 3.6; EXPRESSED IN HEART, SIGNAL =   3; EXPRESSED IN LUNG, SIGNAL = 2.2; EST_HUMAN HIT: AA601023.1, EVALUE 1.00e-14; NT HIT: AJ271735.1, EVALUE 2.00e-15; SWISSPROT HIT: P08548, EVALUE 1.00e-05
ataggttttggtgttttgtgtttccatattcatttgcttcaagacattattaatttgcttcttaatgtcttcagtgacccactggtctttcaggagcatattgtttaatttccgtatgtttgtatcatttccaaagttttttttattgatt

SEQ ID NO: 24951 - DNA, 178 bp, Homo sapiens
  MAP TO AL133380.3; EXPRESSED IN PLACENTA, SIGNAL =  40; EXPRESSED IN BONE MARROW, SIGNAL =  40; EXPRESSED IN FETAL LIVER, SIGNAL =  45; EXPRESSED IN HELA, SIGNAL =  50; EXPRESSED IN LUNG, SIGNAL =  50; EXPRESSED IN HEART, SIGNAL = 1.6e+02; EXPRESSED IN BRAIN, SIGNAL =  80; EXPRESSED IN ADULT LIVER, SIGNAL =  80; NT HIT: X58700.1, EVALUE 4.10e-01; SWISSPROT HIT: P05979, EVALUE 2.30e+00
gaggaggcagcctctgcgaatgctgccacagtctccattgagatgactcctacgaatagtctgagtagatccccccagagaaagaaaacggagtcagctctgtatgggtgcaccgtccttctggcatcggtggctctgggactggacctcagagagcttcataaagcacaggctgctg

SEQ ID NO: 24952 - DNA, 320 bp, Homo sapiens
  MAP TO AC012578.5; EXPRESSED IN ADULT LIVER, SIGNAL = 2.8; EXPRESSED IN FETAL LIVER, SIGNAL = 2.8; EXPRESSED IN BRAIN, SIGNAL = 1.6; EXPRESSED IN PLACENTA, SIGNAL = 2.1; EXPRESSED IN HEART, SIGNAL = 2.7; EXPRESSED IN BONE MARROW, SIGNAL = 2.2; EXPRESSED IN HELA, SIGNAL =   3; NT HIT: D89088.1, EVALUE 2.00e-01; SWISSPROT HIT: Q07864, EVALUE 1.60e+00; EST_HUMAN HIT: AW889321.1, EVALUE 2.90e-01
tggctgttccagcccaggccattctcctccgcatcgaactgtccaacatcaaagcccttggagctaaatctgccttcagaattccactcagactttttagttctttccaacagatgacaggggaggaaatgaaacaccttcaagatctttcagaagaaaccccagccgtcaatgacacgcaggttttatgcttcctgcccacatataggtctccgaaatgcccctggaacactcagctcctggcaacaggctgctcagcaccaccattccaggaagcgaaggtcaacatgacagtaaaatataagaagtatgaagtataa

SEQ ID NO: 24953 - DNA, 294 bp, Homo sapiens; identical to SEQ ID NO: 23822
  MAP TO AC020904.3; EXPRESSED IN FETAL LIVER, SIGNAL =  12; EXPRESSED IN HEART, SIGNAL = 7.1; EXPRESSED IN BRAIN, SIGNAL = 7.8; EXPRESSED IN PLACENTA, SIGNAL = 7.7; EXPRESSED IN BONE MARROW, SIGNAL =  13; EXPRESSED IN ADULT LIVER, SIGNAL =  14; EXPRESSED IN HELA, SIGNAL =  16; EXPRESSED IN LUNG, SIGNAL =  10; EST_HUMAN HIT: AA376399.1, EVALUE 3.00e-69; NT HIT: gi11968181, EVALUE 1.00e-64; SWISSPROT HIT: P25232, EVALUE 5.00e-19

SEQ ID NO: 24954 - DNA, 158 bp, Homo sapiens
  MAP TO AL135792.3; EXPRESSED IN BRAIN, SIGNAL = 3.2; EXPRESSED IN HELA, SIGNAL = 3.5; EXPRESSED IN ADULT LIVER, SIGNAL = 3.3; EXPRESSED IN PLACENTA, SIGNAL = 2.6; EXPRESSED IN LUNG, SIGNAL = 3.5; EXPRESSED IN HEART, SIGNAL = 3.3; EXPRESSED IN FETAL LIVER, SIGNAL = 3.2; EXPRESSED IN BONE MARROW, SIGNAL = 2.6; NT HIT: Y13030.1, EVALUE 3.60e-01; EST_HUMAN HIT: R53400.1, EVALUE 1.40e-01; SWISSPROT HIT: P40365, EVALUE 3.00e+00
atcctagaagcagggccatctcccaccaagcacctaccacatttccatcctgctcctccacatgccattacaggcaaaactttgaggcagaaaaacacgctgaaaatcagcctgcaaatggaaccctttcatgttgcccgtgatcggcagctaggaag

SEQ ID NO: 24955 - DNA, 402 bp, Homo sapiens
  MAP TO AL109925.11; EXPRESSED IN PLACENTA, SIGNAL = 2.4; EXPRESSED IN BRAIN, SIGNAL = 2.2; EXPRESSED IN HELA, SIGNAL = 2.9; EXPRESSED IN FETAL LIVER, SIGNAL = 3.7; EXPRESSED IN HEART, SIGNAL = 2.7; EXPRESSED IN LUNG, SIGNAL = 2.5; NT HIT: AF149773.1, EVALUE 1.00e-103; EST_HUMAN HIT: AI076830.1, EVALUE 7.00e-92; SWISSPROT HIT: P10272, EVALUE 3.00e-20
caagctgaactcactgccttaactcgagacctcgctctcgcaaaaggactacgcgtcaatatttatactgactgtaaatatgccttccatatcttgcaccaccatgctgttatatgggcagaaagaaatttcctcactatgcaagggtcctccatcattaatgcctctttaacaaaaactcttctcaaagccgctttacttccaaaggaagctggagtcattcactgcaaaggccatcaaaaggcatcagatcccatcgctcaagacaatgcttatgctgataaggtagctaaaaaagcagccatcaaaaggcatcagatcccattgctcaggacaatgcttatgctgataagatagctaaaaaaagcagctagtgttccaatttctatccctcatggcagt

SEQ ID NO: 24956 - DNA, 111 bp, Homo sapiens
  MAP TO AC009565.7; EXPRESSED IN BRAIN, SIGNAL = 1.3; EXPRESSED IN FETAL LIVER, SIGNAL = 2.2; EXPRESSED IN HELA, SIGNAL =   2; EXPRESSED IN HEART, SIGNAL = 1.9; EST_HUMAN HIT: AI420786.1, EVALUE 6.00e-03; NT HIT: AF039392.1, EVALUE 9.60e-01; SWISSPROT HIT: P31796, EVALUE 9.30e+00
atgctggcagttggtgcttgctgtcagctggatctcagtgggggctgtaggctgagtctcagttttccatgtggtccaccccacatgtctgcttgtgcttccccacagcat

SEQ ID NO: 24957 - DNA, 232 bp, Homo sapiens
  MAP TO AL079303.2; EXPRESSED IN BRAIN, SIGNAL = 6.1; EXPRESSED IN PLACENTA, SIGNAL = 4.4; EXPRESSED IN HELA, SIGNAL = 6.3; EXPRESSED IN HEART, SIGNAL = 5.8; EXPRESSED IN ADULT LIVER, SIGNAL = 5.3; EXPRESSED IN BONE MARROW, SIGNAL = 4.8; EXPRESSED IN FETAL LIVER, SIGNAL = 4.9; EXPRESSED IN LUNG, SIGNAL = 6.3; NT HIT: AF102673.1, EVALUE 4.70e-01; EST_HUMAN HIT: R57201.1, EVALUE 5.60e-01
acattctgctggatctccctgttcctcttcagatactgaactagcaagtagtacataaacctctacagttatgtggttaagtaaatggaaatcagggtagtggaagtaataatttttgttaagaaccagaatagagaattttaacagaggagactaagggggaaaatgaagttggcattccaaaaaattatgttatatgagaatcatatataaagaaatatggtatattggt

SEQ ID NO: 24958 - DNA, 79 bp, Homo sapiens
  MAP TO AC013359.4; EXPRESSED IN ADULT LIVER, SIGNAL = 1.9; EXPRESSED IN FETAL LIVER, SIGNAL = 4.3; EXPRESSED IN PLACENTA, SIGNAL = 2.7; EXPRESSED IN BONE MARROW, SIGNAL = 1.6; EXPRESSED IN HELA, SIGNAL = 2.7; EXPRESSED IN LUNG, SIGNAL = 1.7; EXPRESSED IN BRAIN, SIGNAL = 1.9; EXPRESSED IN HEART, SIGNAL = 2.7; NT HIT: gi5803028, EVALUE 3.00e-03; EST_HUMAN HIT: AI765146.1, EVALUE 6.00e-02; SWISSPROT HIT: P00654, EVALUE 7.40e+00
caacatcatcatcattgccatcatcataatactggtggctaacagtcactggattctttccatgtgccaagcactgtgt

SEQ ID NO: 24959 - DNA, 207 bp, Homo sapiens
  MAP TO AC004551.1; EXPRESSED IN ADULT LIVER, SIGNAL = 4.5; EXPRESSED IN HEART, SIGNAL = 3.7; EXPRESSED IN LUNG, SIGNAL =   4; EXPRESSED IN BRAIN, SIGNAL = 6.6; EXPRESSED IN PLACENTA, SIGNAL = 3.2; EXPRESSED IN BONE MARROW, SIGNAL = 3.5; EXPRESSED IN FETAL LIVER, SIGNAL =   5; EXPRESSED IN HELA, SIGNAL = 4.4; NT HIT: gi11436448, EVALUE 2.00e-83; EST_HUMAN HIT: BF310620.1, EVALUE 3.00e-83; SWISSPROT HIT: P47708, EVALUE 1.00e-23
agcttgacgaatgggtctgagtagccattagcgtccatggcagccaggtgcacgcagcgtatgatgcccacaatgaggcctccctgctgtgtgctgtacatgagggagaccaggatcttgccacgctcctcgatgtcaccaacacgctccacctgctgcattgggggaaaaggcagtgtgggccttggaggggagggggccaggaaa

SEQ ID NO: 24960 - DNA, 275 bp, Homo sapiens
  MAP TO AC011465.4; EXPRESSED IN ADULT LIVER, SIGNAL = 1.9; EXPRESSED IN BRAIN, SIGNAL =   2; EXPRESSED IN BONE MARROW, SIGNAL = 2.1; EXPRESSED IN FETAL LIVER, SIGNAL =   2; EXPRESSED IN HELA, SIGNAL = 1.9; EXPRESSED IN HEART, SIGNAL = 1.9; EXPRESSED IN LUNG, SIGNAL = 2.9; EXPRESSED IN PLACENTA, SIGNAL = 1.5; SWISSPROT HIT: P46062, EVALUE 4.00e-12; NT HIT: AB011117.1, EVALUE 0.00e+00; EST_HUMAN HIT: AW843218.1, EVALUE 3.00e-62
gagacggtggacatgacgcttcggcggaacgggctcgggcagctgggcttccacgtgaagtacgacggcacggtggccgaggttgaggactatgggttcgcctggcaggccggcctccggcagggcagccgactagtggagatctgcaaggtggccgtggtcacactgacccacgaccagatgatcgacctgctgcgcacctctgtcactgtgaaggtggtcatcatcccgccttttgaggacggcactccccggaggtaagggcctccaccttt

SEQ ID NO: 24961 - DNA, 80 bp, Homo sapiens
  MAP TO AC010352.4; EXPRESSED IN FETAL LIVER, SIGNAL = 6.2; EXPRESSED IN HEART, SIGNAL = 6.1; EXPRESSED IN BRAIN, SIGNAL = 5.2; EXPRESSED IN PLACENTA, SIGNAL = 3.9; EXPRESSED IN BONE MARROW, SIGNAL = 3.6; EXPRESSED IN LUNG, SIGNAL =   4; EXPRESSED IN ADULT LIVER, SIGNAL = 3.8; EXPRESSED IN HELA, SIGNAL = 6.3; EST_HUMAN HIT: AV730373.1, EVALUE 2.00e-04; NT HIT: U82375.1, EVALUE 1.00e-02; SWISSPROT HIT: P52090, EVALUE 9.60e+00
ttagacctcaagggagtaatacattccaatataataatcgttgcagacttcaacatcccactcatcattgaacagatcat

SEQ ID NO: 24962 - DNA, 132 bp, Homo sapiens
  MAP TO AL138828.4; EXPRESSED IN HELA, SIGNAL = 2.8; EXPRESSED IN BONE MARROW, SIGNAL = 1.5; EXPRESSED IN FETAL LIVER, SIGNAL = 2.8; EXPRESSED IN HEART, SIGNAL = 2.4; EXPRESSED IN ADULT LIVER, SIGNAL = 1.5; EXPRESSED IN LUNG, SIGNAL = 1.7; EXPRESSED IN BRAIN, SIGNAL = 1.8; EXPRESSED IN PLACENTA, SIGNAL = 2.2; NT HIT: gi11418869, EVALUE 1.00e-68; EST_HUMAN HIT: AA904859.1, EVALUE 2.00e-34; SWISSPROT HIT: P70453, EVALUE 3.00e-14
cttgccagcttcctcacgcctctggacatcatgcttggactgctggctgcagcagcacacgatgtggaccacccaggggtgaaccagccatttttgataaaaactaaccaccatcttgcaaacctatatcag

SEQ ID NO: 24963 - DNA, 269 bp, Homo sapiens
  MAP TO AL049829.3; EXPRESSED IN BONE MARROW, SIGNAL = 1.7; EXPRESSED IN HEART, SIGNAL =  60; EST_HUMAN HIT: F25870.1, EVALUE 3.00e-62; SWISSPROT HIT: P13533, EVALUE 7.00e-47; NT HIT: Z20656.1, EVALUE 0.00e+00
gtcgaagatctcgaagccagcgatgtccaggactcctatgaagtactggcgtggctgcttggtctccagggtggcgttgatgcgcgtcaccatccagttgaacatcttctcatacactgccttggccagagccccgatggagtagtacacctgctgcacgctctgccccttggtgacatactcgttgcccactttcacccgagggtggcacagccccttgagcaggtcagctgagttcagccccatgaggtaggccgacttgtcagcat

SEQ ID NO: 24964 - DNA, 107 bp, Homo sapiens
  MAP TO AC018499.2; EXPRESSED IN PLACENTA, SIGNAL = 3.2; EXPRESSED IN ADULT LIVER, SIGNAL = 3.1; EXPRESSED IN BONE MARROW, SIGNAL = 3.2; EXPRESSED IN LUNG, SIGNAL = 3.1; EXPRESSED IN HEART, SIGNAL = 3.8; EXPRESSED IN BRAIN, SIGNAL = 4.1; EXPRESSED IN HELA, SIGNAL = 4.1; EXPRESSED IN FETAL LIVER, SIGNAL = 4.3; SWISSPROT HIT: Q28689, EVALUE 7.20e+00; NT HIT: M96795.1, EVALUE 3.60e+00
atggagcccatgctgatgctgcccccggggaccacttgcttgtctggctggctctggcacatctccttgcaggaaagcacccgcctcttagagaagcccagtcaatc

SEQ ID NO: 24965 - DNA, 355 bp, Homo sapiens; identical to SEQ ID NO: 17250
  MAP TO AL049776.3; EXPRESSED IN BRAIN, SIGNAL = 1.4; EXPRESSED IN BONE MARROW, SIGNAL = 2.7; EXPRESSED IN LUNG, SIGNAL = 2.3; EXPRESSED IN HEART, SIGNAL = 1.8; SWISSPROT HIT: P49643, EVALUE 5.50e+00; EST_HUMAN HIT: BE384475.1, EVALUE 1.00e-128; NT HIT: gi11421829, EVALUE 1.00e-128

SEQ ID NO: 24966 - DNA, 155 bp, Homo sapiens
  MAP TO AC002126.1; EXPRESSED IN BRAIN, SIGNAL = 5.9; EXPRESSED IN ADULT LIVER, SIGNAL = 5.1; EXPRESSED IN LUNG, SIGNAL = 5.6; EXPRESSED IN PLACENTA, SIGNAL = 4.5; EXPRESSED IN HEART, SIGNAL = 5.6; EXPRESSED IN HELA, SIGNAL =   7; EXPRESSED IN FETAL LIVER, SIGNAL = 6.4; EXPRESSED IN BONE MARROW, SIGNAL =   5; NT HIT: gi5174542, EVALUE 7.00e-58; SWISSPROT HIT: Q22498, EVALUE 7.90e-01; EST_HUMAN HIT: BF220134.1, EVALUE 1.00e-57
ctgtggccctgggcactggcattcatatggtcccggatgctgatggcctgtttgagcagaccctccacgctgcggaagtagacgctgctgtccaccaggttcttcacggcgctgaaacgggaggacaggcctggtcagcgctccggacctgcagg

SEQ ID NO: 24967 - DNA, 160 bp, Homo sapiens
  MAP TO AC008395.3; EXPRESSED IN HEART, SIGNAL = 1.8; EXPRESSED IN LUNG, SIGNAL = 3.8; EXPRESSED IN PLACENTA, SIGNAL = 1.8; EXPRESSED IN BRAIN, SIGNAL =   2; EXPRESSED IN ADULT LIVER, SIGNAL = 1.8; EXPRESSED IN BONE MARROW, SIGNAL = 1.9; SWISSPROT HIT: Q19038, EVALUE 6.00e-01; NT HIT: X05958.1, EVALUE 3.70e-01; EST_HUMAN HIT: AI951723.1, EVALUE 5.50e-01
ggttcgtgcagccagggttaagaaaagaagaagctgccctggaggaagcagtcttctctccctggcaagcaagagcagtcccttttgtggaggcaccacacaggcccccaacgctggcgacaaacatcctgacaattctcagcttcctggcatcaaataa

SEQ ID NO: 24968 - DNA, 229 bp, Homo sapiens
  MAP TO AL139289.4; EXPRESSED IN HEART, SIGNAL =   2; EXPRESSED IN BRAIN, SIGNAL = 2.4; EXPRESSED IN ADULT LIVER, SIGNAL = 2.1; EXPRESSED IN BONE MARROW, SIGNAL = 4.4; EXPRESSED IN FETAL LIVER, SIGNAL = 3.7; EXPRESSED IN HELA, SIGNAL = 3.6; EXPRESSED IN LUNG, SIGNAL = 2.2; EXPRESSED IN PLACENTA, SIGNAL =   2; SWISSPROT HIT: P53197, EVALUE 3.00e-12; NT HIT: gi11427176, EVALUE 1.00e-126; EST_HUMAN HIT: BF683175.1, EVALUE 1.00e-126
cttgacagccccttgatgctgggtgaatgtctgcagaggaacccagccaccctctccaggagcactaggccacacattgaccaagttatcattaccaccactggccaaatgtcgtccatctggggcccagcgcagcccacacacttcctggctgtggccactcagtgtggccacatggtgttctgctacccgaacatcatggtggtggatgtggccagaacgtgaacca

SEQ ID NO: 24969 - DNA, 157 bp, Homo sapiens
  MAP TO AL138876.3; EXPRESSED IN BRAIN, SIGNAL = 2.7; EXPRESSED IN BONE MARROW, SIGNAL = 2.1; EXPRESSED IN LUNG, SIGNAL = 2.5; EXPRESSED IN PLACENTA, SIGNAL = 2.6; EXPRESSED IN HEART, SIGNAL = 2.7; EXPRESSED IN HELA, SIGNAL = 2.9; EXPRESSED IN FETAL LIVER, SIGNAL = 2.5; EXPRESSED IN ADULT LIVER, SIGNAL = 2.6; SWISSPROT HIT: P07313, EVALUE 5.00e-13; NT HIT: gi9629553, EVALUE 3.60e-01
ttacctcttctccttaatcagaagcttagagatgaactccttggcctcctccgagatgtcctgaaattcttcatcctctaagtcccacctgcaggccaggatgttgttcagcgtctcagcatcattgtcacccaggaaaggcgacaaaccgctaagt

SEQ ID NO: 24970 - DNA, 123 bp, Homo sapiens
  MAP TO AC004547.1; EXPRESSED IN BRAIN, SIGNAL = 7.6; EXPRESSED IN PLACENTA, SIGNAL =  15; EXPRESSED IN BONE MARROW, SIGNAL =   7; EXPRESSED IN FETAL LIVER, SIGNAL = 8.9; EXPRESSED IN HELA, SIGNAL = 8.7; EXPRESSED IN HEART, SIGNAL = 7.5; EXPRESSED IN ADULT LIVER, SIGNAL = 5.5; EXPRESSED IN LUNG, SIGNAL = 5.9; NT HIT: AF240786.1, EVALUE 4.30e+00; SWISSPROT HIT: P76341, EVALUE 7.10e+00
gggaaaggaggctcctgcgctcgctggtgctccccctccgcaggtctttgtccaataaacctgtgttaccgtcgagccgccctccttgtctttttttctccatcttaacagtaacatggaagt

SEQ ID NO: 24971 - DNA, 136 bp, Homo sapiens
  MAP TO AL109658.5; EXPRESSED IN BRAIN, SIGNAL = 2.2; EXPRESSED IN PLACENTA, SIGNAL = 2.5; EXPRESSED IN FETAL LIVER, SIGNAL =   3; EXPRESSED IN ADULT LIVER, SIGNAL = 2.6; EXPRESSED IN BONE MARROW, SIGNAL = 2.3; EXPRESSED IN HEART, SIGNAL = 2.4; EXPRESSED IN LUNG, SIGNAL =   4; EXPRESSED IN HELA, SIGNAL = 3.4; NT HIT: AF217491.1, EVALUE 1.20e+00; EST_HUMAN HIT: AW591271.1, EVALUE 4.50e-01
gtactcaagagcactcttggatttgctttacttgcatgatttttaagaaccagaaggacaagcatgaggccttcatatttagaccttcttccctatatggtaacaagaatatgaggggtaatcccagaatggtaaa

SEQ ID NO: 24972 - DNA, 168 bp, Homo sapiens
  MAP TO AL136102.10; EXPRESSED IN BRAIN, SIGNAL = 2.3; EXPRESSED IN LUNG, SIGNAL = 2.2; EXPRESSED IN ADULT LIVER, SIGNAL = 4.3; EXPRESSED IN HEART, SIGNAL = 3.4; NT HIT: AJ237936.1, EVALUE 2.50e-02; SWISSPROT HIT: P14046, EVALUE 5.10e+00
gccctgttccaaacatgcaaatcacggatccttccatggttaatctctcctgggcagaggttgagggaaggtagaggtcaccggcacatagttcatttgcaaatatatgctgatgacatctatcttccctcaaccaatgcaccctcaggttgggccctggctatctaa

SEQ ID NO: 24973 - DNA, 126 bp, Homo sapiens
  MAP TO AC012568.3; EXPRESSED IN FETAL LIVER, SIGNAL = 4.9; EXPRESSED IN PLACENTA, SIGNAL = 4.2; EXPRESSED IN BRAIN, SIGNAL = 3.1; EXPRESSED IN HEART, SIGNAL = 4.3; EXPRESSED IN ADULT LIVER, SIGNAL = 3.2; EXPRESSED IN BONE MARROW, SIGNAL = 3.5; EXPRESSED IN HELA, SIGNAL = 4.3; EXPRESSED IN LUNG, SIGNAL = 2.7; SWISSPROT HIT: P19468, EVALUE 7.00e+00; EST_HUMAN HIT: BE245344.1, EVALUE 3.00e-23; NT HIT: AF029308.1, EVALUE 4.00e-28
tgggttcttggtctcattgacttcaagaatgaagccgtgaaccctcgttgtgagtgtccggagtttcttccttctggtgggttcgtggtctcgctgacttcaggagtgaagctgcagaccttcgcc

SEQ ID NO: 24974 - DNA, 342 bp, Homo sapiens
  MAP TO AL136169.6; EXPRESSED IN BRAIN, SIGNAL =   4; EXPRESSED IN BONE MARROW, SIGNAL = 1.6; EXPRESSED IN ADULT LIVER, SIGNAL = 1.6; EXPRESSED IN LUNG, SIGNAL = 5.8; EXPRESSED IN PLACENTA, SIGNAL = 3.3; EXPRESSED IN HEART, SIGNAL = 3.5; EXPRESSED IN HELA, SIGNAL = 2.9; EXPRESSED IN FETAL LIVER, SIGNAL = 2.2; EST_HUMAN HIT: BE792155.1, EVALUE 0.00e+00; SWISSPROT HIT: O95751, EVALUE 3.00e-31; NT HIT: gi4503180, EVALUE 0.00e+00
atccggcctgcgacgcgtcgctggaggaacccgattccctttcccgagacgtttgacggcgataccgaccgactcccggagttcatcgtgcagacgggctcctacatgttcgtggacgagaacacgttctccagcgacgccctgaaggtgacgttcctcatcacccgcctcacagggcccgccctgcagtgggtgatcccctacatcaagaaggagagccccctcctcaatgattaccggggctttctggccgagatgaagcgagtctttggatgggaggaggacgaggacttctaggccgggagaccctcgggcctgggggcgggtgctctggggagggtc

SEQ ID NO: 24975 - DNA, 450 bp, Homo sapiens
  MAP TO AC013827.4; EXPRESSED IN FETAL LIVER, SIGNAL =  78; EXPRESSED IN HEART, SIGNAL =  25; EXPRESSED IN PLACENTA, SIGNAL =  77; EXPRESSED IN BRAIN, SIGNAL =  59; EXPRESSED IN BONE MARROW, SIGNAL =  70; EXPRESSED IN ADULT LIVER, SIGNAL =  73; EXPRESSED IN HELA, SIGNAL =  63; EXPRESSED IN LUNG, SIGNAL = 2.2e+02; EST_HUMAN HIT: BF684061.1, EVALUE 0.00e+00; NT HIT: gi11418792, EVALUE 0.00e+00; SWISSPROT HIT: Q90835, EVALUE 4.00e-62
gatatctacaaaaattggtggtattggtactgtttctgttggctgagtagagactggtgttctcaaaccctgtatggtgctccagtcaatgttacaactgaagtaaagtctgttgaaatacaccatgaagctttgagtgaagctcttcctggggacaatgtgggcttcaatgtcaagaacgtgtctgtcaaggatgttcgtcatggcaacaatgctggtgacagcaaaaacgacccaccaatggaagcagctggcttcactgctcaggtgattatcctgaaccatccaggccaaataagtgctggctatgcccttgtactggattgtcacacggctcacactgcatgcaagtttgctgagctgaaggaaaagattgatcgctgttctggtaaaaagctggaagacggccctaaattcttgaagtctggtgatgctgccatcatttatatg

SEQ ID NO: 24976 - DNA, 277 bp, Homo sapiens
  MAP TO AL121595.3; EXPRESSED IN HEART, SIGNAL = 2.5; NT HIT: X17012.1, EVALUE 4.30e-02; SWISSPROT HIT: P04474, EVALUE 6.60e-02; EST_HUMAN HIT: H40060.1, EVALUE 3.90e+00
gagctgtatgagaccttaacacagggtgcagtaggccacgtgcctgacggaaatccaaggagggagagctggactcctcgtctcagctccgaagctgtctctgtgctctgggatctcctgaggcagtctccccagccagcacaggccctgctggagctcctgcttgaggaggatgacggtactggcctctgtcactggcctctgcagaatgcactggtggacctcattcgaaaggcattgcgggctttgcagggccctgattcggtgccccctgggg

SEQ ID NO: 24977 - DNA, 152 bp, Homo sapiens
  MAP TO AL138734.2; EXPRESSED IN PLACENTA, SIGNAL = 6.8; EXPRESSED IN BRAIN, SIGNAL = 4.5; EXPRESSED IN BONE MARROW, SIGNAL =   8; EXPRESSED IN LUNG, SIGNAL =  22; EXPRESSED IN ADULT LIVER, SIGNAL = 7.9; EXPRESSED IN FETAL LIVER, SIGNAL = 7.3; EXPRESSED IN HELA, SIGNAL = 6.6; EXPRESSED IN HEART, SIGNAL = 3.1; NT HIT: M80427.1, EVALUE 2.00e-05; EST_HUMAN HIT: AA393362.1, EVALUE 2.00e-80
catcctatggctctactttgagacgggtacctgggtgtatcctgtgtttgccaaactcagcctcttgggtctagcagctttcttctctctcagctacgtcttcatcgccagcatctacctacttggagagaagctcaaccactggaaatggg

SEQ ID NO: 24978 - DNA, 263 bp, Homo sapiens
  MAP TO AL133415.12; EXPRESSED IN ADULT LIVER, SIGNAL = 3.9; EXPRESSED IN FETAL LIVER, SIGNAL = 4.7; EXPRESSED IN HEART, SIGNAL = 6.2; EXPRESSED IN BRAIN, SIGNAL = 5.6; EXPRESSED IN PLACENTA, SIGNAL = 7.9; EXPRESSED IN BONE MARROW, SIGNAL = 7.7; EXPRESSED IN LUNG, SIGNAL =  19; EXPRESSED IN HELA, SIGNAL = 5.8; SWISSPROT HIT: gi138541, EVALUE 1.00e-35; NT HIT: gi11431256, EVALUE 1.00e-121; EST_HUMAN HIT: AU118386.1, EVALUE 0.00e+00
ctgctctcctcgccttccagcagcttcctgtaggtggcaatctcaatgtcaagggccatcttaacattgagcaggtcttggtattcacgaaggtgacgagccatttcctccttcatattctgaatctcatcctgcaggcggccaatagtgtcttggtagttagcagcttcaacggcaaagttctcttccatttcacgcatctggcgttccagggactcattctgcagggggtgagaaagatgtctggtgttatttctcagaaa

SEQ ID NO: 24979 - DNA, 398 bp, Homo sapiens
  MAP TO AL121997.7; EXPRESSED IN PLACENTA, SIGNAL = 1.8; EXPRESSED IN BONE MARROW, SIGNAL = 2.5; EXPRESSED IN LUNG, SIGNAL = 3.2; EXPRESSED IN ADULT LIVER, SIGNAL = 1.7; EXPRESSED IN FETAL LIVER, SIGNAL = 8.1; EXPRESSED IN HELA, SIGNAL =  12; EXPRESSED IN HEART, SIGNAL = 2.7; SWISSPROT HIT: P13491, EVALUE 1.00e-38; EST_HUMAN HIT: AW236269.1, EVALUE 0.00e+00; NT HIT: gi5031856, EVALUE 1.00e-111
atagtgaccagcttggagtttacagttacagtatagtctttgccagagacaatctttggtgttctaaggaaaaggctgccatggtggagatccatcatctcgcccttcaatttgtcttccatgacatcaacaagagcaagttcgcctgccaagtccttcattaagataccgatggcacaggccatgccaagagcaccaaccccaacaactgtaatcttattctggaggatctgttcttcctttagaagactgtgaataagctgatccttgagcgtatacttgagagtatattggacttggaaacaaaaggaatcgagaatgcacgtccggcgggtgttggggcacgcggcagtgagatccagactcgtcggcagcggctccagcaccttcgctacctt

SEQ ID NO: 24980 - DNA, 199 bp, Homo sapiens
  MAP TO AC008651.4; EXPRESSED IN ADULT LIVER, SIGNAL = 3.2; EXPRESSED IN FETAL LIVER, SIGNAL =  14; EXPRESSED IN HEART, SIGNAL =  23; EXPRESSED IN BRAIN, SIGNAL =  11; EXPRESSED IN BONE MARROW, SIGNAL = 2.8; EXPRESSED IN HELA, SIGNAL =  26; EXPRESSED IN LUNG, SIGNAL =  42; EXPRESSED IN PLACENTA, SIGNAL =  35; EST_HUMAN HIT: BE392256.1, EVALUE 2.00e-69; SWISSPROT HIT: P05787, EVALUE 3.00e-07; NT HIT: gi4504918, EVALUE 1.00e-69
gctttccatcgtgggtctcgatcttcacaatcacagccctggtggagctggtgcagctgaaggaactggagcccgcaccagagccaaagctggagtccaggctgtagctgaggccagggcttatgaggcccccataggccgagctcagaccacctgaatagccgctggtggtcttcgtatggatactcatgttctgcat

SEQ ID NO: 24981 - DNA, 130 bp, Homo sapiens
  MAP TO AC010251.3; EXPRESSED IN BRAIN, SIGNAL = 3.8; EXPRESSED IN PLACENTA, SIGNAL = 3.6; EXPRESSED IN ADULT LIVER, SIGNAL = 2.9; EXPRESSED IN FETAL LIVER, SIGNAL =  12; EXPRESSED IN HELA, SIGNAL = 4.9; EXPRESSED IN HEART, SIGNAL = 6.2; EXPRESSED IN BONE MARROW, SIGNAL = 2.6; EXPRESSED IN LUNG, SIGNAL = 2.7; SWISSPROT HIT: Q03526, EVALUE 2.40e+00; NT HIT: AF043235.1, EVALUE 1.10e+00; EST_HUMAN HIT: BE567816.1, EVALUE 6.00e-65
acactggtggttttcttgaagtgttcgctcccatggttgaatctgcccagacctggatcctcgatttatactatccgggcagaaacacccatcttcgctcaaaacatgtcccgaagccttagttggatat

SEQ ID NO: 24982 - DNA, 119 bp, Homo sapiens
  MAP TO AC013533.3; EXPRESSED IN BRAIN, SIGNAL = 9.5; EXPRESSED IN PLACENTA, SIGNAL = 8.1; EXPRESSED IN HEART, SIGNAL = 7.1; EXPRESSED IN ADULT LIVER, SIGNAL =   7; EXPRESSED IN BONE MARROW, SIGNAL = 6.9; EXPRESSED IN HELA, SIGNAL =  10; EXPRESSED IN LUNG, SIGNAL = 4.4; EXPRESSED IN FETAL LIVER, SIGNAL = 6.3; SWISSPROT HIT: Q53317, EVALUE 4.80e-01; NT HIT: AF254799.1, EVALUE 1.00e+00; EST_HUMAN HIT: BF514170.1, EVALUE 3.00e-48
aggtgctgccagagaggcgttgagcagtaggcagtttgcacccaggaacccgggcagtctgtttttttctgtttggccttctctcataccagcttgttggattcagctctttcttccac

SEQ ID NO: 24983 - DNA, 191 bp, Homo sapiens
  MAP TO AL158848.1; EXPRESSED IN PLACENTA, SIGNAL = 2.8; EXPRESSED IN BONE MARROW, SIGNAL = 3.7; EXPRESSED IN BRAIN, SIGNAL = 3.6; EXPRESSED IN LUNG, SIGNAL = 5.7; EXPRESSED IN HEART, SIGNAL = 3.3; EXPRESSED IN HELA, SIGNAL = 4.5; EXPRESSED IN FETAL LIVER, SIGNAL = 4.4; EXPRESSED IN ADULT LIVER, SIGNAL = 3.7; EST_HUMAN HIT: BF359917.1, EVALUE 3.00e-77; SWISSPROT HIT: P42107, EVALUE 2.90e+00
ttgtattgcaactcgagcagcagggatgatttcctcaaccctaatagaagacctatcagacacggacaactgtcggtaggatgacttttctggggtaccacataaggacatctgtctgcttgtctgccggctgacatttcggaatgggcgggaagaaagtgcttctataccatctttggtgaggtcttcat

SEQ ID NO: 24984 - DNA, 342 bp, Homo sapiens
  MAP TO AL096814.26; EXPRESSED IN BRAIN, SIGNAL = 6.5; EXPRESSED IN PLACENTA, SIGNAL = 5.7; EXPRESSED IN HELA, SIGNAL = 8.6; EXPRESSED IN ADULT LIVER, SIGNAL = 5.8; EXPRESSED IN BONE MARROW, SIGNAL = 4.9; EXPRESSED IN FETAL LIVER, SIGNAL = 7.2; EXPRESSED IN LUNG, SIGNAL = 9.7; EXPRESSED IN HEART, SIGNAL = 6.8; SWISSPROT HIT: Q49689, EVALUE 7.80e-01; EST_HUMAN HIT: AI149809.1, EVALUE 0.00e+00; NT HIT: gi6681072, EVALUE 2.10e-01
gtcactcctcctgcagtgagcagcccttccccttggggacctgaggtcacaggggtgagggtgaagggtcgggggcttccgtttggctcaggcctaggagcgccacaagaccaagttggcaggaggcacatcaaagcgcttgcgggtgtggtcagtgtcccggcggtacaggtagccacaggtaggcttctgcaaagtgtagaaggggttcagggagttggagtactgggaggtgtagaaattgaacctgagcttgtccggattctgccccttagagtccacaacgaccggcacataggctgctgccagagactgctcgaggtcctgcttccacgcccgggg

SEQ ID NO: 24985 - DNA, 390 bp, Homo sapiens
  MAP TO AC012683.3; EXPRESSED IN BRAIN, SIGNAL =   3; EXPRESSED IN PLACENTA, SIGNAL = 2.5; EXPRESSED IN ADULT LIVER, SIGNAL = 2.3; EXPRESSED IN BONE MARROW, SIGNAL = 2.1; EXPRESSED IN FETAL LIVER, SIGNAL = 3.5; EXPRESSED IN HELA, SIGNAL = 4.2; EXPRESSED IN HEART, SIGNAL = 3.1; EXPRESSED IN LUNG, SIGNAL = 2.8; EST_HUMAN HIT: AW391937.1, EVALUE 0.00e+00; NT HIT: L77964.1, EVALUE 0.00e+00; SWISSPROT HIT: Q16659, EVALUE 6.00e-51
gaactattcaacttagttcccaacatgagcctactgatgttgttgataaattaaatgacttgaatagctcagtgtcccaactagaattgaaaagcttgatatcaaagtcagtaagccaagaaaaacaggaaaaaggaatggcaaatctggctcagttagaaaccttgtaccaatcttcttgggacagccagtgtgtgagtggtggggaggactgttttctcatcaatcagttttgtgacgtaaggaaggatgaacaagttgagaaagaaaacacttacactcgttacttggacaagttctttagcaggaaagaagatactgaaatgctagaaactgagccagtagaggaagaagagcttggggagagaggaaatgaggaaaggtttctga

SEQ ID NO: 24986 - DNA, 211 bp, Homo sapiens
  MAP TO AC011462.3; EXPRESSED IN BRAIN, SIGNAL =   2; EXPRESSED IN ADULT LIVER, SIGNAL = 1.7; EXPRESSED IN BONE MARROW, SIGNAL = 2.4; EXPRESSED IN FETAL LIVER, SIGNAL = 1.6; EXPRESSED IN HEART, SIGNAL = 2.9; EXPRESSED IN LUNG, SIGNAL = 4.6; EST_HUMAN HIT: BE254024.1, EVALUE 6.00e-94; NT HIT: S38327.1, EVALUE 1.00e-101; SWISSPROT HIT: P12694, EVALUE 2.00e-31
ggagcccacactgacctggggccccttgcccctgtgcaggatcgggcaccacagcaccagtgacgacagttcagcgtaccgctcggtggatgaggtcaattactgggataaacaggaccaccccatctcccggctgcggcactatctgctgagccaaggctggtgggatgaggagcaggagaaggcctggaggaagcagtcccgcaggaag

SEQ ID NO: 24987 - DNA, 255 bp, Homo sapiens
  MAP TO AC008481.4; EXPRESSED IN PLACENTA, SIGNAL = 5.8; EXPRESSED IN BRAIN, SIGNAL = 3.6; EXPRESSED IN FETAL LIVER, SIGNAL =  11; EXPRESSED IN HEART, SIGNAL = 7.8; EXPRESSED IN ADULT LIVER, SIGNAL =  11; EXPRESSED IN BONE MARROW, SIGNAL =  17; EXPRESSED IN HELA, SIGNAL =  12; EXPRESSED IN LUNG, SIGNAL =  12; SWISSPROT HIT: Q02543, EVALUE 6.00e-35; EST_HUMAN HIT: AI983801.1, EVALUE 3.00e-84; NT HIT: gi11415025, EVALUE 4.00e-82
ctagaagaaggtgttgggccttttggtggtgaagcgtggcttgtgctgatggcgcaggacctggtggggcagcgggaacttgatcttggagtcttggaactgcttgacggccagccggtgggacttgctggctgctatctcctccatcttcatgatctggatggaatgggtccaggtggggtaccgggcgcccatgtctcggtagcactgggtgacagcgcccgtggtggtcaggtcccaatattcctggtacat

SEQ ID NO: 24988 - DNA, 125 bp, Homo sapiens
  MAP TO AC011989.3; EXPRESSED IN BRAIN, SIGNAL = 1.3; EXPRESSED IN PLACENTA, SIGNAL = 1.5; EXPRESSED IN HELA, SIGNAL = 2.9; EXPRESSED IN FETAL LIVER, SIGNAL = 3.3; EXPRESSED IN HEART, SIGNAL = 2.6; EXPRESSED IN ADULT LIVER, SIGNAL = 2.2; NT HIT: AF051662.1, EVALUE 2.80e-01; EST_HUMAN HIT: BE531294.1, EVALUE 1.60e+00
ctcacatagctgatgcttctgagagctaagagttgcaatatcaatatatttggaatatgattttttaaatttttttctatactcattaaaaatgtccagttgatacttgaagcttcttgctgtag

SEQ ID NO: 24989 - DNA, 167 bp, Homo sapiens
  MAP TO AL158800.1; EXPRESSED IN ADULT LIVER, SIGNAL = 3.9; EXPRESSED IN HEART, SIGNAL = 3.3; EXPRESSED IN PLACENTA, SIGNAL = 2.9; EXPRESSED IN BONE MARROW, SIGNAL =   3; EXPRESSED IN FETAL LIVER, SIGNAL =   4; EXPRESSED IN HELA, SIGNAL = 4.1; EXPRESSED IN LUNG, SIGNAL = 2.6; EXPRESSED IN BRAIN, SIGNAL = 3.5; EST_HUMAN HIT: AI267204.1, EVALUE 1.50e-01; NT HIT: AF050157.1, EVALUE 2.50e-02
atgtggatatggatatgggcatgggaaaagataaagatataggaataaaaataagtatggatgcagatctacgtatagatataggtataggtatgcgtgtgaatatagatatggaaaaaagatatagatatggaaatctggacatagctatagaaacagaaaagaga

SEQ ID NO: 24990 - DNA, 137 bp, Homo sapiens
  MAP TO AC023009.3; EXPRESSED IN BRAIN, SIGNAL = 2.2; EXPRESSED IN PLACENTA, SIGNAL = 3.3; EXPRESSED IN BONE MARROW, SIGNAL = 2.1; EXPRESSED IN HEART, SIGNAL = 3.2; EXPRESSED IN ADULT LIVER, SIGNAL = 4.2; EXPRESSED IN HELA, SIGNAL = 2.1; EXPRESSED IN LUNG, SIGNAL = 3.8; EXPRESSED IN FETAL LIVER, SIGNAL = 2.1; NT HIT: gi11418903, EVALUE 1.00e-71; SWISSPROT HIT: P00488, EVALUE 9.00e-21; EST_HUMAN HIT: AU120508.1, EVALUE 1.00e-66
gtccgtggcactcaggtagttggttctgacatgactgtgacagttgagtttaccaatcctttaaaagaaaccctgcgaaatgtctgggtacacctggatggtcctggagtaacaagaccaatgaagaagatgttccg

SEQ ID NO: 24991 - DNA, 168 bp, Homo sapiens
  MAP TO AC016537.2; EXPRESSED IN BRAIN, SIGNAL =  11; EXPRESSED IN PLACENTA, SIGNAL = 6.7; EXPRESSED IN BONE MARROW, SIGNAL = 3.8; EXPRESSED IN LUNG, SIGNAL = 3.6; EXPRESSED IN ADULT LIVER, SIGNAL = 5.7; EXPRESSED IN FETAL LIVER, SIGNAL = 6.6; EXPRESSED IN HELA, SIGNAL = 5.8; EXPRESSED IN HEART, SIGNAL =   4; NT HIT: AL163284.2, EVALUE 1.00e-75; EST_HUMAN HIT: AA664377.1, EVALUE 1.00e-75; SWISSPROT HIT: P38811, EVALUE 5.10e+00
atggaacactgcgaagttatttccttgaggatagatttccacgatggaaagaaaatgagaggttctaagaggcgggctagtggcttgtactatagcatagcctgcctttgctggtgtgtggtgattaggcctggtggaacggccatcaataaatcaagcgtgatcagg

SEQ ID NO: 24992 - DNA, 148 bp, Homo sapiens
  MAP TO AC010620.3; EXPRESSED IN FETAL LIVER, SIGNAL = 9.8; EXPRESSED IN HELA, SIGNAL =  22; EXPRESSED IN LUNG, SIGNAL = 3.7; EXPRESSED IN PLACENTA, SIGNAL =   4; EXPRESSED IN BRAIN, SIGNAL = 1.8; EXPRESSED IN HEART, SIGNAL = 7.1; EXPRESSED IN ADULT LIVER, SIGNAL = 3.4; EXPRESSED IN BONE MARROW, SIGNAL = 6.9; SWISSPROT HIT: P09896, EVALUE 9.00e-21; NT HIT: gi11419729, EVALUE 2.00e-61; EST_HUMAN HIT: BF088798.1, EVALUE 3.00e-61
ttagcacaatcttctttgtagttttagcctttttctggaaaatcggcttagtttgcccatcatagccattctgcttcctgtcataatgctgctttccctgggcatacagagaatccttgcccttcttgtactgtgtcactttgtgggg

SEQ ID NO: 24993 - DNA, 129 bp, Homo sapiens
  MAP TO AC016939.8; EXPRESSED IN HELA, SIGNAL =   3; EXPRESSED IN HEART, SIGNAL = 2.9; EXPRESSED IN BRAIN, SIGNAL = 3.1; EXPRESSED IN ADULT LIVER, SIGNAL = 3.7; EXPRESSED IN BONE MARROW, SIGNAL = 2.3; EXPRESSED IN FETAL LIVER, SIGNAL =   3; EXPRESSED IN LUNG, SIGNAL = 3.2; EXPRESSED IN PLACENTA, SIGNAL = 2.2; SWISSPROT HIT: P09716, EVALUE 4.10e+00; EST_HUMAN HIT: AU117525.1, EVALUE 6.60e+00
caattgtaagtgccacagcctgagaaggtcgtggaggaccaggagcccagaaccttccgggatgagggtttgcactactctattgggtaagtaatagagaacagcaaagattctggttgaaaccgacag

SEQ ID NO: 24994 - DNA, 200 bp, Homo sapiens
  MAP TO AL132987.2; EXPRESSED IN PLACENTA, SIGNAL = 2.5; EXPRESSED IN FETAL LIVER, SIGNAL = 3.6; EXPRESSED IN LUNG, SIGNAL = 2.1; EXPRESSED IN ADULT LIVER, SIGNAL = 2.7; EXPRESSED IN HEART, SIGNAL = 2.9; EXPRESSED IN BRAIN, SIGNAL = 2.2; EXPRESSED IN HELA, SIGNAL = 3.6; EXPRESSED IN BONE MARROW, SIGNAL = 2.4; SWISSPROT HIT: P41808, EVALUE 5.70e-01; NT HIT: D26184.1, EVALUE 1.20e-01; EST_HUMAN HIT: BE741651.1, EVALUE 7.00e-01
ggacagggcctgtgccatcagcccttccctccaagtagccatgggtccagggagatgtggcaggggtggggagaaagagtattgtctccattggatagatgcggtggctgatgtctttaggctgaaagcccagtggagctgtggggttgcagggtgctgtggcaggttttccttctatctatgcccccattcccatgccc

SEQ ID NO: 24995 - DNA, 99 bp, Homo sapiens
  MAP TO AC009181.5; EXPRESSED IN BRAIN, SIGNAL =   2; EXPRESSED IN PLACENTA, SIGNAL = 2.1; EXPRESSED IN BONE MARROW, SIGNAL = 2.2; EXPRESSED IN LUNG, SIGNAL = 2.7; EXPRESSED IN ADULT LIVER, SIGNAL = 1.7; EXPRESSED IN FETAL LIVER, SIGNAL = 3.3; EXPRESSED IN HELA, SIGNAL = 3.6; EXPRESSED IN HEART, SIGNAL = 3.6; SWISSPROT HIT: Q59996, EVALUE 9.50e+00; EST_HUMAN HIT: AW816705.1, EVALUE 7.00e-30; NT HIT: AL163278.2, EVALUE 5.00e-30
atgaaatcttcacaatccacgttcttctgccatggcttcagctggtccctccgttcggggtgcctgacttcccgcaacatatacacctaggagtgaaat

SEQ ID NO: 24996 - DNA, 285 bp, Homo sapiens
  MAP TO AC007115.1; EXPRESSED IN PLACENTA, SIGNAL =  12; EXPRESSED IN BONE MARROW, SIGNAL = 1.5; EXPRESSED IN LUNG, SIGNAL =  19; EXPRESSED IN ADULT LIVER, SIGNAL = 2.2; EXPRESSED IN FETAL LIVER, SIGNAL = 1.5; EXPRESSED IN HEART, SIGNAL = 4.6; EST_HUMAN HIT: AU116908.1, EVALUE 0.00e+00; NT HIT: gi11435938, EVALUE 0.00e+00; SWISSPROT HIT: P51884, EVALUE 1.00e-50
ttgccaaaaatgagtctaagtgcatttactctcttcctggcattgattggtggtaccagtggccagtactatgattatgattttcccctatcaatttatgggcaatcatcaccaaactgtgcaccagaatgtaactgccctgaaagctacccaagtgccatgtactgtgatgagctgaaattgaaaagtgtaccaatggtgcctcctggaatcaagtatctttaccttaggaataaccagattgaccatattgatgaaaaggcctttgagaatgtaactgatctg

SEQ ID NO: 24997 - DNA, 259 bp, Homo sapiens
  MAP TO AP001251.1; EXPRESSED IN BRAIN, SIGNAL = 6.5; EXPRESSED IN HELA, SIGNAL = 9.7; EXPRESSED IN ADULT LIVER, SIGNAL = 4.8; EXPRESSED IN BONE MARROW, SIGNAL = 5.5; EXPRESSED IN FETAL LIVER, SIGNAL =  12; EXPRESSED IN HEART, SIGNAL = 9.3; EXPRESSED IN LUNG, SIGNAL = 3.4; EXPRESSED IN PLACENTA, SIGNAL = 7.9; NT HIT: AL163227.2, EVALUE 2.00e-53; SWISSPROT HIT: P19099, EVALUE 2.40e+00; EST_HUMAN HIT: AU117241.1, EVALUE 9.00e-69
aaattggccaaaacaaaagggttacttatgaaaatttctgcagctgccttgaatttctccccagaatatggatttttcttttctatcacatattcaggctgcatattttccaaactcttatgctctgcttctcctataaaactaaatgcctttaacagtacccgagatacctcttgaatgctttgctgcttagaaatttcttctgccagatactctaaatcatctttctcaagttcaaagttcaacaaatctctagagc

SEQ ID NO: 24998 - DNA, 236 bp, Homo sapiens
  MAP TO AC018836.2; EXPRESSED IN ADULT LIVER, SIGNAL = 7.4; EXPRESSED IN HELA, SIGNAL =  11; EXPRESSED IN HEART, SIGNAL =  11; EXPRESSED IN PLACENTA, SIGNAL = 6.6; EXPRESSED IN BONE MARROW, SIGNAL =  10; EXPRESSED IN FETAL LIVER, SIGNAL =  11; EXPRESSED IN LUNG, SIGNAL =  29; EXPRESSED IN BRAIN, SIGNAL = 6.7; EST_HUMAN HIT: BE874552.1, EVALUE 1.00e-86; NT HIT: K03002.1, EVALUE 7.00e-87; SWISSPROT HIT: P02433, EVALUE 1.00e-31
ttgttgcacatcagcagcacttccagctccttgacgttgtggaccaggaacttccggaagccactgggcagcatgtgctttgtttttttgttgcttccataaccaatgttgggcatcaagatctggcccttgaatcttctacgaaccctgttgtcaatgcctctgggtttccgccagttacgctgaaggaaataatacacaggtgggttagcgtctgtgcagagtgcgaactcttc

SEQ ID NO: 24999 - DNA, 270 bp, Homo sapiens
  MAP TO AC010311.5; EXPRESSED IN PLACENTA, SIGNAL = 9.7; EXPRESSED IN BRAIN, SIGNAL = 9.6; EXPRESSED IN HEART, SIGNAL =  19; EXPRESSED IN ADULT LIVER, SIGNAL = 9.9; EXPRESSED IN BONE MARROW, SIGNAL = 9.2; EXPRESSED IN HELA, SIGNAL =  22; EXPRESSED IN FETAL LIVER, SIGNAL =  21; EXPRESSED IN LUNG, SIGNAL = 8.2; EST_HUMAN HIT: AW880222.1, EVALUE 8.00e-54; NT HIT: gi11424726, EVALUE 0.00e+00; SWISSPROT HIT: P06213, EVALUE 9.00e-47
cccttatcagaatgtgacggagttcgacgggcaggatgcgtgtggttccaacagttggacggtggtagacattgacccacccctgaggtccaacgaccccaaatcacagaaccacccagggtggctgatgcggggtctcaagccctggacccagtatgccatctttgtgaagaccctggtcaccttttcggatgaacgccggacctatggggccaagagtgacatcatttatgtccagacagatgccaccagtgagtgtgtcttgggaat

SEQ ID NO: 25000 - DNA, 189 bp, Homo sapiens
  MAP TO AC008553.3; EXPRESSED IN PLACENTA, SIGNAL =   2; EXPRESSED IN BRAIN, SIGNAL = 2.2; EXPRESSED IN BONE MARROW, SIGNAL = 2.1; EXPRESSED IN ADULT LIVER, SIGNAL = 2.2; EXPRESSED IN HELA, SIGNAL = 3.1; EXPRESSED IN HEART, SIGNAL = 3.2; EXPRESSED IN FETAL LIVER, SIGNAL =   3; SWISSPROT HIT: Q12315, EVALUE 2.20e+00; EST_HUMAN HIT: AL038487.1, EVALUE 1.00e-26; NT HIT: AL163201.2, EVALUE 6.00e-22
atgaaccaagtaaggcaccagggaccaatcctggagaagcagatatatgtgacctttcagacagaccttcaggtagctgtgttggggaaactcaaagaaattcaagttaacacagagaagaaattcagaattctattggatacatttaacaaagagattgaaacagttaagcagaagttctacagttga

SEQ ID NO: 25001 - DNA, 132 bp, Homo sapiens
  MAP TO AC011431.2; EXPRESSED IN BRAIN, SIGNAL = 1.9; EXPRESSED IN PLACENTA, SIGNAL = 1.9; EXPRESSED IN ADULT LIVER, SIGNAL = 1.8; EXPRESSED IN BONE MARROW, SIGNAL = 1.7; EXPRESSED IN FETAL LIVER, SIGNAL = 2.2; EXPRESSED IN LUNG, SIGNAL = 2.2; EXPRESSED IN HELA, SIGNAL = 2.1; EXPRESSED IN HEART, SIGNAL =   2; SWISSPROT HIT: P34428, EVALUE 8.10e-01; EST_HUMAN HIT: AW102654.1, EVALUE 1.70e+00; NT HIT: AF128843.1, EVALUE 2.90e-01
cctcctacttcatcagcacccagtgggtctcaaacctgtgcatgggaaaatgccatccacagaccagggctggcccgggcaccttctacaggaccatccgaggagctcagcagagcgacatcatggaaaacc

SEQ ID NO: 25002 - DNA, 129 bp, Homo sapiens
  MAP TO AC010361.3; EXPRESSED IN BRAIN, SIGNAL = 2.2; EXPRESSED IN PLACENTA, SIGNAL = 1.9; EXPRESSED IN HEART, SIGNAL = 4.2; EXPRESSED IN BONE MARROW, SIGNAL = 1.8; EXPRESSED IN ADULT LIVER, SIGNAL =   2; EXPRESSED IN HELA, SIGNAL = 4.1; EXPRESSED IN FETAL LIVER, SIGNAL = 3.7; EST_HUMAN HIT: AI536702.1, EVALUE 7.00e-37; SWISSPROT HIT: P11369, EVALUE 2.00e-09; NT HIT: AF003528.1, EVALUE 3.00e-29
tgtttgtttttctgttcctgcattagtttgctgaggataacagcttccagatccacccatgtccctgcaaaggacatgatcttgttcctttttatggccacgtagtattccatgttgtatatgtaccac

SEQ ID NO: 25003 - DNA, 196 bp, Homo sapiens
  MAP TO AC024127.1; EXPRESSED IN BONE MARROW, SIGNAL = 4.8; EXPRESSED IN LUNG, SIGNAL = 4.2; EXPRESSED IN PLACENTA, SIGNAL = 4.8; EXPRESSED IN BRAIN, SIGNAL = 7.1; EXPRESSED IN ADULT LIVER, SIGNAL = 5.4; EXPRESSED IN FETAL LIVER, SIGNAL = 6.9; EXPRESSED IN HELA, SIGNAL = 6.8; EXPRESSED IN HEART, SIGNAL = 5.2; SWISSPROT HIT: O42224, EVALUE 1.30e+00; EST_HUMAN HIT: BF032755.1, EVALUE 1.00e-106; NT HIT: gi11641238, EVALUE 1.00e-106
tcactgggcatgtgcttggaaggacttggacgagtgctcatggggctgcttgtgtttgctgtggtcgctacagtctgagcacgtgtggccaatgtggccagggttgctgttcttggcaacgcgctgctctttggcacttgtgcgagggctgtgctgagagatggatgcccagtggcggtagtggacggggtccgcc

SEQ ID NO: 25004 - DNA, 184 bp, Homo sapiens
  MAP TO AL133233.2; EXPRESSED IN ADULT LIVER, SIGNAL = 2.5; EXPRESSED IN HEART, SIGNAL = 2.8; EXPRESSED IN BRAIN, SIGNAL = 2.3; EXPRESSED IN PLACENTA, SIGNAL = 2.6; EXPRESSED IN BONE MARROW, SIGNAL = 1.8; EXPRESSED IN FETAL LIVER, SIGNAL = 2.5; EXPRESSED IN HELA, SIGNAL = 2.7; NT HIT: AL163246.2, EVALUE 7.00e-40; SWISSPROT HIT: P70213, EVALUE 8.00e-05; EST_HUMAN HIT: BE163587.1, EVALUE 3.00e-09
tcagggagggaatgttgccaccactggggatggggaagctgttccttctggcaaaaaaaggttcatagagtttacaaactcagtgtccccagctgcaagaggatcctgccacatgtgcccattccaacttgcagagtaccattcttttccaatcaatgccctcactttaacaatagacacctgg

SEQ ID NO: 25005 - DNA, 320 bp, Homo sapiens
  MAP TO AC002060.3; EXPRESSED IN BRAIN, SIGNAL = 1.4; EXPRESSED IN BONE MARROW, SIGNAL = 1.5e+02; EXPRESSED IN HEART, SIGNAL = 1.8; EXPRESSED IN LUNG, SIGNAL =  86; EXPRESSED IN ADULT LIVER, SIGNAL = 3.7; EXPRESSED IN FETAL LIVER, SIGNAL = 1.9; SWISSPROT HIT: P01842, EVALUE 1.00e-56; NT HIT: X57804.1, EVALUE 0.00e+00; EST_HUMAN HIT: AW804516.1, EVALUE 0.00e+00
gtcagcccaaggctgccccctcggtcactctgttcccgccctcctctgaggagcttcaagccaacaaggccacactggtgtgtctcataagtgacttctacccgggagccgtgacagtggcctggaaggcagatagcagccccgtcaaggcgggagtggagaccaccacaccctccaaacaaagcaacaacaagtacgcggccagcagctacctgagcctgacgcctgagcagtggaagtcccacaaaagctacagctgccaggtcacgcatgaagggagcaccgtggagaagacagtggcccctacagaatgttcatag

SEQ ID NO: 25006 - DNA, 294 bp, Homo sapiens
  MAP TO AC000134.14; EXPRESSED IN BRAIN, SIGNAL = 1.6; EXPRESSED IN PLACENTA, SIGNAL = 1.6; EXPRESSED IN HELA, SIGNAL = 1.8; EXPRESSED IN BONE MARROW, SIGNAL = 3.3; EXPRESSED IN LUNG, SIGNAL = 3.6; EXPRESSED IN ADULT LIVER, SIGNAL = 1.8; EXPRESSED IN FETAL LIVER, SIGNAL =   2; EXPRESSED IN HEART, SIGNAL = 2.1; EST_HUMAN HIT: BF340308.1, EVALUE 0.00e+00; NT HIT: AF043723.1, EVALUE 0.00e+00; SWISSPROT HIT: P04821, EVALUE 3.10e-02
cgtgagcaggctcagcaggtcggggttggcctgtactggtggccgcaggctggtcaccatggccagctcctccaggatgctaaagagctgcttcatcttggccccgttgagccgggtccgggctgggtccagccagtcaggcagtgccagctgcagggccaccaggtccttgaggtgcacacccaggatcgggaagcggaagcccacacaggctgccagccgacgccggtagttgccatagttgcctgtcgccgtcactagttccgtgagaccctcccagagctggggacaaag

SEQ ID NO: 25007 - DNA, 322 bp, Homo sapiens
  MAP TO AL133475.14; EXPRESSED IN PLACENTA, SIGNAL =  14; EXPRESSED IN BONE MARROW, SIGNAL =  50; EXPRESSED IN HELA, SIGNAL =  41; EXPRESSED IN LUNG, SIGNAL =  25; EXPRESSED IN ADULT LIVER, SIGNAL =  27; EXPRESSED IN BRAIN, SIGNAL =  53; EXPRESSED IN HEART, SIGNAL =  49; EXPRESSED IN FETAL LIVER, SIGNAL =  39; NT HIT: AF261085.1, EVALUE 0.00e+00; SWISSPROT HIT: P04406, EVALUE 3.00e-52; EST_HUMAN HIT: BE261209.1, EVALUE 0.00e+00
tcaggtggcattgctgatgatcttgaggctgttgtcatacttctcatggttcacacccatcgtgaacatggggggatcagcagagggggcagagatgatgacccttttggctccccactgcaagtgagccccagcattctccatggtggtgaagatgccagtggactccatgacatactcagtgccagcatcaccccacttgattttggagggatctggctcctggaagatagtgatgggatttccattgatgacaagcttcccgttctcagccttgacggtgccatggaatttaccatgggtgggatcatactggaacatg

SEQ ID NO: 25008 - DNA, 229 bp, Homo sapiens
  MAP TO AC008786.6; EXPRESSED IN HELA, SIGNAL = 1.8; EXPRESSED IN HEART, SIGNAL = 1.8; EXPRESSED IN FETAL LIVER, SIGNAL = 1.7; EST_HUMAN HIT: AV647600.1, EVALUE 1.30e-02; SWISSPROT HIT: Q60287, EVALUE 1.00e+00; NT HIT: AJ238617.1, EVALUE 4.00e-08
gaacacaaatatcatagtttatttagtccagtttctctacctcagaactattgacattttgggctggataattcagcactgtgagggctgtcctatgcattgtaggatatttaacaatatccctgatccctaccaactagatgccagtaacacccctccccaagttgtgacaatcaaaaatatctctaagcattgtcaatatctcttgggggccaaaatagtccctaat

SEQ ID NO: 25009 - DNA, 132 bp, Homo sapiens
  MAP TO AC022211.2; EXPRESSED IN ADULT LIVER, SIGNAL = 1.5; EXPRESSED IN HELA, SIGNAL = 2.6; EXPRESSED IN HEART, SIGNAL = 2.3; EXPRESSED IN BRAIN, SIGNAL = 3.5; EXPRESSED IN PLACENTA, SIGNAL = 2.8; EXPRESSED IN BONE MARROW, SIGNAL = 3.4; EXPRESSED IN LUNG, SIGNAL = 3.9; EXPRESSED IN FETAL LIVER, SIGNAL = 3.4; EST_HUMAN HIT: BE738903.1, EVALUE 2.00e-68; NT HIT: L76416.1, EVALUE 1.00e-68; SWISSPROT HIT: P55855, EVALUE 4.00e-20
gaaggagtcaagactgagaacaacgatcatattaatttgaaggtggcggggcaggatggttctgtggtgcagtttaagattaagaggcatacaccacttagtaaactaatgaaagcctattgtgaacgacag

SEQ ID NO: 25010 - DNA, 162 bp, Homo sapiens
  MAP TO AL159191.1; EXPRESSED IN BRAIN, SIGNAL = 2.5; EXPRESSED IN PLACENTA, SIGNAL = 1.8; EXPRESSED IN FETAL LIVER, SIGNAL = 1.9; EXPRESSED IN ADULT LIVER, SIGNAL = 1.9; EXPRESSED IN HELA, SIGNAL = 1.8; EXPRESSED IN HEART, SIGNAL = 1.8; SWISSPROT HIT: P21425, EVALUE 2.00e-07; NT HIT: gi4759051, EVALUE 2.00e-86; EST_HUMAN HIT: AA305163.1, EVALUE 4.00e-82
ctgaaacagcttctcagaactctggggcagggctgcgggagaataagtgggatccatttctgtgaactcttctgcaaagttactcacatctaattcatctcgaatgactggcttaaatggtgcaggcacttttttggcggctaaatcatcccaatttatttt

SEQ ID NO: 25011 - DNA, 205 bp, Homo sapiens
  MAP TO AL132773.14; EXPRESSED IN FETAL LIVER, SIGNAL = 2.3; EXPRESSED IN HEART, SIGNAL = 2.3; EXPRESSED IN BRAIN, SIGNAL = 1.9; EXPRESSED IN PLACENTA, SIGNAL = 2.4; EXPRESSED IN ADULT LIVER, SIGNAL = 2.5; EXPRESSED IN BONE MARROW, SIGNAL = 2.3; EXPRESSED IN HELA, SIGNAL = 2.4; EXPRESSED IN LUNG, SIGNAL = 2.2; NT HIT: AJ131984.1, EVALUE 7.50e+00; SWISSPROT HIT: P25299, EVALUE 1.30e+00
tgaaaaaagtacgcagaatgcagctcagagagacaaggagatagaaagtacaatagatactaagaatatggaggatagaatgagaagatccaactcatatatatttccagaatcccagaacaaaggagaggcaatattcagaaatgatagctttccagaactgatggaaaacatgaatatacagattccagaagcaaaacatatt

SEQ ID NO: 25012 - DNA, 162 bp, Homo sapiens
  MAP TO AC008372.6; EXPRESSED IN ADULT LIVER, SIGNAL = 3.4; EXPRESSED IN FETAL LIVER, SIGNAL = 3.5; EXPRESSED IN HELA, SIGNAL = 3.2; EXPRESSED IN PLACENTA, SIGNAL = 4.5; EXPRESSED IN BONE MARROW, SIGNAL = 3.1; EXPRESSED IN HEART, SIGNAL = 2.8; EXPRESSED IN LUNG, SIGNAL = 3.6; EXPRESSED IN BRAIN, SIGNAL = 3.8; NT HIT: gi11434908, EVALUE 5.00e-59; EST_HUMAN HIT: BE836731.1, EVALUE 2.20e+00; SWISSPROT HIT: O04212, EVALUE 1.40e-02
atgtggcttgtggatgaagccaagaagaacctgcctttggagctggatttcctcaatgaagggaggaatgctgagaaggtgtcccagatgctcaggcattttgacttcttgaaggtaggtgggacgatgcaatgcagggtatggtggtctggtggaagagtg

SEQ ID NO: 25013 - DNA, 113 bp, Homo sapiens
  MAP TO AC002400.1; EXPRESSED IN PLACENTA, SIGNAL = 2.3; EXPRESSED IN HELA, SIGNAL = 3.4; EXPRESSED IN BRAIN, SIGNAL = 2.9; EXPRESSED IN LUNG, SIGNAL = 5.4; EXPRESSED IN FETAL LIVER, SIGNAL =   3; EXPRESSED IN BONE MARROW, SIGNAL =   3; EXPRESSED IN ADULT LIVER, SIGNAL = 2.8; EXPRESSED IN HEART, SIGNAL =  20; NT HIT: X97196.1, EVALUE 6.20e-02; SWISSPROT HIT: O32741, EVALUE 9.30e+00; EST_HUMAN HIT: AW248374.1, EVALUE 3.00e-57
caggacttggtgtccccagtatactcttacctgtggactcgccctgcagtaggtcgagcacagctggacgccatctcggagaaggtggatgtgattgccaagcgtgtgctggg

SEQ ID NO: 25014 - DNA, 207 bp, Homo sapiens
  MAP TO AC008753.5; EXPRESSED IN FETAL LIVER, SIGNAL = 1.9; EXPRESSED IN HELA, SIGNAL = 1.8; EXPRESSED IN BRAIN, SIGNAL = 1.8; EXPRESSED IN PLACENTA, SIGNAL = 1.5; EXPRESSED IN HEART, SIGNAL = 2.8; NT HIT: gi4502694, EVALUE 4.00e-88; SWISSPROT HIT: O55131, EVALUE 6.00e-30; EST_HUMAN HIT: AU136454.1, EVALUE 5.00e-88
cctttttccattaacttcagtgataatatcactacccaccacagcaagaggtaaacggtcctttatctttttaacacgtttcttttcttcttcatcatctgtttctggaaattcatatattttaattttatgttcttggatttctttcattatctgttttgtaaactgttgacattcctctggtgtgagtgtgtctgctttggcagt

SEQ ID NO: 25015 - DNA, 337 bp, Homo sapiens
  MAP TO AC008481.4; EXPRESSED IN PLACENTA, SIGNAL = 3.9; EXPRESSED IN HELA, SIGNAL = 3.8; EXPRESSED IN BRAIN, SIGNAL = 3.5; EXPRESSED IN LUNG, SIGNAL =   9; EXPRESSED IN HEART, SIGNAL = 2.5; EXPRESSED IN FETAL LIVER, SIGNAL = 3.8; EXPRESSED IN BONE MARROW, SIGNAL = 6.1; EXPRESSED IN ADULT LIVER, SIGNAL = 4.4; NT HIT: U50326.1, EVALUE 0.00e+00; SWISSPROT HIT: P14314, EVALUE 6.00e-30; EST_HUMAN HIT: BE926723.1, EVALUE 5.00e-77
ctagagctcgtcatggtcgtcttcggtgggtgcttcaggcggtggctccgggcaggcggctggcgtcatcagctccatgaggtactcgcagcgactgggctctgtggtgctggtcaccatggtctctttcccgcacaggaggcgcacctggggatgggcagacgggtgctcgagagggttcggctgggccaggcctgggtctccccgccccagctcccctgccttgcaggcactcacggtggtggagcggttggggccctgccagcagcccgtgccttgctcatacttcatggcactgaacttgtcgtggtcggggccaatccatgagccccaggtg

SEQ ID NO: 25016 - DNA, 311 bp, Homo sapiens; identical to SEQ ID NO: 17687
  MAP TO AL049829.3; EXPRESSED IN BONE MARROW, SIGNAL = 1.7; EXPRESSED IN HEART, SIGNAL =  69; SWISSPROT HIT: P13533, EVALUE 4.00e-56; NT HIT: Z20656.1, EVALUE 0.00e+00; EST_HUMAN HIT: N85169.1, EVALUE 1.00e-80

SEQ ID NO: 25017 - DNA, 408 bp, Homo sapiens
  MAP TO AL133244.1; EXPRESSED IN BRAIN, SIGNAL = 1.8; EXPRESSED IN PLACENTA, SIGNAL = 2.4; EXPRESSED IN FETAL LIVER, SIGNAL =   5; EXPRESSED IN HELA, SIGNAL = 5.3; EXPRESSED IN ADULT LIVER, SIGNAL = 1.5; EXPRESSED IN HEART, SIGNAL = 4.7; NT HIT: AL163210.2, EVALUE 1.00e-55; EST_HUMAN HIT: BE156318.1, EVALUE 1.00e-44; SWISSPROT HIT: Q10175, EVALUE 3.60e-01
aatggctttgaccaaaatgctaatagtgatagagacaataaagtccaggctgaggtggtctcagatagagatgaggaacttgttgggagctggagcaaaggtgattcttgttacacttaaaaaagagactggtggcattttgcttttgccctagagatctgtggaactttgagcttgagagagatgatttggggtatctggtggaagaaacttctaagtggcaaactgttcaagaggaggcagaatataaaagtttggaaaatttgcagcctgatgatgaagtagaaaagaaaaaccaattttctggggagaaactcaagcctgctgcagaaatttgtgtaagtaacaaggagcccaagacagtgggcttaatcaccaagacagttaatcaccaagttaatcaccaag

SEQ ID NO: 25018 - DNA, 128 bp, Homo sapiens
  MAP TO AL133286.5; EXPRESSED IN FETAL LIVER, SIGNAL = 6.2; EXPRESSED IN HEART, SIGNAL = 4.8; EXPRESSED IN PLACENTA, SIGNAL = 4.1; EXPRESSED IN BRAIN, SIGNAL = 3.3; EXPRESSED IN BONE MARROW, SIGNAL = 4.2; EXPRESSED IN ADULT LIVER, SIGNAL = 3.9; EXPRESSED IN HELA, SIGNAL = 4.8; EXPRESSED IN LUNG, SIGNAL = 4.9; SWISSPROT HIT: Q12887, EVALUE 6.20e-01; NT HIT: AF049874.1, EVALUE 7.20e-02
gagcagtcccatggacggtggggagagtggcctcagggaggcaaacttgcagagtcctggctgcgttctctctcagacaggtcgcatggtctcccggggcctcggttatttcaactatgaaattgaga

SEQ ID NO: 25019 - DNA, 140 bp, Homo sapiens
  MAP TO AC008929.3; EXPRESSED IN ADULT LIVER, SIGNAL =   3; EXPRESSED IN FETAL LIVER, SIGNAL = 3.5; EXPRESSED IN HEART, SIGNAL = 3.4; EXPRESSED IN BRAIN, SIGNAL = 2.7; EXPRESSED IN PLACENTA, SIGNAL = 3.5; EXPRESSED IN HELA, SIGNAL = 3.8; EXPRESSED IN BONE MARROW, SIGNAL = 3.3; EXPRESSED IN LUNG, SIGNAL = 4.3; NT HIT: X14946.1, EVALUE 5.00e-03; EST_HUMAN HIT: AI038280.1, EVALUE 1.00e-10
ctagagaagttcccctgaacgtgtagaacactggcaaccatgaggaggacatgcagtgttctgtcctgagtgtgaagctgggtcttggtgttgctttgctgcaagtaccatttgccactgatgattgtttttgtctccct

SEQ ID NO: 25020 - DNA, 277 bp, Homo sapiens
  MAP TO Z97197.2; EXPRESSED IN BRAIN, SIGNAL = 1.6; EXPRESSED IN PLACENTA, SIGNAL = 2.4; EXPRESSED IN BONE MARROW, SIGNAL =   6; EXPRESSED IN HEART, SIGNAL = 3.5; EXPRESSED IN LUNG, SIGNAL = 5.7; EXPRESSED IN FETAL LIVER, SIGNAL = 3.5; EXPRESSED IN HELA, SIGNAL = 2.2; EST_HUMAN HIT: BE773036.1, EVALUE 0.00e+00; NT HIT: gi11433460, EVALUE 0.00e+00
ggtgtgctggagtatctgtctgccttcgatgaagaaaccacggaagtttgttctctggacactccttctagacctcttgctctccctctggtagaagaggaggaagcagtgtctgaaccagagcctgaggggttgccagaggcctgtgatgacttggagttagcagatgacaatcttaaagaggggaccatttgcactgagtccagccagcaggaacccatcaccaagtcaggcttcacacgcctcagcagctctccttgttactacttttaccaag

SEQ ID NO: 25021 - DNA, 122 bp, Homo sapiens
  MAP TO AC007955.4; EXPRESSED IN BRAIN, SIGNAL = 2.7; EXPRESSED IN ADULT LIVER, SIGNAL = 3.5; EXPRESSED IN HELA, SIGNAL = 2.5; EXPRESSED IN PLACENTA, SIGNAL = 2.3; EXPRESSED IN LUNG, SIGNAL = 2.8; EXPRESSED IN HEART, SIGNAL = 2.7; EXPRESSED IN FETAL LIVER, SIGNAL = 2.9; EXPRESSED IN BONE MARROW, SIGNAL = 4.7; NT HIT: U93173.1, EVALUE 1.00e-31; EST_HUMAN HIT: AI086434.1, EVALUE 1.00e-31; SWISSPROT HIT: Q16595, EVALUE 2.00e-12
aagacaagtccagtttggttttcaagacttcagtgagctctgtggccagcagctcatggagggacacgctgtcatgggagtacatgcagtttttcccagtcccatcataattcttgggccca

SEQ ID NO: 25022 - DNA, 85 bp, Homo sapiens
  MAP TO AC002039.1; EXPRESSED IN BRAIN, SIGNAL = 8.3; EXPRESSED IN PLACENTA, SIGNAL = 6.4; EXPRESSED IN HELA, SIGNAL = 6.8; EXPRESSED IN BONE MARROW, SIGNAL = 2.4; EXPRESSED IN FETAL LIVER, SIGNAL = 4.1; EXPRESSED IN LUNG, SIGNAL =  19; EXPRESSED IN HEART, SIGNAL = 5.7; NT HIT: X57398.1, EVALUE 2.00e-38; SWISSPROT HIT: Q9WTL3, EVALUE 9.60e+00; EST_HUMAN HIT: AU149345.1, EVALUE 1.00e-40
cgcgctcggccaggcagcctctgacaatagcggcccagaagatgcaaagagacaagccaagaaacagaagacaaggcggacgtga

SEQ ID NO: 25023 - DNA, 158 bp, Homo sapiens
  MAP TO AL157996.1; EXPRESSED IN FETAL LIVER, SIGNAL = 5.8; EXPRESSED IN LUNG, SIGNAL = 5.4; EXPRESSED IN BRAIN, SIGNAL = 4.5; EXPRESSED IN ADULT LIVER, SIGNAL = 4.5; EXPRESSED IN BONE MARROW, SIGNAL = 5.3; EXPRESSED IN HELA, SIGNAL = 5.8; EXPRESSED IN HEART, SIGNAL = 6.6; EXPRESSED IN PLACENTA, SIGNAL = 4.8; NT HIT: AB032956.1, EVALUE 4.00e-84; SWISSPROT HIT: P30291, EVALUE 2.30e+00; EST_HUMAN HIT: AI750782.1, EVALUE 2.00e-34
ctgtaatggcgggtgtcccggatgggccggtctgggctcagcttgtcactctccagctggttgaaggcgtgctgtctgtaggggtcctctccagccttcagctgcttggccgacaggtaggccttctcatcaaagcctttcgagggagttcctgtcac

SEQ ID NO: 25024 - DNA, 92 bp, Homo sapiens
  MAP TO AC009565.7; EXPRESSED IN BRAIN, SIGNAL =   2; EXPRESSED IN PLACENTA, SIGNAL = 2.2; EXPRESSED IN BONE MARROW, SIGNAL = 1.8; EXPRESSED IN FETAL LIVER, SIGNAL = 2.3; EXPRESSED IN ADULT LIVER, SIGNAL = 2.1; EXPRESSED IN HELA, SIGNAL = 2.5; EXPRESSED IN HEART, SIGNAL = 2.2; EST_HUMAN HIT: R53739.1, EVALUE 2.00e-05; NT HIT: U91328.1, EVALUE 1.00e-05; SWISSPROT HIT: Q9Y5B6, EVALUE 6.00e-03
aaggcctgtctgtgcagattcttcctctctgtgcagcattccttccttccaggcatggaacaggattgtctttggaatgggagtcttgggac

SEQ ID NO: 25025 - DNA, 135 bp, Homo sapiens
  MAP TO AL136038.1; EXPRESSED IN BRAIN, SIGNAL =   4; EXPRESSED IN FETAL LIVER, SIGNAL = 4.9; EXPRESSED IN HELA, SIGNAL =   5; EXPRESSED IN BONE MARROW, SIGNAL = 3.9; EXPRESSED IN HEART, SIGNAL = 4.2; EXPRESSED IN LUNG, SIGNAL = 3.3; EXPRESSED IN PLACENTA, SIGNAL =   4; EXPRESSED IN ADULT LIVER, SIGNAL = 4.9; EST_HUMAN HIT: AI624888.1, EVALUE 7.00e-37; SWISSPROT HIT: O75600, EVALUE 2.00e-15; NT HIT: gi7657117, EVALUE 5.00e-37
atgctgaagagaggcatctttgttattgggttcagctaccctgtggtctccaagggcaaggcccagatccggatacagatctcagcattgcacaatgaggaagacattgactaccacgtggaggccttcgtggaa

SEQ ID NO: 25026 - DNA, 145 bp, Homo sapiens
  MAP TO AC007338.2; EXPRESSED IN ADULT LIVER, SIGNAL =   3; EXPRESSED IN FETAL LIVER, SIGNAL = 2.8; EXPRESSED IN HEART, SIGNAL = 2.8; EXPRESSED IN PLACENTA, SIGNAL = 2.4; EXPRESSED IN BONE MARROW, SIGNAL = 2.6; EXPRESSED IN LUNG, SIGNAL = 2.5; EXPRESSED IN BRAIN, SIGNAL = 3.6; EXPRESSED IN HELA, SIGNAL = 2.7; EST_HUMAN HIT: AA364711.1, EVALUE 3.00e-76; SWISSPROT HIT: Q03363, EVALUE 9.00e-11; NT HIT: gi7549807, EVALUE 2.00e-76
gtatttcagagagatgggaatgatttgcacatgacatataaaataggacttgttgaagctctatgtggatttcagttcacatttaagcaccttgatggacgtcagattgtggtgaaatacccccctggcaaagtaattgaaccag

SEQ ID NO: 25027 - DNA, 189 bp, Homo sapiens
  MAP TO AC023084.2; EXPRESSED IN BONE MARROW, SIGNAL = 3.1; EXPRESSED IN LUNG, SIGNAL = 3.3; EXPRESSED IN PLACENTA, SIGNAL = 2.5; EXPRESSED IN ADULT LIVER, SIGNAL = 2.2; EXPRESSED IN FETAL LIVER, SIGNAL = 3.2; EXPRESSED IN HELA, SIGNAL = 3.5; EXPRESSED IN HEART, SIGNAL = 3.9; EXPRESSED IN BRAIN, SIGNAL = 2.8; NT HIT: AF169032.1, EVALUE 1.10e-01
atggtagccataaaaatcatgatgtcaggggcatctggcatttcattcctcaactacatgactatttgtacagtggactggccaatcattaggcttatttcagtagagaagacaaagaataggaaagaaaacatcccaaactcactccttccccaggtcttgtttgaatgggtgaaagggaagaagtgg

SEQ ID NO: 25028 - DNA, 375 bp, Homo sapiens
  MAP TO AL157817.3; EXPRESSED IN BRAIN, SIGNAL = 8.9; EXPRESSED IN PLACENTA, SIGNAL = 7.7; EXPRESSED IN BONE MARROW, SIGNAL = 7.8; EXPRESSED IN ADULT LIVER, SIGNAL = 8.5; EXPRESSED IN HELA, SIGNAL =  11; EXPRESSED IN LUNG, SIGNAL = 7.7; EXPRESSED IN FETAL LIVER, SIGNAL = 8.3; EXPRESSED IN HEART, SIGNAL = 8.7; SWISSPROT HIT: P18833, EVALUE 1.60e+00; EST_HUMAN HIT: AI498066.1, EVALUE 4.00e-56
tcagatgtagaattcctccatgtcgttatccccggggccagccgaccctgggggtggtggcatgtctccatcagtctgcttgactttgggggtatcgcatgggagctgtggggaggagtctgtgagggtggaggtgctgggagctgggggagcagcacgagctgtcgctgaggagctggaagaccttttggtgaagaaagggagggaagcccaggaggcctctgtggtcaccctgctgacagtgggcagtggtccctccctggaatccttgtgagctgcccagtggctgctgcatctttcggaggggaggggtgtctccactgtgctgcagaacctactgggtgcagaatatgcagagaccacagacaggtccga

SEQ ID NO: 25029 - DNA, 161 bp, Homo sapiens
  MAP TO AC002477.1; EXPRESSED IN BRAIN, SIGNAL = 2.8; EXPRESSED IN HELA, SIGNAL = 2.9; EXPRESSED IN BONE MARROW, SIGNAL =   2; EXPRESSED IN LUNG, SIGNAL = 3.7; EXPRESSED IN PLACENTA, SIGNAL = 2.8; EXPRESSED IN FETAL LIVER, SIGNAL = 2.7; EXPRESSED IN ADULT LIVER, SIGNAL = 2.2; EXPRESSED IN HEART, SIGNAL = 2.6; SWISSPROT HIT: Q15233, EVALUE 2.70e-01; EST_HUMAN HIT: AA778785.1, EVALUE 1.00e-85
tccctttggtctttctgtaaaccatttctcgaaaactggccagaatcttgttctctctctttcgtctctcttcttggttaaaggatgcaagggctctcttctcatcagcactgtagatctggttctcttttcgcagtcgcacagcctccattcggcgatgc

SEQ ID NO: 25030 - DNA, 97 bp, Homo sapiens
  MAP TO AL117692.1; EXPRESSED IN BRAIN, SIGNAL = 3.6; EXPRESSED IN FETAL LIVER, SIGNAL = 7.7; EXPRESSED IN HELA, SIGNAL = 9.1; EXPRESSED IN BONE MARROW, SIGNAL = 2.8; EXPRESSED IN HEART, SIGNAL = 8.1; EXPRESSED IN PLACENTA, SIGNAL = 3.4; EXPRESSED IN LUNG, SIGNAL = 1.9; EXPRESSED IN ADULT LIVER, SIGNAL = 3.4; SWISSPROT HIT: O74164, EVALUE 9.50e+00; EST_HUMAN HIT: AA777621.1, EVALUE 3.00e-32; NT HIT: AL163227.2, EVALUE 7.00e-29
atgtggaagcaactttggaactgggtaataggcagaggttggtaccgtttggagagctcagaagcagacaggaaaatgtgggaaagtttggaacttc

SEQ ID NO: 25031 - DNA, 160 bp, Homo sapiens
  MAP TO AC002401.1; EXPRESSED IN BRAIN, SIGNAL = 2.2; EXPRESSED IN PLACENTA, SIGNAL = 1.6; EXPRESSED IN FETAL LIVER, SIGNAL = 1.9; EXPRESSED IN ADULT LIVER, SIGNAL = 1.7; EXPRESSED IN BONE MARROW, SIGNAL = 1.8; EXPRESSED IN HELA, SIGNAL = 2.3; EXPRESSED IN LUNG, SIGNAL = 2.1; EXPRESSED IN HEART, SIGNAL = 1.8; SWISSPROT HIT: P14335, EVALUE 4.00e+00; NT HIT: X87948.1, EVALUE 9.30e-02; EST_HUMAN HIT: AL134452.1, EVALUE 2.00e-83
ggagtcagtggaggggtccggcaggtcagggggctccccgttcctgcctttttcctggttcacggacagcggcaagggctcagcatcctcgggtagcaccacctcccccacctgctcccctaaacacgagggcttcagccctaagaagtcagcttcccag

SEQ ID NO: 25032 - DNA, 148 bp, Homo sapiens
  MAP TO AC000059.1; EXPRESSED IN PLACENTA, SIGNAL = 1.8; EXPRESSED IN BRAIN, SIGNAL =   2; EXPRESSED IN ADULT LIVER, SIGNAL =   2; EXPRESSED IN BONE MARROW, SIGNAL = 1.7; EXPRESSED IN FETAL LIVER, SIGNAL = 2.2; EXPRESSED IN HELA, SIGNAL = 2.3; EXPRESSED IN HEART, SIGNAL = 2.2; NT HIT: Z18892.2, EVALUE 1.30e+00
agttgtgccaaacatcaacaaaatccattttgatgatctcaacaaaatccactttgatgatctcaaagagagccacagctgtcaatcccccaccccaccccatcatctcctccccaccactacttccacctcggccctaagcaaccat

SEQ ID NO: 25033 - DNA, 114 bp, Homo sapiens
  MAP TO AC023344.2; EXPRESSED IN PLACENTA, SIGNAL = 2.6; EXPRESSED IN HEART, SIGNAL = 3.2; EXPRESSED IN ADULT LIVER, SIGNAL = 3.2; EXPRESSED IN BRAIN, SIGNAL = 3.6; EXPRESSED IN LUNG, SIGNAL = 3.7; EXPRESSED IN HELA, SIGNAL = 3.9; EXPRESSED IN FETAL LIVER, SIGNAL = 3.8; EXPRESSED IN BONE MARROW, SIGNAL = 2.8; NT HIT: gi7662658, EVALUE 2.50e-01; EST_HUMAN HIT: AW504109.1, EVALUE 7.00e-58
gttctgtatgttcctgatcctgaatatgtctccagtgttgagagctctccatctctaagccccgtaagtcctctgtcaccaacatcatctgaggctgaatttgataagaccact

SEQ ID NO: 25034 - DNA, 218 bp, Homo sapiens
  MAP TO AC017004.2; EXPRESSED IN BONE MARROW, SIGNAL = 3.2; EXPRESSED IN LUNG, SIGNAL = 2.7; EXPRESSED IN BRAIN, SIGNAL = 4.5; EXPRESSED IN PLACENTA, SIGNAL = 3.2; EXPRESSED IN ADULT LIVER, SIGNAL = 1.6; EXPRESSED IN FETAL LIVER, SIGNAL =   4; EXPRESSED IN HELA, SIGNAL = 6.2; EXPRESSED IN HEART, SIGNAL = 3.1; NT HIT: AL163284.2, EVALUE 4.00e-91; EST_HUMAN HIT: N66951.1, EVALUE 6.00e-91; SWISSPROT HIT: O75593, EVALUE 5.40e-01
acccatctgacctctctcctcctccccaggctgctccttgccaggcggagctaggtcccaattcttcctcagcctctgctcctccaccctataatccttttatcacctcccctcctcacacctggtccggcttacagtttcgttcggtgactagccctcccccacctgcccagcaatttactcttaaaaaggtgcctggagctaaaggcatagtcaag

SEQ ID NO: 25035 - DNA, 221 bp, Homo sapiens
  MAP TO AC011442.2; EXPRESSED IN BRAIN, SIGNAL = 5.7; EXPRESSED IN HELA, SIGNAL = 6.6; EXPRESSED IN PLACENTA, SIGNAL = 4.8; EXPRESSED IN LUNG, SIGNAL = 7.2; EXPRESSED IN HEART, SIGNAL = 5.4; EXPRESSED IN FETAL LIVER, SIGNAL = 6.1; EXPRESSED IN BONE MARROW, SIGNAL = 4.6; EXPRESSED IN ADULT LIVER, SIGNAL = 5.4; NT HIT: AF254822.1, EVALUE 1.00e-105; SWISSPROT HIT: P08699, EVALUE 6.30e-01; EST_HUMAN HIT: AI459788.1, EVALUE 3.10e+00
atgtggcgcaaagaccaaatatatccatatcatacctcagagggcaagtgggtgcggccacaggtggggcatagggagaagtcacaggccttgagggccacagtaaaggggttccaggagcaccagtgcagtggggagctgctagaatgttccaggcacgggagtggcacgtctgataatgactttaatttctctggacatgctgatggaatggatgtgca

SEQ ID NO: 25036 - DNA, 196 bp, Homo sapiens
  MAP TO AL132801.1; EXPRESSED IN ADULT LIVER, SIGNAL = 2.9; EXPRESSED IN BONE MARROW, SIGNAL = 8.6; EXPRESSED IN LUNG, SIGNAL = 8.5; EXPRESSED IN PLACENTA, SIGNAL = 7.6; EXPRESSED IN FETAL LIVER, SIGNAL =  16; EXPRESSED IN HEART, SIGNAL =  14; EXPRESSED IN BRAIN, SIGNAL = 7.1; EXPRESSED IN HELA, SIGNAL =  19; SWISSPROT HIT: P29316, EVALUE 3.00e-24; NT HIT: U43701.1, EVALUE 1.00e-66; EST_HUMAN HIT: AV738538.1, EVALUE 1.00e-70
tcagggtgttgaccgggccacatcaatgtcatagagcttcttcacagcctgtttgatctggtgcctgttggctttaacatctacaatgaacacaagtgtcttgttgtcctcgctcttcttcatggcagactcagtggtcagcggcaacttgatgataatatggtggtcaagcttgtttctcctggcggcgctcttc

SEQ ID NO: 25037 - DNA, 342 bp, Homo sapiens
  MAP TO AL121761.5; EXPRESSED IN PLACENTA, SIGNAL = 2.1; EXPRESSED IN FETAL LIVER, SIGNAL = 2.1; EXPRESSED IN HEART, SIGNAL = 1.8; EXPRESSED IN BRAIN, SIGNAL = 2.1; EXPRESSED IN LUNG, SIGNAL = 2.5; EXPRESSED IN HELA, SIGNAL = 1.8; EXPRESSED IN BONE MARROW, SIGNAL = 2.1; EXPRESSED IN ADULT LIVER, SIGNAL = 1.7; SWISSPROT HIT: P04157, EVALUE 1.30e+00; NT HIT: U53588.1, EVALUE 3.00e-28; EST_HUMAN HIT: AU145969.1, EVALUE 2.00e-17
gaggaaatgtgaaatcttgttttccctgcggagctgcttccgctcagtcaccaccaagctctgcaactcatggctctgcccccagcctctgtccctcttccacctcctgctgcctccttcccagcaagaattccatgttttcacgtataacctgtacgtgaaaaaaacaaaaacgtgtttttcctctgctctcacaacaatcaccaacacagaagccttctgtgaccaaatgtgtggggtttttccccacacaccaagtagtggacaccagctgggcatcctccagctcaattcccacagggtgagggctgagtctcacaagactgcccccacccccccccc

SEQ ID NO: 25038 - DNA, 310 bp, Homo sapiens
  MAP TO AC002045.1; EXPRESSED IN ADULT LIVER, SIGNAL =  66; EXPRESSED IN PLACENTA, SIGNAL =  51; EXPRESSED IN BONE MARROW, SIGNAL =  90; EXPRESSED IN FETAL LIVER, SIGNAL =  56; EXPRESSED IN HELA, SIGNAL =  19; EXPRESSED IN LUNG, SIGNAL = 1.2e+02; EXPRESSED IN HEART, SIGNAL =  25; EXPRESSED IN BRAIN, SIGNAL = 1.4e+02; SWISSPROT HIT: O59947, EVALUE 9.90e+00; EST_HUMAN HIT: AA740782.1, EVALUE 0.00e+00; NT HIT: gi5902013, EVALUE 0.00e+00
ttatcatccgctgagggtggaaggggagtgagcagacacacttgggaggtgtcttgagattatcatccgctgagggtggagctgagggtggaaggggagtgagcagacactcgggaggtgtcttgagattatcatccgctgagggtggaaggggatagagcagacactccgcaggtgtcttgagattatcatccgctgagggtagagctgagggtggaaggggagtgagcagacactcgggaggtgtcttgaggctcagggagttatcaattatagaatgttgttgagttggaggaggtggctggtggcc

SEQ ID NO: 25039 - DNA, 114 bp, Homo sapiens
  MAP TO AC011464.2; EXPRESSED IN BRAIN, SIGNAL = 3.1; EXPRESSED IN PLACENTA, SIGNAL = 3.9; EXPRESSED IN BONE MARROW, SIGNAL = 2.6; EXPRESSED IN HELA, SIGNAL = 4.3; EXPRESSED IN ADULT LIVER, SIGNAL = 3.3; EXPRESSED IN LUNG, SIGNAL = 2.2; EXPRESSED IN FETAL LIVER, SIGNAL =   4; EXPRESSED IN HEART, SIGNAL = 3.8; SWISSPROT HIT: P35085, EVALUE 8.20e-01; EST_HUMAN HIT: AI765528.1, EVALUE 4.00e-07
cctggcaggaagacatgtaccctggcggaagacacgtaccctggccggaagacatctaccctggccggaagacattaccctggccggaagacacctaccctggccggaagacat

SEQ ID NO: 25040 - DNA, 163 bp, Homo sapiens
  MAP TO AC006530.4; EXPRESSED IN BRAIN, SIGNAL = 3.5; EXPRESSED IN PLACENTA, SIGNAL = 3.6; EXPRESSED IN BONE MARROW, SIGNAL = 3.6; EXPRESSED IN HELA, SIGNAL = 3.6; EXPRESSED IN ADULT LIVER, SIGNAL = 3.5; EXPRESSED IN FETAL LIVER, SIGNAL = 3.8; EXPRESSED IN HEART, SIGNAL = 3.3; EXPRESSED IN LUNG, SIGNAL = 3.1; SWISSPROT HIT: Q10364, EVALUE 9.00e-06; EST_HUMAN HIT: AI130858.1, EVALUE 2.20e+00; NT HIT: AF109906.1, EVALUE 9.50e-02
ctgcctggtccaggagcaggttcccggggtggaggtcccggcacagcaccccctgctcgtgcagcgcctccagcgctaccagcatctctgccgcccactgcttcacctgctcctctctcacactccaggtggccctgccacagccccggccggccccatctgc

SEQ ID NO: 25041 - DNA, 97 bp, Homo sapiens
  MAP TO AC002994.2; EXPRESSED IN HEART, SIGNAL = 3.2; EXPRESSED IN BRAIN, SIGNAL = 3.4; EXPRESSED IN HELA, SIGNAL =   3; EXPRESSED IN PLACENTA, SIGNAL = 2.4; EXPRESSED IN LUNG, SIGNAL =   4; EXPRESSED IN FETAL LIVER, SIGNAL = 2.9; EXPRESSED IN BONE MARROW, SIGNAL = 2.2; EXPRESSED IN ADULT LIVER, SIGNAL = 2.5; EST_HUMAN HIT: AW170334.1, EVALUE 5.00e-03; NT HIT: U62631.1, EVALUE 5.20e-02
ttagcaaaagacatatacattcatattcaagaaacagcgaccgtcaaacaggataaaccaaagatccatgaagacatcatagtcaaacttctgaaaa

SEQ ID NO: 25042 - DNA, 151 bp, Homo sapiens
  MAP TO AC020714.2; EXPRESSED IN BRAIN, SIGNAL = 2.8; EXPRESSED IN PLACENTA, SIGNAL =   2; EXPRESSED IN HELA, SIGNAL = 2.9; EXPRESSED IN ADULT LIVER, SIGNAL = 2.4; EXPRESSED IN BONE MARROW, SIGNAL = 2.4; EXPRESSED IN HEART, SIGNAL = 2.9; EXPRESSED IN FETAL LIVER, SIGNAL = 2.7; EXPRESSED IN LUNG, SIGNAL = 3.3; NT HIT: gi11427366, EVALUE 6.00e-80; SWISSPROT HIT: P39801, EVALUE 1.40e+00; EST_HUMAN HIT: AA018991.1, EVALUE 5.10e-01
ctagccctaaacccacaaattcatcaggagcctgatcttttgttccagtaagagatccttctctgcctcgcactgttccagaaatgtatcgaggtttcactccagttcctataagctgtgccagctccaactgactgatgcacttcagaat

SEQ ID NO: 25043 - DNA, 180 bp, Homo sapiens
  MAP TO AC019205.2; EXPRESSED IN BRAIN, SIGNAL = 2.5; EXPRESSED IN HELA, SIGNAL = 2.1; EXPRESSED IN BONE MARROW, SIGNAL = 2.5; EXPRESSED IN HEART, SIGNAL = 2.4; EXPRESSED IN PLACENTA, SIGNAL = 2.2; EXPRESSED IN LUNG, SIGNAL = 2.9; EXPRESSED IN FETAL LIVER, SIGNAL =   2; EXPRESSED IN ADULT LIVER, SIGNAL = 1.9; NT HIT: AF111167.2, EVALUE 1.00e-66; SWISSPROT HIT: P27607, EVALUE 2.30e+00; EST_HUMAN HIT: AI365263.1, EVALUE 2.00e-31
ctcgctcctggcgctggcggtgccactcagccatggactggagcatccacttggtccggagcttgtacaaataggagccgtaaaccacgacctcggtgaggtctgaagactccagagccttcagctcgagcatggccttgctcacctgctcgatgtaagggattcgagatccgtccgggc

SEQ ID NO: 25044 - DNA, 313 bp, Homo sapiens
  MAP TO AL121985.13; EXPRESSED IN ADULT LIVER, SIGNAL = 3.1; EXPRESSED IN HEART, SIGNAL = 3.1; EXPRESSED IN LUNG, SIGNAL = 3.4; EXPRESSED IN BRAIN, SIGNAL = 2.9; EXPRESSED IN PLACENTA, SIGNAL = 2.8; EXPRESSED IN BONE MARROW, SIGNAL = 2.8; EXPRESSED IN FETAL LIVER, SIGNAL =   3; EXPRESSED IN HELA, SIGNAL = 3.9; SWISSPROT HIT: Q13291, EVALUE 5.00e-50; NT HIT: AF252303.1, EVALUE 0.00e+00; EST_HUMAN HIT: AI904924.1, EVALUE 1.00e-109
ggtaccatccctcatcctccttcctgctttcccgtatccccagggtgagattctccagataaaacttgtagcgatctcctagataacgtggagggcctgcttcggatggatcaagagacactattttgttctcgacactgttctccagtgattttgccattgtgacgacaatgtggatgcttttgttcatgctcttatttatcctttcatatgtcaggggcagcagcactttgcttcccaactgccggagaatctttgggcagttcatcatgcgcccacctgtgggagggaggagaagagagtcccttattat

SEQ ID NO: 25045 - DNA, 112 bp, Homo sapiens
  MAP TO AC009242.2; EXPRESSED IN BRAIN, SIGNAL = 3.3; EXPRESSED IN PLACENTA, SIGNAL = 2.4; EXPRESSED IN HELA, SIGNAL = 2.3; EXPRESSED IN ADULT LIVER, SIGNAL = 1.9; EXPRESSED IN BONE MARROW, SIGNAL =   3; EXPRESSED IN FETAL LIVER, SIGNAL = 2.5; EXPRESSED IN LUNG, SIGNAL = 5.6; EXPRESSED IN HEART, SIGNAL = 1.9; SWISSPROT HIT: O87278, EVALUE 3.20e+00; EST_HUMAN HIT: BE902390.1, EVALUE 3.60e-01
ctggaacctcacgggttaccctgccggtgtctgctggggcctgctgctcctgaaggaagacagcggctgggatcagggcagctggcttcctgccacgggtcagcaccatcac

SEQ ID NO: 25046 - DNA, 535 bp, Homo sapiens
  MAP TO AC012558.6; EXPRESSED IN FETAL LIVER, SIGNAL = 1.7; EXPRESSED IN HEART, SIGNAL =   2; EXPRESSED IN PLACENTA, SIGNAL = 1.8; EXPRESSED IN BRAIN, SIGNAL = 1.8; EXPRESSED IN HELA, SIGNAL = 1.9; EXPRESSED IN ADULT LIVER, SIGNAL = 1.9; SWISSPROT HIT: P78716, EVALUE 6.80e-01; EST_HUMAN HIT: BE277344.1, EVALUE 1.30e-01; NT HIT: AF206551.1, EVALUE 8.60e-02
gttcaagctcattttgggggttccacttagtaataagaacagaggacctgcattcccatccctcagtcatagctggagtgtcttctactactgtcctcctcacacctgccagcaccttgattttctcctagcttgcctcctgcagaatagagtcacctatggactctccagtggattcatggataccctcccccagtcacctccgccagtactcagccttctcccaccagcctatcactgcttctgcagtcatgtcctccattgcaaccagcacgtctgcacggttgaactcttagctactttgaactttgatgtcactggcatggacatcactcccccttctcaagctttcttcctgagttctccttcaggctccagagagaacatcttcccattttccatggagctccctggttctgagaacatgtcacccaggagcagcattacctcagcctgttcccaccagtttgtctgcacagttggtcagtggcccaaatgcaactttcaaagttattgtggcccaagagccactgtt

SEQ ID NO: 25047 - DNA, 208 bp, Homo sapiens
  MAP TO AL121694.3; EXPRESSED IN BRAIN, SIGNAL =  14; EXPRESSED IN HELA, SIGNAL = 1.9; EXPRESSED IN BONE MARROW, SIGNAL = 1.5; EXPRESSED IN LUNG, SIGNAL = 2.1; EXPRESSED IN PLACENTA, SIGNAL = 1.6; EXPRESSED IN HEART, SIGNAL = 1.8; EXPRESSED IN FETAL LIVER, SIGNAL = 2.2; EXPRESSED IN ADULT LIVER, SIGNAL = 1.8; SWISSPROT HIT: O83650, EVALUE 2.20e+00; NT HIT: L49141.1, EVALUE 1.00e-107; EST_HUMAN HIT: AV728914.1, EVALUE 4.00e-67
gacccagttcagcgtggtgagcgtcgtggcctacctggccctggccgcactctcagccaccatcagtttccgcatctacaagtctgttttacaagcagtgcagaaaaccgacgaaggccaccctttcaagtgagtgcctcagctgaggagccctcacccactgaccaggggcttttaccctcacctgtatttcagctcacagatgcac

SEQ ID NO: 25048 - DNA, 78 bp, Homo sapiens
  MAP TO AC020596.2; EXPRESSED IN BRAIN, SIGNAL = 3.3; EXPRESSED IN PLACENTA, SIGNAL = 2.6; EXPRESSED IN FETAL LIVER, SIGNAL = 3.6; EXPRESSED IN HELA, SIGNAL =   4; EXPRESSED IN ADULT LIVER, SIGNAL = 2.9; EXPRESSED IN BONE MARROW, SIGNAL = 2.8; EXPRESSED IN HEART, SIGNAL = 3.4; SWISSPROT HIT: P15882, EVALUE 1.00e-08; NT HIT: S75654.1, EVALUE 1.00e-36; EST_HUMAN HIT: AW897636.1, EVALUE 1.00e-36
cttgaaattgtgaatcttttcatattttggaatttgctcgttttctttcagagttgctcttctaacaagtgatgtcaa

SEQ ID NO: 25049 - DNA, 275 bp, Homo sapiens
  MAP TO AL135747.2; EXPRESSED IN PLACENTA, SIGNAL = 3.1; EXPRESSED IN BRAIN, SIGNAL = 3.4; EXPRESSED IN FETAL LIVER, SIGNAL = 4.3; EXPRESSED IN HELA, SIGNAL = 5.4; EXPRESSED IN BONE MARROW, SIGNAL = 2.4; EXPRESSED IN LUNG, SIGNAL = 2.5; EXPRESSED IN HEART, SIGNAL = 2.9; EXPRESSED IN ADULT LIVER, SIGNAL = 2.9; SWISSPROT HIT: P24054, EVALUE 1.20e+00; NT HIT: AJ249900.1, EVALUE 1.00e-112; EST_HUMAN HIT: BF378335.1, EVALUE 1.00e-107
aaatgaccttgtctttgttcaggtcacagtagtcggtgaaacgccgggcacatttcttgggcttggctttcttcttcacgtagcgcttgaagggcttcatctcccgcttgttaatgtcgttgctgctattgctgtccagctggctgaaataccagtgcactacccgctcctccagggtgtggctggggtctggctctgagaacctgggccatggacaaacacccccaccgcagagaacaccaatcaggatcttgcaggaaccatcagccctggta

SEQ ID NO: 25050 - DNA, 110 bp, Homo sapiens
  MAP TO AC016910.2; EXPRESSED IN BRAIN, SIGNAL =   2; EXPRESSED IN PLACENTA, SIGNAL = 2.4; EXPRESSED IN BONE MARROW, SIGNAL = 1.8; EXPRESSED IN ADULT LIVER, SIGNAL = 1.8; EXPRESSED IN HELA, SIGNAL = 2.5; EXPRESSED IN LUNG, SIGNAL = 4.1; EXPRESSED IN FETAL LIVER, SIGNAL = 2.2; EXPRESSED IN HEART, SIGNAL = 2.2; EST_HUMAN HIT: AU119344.1, EVALUE 2.00e-55; NT HIT: AB003476.1, EVALUE 2.40e-01; SWISSPROT HIT: P54421, EVALUE 4.20e+00
ggagcatgataaagatccagaaagcttttttaaggtattaatgcatcttaaagacttaggactcaatttccacgtgtctgtacttggagaaaccttcacagatgtcccag

SEQ ID NO: 25051 - DNA, 155 bp, Homo sapiens
  MAP TO AP001340.1; EXPRESSED IN BRAIN, SIGNAL =  15; EXPRESSED IN HELA, SIGNAL =  35; EXPRESSED IN ADULT LIVER, SIGNAL =  13; EXPRESSED IN FETAL LIVER, SIGNAL =  28; EXPRESSED IN LUNG, SIGNAL = 1.4e+02; EXPRESSED IN BONE MARROW, SIGNAL =  18; EXPRESSED IN HEART, SIGNAL =  24; EXPRESSED IN PLACENTA, SIGNAL =  24; NT HIT: gi11424099, EVALUE 9.00e-73; SWISSPROT HIT: P40429, EVALUE 1.00e-21; EST_HUMAN HIT: AV721580.1, EVALUE 1.00e-72
gatggcggaggtgcaggtcctggtgctcgatggtcgaggccatctcctggtccgcctggcggccatcgtggctaaacaggtactgctgggccggaaagtggtggtcgtacgctgcgaaggcatcaacatttctggcaatttctacagaaacaagt

SEQ ID NO: 25052 - DNA, 205 bp, Homo sapiens
  MAP TO AC023344.2; EXPRESSED IN PLACENTA, SIGNAL = 8.1; EXPRESSED IN HELA, SIGNAL = 8.7; EXPRESSED IN FETAL LIVER, SIGNAL = 3.6; EXPRESSED IN HEART, SIGNAL = 4.1; EXPRESSED IN BONE MARROW, SIGNAL = 3.7; EXPRESSED IN LUNG, SIGNAL =  75; NT HIT: gi11421238, EVALUE 9.00e-89; EST_HUMAN HIT: AA429376.1, EVALUE 1.00e-88; SWISSPROT HIT: P37802, EVALUE 7.00e-27
ataacaccgtgccatccttgagccagttctggaagttctcgcgtccaggctgggacccgcccacatcctttcggcactgtgtggtgatccactggatcaggatctgctccagatctgcatcatactgtttctcaatcttctgctgcacctcctgctcaggccataatgcaggtcccctgttggccattccaatgggtggcggtgg

SEQ ID NO: 25053 - DNA, 226 bp, Homo sapiens
  MAP TO AL136527.7; EXPRESSED IN BRAIN, SIGNAL = 4.1; EXPRESSED IN PLACENTA, SIGNAL = 2.6; EXPRESSED IN HELA, SIGNAL = 2.6; EXPRESSED IN ADULT LIVER, SIGNAL =  12; EXPRESSED IN FETAL LIVER, SIGNAL = 3.8; EXPRESSED IN LUNG, SIGNAL = 3.1; EXPRESSED IN BONE MARROW, SIGNAL = 2.1; EXPRESSED IN HEART, SIGNAL = 5.2; NT HIT: U59309.1, EVALUE 3.00e-98; EST_HUMAN HIT: AA284187.1, EVALUE 4.00e-98; SWISSPROT HIT: P07954, EVALUE 5.00e-32
agcatgtccttagtttttacctgttcatcaaactgttctggtgtgagatagccaagttcaataacagtttcctttaaggttgatccatttttgtgtgctgtcttagcaatctttgctgccttgtcatacgctatacgaggattgagagctgtcaccaacatttgagactcattcatcagcttgttgatcctttctgtattggcctggattcccaccacgcagtttt

SEQ ID NO: 25054 - DNA, 193 bp, Homo sapiens
  MAP TO AC019055.2; EXPRESSED IN ADULT LIVER, SIGNAL = 2.3; EXPRESSED IN FETAL LIVER, SIGNAL = 2.5; EXPRESSED IN HEART, SIGNAL = 2.2; EXPRESSED IN LUNG, SIGNAL = 1.8; EXPRESSED IN BRAIN, SIGNAL = 2.1; EXPRESSED IN PLACENTA, SIGNAL = 2.1; EXPRESSED IN BONE MARROW, SIGNAL = 2.6; EXPRESSED IN HELA, SIGNAL = 2.6; NT HIT: gi11416659, EVALUE 1.80e+00; EST_HUMAN HIT: BF354649.1, EVALUE 6.70e-01
ctagtagttgttgttacagtggtacttggtagcagtagttgataatgtagttgatgttgtagttgcagtagtggttgttgtagtagttgtagtaattatggtagttgttgtagtactagttgcggcagtagttgtagttactgtaatcaaagctagcagcatatcagcagcagcagtattgaaatcattacaa

SEQ ID NO: 25055 - DNA, 91 bp, Homo sapiens
  MAP TO AC005201.1; EXPRESSED IN BRAIN, SIGNAL = 4.1; EXPRESSED IN PLACENTA, SIGNAL = 3.6; EXPRESSED IN BONE MARROW, SIGNAL =   3; EXPRESSED IN HELA, SIGNAL = 3.4; EXPRESSED IN HEART, SIGNAL = 2.9; EXPRESSED IN ADULT LIVER, SIGNAL =   3; EXPRESSED IN LUNG, SIGNAL = 2.1; EXPRESSED IN FETAL LIVER, SIGNAL = 3.4; EST_HUMAN HIT: AU121685.1, EVALUE 2.00e-27; NT HIT: Y10196.1, EVALUE 2.00e-19
caagctcaagcatcccaagttgacctcagactgctgtgctggcagcgagaatttcaaggcagtggatcttagcttgctgggctccatggag

SEQ ID NO: 25056 - DNA, 155 bp, Homo sapiens
  MAP TO AL109658.5; EXPRESSED IN BONE MARROW, SIGNAL = 2.8; EXPRESSED IN FETAL LIVER, SIGNAL = 4.2; EXPRESSED IN LUNG, SIGNAL =   6; EXPRESSED IN PLACENTA, SIGNAL = 3.1; EXPRESSED IN ADULT LIVER, SIGNAL = 3.3; EXPRESSED IN HEART, SIGNAL = 3.5; EXPRESSED IN BRAIN, SIGNAL =   4; EXPRESSED IN HELA, SIGNAL =   4; SWISSPROT HIT: P27546, EVALUE 2.30e+00; NT HIT: AL161531.2, EVALUE 1.40e+00; EST_HUMAN HIT: AI620420.1, EVALUE 4.00e-48
atcaatccaagcccttcccctatacgggtcagtttgggcactactttacctgctgtgaagtctactgggatcttccaggaaagtcccacctcattagtaaaaagaaaaacaaagactcgggaagaaagttcctgccctccctgttgaatgctgtg

SEQ ID NO: 25057 - DNA, 355 bp, Homo sapiens
  MAP TO AL049829.3; EXPRESSED IN HEART, SIGNAL = 1.5e+02; EXPRESSED IN BONE MARROW, SIGNAL = 7.6; EXPRESSED IN LUNG, SIGNAL = 5.2; EXPRESSED IN PLACENTA, SIGNAL = 4.9; EXPRESSED IN BRAIN, SIGNAL = 7.3; EXPRESSED IN HELA, SIGNAL = 6.9; EXPRESSED IN ADULT LIVER, SIGNAL = 5.6; EXPRESSED IN FETAL LIVER, SIGNAL =   7; NT HIT: Z20656.1, EVALUE 0.00e+00; EST_HUMAN HIT: C05089.1, EVALUE 0.00e+00; SWISSPROT HIT: P13533, EVALUE 2.00e-38
ctggtaggtgagctccttgatgcgccgctcgctcttcctcatgcccttcaccgactctgcgttgcgcttctgctcggcctccagctcaccctccagctcccgcacccgcgcttccagcttctgcagctgcttcttgcctcccttgagggcgatctgctcggcctcgtccagccggtgctgcaggtccttaatggtctgctccatgttcttcttcatgcgctccaggtgggcgctggtgtcctgctccttcttcagctcctctgccatcatggcggcctgtgtgcaggagagaggtggcaaggaacatgggccaggggccggggccttttgccccccaaggatctcctttctccca

SEQ ID NO: 25058 - DNA, 197 bp, Homo sapiens
  MAP TO AL117258.2; EXPRESSED IN BRAIN, SIGNAL = 1.7; EXPRESSED IN BONE MARROW, SIGNAL = 2.1; EXPRESSED IN FETAL LIVER, SIGNAL = 2.4; EXPRESSED IN HELA, SIGNAL = 2.9; EXPRESSED IN LUNG, SIGNAL = 3.8; EXPRESSED IN PLACENTA, SIGNAL = 2.3; EXPRESSED IN HEART, SIGNAL =   2; EXPRESSED IN ADULT LIVER, SIGNAL =   2; NT HIT: gi11433916, EVALUE 1.00e-107; EST_HUMAN HIT: BF666511.1, EVALUE 1.00e-107; SWISSPROT HIT: P77247, EVALUE 5.80e-01
cctgctcagcccagcctcgaaaccactgatcccaaagatgtagctggcactcaaagatagaaggtggtcggtctgccccagacacactaagctgctccagactatccagcagtggttgtaatttttctggcactgccttagctaccaggtcctctaggaaacgttcacgctggggacctgaccaattggcaaaccag

SEQ ID NO: 25059 - DNA, 171 bp, Homo sapiens
  MAP TO AL158148.1; EXPRESSED IN BRAIN, SIGNAL = 2.9; EXPRESSED IN BONE MARROW, SIGNAL = 2.5; EXPRESSED IN HEART, SIGNAL = 3.1; EXPRESSED IN LUNG, SIGNAL = 3.1; EXPRESSED IN PLACENTA, SIGNAL = 2.8; EXPRESSED IN HELA, SIGNAL =   3; EXPRESSED IN FETAL LIVER, SIGNAL =   3; EXPRESSED IN ADULT LIVER, SIGNAL = 3.5; EST_HUMAN HIT: AW937175.1, EVALUE 5.90e-01; SWISSPROT HIT: P36992, EVALUE 3.90e+00
gaaggctgatcctaactctgtcactgaccctggggagggctcccaccttactgagtctcagcttgcttgtcaggaaaatggggataataaaccttgcttttgttactttcaaggtttttggagagacaaaagtgataggagaagggacacagaagcccctggtcacccagg

SEQ ID NO: 25060 - DNA, 161 bp, Homo sapiens
  MAP TO AC011375.3; EXPRESSED IN PLACENTA, SIGNAL = 1.4; EXPRESSED IN BRAIN, SIGNAL = 1.7; EXPRESSED IN ADULT LIVER, SIGNAL = 1.6; EXPRESSED IN HELA, SIGNAL = 2.7; EXPRESSED IN LUNG, SIGNAL = 2.6; EXPRESSED IN FETAL LIVER, SIGNAL = 2.4; EXPRESSED IN HEART, SIGNAL = 2.2; EST_HUMAN HIT: AW499850.1, EVALUE 1.00e-85; NT HIT: gi11417012, EVALUE 7.00e-86; SWISSPROT HIT: P33203, EVALUE 4.60e-01
ttagtttcttcaattcctccattccttttttatgagggggctcctgaataattttgtcaacatctgccctgccaatcagatcatcaggtcggtcccacatagaaagacgagtggtgggattataaaagaagacccgctcatcaccagtccaaacgacacac

SEQ ID NO: 25061 - DNA, 85 bp, Homo sapiens
  MAP TO AC008381.5; EXPRESSED IN BRAIN, SIGNAL = 6.9; EXPRESSED IN PLACENTA, SIGNAL =   5; EXPRESSED IN HELA, SIGNAL = 7.2; EXPRESSED IN ADULT LIVER, SIGNAL = 6.4; EXPRESSED IN FETAL LIVER, SIGNAL = 7.1; EXPRESSED IN HEART, SIGNAL = 6.3; EXPRESSED IN BONE MARROW, SIGNAL = 4.9; EXPRESSED IN LUNG, SIGNAL =   7; SWISSPROT HIT: P29936, EVALUE 9.60e+00; EST_HUMAN HIT: BF374248.1, EVALUE 6.60e-02
aagttgggcagatttgggctggaatctggctctgctcccaccagctaagtcttcgggtcagtgtatatacaactctgagcctcag

SEQ ID NO: 25062 - DNA, 90 bp, Homo sapiens
  MAP TO AC018801.2; EXPRESSED IN BRAIN, SIGNAL = 8.1; EXPRESSED IN PLACENTA, SIGNAL = 5.8; EXPRESSED IN HELA, SIGNAL = 7.7; EXPRESSED IN ADULT LIVER, SIGNAL = 7.5; EXPRESSED IN FETAL LIVER, SIGNAL =   8; EXPRESSED IN HEART, SIGNAL = 6.7; EXPRESSED IN BONE MARROW, SIGNAL = 5.9; EXPRESSED IN LUNG, SIGNAL = 3.7; NT HIT: X65722.1, EVALUE 7.40e-01; EST_HUMAN HIT: AI984961.1, EVALUE 1.00e-43
tctgtcattcagcattatcatgatcgtgaacaaaattgtactgagaaagtttgtataagtgatatgaacggtattgtattgaacatccat

SEQ ID NO: 25063 - DNA, 125 bp, Homo sapiens
  MAP TO AC023344.2; EXPRESSED IN ADULT LIVER, SIGNAL = 1.9; EXPRESSED IN FETAL LIVER, SIGNAL = 2.7; EXPRESSED IN HEART, SIGNAL = 2.3; EXPRESSED IN BRAIN, SIGNAL = 2.4; EXPRESSED IN PLACENTA, SIGNAL = 1.6; EXPRESSED IN BONE MARROW, SIGNAL = 1.5; EXPRESSED IN HELA, SIGNAL = 1.9; EST_HUMAN HIT: AW872641.1, EVALUE 2.00e-58
cttacattgtggtggtggtggtcatggtgttaggagtaatagtgataggagaatgcattcaattagagggagcattacattttttaaaatggagatgggagaaggcacttgacacatgggaaagt

SEQ ID NO: 25064 - DNA, 410 bp, Homo sapiens
  MAP TO AC022845.2; EXPRESSED IN FETAL LIVER, SIGNAL = 2.2; EXPRESSED IN HEART, SIGNAL = 2.2; EXPRESSED IN BRAIN, SIGNAL = 2.3; EXPRESSED IN ADULT LIVER, SIGNAL = 2.4; EXPRESSED IN BONE MARROW, SIGNAL = 1.9; EXPRESSED IN HELA, SIGNAL = 2.2; EXPRESSED IN LUNG, SIGNAL =   3; EXPRESSED IN PLACENTA, SIGNAL = 2.1; SWISSPROT HIT: P51587, EVALUE 1.60e-01; NT HIT: AB046817.1, EVALUE 0.00e+00; EST_HUMAN HIT: AA746375.1, EVALUE 0.00e+00
atgctttaatggctccagggagtttggggaagagttgtcttctaaagaatgctccttctcagaaattctctcatggatggttaggccaggtgacacaattttgcttttgggttcaaagttgtgattataacgaagggtttctgagtctgtgctactggaactggagttgcgcttgaggatccctctcggagcccctctcgctttcagggagtctgtcctttgtctaggaaaagactggttatcatctttgtttaaatcagttgatttgtagatcatcttcctggctttggggattggagccttgatttgggacccatttgaaaggcctggcaaagtctgctttgatttctctaacttttggattgaagtatctgcgacagttgacttttcttttgactctgacaattcat

SEQ ID NO: 25065 - DNA, 202 bp, Homo sapiens
  MAP TO AC023890.3; EXPRESSED IN ADULT LIVER, SIGNAL = 4.2; EXPRESSED IN BONE MARROW, SIGNAL = 3.2; EXPRESSED IN FETAL LIVER, SIGNAL = 3.9; EXPRESSED IN BRAIN, SIGNAL = 3.8; EXPRESSED IN PLACENTA, SIGNAL = 3.6; EXPRESSED IN HELA, SIGNAL = 4.3; EXPRESSED IN HEART, SIGNAL = 3.5; EXPRESSED IN LUNG, SIGNAL = 5.2; EST_HUMAN HIT: BE734357.1, EVALUE 1.00e-110; NT HIT: gi11433277, EVALUE 1.00e-110; SWISSPROT HIT: Q03601, EVALUE 1.70e+00
gataccatcagaacggagtcatcagaaaccagtatgtgccatatccccatgctcctggaagccagaggtccaatcagaaaagcctgtacacctccatggcccgcccgcccttgcctcggcagcagtctaccagttcagaccgagtgtcacagacgccagagagcctggatttcctcaaggtcccggaccagggagctgcagg

SEQ ID NO: 25066 - DNA, 201 bp, Homo sapiens
  MAP TO AC002124.1; EXPRESSED IN BRAIN, SIGNAL = 1.5; EXPRESSED IN HELA, SIGNAL = 2.4; EXPRESSED IN HEART, SIGNAL = 2.1; EXPRESSED IN ADULT LIVER, SIGNAL = 1.4; EXPRESSED IN FETAL LIVER, SIGNAL =   2; NT HIT: gi7662279, EVALUE 1.00e-109; SWISSPROT HIT: Q02638, EVALUE 2.90e-02; EST_HUMAN HIT: AU133383.1, EVALUE 1.00e-107
gagcttcagggggaccaggcgatgcaggaagacagagcgccctctagtggcaacagcactaggagcgacagcagtgcttgtgtggatgacacactgggacaagttggggctgtgaaggtcaaggaggaaccagtggacagtgatgaagatgctcagatccaggaaatggaatctggggagcaggctgcttttatgcaacag

SEQ ID NO: 25067 - DNA, 288 bp, Homo sapiens
  MAP TO AC017067.2; EXPRESSED IN BRAIN, SIGNAL = 3.5; EXPRESSED IN BONE MARROW, SIGNAL = 3.6; EXPRESSED IN FETAL LIVER, SIGNAL = 3.5; EXPRESSED IN LUNG, SIGNAL = 8.7; EXPRESSED IN ADULT LIVER, SIGNAL = 2.6; EXPRESSED IN HEART, SIGNAL = 4.9; EXPRESSED IN PLACENTA, SIGNAL = 5.7; EXPRESSED IN HELA, SIGNAL = 4.6; NT HIT: gi7330334, EVALUE 1.00e-121; EST_HUMAN HIT: AA675919.1, EVALUE 1.00e-120; SWISSPROT HIT: Q9Y696, EVALUE 4.00e-41
tcatttcttttggaatatcaaagttgcgatttttttggccacaaccttgacaatatgcagctttgacagcagattgcaatcagctaatgtcatttcattgctgtccagaaatttacgtttagaaaacttaacgtcctccatactattttcatcaatttcatcagggagaggagaattcagatattcatccagtttctgcagggttttcaggagacccctctccagtgcttcattagcctctggccttgaattcttgatatatgcagagaatttggcaaagatgtccat

SEQ ID NO: 25068 - DNA, 160 bp, Homo sapiens
  MAP TO AC018497.4; EXPRESSED IN ADULT LIVER, SIGNAL = 3.2; EXPRESSED IN BONE MARROW, SIGNAL = 2.9; EXPRESSED IN LUNG, SIGNAL = 2.6; EXPRESSED IN PLACENTA, SIGNAL = 3.1; EXPRESSED IN FETAL LIVER, SIGNAL = 3.7; EXPRESSED IN HELA, SIGNAL = 3.9; EXPRESSED IN HEART, SIGNAL = 3.5; EXPRESSED IN BRAIN, SIGNAL = 3.1; SWISSPROT HIT: Q00536, EVALUE 6.00e-01; NT HIT: U93163.1, EVALUE 1.00e-25; EST_HUMAN HIT: AI276522.1, EVALUE 3.00e-24
ttgtaaaacagccacaggcagctccctcaggagaaattccagaagaaggcattgctgtcttagggggtgacagctccatgcctgttattgtccccgaagaccttccagtaggacaagatgtggaagtggaagacagtgatattaatgatcctgactccct

SEQ ID NO: 25069 - DNA, 89 bp, Homo sapiens
  MAP TO AC011497.3; EXPRESSED IN FETAL LIVER, SIGNAL = 4.1; EXPRESSED IN HEART, SIGNAL = 2.7; EXPRESSED IN LUNG, SIGNAL = 8.1; EXPRESSED IN PLACENTA, SIGNAL = 2.2; EXPRESSED IN BRAIN, SIGNAL = 1.8; EXPRESSED IN HELA, SIGNAL = 1.7; NT HIT: AF062072.1, EVALUE 7.00e-38; EST_HUMAN HIT: W29011.1, EVALUE 5.00e-43
aggtttgactgccgatgtggaaatttgttttgtggacttcaccgttaactctgacaagcacaactgtccgtatgattacaaagcagaag

SEQ ID NO: 25070 - DNA, 86 bp, Homo sapiens
  MAP TO AC018801.2; EXPRESSED IN ADULT LIVER, SIGNAL =  15; EXPRESSED IN HEART, SIGNAL =  12; EXPRESSED IN BRAIN, SIGNAL =  12; EXPRESSED IN PLACENTA, SIGNAL =  12; EXPRESSED IN BONE MARROW, SIGNAL =  13; EXPRESSED IN LUNG, SIGNAL = 8.6; EXPRESSED IN FETAL LIVER, SIGNAL =  14; EXPRESSED IN HELA, SIGNAL =  15; EST_HUMAN HIT: BE885880.1, EVALUE 4.10e+00
gtacagaagagaatgtagaagggggtggcaatcatgccgagttgacaactgacaagctggcacatgctcctgttggggcctatggg

SEQ ID NO: 25071 - DNA, 99 bp, Homo sapiens
  MAP TO AC023392.2; EXPRESSED IN ADULT LIVER, SIGNAL = 2.3; EXPRESSED IN FETAL LIVER, SIGNAL =   5; EXPRESSED IN LUNG, SIGNAL = 1.8; EXPRESSED IN BRAIN, SIGNAL =   2; EXPRESSED IN PLACENTA, SIGNAL = 2.9; EXPRESSED IN HEART, SIGNAL = 5.3; EXPRESSED IN BONE MARROW, SIGNAL = 3.1; EXPRESSED IN HELA, SIGNAL = 5.3; SWISSPROT HIT: O83128, EVALUE 5.50e+00; EST_HUMAN HIT: AW470791.1, EVALUE 2.00e-18; NT HIT: AL163227.2, EVALUE 4.00e-18
gttcacagaagactagagttgcagtttgggaacctccacctagatttcagaagatgtatagaaacacctggatttccaggcagaagtctgatgcagggg

SEQ ID NO: 25072 - DNA, 409 bp, Homo sapiens
  MAP TO AC013359.4; EXPRESSED IN BRAIN, SIGNAL = 3.7; EXPRESSED IN HELA, SIGNAL =   2; EXPRESSED IN LUNG, SIGNAL =  12; EXPRESSED IN HEART, SIGNAL = 2.4; EXPRESSED IN PLACENTA, SIGNAL = 2.7; EST_HUMAN HIT: M78448.1, EVALUE 0.00e+00; SWISSPROT HIT: O65607, EVALUE 5.40e-02; NT HIT: AB029025.1, EVALUE 0.00e+00
agagcggagagagagagagctgcatgaagcatataagaacgctcggtcccaggaggaggcagaggggatccttcaacagtacattgagaggttcaccatcagtgaggctgttctcgaacgcttggagatgccaaaaattctggaaagaagccattcaacagagccaaatttatcctccttcctgaatgaccccaatcccatgaaatacctgcggcaacagtcactgcctccacccaaattcactgccactgttgaaaccaccattgctcgtgccagtgttctggataccagcatgtcagcaggcagtgggtctccaagcaaaactgtcactcccaaagcagtgcctatgctgacacccaagccttactcccagcccaaaaattctcaagatgttctgaagacctttaag

SEQ ID NO: 25073 - DNA, 243 bp, Homo sapiens
  MAP TO AC023153.2; EXPRESSED IN BRAIN, SIGNAL = 1.7; EXPRESSED IN HELA, SIGNAL = 1.8; EXPRESSED IN HEART, SIGNAL = 1.7; NT HIT: AB042975.1, EVALUE 1.50e-01; SWISSPROT HIT: Q9VVR9, EVALUE 4.70e-01; EST_HUMAN HIT: BF367494.1, EVALUE 3.40e+00
gatgattttcaaaaagtgggtaacacatcggtgacaaacactacagtaaggtctccagtcaaggctgaacaaagtggggcaaagtctcccaaactccattttcataaaaatgtcaacagaaaagaagcatcagtgataaatctgggttcatatcctattacaggaggaaaacaaccagttttacatcttgtacaaacactttcaatcaccttttatggccatgtagctgccgcatttggcaat

SEQ ID NO: 25074 - DNA, 142 bp, Homo sapiens
  MAP TO AC011126.3; EXPRESSED IN HEART, SIGNAL = 4.2; EXPRESSED IN LUNG, SIGNAL = 1.7; EXPRESSED IN PLACENTA, SIGNAL = 1.9; EXPRESSED IN BRAIN, SIGNAL = 2.4; EXPRESSED IN BONE MARROW, SIGNAL = 1.9; EXPRESSED IN ADULT LIVER, SIGNAL = 2.2; EXPRESSED IN FETAL LIVER, SIGNAL = 4.5; EXPRESSED IN HELA, SIGNAL = 4.3; EST_HUMAN HIT: AL048507.2, EVALUE 5.00e-04; SWISSPROT HIT: P15533, EVALUE 1.80e+00; NT HIT: AJ271735.1, EVALUE 8.10e-02
atcttcaggctccatttctaattctagtttgctttctattaatatttctaccacatctgtagttacttcctctagtgacaacatcttgaacccctcaaagttatcaatgagagttggaactccttccaaactcctgtttatg

SEQ ID NO: 25075 - DNA, 250 bp, Homo sapiens
  MAP TO AC002401.1; EXPRESSED IN ADULT LIVER, SIGNAL = 1.6; EXPRESSED IN LUNG, SIGNAL = 3.6; EXPRESSED IN PLACENTA, SIGNAL = 1.8; EXPRESSED IN BONE MARROW, SIGNAL = 1.7; EXPRESSED IN HEART, SIGNAL = 1.8; SWISSPROT HIT: P26006, EVALUE 2.00e-48; NT HIT: gi6006010, EVALUE 0.00e+00; EST_HUMAN HIT: BF353625.1, EVALUE 0.00e+00
ctttccagttgtaggcaccgggggcgccgaagtacacagtgttctgggtgaagccaccgctggtgcccagctggcacatgcccgtctccaggtagtctgtgttgctattgcacatctcgttgtggtaggtctgccagtcatcactggagtccagctctaggtcattgcctcgcacgtagcacttgcccaccatgcgccgctggtcttctgaccctgaccacagcacctgggtgtagcggtgggcacagac

SEQ ID NO: 25076 - DNA, 386 bp, Homo sapiens
  MAP TO AC015971.2; EXPRESSED IN BRAIN, SIGNAL = 6.8; EXPRESSED IN BONE MARROW, SIGNAL = 5.8; EXPRESSED IN FETAL LIVER, SIGNAL = 8.1; EXPRESSED IN LUNG, SIGNAL = 9.5; EXPRESSED IN HEART, SIGNAL = 8.1; EXPRESSED IN PLACENTA, SIGNAL = 6.5; EXPRESSED IN HELA, SIGNAL = 7.7; EXPRESSED IN ADULT LIVER, SIGNAL =   6; EST_HUMAN HIT: AL157608.1, EVALUE 0.00e+00; NT HIT: gi11430033, EVALUE 0.00e+00; SWISSPROT HIT: Q06068, EVALUE 1.50e-01
gtgttatatgatccatatgacctccccttcctttcacatgggctggtctgacaatatttattggcacatgaacaagcctcagcatcacagtgacttgctgttcctggagaattgtgaagtacgctttgcttatcttcaaatacttccttctcactactcaaagtgtctgtgttctcactttccgagtcattttcagtatcttgagacccctccgacatttcctcttcagactggactccaagacatttaaatcgccacattggtaagtttttaatataatcagttggtatcagagggtgaagccaaaggtcagggaaagctaagcgctccaagaataagtcagggtcttcgtcccaatcagattctacaggaaagttctgaaaaga

SEQ ID NO: 25077 - DNA, 115 bp, Homo sapiens
  MAP TO AC018503.4; EXPRESSED IN BRAIN, SIGNAL = 3.5; EXPRESSED IN ADULT LIVER, SIGNAL = 3.9; EXPRESSED IN HELA, SIGNAL = 4.2; EXPRESSED IN HEART, SIGNAL = 4.3; EXPRESSED IN PLACENTA, SIGNAL = 3.4; EXPRESSED IN LUNG, SIGNAL =   4; EXPRESSED IN FETAL LIVER, SIGNAL = 3.7; EXPRESSED IN BONE MARROW, SIGNAL = 3.3; NT HIT: gi10242378, EVALUE 5.00e-18; EST_HUMAN HIT: AW664888.1, EVALUE 4.00e-07
aaagaatttcaattataaggcaaccaaggaaagcaaagatcacctggtggccatcaagcaggccatccagagacaaaactccttatttgaggaatttagaatattagacttccct

SEQ ID NO: 25078 - DNA, 285 bp, Homo sapiens
  MAP TO AC018506.3; EXPRESSED IN BRAIN, SIGNAL = 3.2; EXPRESSED IN PLACENTA, SIGNAL = 2.4; EXPRESSED IN ADULT LIVER, SIGNAL = 2.5; EXPRESSED IN BONE MARROW, SIGNAL =   2; EXPRESSED IN FETAL LIVER, SIGNAL = 3.9; EXPRESSED IN HELA, SIGNAL = 3.9; EXPRESSED IN HEART, SIGNAL = 3.4; EXPRESSED IN LUNG, SIGNAL = 2.8; EST_HUMAN HIT: BF348263.1, EVALUE 1.70e-02; NT HIT: gi11435505, EVALUE 1.10e-02; SWISSPROT HIT: P11345, EVALUE 1.70e+00
ctctgtgcctcgtcctgggctgcatgatctttcctgatggctgggatgccgagaccatccgggacatgtgtggggccaagacggggaagtactccctgggggactgttcagtgcgctgggcatacatcctggccatcatcggcatcctcaacgccctcatcctctccttcctcgccttcgtgctgggcaaccggcaaacagacctgctgcaggaggagctcaagccggagaacaaaggcgagtgtgctgtgggctggggggcagcggcgggagccaggcctggtc

SEQ ID NO: 25079 - DNA, 136 bp, Homo sapiens
  MAP TO AC011989.3; EXPRESSED IN BRAIN, SIGNAL = 2.9; EXPRESSED IN ADULT LIVER, SIGNAL = 5.2; EXPRESSED IN BONE MARROW, SIGNAL = 7.5; EXPRESSED IN PLACENTA, SIGNAL = 3.9; EXPRESSED IN LUNG, SIGNAL = 9.1; EXPRESSED IN HEART, SIGNAL = 1.9; EXPRESSED IN HELA, SIGNAL = 3.7; EXPRESSED IN FETAL LIVER, SIGNAL = 4.6; EST_HUMAN HIT: AW752219.1, EVALUE 7.00e-71; NT HIT: gi11436514, EVALUE 5.00e-71; SWISSPROT HIT: P02775, EVALUE 2.00e-20
atcacttcgacttggttgcaatgggttcctttcccgatcacttccaaactttggatgtttttgggatgaattccagaggttgtctttatacacatgcagcggagttcagcatacaagtcactgtctagactttcct

SEQ ID NO: 25080 - DNA, 273 bp, Homo sapiens
  MAP TO AL121767.3; EXPRESSED IN BRAIN, SIGNAL =   2; EXPRESSED IN FETAL LIVER, SIGNAL = 5.7; EXPRESSED IN HELA, SIGNAL = 6.1; EXPRESSED IN ADULT LIVER, SIGNAL =   2; EXPRESSED IN BONE MARROW, SIGNAL = 1.8; EXPRESSED IN HEART, SIGNAL = 5.5; EXPRESSED IN PLACENTA, SIGNAL = 2.5; SWISSPROT HIT: P29539, EVALUE 6.80e-01; EST_HUMAN HIT: BE156318.1, EVALUE 3.00e-78; NT HIT: AL163210.2, EVALUE 7.00e-75
ggctgaggtggtcccagatggagatgaggaatttgttgggaactggagcaaaggtgactattgttatgttttagcaaagagactggatgcattttgcccctgccctgaagatttggggaacattgaacttgagagagatgatttggggtatctggtggaagaaatttctaaacagcaaagcattcaagaggtgacttggctgctgttaaaggcattcaattttataagggtagctgagcataaaagtttggaaaagttgcagcctgacaatgt

SEQ ID NO: 25081 - DNA, 168 bp, Homo sapiens
  MAP TO AC018686.3; EXPRESSED IN BRAIN, SIGNAL = 4.6; EXPRESSED IN HEART, SIGNAL = 3.9; EXPRESSED IN ADULT LIVER, SIGNAL = 5.7; EXPRESSED IN PLACENTA, SIGNAL = 4.1; EXPRESSED IN LUNG, SIGNAL =   6; EXPRESSED IN HELA, SIGNAL = 4.4; EXPRESSED IN FETAL LIVER, SIGNAL = 2.1; EXPRESSED IN BONE MARROW, SIGNAL =   4; SWISSPROT HIT: P47241, EVALUE 1.70e+00; NT HIT: U14556.1, EVALUE 6.00e-03; EST_HUMAN HIT: BE311928.1, EVALUE 5.80e-01
agcagctcctgaaagagcactctgtcatccttacagaagaggaaaaggcaaggaagagtgacatgcaggtgcctgctgcatgccaggtgctggagttcatgtacatcatcaaaatcatgacaacccagccagttggatactgccagccccatttcatggaagagaaga

SEQ ID NO: 25082 - DNA, 111 bp, Homo sapiens
  MAP TO AC009242.2; EXPRESSED IN BRAIN, SIGNAL = 2.8; EXPRESSED IN ADULT LIVER, SIGNAL =   4; EXPRESSED IN HELA, SIGNAL = 2.6; EXPRESSED IN HEART, SIGNAL = 3.5; EXPRESSED IN PLACENTA, SIGNAL = 2.7; EXPRESSED IN LUNG, SIGNAL = 3.1; EXPRESSED IN FETAL LIVER, SIGNAL = 2.4; EXPRESSED IN BONE MARROW, SIGNAL = 2.5; NT HIT: U71335.1, EVALUE 3.80e+00; EST_HUMAN HIT: BE737895.1, EVALUE 6.00e-03
gattaaagagaagaatgaaccccaggctgagtatgaactttttgtagggctcaagagaacagaaccccaggctgaggagggagaggcagacttggagtgtgggaggacagg

SEQ ID NO: 25083 - DNA, 257 bp, Homo sapiens
  MAP TO AC023221.2; EXPRESSED IN ADULT LIVER, SIGNAL = 2.5; EXPRESSED IN FETAL LIVER, SIGNAL = 1.9; EXPRESSED IN LUNG, SIGNAL = 3.3; EXPRESSED IN PLACENTA, SIGNAL = 2.2; EXPRESSED IN BRAIN, SIGNAL = 1.7; EXPRESSED IN BONE MARROW, SIGNAL =  13; EXPRESSED IN HEART, SIGNAL = 2.1; NT HIT: AB014607.1, EVALUE 1.00e-51; SWISSPROT HIT: P13665, EVALUE 1.60e-01; EST_HUMAN HIT: BE010038.1, EVALUE 5.00e-67
gaccgaatcaacagctgatttggataccatcaagacatctgaaaacttatcatgagccagatgatgaagaagagattccgggaggatcccaaggaccccacagttgcagtcatgttgagactgatgctgagaagaaccccaactgtcacgagcaacacccatcaaacacagccacctacctggggacagatcaagaagctgtcacagatggcggaagaaaatctgagaaaagcaggacaaacagtcacaatgagtaa

SEQ ID NO: 25084 - DNA, 220 bp, Homo sapiens
  MAP TO AC012614.3; EXPRESSED IN BRAIN, SIGNAL = 3.6; EXPRESSED IN ADULT LIVER, SIGNAL = 2.8; EXPRESSED IN HEART, SIGNAL = 2.8; EXPRESSED IN PLACENTA, SIGNAL = 2.8; EXPRESSED IN LUNG, SIGNAL = 2.5; EXPRESSED IN HELA, SIGNAL =   3; EXPRESSED IN FETAL LIVER, SIGNAL =   3; EXPRESSED IN BONE MARROW, SIGNAL = 2.7; NT HIT: Z49652.1, EVALUE 8.00e-03; SWISSPROT HIT: P01010, EVALUE 6.10e+00; EST_HUMAN HIT: T53274.1, EVALUE 7.80e-01
agtctaccatgacaaccaggctagaattacaactaaggttgtcattctaagagaactgggccattatgcccacaccaaactctggagcagtggcttggagattttggccatggggcgagacaggccattaaaatggagagctctgactgagaggaatttggaacagagtatgaggaagtttgagcctaaaagtactcttaaaacaatgaacattttggtg

SEQ ID NO: 25085 - DNA, 221 bp, Homo sapiens
  MAP TO AC009989.6; EXPRESSED IN BRAIN, SIGNAL = 2.1; EXPRESSED IN PLACENTA, SIGNAL = 1.7; EXPRESSED IN ADULT LIVER, SIGNAL = 2.4; EXPRESSED IN BONE MARROW, SIGNAL = 1.6; EXPRESSED IN FETAL LIVER, SIGNAL = 1.8; EXPRESSED IN HELA, SIGNAL = 1.7; EXPRESSED IN LUNG, SIGNAL =   2; EXPRESSED IN HEART, SIGNAL = 1.9; EST_HUMAN HIT: AW806972.1, EVALUE 1.30e-02; NT HIT: Y18000.1, EVALUE 9.00e-03
ctctttaatgtgctttctcctcatctgcaaaacagggataatatcagtacctgcatcataaaatggtggtgagaagtaaacaaagtcctgaatgtgaactgcactgcacagtgcttggcaagggaacacaggggagctgctgccattatcattgtcaccattaccctcaccaccactatttggacccttggtgatggctccaacctcaggcctgccattta

SEQ ID NO: 25086 - DNA, 85 bp, Homo sapiens
  MAP TO AL158801.1; EXPRESSED IN HEART, SIGNAL =  53; SWISSPROT HIT: O60811, EVALUE 7.30e+00; NT HIT: AB008681.1, EVALUE 2.00e-04; EST_HUMAN HIT: AI239572.1, EVALUE 1.00e-40
gaagggagagaccagggatgccgctgctcaatatcctataatgcacagaacagcttctacgacaaagagttattccaccaaaaat

SEQ ID NO: 25087 - DNA, 195 bp, Homo sapiens
  MAP TO AC018552.2; EXPRESSED IN FETAL LIVER, SIGNAL = 2.4; EXPRESSED IN HEART, SIGNAL = 2.2; EXPRESSED IN BRAIN, SIGNAL = 2.8; EXPRESSED IN PLACENTA, SIGNAL = 3.1; EXPRESSED IN BONE MARROW, SIGNAL = 1.8; EXPRESSED IN ADULT LIVER, SIGNAL = 1.6; EXPRESSED IN HELA, SIGNAL = 2.9; EXPRESSED IN LUNG, SIGNAL = 3.2; SWISSPROT HIT: P27887, EVALUE 2.20e+00; NT HIT: U20214.1, EVALUE 4.60e-01; EST_HUMAN HIT: AA400370.1, EVALUE 4.00e-36
gagcgcatgatgcacgaagagcacctgcggcaggtggagacccagctggactacctggccccattcctggcccagctcccgccaggagagaaactaacatgctggcaggcggtgcgcctcaaggatgagtgcctcagcgacttcaagcagcggctcatcaacaaggccaacctcatccaggcccgctttgagaag

SEQ ID NO: 25088 - DNA, 239 bp, Homo sapiens
  MAP TO AL158801.1; EXPRESSED IN PLACENTA, SIGNAL = 6.1; EXPRESSED IN BONE MARROW, SIGNAL = 6.8; EXPRESSED IN HELA, SIGNAL =  13; EXPRESSED IN LUNG, SIGNAL = 4.6; EXPRESSED IN ADULT LIVER, SIGNAL = 7.1; EXPRESSED IN HEART, SIGNAL =  11; EXPRESSED IN BRAIN, SIGNAL = 5.8; EXPRESSED IN FETAL LIVER, SIGNAL =  13; EST_HUMAN HIT: AU116988.1, EVALUE 0.00e+00; SWISSPROT HIT: Q10477, EVALUE 2.60e+00; NT HIT: gi11434320, EVALUE 7.00e-59
gatgtcttcatcacattttgccagtcgacacaggaaggatataagtactgaaatgattagaactaaaattgctcataggaaatcactgtctcagaaagaaaatagacataaggaatacgaacgaaatagacactttggtttgaaagatgtaaacattccaaccttggaaggtagaattcttgttgaattagatgagacatctcaagggcttgttccagaaaagaccaatgttaagccaa

SEQ ID NO: 25089 - DNA, 244 bp, Homo sapiens
  MAP TO AC007340.3; EXPRESSED IN BRAIN, SIGNAL = 7.6; EXPRESSED IN PLACENTA, SIGNAL = 7.3; EXPRESSED IN LUNG, SIGNAL = 3.7; EXPRESSED IN ADULT LIVER, SIGNAL = 7.8; EXPRESSED IN BONE MARROW, SIGNAL = 6.9; EXPRESSED IN HELA, SIGNAL = 9.8; EXPRESSED IN FETAL LIVER, SIGNAL = 9.4; EXPRESSED IN HEART, SIGNAL = 8.5; SWISSPROT HIT: P10586, EVALUE 4.70e+00; EST_HUMAN HIT: BF476387.1, EVALUE 3.40e+00; NT HIT: AJ243213.1, EVALUE 5.80e-01
acccctatttttcaacacttacctcttggacaagtgttatgttgatccaagtgctaaactcttggatcagactcagaaggaaaaggagtcatgggataaatgaggtttggagaagtggagttctcctgaaaaagaaagagagaaagaaggagaaggagaagaagaggaacaggaaggggaagaaaagaagaagaagaagacgaagaggaagaaggaggaggaggaggaagaagaaaggggaagg

SEQ ID NO: 25090 - DNA, 163 bp, Homo sapiens
  MAP TO AC019055.2; EXPRESSED IN BRAIN, SIGNAL = 2.3; EXPRESSED IN PLACENTA, SIGNAL = 2.3; EXPRESSED IN BONE MARROW, SIGNAL = 2.3; EXPRESSED IN FETAL LIVER, SIGNAL = 3.1; EXPRESSED IN HELA, SIGNAL = 3.2; EXPRESSED IN ADULT LIVER, SIGNAL = 2.8; EXPRESSED IN HEART, SIGNAL = 2.9; SWISSPROT HIT: P98163, EVALUE 4.60e-01; EST_HUMAN HIT: AI653515.1, EVALUE 2.20e+00; NT HIT: L14927.1, EVALUE 5.80e+00
atgctgctcagggacctaagggttgaccctagtgacagtgctactgtcactgctgatgtcatgcatgccactcaggagcctgacggccaacctgaccacctgatccacatctaccactgctggcatccaagcaagcaacctggaagcccaaggatcaattgcc

SEQ ID NO: 25091 - DNA, 220 bp, Homo sapiens
  MAP TO AL137190.2; EXPRESSED IN ADULT LIVER, SIGNAL = 3.8; EXPRESSED IN HEART, SIGNAL = 4.4; EXPRESSED IN BRAIN, SIGNAL =   4; EXPRESSED IN PLACENTA, SIGNAL = 3.4; EXPRESSED IN HELA, SIGNAL = 4.3; EXPRESSED IN BONE MARROW, SIGNAL = 3.7; EXPRESSED IN FETAL LIVER, SIGNAL = 4.1; EXPRESSED IN LUNG, SIGNAL = 4.3; EST_HUMAN HIT: AW268563.1, EVALUE 1.30e-02; SWISSPROT HIT: P09083, EVALUE 1.20e+00
gtcctacgaagcctgcagcttctacctggaactgctggaacactctttcttgggggagccagcaccatgcaagaagagcaacaaccttgggacctccatactgggaggaagcccaagtcacctgaagaagcccttgcaggatgaaatcccaagaggagagtggccaagttgcctagaggcaccagacaagttcagaggaaactacacgctggaagcctag

SEQ ID NO: 25092 - DNA, 204 bp, Homo sapiens
  MAP TO AC021012.2; EXPRESSED IN PLACENTA, SIGNAL = 1.4; EXPRESSED IN BONE MARROW, SIGNAL = 1.9; EXPRESSED IN HELA, SIGNAL = 2.8; EXPRESSED IN LUNG, SIGNAL = 1.7; EXPRESSED IN ADULT LIVER, SIGNAL = 1.9; EXPRESSED IN BRAIN, SIGNAL =   2; EXPRESSED IN FETAL LIVER, SIGNAL = 2.7; EXPRESSED IN HEART, SIGNAL = 2.6; NT HIT: D87675.1, EVALUE 2.00e-12; SWISSPROT HIT: P00487, EVALUE 1.70e+00; EST_HUMAN HIT: F08688.1, EVALUE 9.00e-16
agtaatggcctccagctccatccaagttgcagcttgctctttgaagccttggagcaaagcattgacttctctcctactccaaaagtcctagatggcatcaatgatcttagctatatcttctggataacttacagcagcttctacatcagggcttgctcctttaccttgaacttttatgttatgaagatagcttccttttattaa

SEQ ID NO: 25093 - DNA, 82 bp, Homo sapiens
  MAP TO AC022267.2; EXPRESSED IN ADULT LIVER, SIGNAL =   2; EXPRESSED IN HEART, SIGNAL = 4.4; EXPRESSED IN BRAIN, SIGNAL = 2.3; EXPRESSED IN PLACENTA, SIGNAL = 1.8; EXPRESSED IN BONE MARROW, SIGNAL = 2.1; EXPRESSED IN FETAL LIVER, SIGNAL = 4.9; EXPRESSED IN HELA, SIGNAL = 4.3; NT HIT: AF053490.1, EVALUE 2.60e+00; EST_HUMAN HIT: BE258705.1, EVALUE 9.80e-01
cttttcttgctcccttttgtccctcaggaatctctttgtatgaatctcatgctgtttgaccttacggttactgtaatcaagc

SEQ ID NO: 25094 - DNA, 399 bp, Homo sapiens
  MAP TO AL136170.2; EXPRESSED IN HELA, SIGNAL = 1.9; EXPRESSED IN HEART, SIGNAL = 3.5; EXPRESSED IN BRAIN, SIGNAL = 2.5; EXPRESSED IN PLACENTA, SIGNAL = 1.9; EXPRESSED IN ADULT LIVER, SIGNAL = 1.5; EXPRESSED IN BONE MARROW, SIGNAL = 3.4; EXPRESSED IN FETAL LIVER, SIGNAL = 2.1; EXPRESSED IN LUNG, SIGNAL = 4.4; NT HIT: AF010603.1, EVALUE 9.90e-01; EST_HUMAN HIT: N59624.1, EVALUE 1.00e-121; SWISSPROT HIT: Q04322, EVALUE 1.00e+00
ctatgtaataaaaaaaaatacagcatactctgaggtacgaaggtctgatctgagttggatgaggagccactggatagtaactctcgatctgttggtatctttctctggattctggtacatacgatggtactgctgcaggtggaatctcaatgggtatagggctttctcggaatatctcttctcttgtgtaagacggagcagggtacactcgacggccatcatagtgagatgggtatataggtgggtactgctgtggctgtgtgccatactgagagtttacaacacgttcttggaggtagggtggataatgatccaagtagggaggagcaggttcaggagcagatggtggaggtcggacaaagcgggacacacattgtggtggtggagtataatacatac

SEQ ID NO: 25095 - DNA, 145 bp, Homo sapiens
  MAP TO AL158148.1; EXPRESSED IN BRAIN, SIGNAL = 1.6; EXPRESSED IN PLACENTA, SIGNAL = 1.3; EXPRESSED IN ADULT LIVER, SIGNAL = 8.9; EXPRESSED IN HEART, SIGNAL = 1.8; NT HIT: AF006573.1, EVALUE 3.30e-01; SWISSPROT HIT: O14647, EVALUE 1.60e-01
atgttggtacaagggcatcacctccaagcctggtgtgcagagaccacccacacgcacgtctccattgtgccttccctcatctgccaaccagatccagaggaccccaaggtccaaggggattgcagaaccacccatctggaggaag

SEQ ID NO: 25096 - DNA, 213 bp, Homo sapiens
  MAP TO AC002126.1; EXPRESSED IN BRAIN, SIGNAL = 1.7; EXPRESSED IN BONE MARROW, SIGNAL = 2.5; EXPRESSED IN FETAL LIVER, SIGNAL = 2.6; EXPRESSED IN HEART, SIGNAL = 2.3; EXPRESSED IN LUNG, SIGNAL = 2.3; EXPRESSED IN ADULT LIVER, SIGNAL = 3.4; EXPRESSED IN PLACENTA, SIGNAL = 1.9; EXPRESSED IN HELA, SIGNAL = 2.7; NT HIT: gi8923393, EVALUE 2.00e-77; SWISSPROT HIT: Q01200, EVALUE 2.70e-02; EST_HUMAN HIT: BF311552.1, EVALUE 1.00e-85
caagcgacccacttaactgcagcatgggtctgtcctccgacatggtcagtgcgtcccggtgggtctgggccagccgcaggcctgggaaggtgaggaaggcacccagcacagagcccaccactgccagtcccacgcggatagccagcttggccacaggaagcctaggagaacaccaggtcacgagcctgcctgggggaccctgggagggtccca

SEQ ID NO: 25097 - DNA, 87 bp, Homo sapiens
  MAP TO AC022845.2; EXPRESSED IN ADULT LIVER, SIGNAL = 2.7; EXPRESSED IN PLACENTA, SIGNAL = 1.8; EXPRESSED IN BRAIN, SIGNAL = 2.4; EXPRESSED IN FETAL LIVER, SIGNAL = 1.9; EXPRESSED IN HELA, SIGNAL = 2.3; EXPRESSED IN HEART, SIGNAL = 2.1; EXPRESSED IN LUNG, SIGNAL = 2.5; NT HIT: gi8923162, EVALUE 5.00e-42; SWISSPROT HIT: Q06846, EVALUE 5.60e+00
ctgactctctcttcttcggccctcttcagagcagcatcccgctgcaaaaccttcatgatggcctcttgttcctcttcagtcaggaag

SEQ ID NO: 25098 - DNA, 164 bp, Homo sapiens
  MAP TO AC011447.2; EXPRESSED IN PLACENTA, SIGNAL = 1.7; EXPRESSED IN BRAIN, SIGNAL = 1.9; EXPRESSED IN FETAL LIVER, SIGNAL = 1.8; EXPRESSED IN LUNG, SIGNAL = 2.4; EXPRESSED IN ADULT LIVER, SIGNAL = 1.6; EXPRESSED IN HELA, SIGNAL = 1.9; EXPRESSED IN HEART, SIGNAL = 1.8; SWISSPROT HIT: P21414, EVALUE 1.80e-02; NT HIT: D10083.1, EVALUE 1.00e-87; EST_HUMAN HIT: AI022655.1, EVALUE 1.00e-60
atcgccagccatatgaagacaacctagctggacgatcagttgttgttaagaatctgacccctcaaactctacaacctcgatggacgggaccctacttagtcatctatagtccccgactgccgtccgcctgcaggatcctccccactgggttcaccattccagaa

SEQ ID NO: 25099 - DNA, 137 bp, Homo sapiens
  MAP TO AL157817.3; EXPRESSED IN PLACENTA, SIGNAL = 5.1; EXPRESSED IN BONE MARROW, SIGNAL = 4.9; EXPRESSED IN FETAL LIVER, SIGNAL = 4.1; EXPRESSED IN HELA, SIGNAL = 3.6; EXPRESSED IN HEART, SIGNAL = 4.8; EXPRESSED IN ADULT LIVER, SIGNAL = 5.2; EXPRESSED IN BRAIN, SIGNAL =  10; SWISSPROT HIT: Q08427, EVALUE 6.10e-01; EST_HUMAN HIT: BE185449.1, EVALUE 4.60e-01
atgacatcaacgctgctttgggtggcaaggctctacagcagggatttccacaactgaattcacgaaagtcccttagtaactctgatatgcagcaggattttggaactggagctattgaaaagctcattgaagattaa

SEQ ID NO: 25100 - DNA, 181 bp, Homo sapiens
  MAP TO AC007497.2; EXPRESSED IN BRAIN, SIGNAL = 2.6; EXPRESSED IN PLACENTA, SIGNAL = 2.6; EXPRESSED IN ADULT LIVER, SIGNAL = 2.3; EXPRESSED IN FETAL LIVER, SIGNAL = 2.4; EXPRESSED IN BONE MARROW, SIGNAL = 2.1; EXPRESSED IN LUNG, SIGNAL = 2.1; EXPRESSED IN HELA, SIGNAL = 2.7; EXPRESSED IN HEART, SIGNAL = 2.2; SWISSPROT HIT: P54726, EVALUE 5.90e-01; NT HIT: AB023222.1, EVALUE 9.00e-98; EST_HUMAN HIT: AA604556.1, EVALUE 2.50e+00
ggtacagaaagtgacaggctctttatctccagatgcctgtaaaacttcagaagaaaaggttactttgttgatatggatttcaaatagattttcgcctcgttctaagtggatggtttcatcaaattcatcaacagagtcatctggcatgatttctggtttaaatttgtactgcttggtgcca

SEQ ID NO: 25101 - DNA, 77 bp, Homo sapiens
  MAP TO AL049873.2; EXPRESSED IN BONE MARROW, SIGNAL = 4.2; EXPRESSED IN FETAL LIVER, SIGNAL = 7.7; EXPRESSED IN HELA, SIGNAL = 7.2; EXPRESSED IN LUNG, SIGNAL = 3.6; EXPRESSED IN ADULT LIVER, SIGNAL = 6.2; EXPRESSED IN HEART, SIGNAL = 7.1; EXPRESSED IN BRAIN, SIGNAL = 8.8; EXPRESSED IN PLACENTA, SIGNAL = 7.6; NT HIT: AL163227.2, EVALUE 5.00e-14; EST_HUMAN HIT: AA371807.1, EVALUE 4.00e-18
aaggcagtgtgaaaaggaaatgtggggttggagcccccacacagagttcccactggggtactgcctagtggaactgt

SEQ ID NO: 25102 - DNA, 140 bp, Homo sapiens
  MAP TO AC023066.2; EXPRESSED IN PLACENTA, SIGNAL =  15; EXPRESSED IN BRAIN, SIGNAL =  17; EXPRESSED IN BONE MARROW, SIGNAL =  39; EXPRESSED IN LUNG, SIGNAL =  11; EXPRESSED IN FETAL LIVER, SIGNAL =  25; EXPRESSED IN HELA, SIGNAL =  25; EXPRESSED IN HEART, SIGNAL =  54; EXPRESSED IN ADULT LIVER, SIGNAL =  29; NT HIT: AB038241.1, EVALUE 4.00e-28; SWISSPROT HIT: P04406, EVALUE 4.00e-05; EST_HUMAN HIT: AA459385.1, EVALUE 4.00e-20
atgacatcaaggtggtaaagcagcatcagagggggccctcaagggcatctggggctacaatgagcaccagattgtctcctccaactttaacagtgacaccaactcttccaccttcagtgctggggctggcattgccctaa

SEQ ID NO: 25103 - DNA, 95 bp, Homo sapiens
  MAP TO AC018826.3; EXPRESSED IN FETAL LIVER, SIGNAL = 2.3; EXPRESSED IN ADULT LIVER, SIGNAL = 2.2; EXPRESSED IN BRAIN, SIGNAL = 2.7; EXPRESSED IN PLACENTA, SIGNAL = 1.7; EXPRESSED IN LUNG, SIGNAL = 2.7; EXPRESSED IN HEART, SIGNAL = 2.4; EXPRESSED IN HELA, SIGNAL = 2.3; EXPRESSED IN BONE MARROW, SIGNAL = 2.8; EST_HUMAN HIT: N64044.1, EVALUE 1.20e+00; NT HIT: gi7662471, EVALUE 7.90e-01
tcaagtctctctcaatttggcaatgccactctcaatcattaactcattaattcttacaataacgtgtgggttttttatcatgtcaatcatcatgg

SEQ ID NO: 25104 - DNA, 323 bp, Homo sapiens
  MAP TO AC018826.3; EXPRESSED IN PLACENTA, SIGNAL = 1.5; EXPRESSED IN HELA, SIGNAL =   2; EXPRESSED IN FETAL LIVER, SIGNAL = 1.5; EXPRESSED IN HEART, SIGNAL = 1.8; SWISSPROT HIT: P19028, EVALUE 1.00e-06; NT HIT: AL163246.2, EVALUE 1.00e-82; EST_HUMAN HIT: AW340174.1, EVALUE 3.00e-81
gattcatgggcccaggaatcaatggatggaagtggaagtggcacaactcaccatcacccctagtgatccactagcaaaatgtttgcttcctgttcccgtgacattctgttctgctggcctagaggtcttagttccagagggaagaaggctgccactaggacacacaacaatgattccattaaactggaagttaagattgcctcctggacactttggtcttctcctatctttaagtcaacaggctaagaagggacttacagtgttggctggggtgattggcctggactatcaagatgaaatcagtctactaccccataagagaa

SEQ ID NO: 25105 - DNA, 158 bp, Homo sapiens
  MAP TO AC011428.2; EXPRESSED IN BRAIN, SIGNAL = 6.4; EXPRESSED IN PLACENTA, SIGNAL =   5; EXPRESSED IN BONE MARROW, SIGNAL = 4.6; EXPRESSED IN LUNG, SIGNAL = 6.3; EXPRESSED IN ADULT LIVER, SIGNAL = 5.9; EXPRESSED IN FETAL LIVER, SIGNAL =   7; EXPRESSED IN HELA, SIGNAL = 6.9; EXPRESSED IN HEART, SIGNAL = 6.5; SWISSPROT HIT: P51842, EVALUE 3.00e+00
ttacatcctcagtctgtgtatgcagatctctggtttgcagaaggcagccactgtcaagcagagctgagcccttgtttgtgtgagttcttctggagccatggtaaggagagcatgaggcccctgctgccagcaggtctgtgggggatgctgccaactgg

SEQ ID NO: 25106 - DNA, 409 bp, Homo sapiens
  MAP TO AC010457.3; EXPRESSED IN BRAIN, SIGNAL = 2.1; EXPRESSED IN PLACENTA, SIGNAL =   3; EXPRESSED IN HELA, SIGNAL = 2.1; EXPRESSED IN LUNG, SIGNAL = 3.6; EXPRESSED IN ADULT LIVER, SIGNAL = 1.4; EXPRESSED IN HEART, SIGNAL = 1.9; NT HIT: gi11416916, EVALUE 0.00e+00; SWISSPROT HIT: P42702, EVALUE 9.00e-69; EST_HUMAN HIT: BF366553.1, EVALUE 0.00e+00
ggaagcagtgctcttaaaacattggaaatgaatccttgtaccccaaataatgttgaggttctggaaactcgatcagcatttcctaaaatagaagatacagaaataatttccccagtagctgagcgtcctgaagatcgctctgatgcagagcctgaaaaccatgtggttgtgtcctattgtccacccatcattgaggaagaaataccaaacccagccgcagatgaagctggagggactgcacaggttatttacattgatgttcagtcgatgtatcagcctcaagcaaaaccagaagaagaacaagaaaatgaccctgtaggaggggcaggctataagccacagatgcacctccccattaattctactgtggaagatatagctgcagaagaggacttagataaaactgcgg

SEQ ID NO: 25107 - DNA, 136 bp, Homo sapiens
  MAP TO AC010828.3; EXPRESSED IN ADULT LIVER, SIGNAL =   6; EXPRESSED IN HELA, SIGNAL =   6; EXPRESSED IN BRAIN, SIGNAL = 4.5; EXPRESSED IN PLACENTA, SIGNAL =   4; EXPRESSED IN BONE MARROW, SIGNAL = 4.7; EXPRESSED IN FETAL LIVER, SIGNAL =   5; EXPRESSED IN HEART, SIGNAL = 5.2; EXPRESSED IN LUNG, SIGNAL = 4.4; NT HIT: gi11422757, EVALUE 7.70e-02; EST_HUMAN HIT: AW377108.1, EVALUE 1.10e-01
agcctcctgcaagggagcagcctcctgagagcagacagcacgatccaggtctgaactgtgacaaagaggtagctttctgtgggatggggaaggggcagacagatgagatggagcttgctcatgtggatgcagaggt

SEQ ID NO: 25108 - DNA, 414 bp, Homo sapiens
  MAP TO AC019191.2; EXPRESSED IN BRAIN, SIGNAL = 4.4; EXPRESSED IN PLACENTA, SIGNAL = 2.6; EXPRESSED IN HELA, SIGNAL = 2.7; EXPRESSED IN BONE MARROW, SIGNAL =   3; EXPRESSED IN FETAL LIVER, SIGNAL = 2.2; EXPRESSED IN HEART, SIGNAL = 2.4; EXPRESSED IN LUNG, SIGNAL = 2.9; EXPRESSED IN ADULT LIVER, SIGNAL = 3.4; SWISSPROT HIT: P21414, EVALUE 3.00e-16; NT HIT: Z78766.1, EVALUE 4.00e-62; EST_HUMAN HIT: BE142076.1, EVALUE 1.00e-59
atgcttaagattctccggcaaattttttatatcagtattgagaacacttatcaaatggccaaatccctatttaaagggccaaatatcctccagaccatccagcaagaagtcaaagcctgtgaggtgtgccaaaagaataatcccttggtccatcataaggccactctggggaaacaaagaatatggcactatcctggagacaactggcagttagacttcacccatatgcctaagtcaaagggatttcaatacttgttggtctgtgttgataccttgacaaattggatcgaagccttccactgcaaggcagagaagattcaggaagtggttaaagtcctaattcatgaaataattcctagatatgggctttcccaaagcttagaaagcaataattgcctggcttttaaagccatg

SEQ ID NO: 25109 - DNA, 123 bp, Homo sapiens
  MAP TO AC018764.3; EXPRESSED IN ADULT LIVER, SIGNAL = 3.7; EXPRESSED IN BONE MARROW, SIGNAL =  13; EXPRESSED IN HEART, SIGNAL =  11; EXPRESSED IN LUNG, SIGNAL = 3.3; EXPRESSED IN PLACENTA, SIGNAL = 4.1; EXPRESSED IN HELA, SIGNAL =  12; EXPRESSED IN BRAIN, SIGNAL =   4; EXPRESSED IN FETAL LIVER, SIGNAL =  11; EST_HUMAN HIT: AV714608.1, EVALUE 1.00e-44; NT HIT: gi4506658, EVALUE 2.00e-42; SWISSPROT HIT: P18124, EVALUE 3.00e-05
atggagggtgtagaagagaaagagaaggttcctgctgtgccagaaacccttaagaaaaagcaagggaatttcgcagagctgaagatcaagtgcctgagaaagaagtttacccaaaagatgctt

SEQ ID NO: 25110 - DNA, 190 bp, Homo sapiens
  MAP TO AC018839.3; EXPRESSED IN PLACENTA, SIGNAL = 2.1; EXPRESSED IN HELA, SIGNAL = 3.2; EXPRESSED IN LUNG, SIGNAL =   3; EXPRESSED IN HEART, SIGNAL = 2.8; EXPRESSED IN BRAIN, SIGNAL =   3; EXPRESSED IN FETAL LIVER, SIGNAL = 3.2; EXPRESSED IN BONE MARROW, SIGNAL = 2.4; EXPRESSED IN ADULT LIVER, SIGNAL = 2.5; SWISSPROT HIT: Q08336, EVALUE 7.60e-01; EST_HUMAN HIT: AW027969.1, EVALUE 3.00e-03; NT HIT: M86524.1, EVALUE 2.00e-03
atccttcaagactcagctccagcagcccctcctccatgaagccttccttgattttccctccgtcccccttttccccatgccccaagaagagttttttgcaattaacctttttatatgcatctgtgttgtccatctggctggggtactccccagggacaggaaactgggtctcatttgcctgagttatccc

SEQ ID NO: 25111 - DNA, 149 bp, Homo sapiens
  MAP TO AC009044.3; EXPRESSED IN ADULT LIVER, SIGNAL = 4.4; EXPRESSED IN BONE MARROW, SIGNAL = 3.5; EXPRESSED IN HEART, SIGNAL = 4.1; EXPRESSED IN LUNG, SIGNAL = 4.8; EXPRESSED IN PLACENTA, SIGNAL = 3.3; EXPRESSED IN HELA, SIGNAL = 4.3; EXPRESSED IN BRAIN, SIGNAL = 4.7; EXPRESSED IN FETAL LIVER, SIGNAL = 4.4; SWISSPROT HIT: Q15050, EVALUE 5.20e+00; NT HIT: AE000881.1, EVALUE 3.40e-01
ctgggtgccaagcactggggacactcagatgaacaagctgccccatgacatctgcaacctgggcaagggagacagggccaacaaggaggagtacacagccaaggctaagcacgaagaagcagagaaacaaggtgactagtacaaggtcg

SEQ ID NO: 25112 - DNA, 87 bp, Homo sapiens
  MAP TO AC009396.5; EXPRESSED IN BRAIN, SIGNAL = 2.6; EXPRESSED IN PLACENTA, SIGNAL = 2.1; EXPRESSED IN ADULT LIVER, SIGNAL = 3.5; EXPRESSED IN FETAL LIVER, SIGNAL = 1.8; EXPRESSED IN BONE MARROW, SIGNAL = 1.9; EXPRESSED IN HELA, SIGNAL = 1.7; EXPRESSED IN HEART, SIGNAL = 2.6; NT HIT: M59257.1, EVALUE 1.80e-01; SWISSPROT HIT: P95816, EVALUE 9.60e+00
tgcattttagaaatgggaattgatagaatctgggatttgcttgacaaaaagttgaaggagaagcagatgcaaagacctgagattcag

SEQ ID NO: 25113 - DNA, 102 bp, Homo sapiens
  MAP TO AC017004.2; EXPRESSED IN BRAIN, SIGNAL = 7.3; EXPRESSED IN PLACENTA, SIGNAL = 6.3; EXPRESSED IN BONE MARROW, SIGNAL = 6.5; EXPRESSED IN HEART, SIGNAL =  12; EXPRESSED IN LUNG, SIGNAL = 5.9; EXPRESSED IN ADULT LIVER, SIGNAL = 7.8; EXPRESSED IN FETAL LIVER, SIGNAL =  12; EXPRESSED IN HELA, SIGNAL =  14; SWISSPROT HIT: P27757, EVALUE 9.40e+00; NT HIT: U09771.1, EVALUE 5.50e-02; EST_HUMAN HIT: AA078109.1, EVALUE 1.30e+00
cttgtgagaaacaggagcacgaagctgtggaaggtatatacgttgagattaggaaggtggtggcctccctgcagctgcacaattgtcacagtgagaatgctg

SEQ ID NO: 25114 - DNA, 107 bp, Homo sapiens
  MAP TO AL158845.1; EXPRESSED IN HELA, SIGNAL = 2.7; EXPRESSED IN FETAL LIVER, SIGNAL = 2.4; EXPRESSED IN ADULT LIVER, SIGNAL = 1.5; EXPRESSED IN HEART, SIGNAL = 3.1; EXPRESSED IN BRAIN, SIGNAL = 1.4; NT HIT: gi11433356, EVALUE 5.90e-02; EST_HUMAN HIT: BF334199.1, EVALUE 8.60e-02
cagatacttcttattccttttgaagttgtaaacattattgatagtgaccaaggaactaatttcatttctcaaaatactcaaggcactcttgagcaaggaattcagca

SEQ ID NO: 25115 - DNA, 189 bp, Homo sapiens
  MAP TO AL121963.10; EXPRESSED IN PLACENTA, SIGNAL = 3.2; EXPRESSED IN BRAIN, SIGNAL = 4.8; EXPRESSED IN LUNG, SIGNAL = 2.7; EXPRESSED IN HEART, SIGNAL = 3.8; EXPRESSED IN HELA, SIGNAL =   4; EXPRESSED IN FETAL LIVER, SIGNAL = 3.9; EXPRESSED IN BONE MARROW, SIGNAL = 3.1; EXPRESSED IN ADULT LIVER, SIGNAL =   4; EST_HUMAN HIT: BF109943.1, EVALUE 3.00e-09; SWISSPROT HIT: P13816, EVALUE 2.60e-01; NT HIT: L78810.1, EVALUE 5.00e-04
ctactccttcttcattgactgatccttctcagtctcctttgctggttcttcctcatcttcttgatgtctaaacttctgcgttccttgaacttcctcatcttcttgatgtcttgatggttccttgtcttcttgatgtctaaacatctctgttcctttccctccccttccttctgcctcctattttctctt

SEQ ID NO: 25116 - DNA, 214 bp, Homo sapiens
  MAP TO AC007115.1; EXPRESSED IN PLACENTA, SIGNAL = 4.4; EXPRESSED IN FETAL LIVER, SIGNAL = 1.8; EXPRESSED IN ADULT LIVER, SIGNAL = 2.6; EXPRESSED IN HEART, SIGNAL =  10; EXPRESSED IN LUNG, SIGNAL =  17; EST_HUMAN HIT: W80605.1, EVALUE 1.00e-117; NT HIT: gi11435936, EVALUE 1.00e-117; SWISSPROT HIT: P07585, EVALUE 3.00e-34
gcattgattcttgtcaacaataaaattagcaaagttagtcctggagcatttacacctttggtgaagttggaacgactttatctgtccaagaatcagctgaaggaattgccagaaaaaatgcccaaaactcttcaggagctgcgtgcccatgagaatgagatcaccaaagtgcgaaaagttactttcaatggactgaaccagatgattgtcatag

SEQ ID NO: 25117 - DNA, 154 bp, Homo sapiens
  MAP TO AL031658.11; EXPRESSED IN HELA, SIGNAL = 2.2; EXPRESSED IN HEART, SIGNAL = 2.3; EXPRESSED IN PLACENTA, SIGNAL =   2; EXPRESSED IN ADULT LIVER, SIGNAL =   2; EXPRESSED IN BONE MARROW, SIGNAL = 1.7; EXPRESSED IN FETAL LIVER, SIGNAL = 2.1; EXPRESSED IN LUNG, SIGNAL = 3.4; EXPRESSED IN BRAIN, SIGNAL = 2.4; NT HIT: AJ243178.1, EVALUE 3.50e-01; EST_HUMAN HIT: BF662898.1, EVALUE 8.20e+00; SWISSPROT HIT: P38584, EVALUE 1.00e+00
ccaaacacgggcccgaggcagtggagacactcttcagggacatcgacaacatctttgtcaaaagcctgcagagtgtgcagaaggtgatcatcagtgacaagcactgcttcgagctgtacggctatgacatcctcatcgaccaggacctcaagcc

SEQ ID NO: 25118 - DNA, 209 bp, Homo sapiens
  MAP TO AC010278.3; EXPRESSED IN FETAL LIVER, SIGNAL = 2.2; EXPRESSED IN HEART, SIGNAL = 1.9; EXPRESSED IN HELA, SIGNAL = 1.9; EST_HUMAN HIT: BE350127.1, EVALUE 3.00e-40; SWISSPROT HIT: Q29131, EVALUE 6.50e+00; NT HIT: U93163.1, EVALUE 1.00e-35
atgtatttactatattatactttttatcattatttttcccatgtattccttctacttataaaaaagttagctgaaaaacagcctcaggcaggtccttcaggcagtattccagaagaaggcactgttataggagatgacagctccatgcgtgttattgcccctgaagaccttccagtgggacaagatgtggaggtggaacacagtgttag

SEQ ID NO: 25119 - DNA, 105 bp, Homo sapiens
  MAP TO AC016902.2; EXPRESSED IN BRAIN, SIGNAL = 1.7; EXPRESSED IN PLACENTA, SIGNAL = 2.1; EXPRESSED IN ADULT LIVER, SIGNAL = 2.3; EXPRESSED IN BONE MARROW, SIGNAL = 2.2; EXPRESSED IN FETAL LIVER, SIGNAL = 1.8; EXPRESSED IN HEART, SIGNAL = 1.8; EXPRESSED IN LUNG, SIGNAL = 2.5; EXPRESSED IN HELA, SIGNAL = 1.9; EST_HUMAN HIT: BF526499.1, EVALUE 3.30e-01
atgccgaatggtattctgatgtgtgacaaagggaagcagtacaaccacagaaagcacagaggaagagtggtgaagatgatgggcaggattaaattggagaaataa

SEQ ID NO: 25120 - DNA, 276 bp, Homo sapiens
  MAP TO AC012153.10; EXPRESSED IN HELA, SIGNAL = 3.1; EXPRESSED IN HEART, SIGNAL = 2.8; EXPRESSED IN BRAIN, SIGNAL = 2.2; EXPRESSED IN PLACENTA, SIGNAL = 1.8; EXPRESSED IN ADULT LIVER, SIGNAL = 1.5; EXPRESSED IN BONE MARROW, SIGNAL = 1.6; EXPRESSED IN FETAL LIVER, SIGNAL =   3; EXPRESSED IN LUNG, SIGNAL = 2.1
ccaccacaatcagtaccatcaccaccatcactatcaccaccatcatcaccaccatcaccatcatcaccatcaccactatcactaccgtcaccaccatcaccgtcaccaccaccatcatcaccaccatcaccatcaccacaatcactacaatcaccaccatcatcaccaccatcaccaccaccatcatcaccatcaccaccaccatcatcaccatcaccaccaccatcaccatcaccaccatcacaccatcaccactaccatcacactagacccatc

SEQ ID NO: 25121 - DNA, 334 bp, Homo sapiens
  MAP TO AC017016.3; EXPRESSED IN ADULT LIVER, SIGNAL = 5.8; EXPRESSED IN FETAL LIVER, SIGNAL = 5.1; EXPRESSED IN PLACENTA, SIGNAL = 2.9; EXPRESSED IN BONE MARROW, SIGNAL = 3.9; EXPRESSED IN HELA, SIGNAL = 4.6; EXPRESSED IN HEART, SIGNAL = 4.2; EXPRESSED IN LUNG, SIGNAL = 3.1; EXPRESSED IN BRAIN, SIGNAL = 4.1; NT HIT: AB014607.1, EVALUE 8.00e-69; SWISSPROT HIT: Q08639, EVALUE 3.80e+00; EST_HUMAN HIT: BE064386.1, EVALUE 2.00e-79
attgttttctgtgtcagcccttgctaaaggaatactcacagcaatggtgatcactgctatcatagctatcattaaattactcattgtgactggttgtcccgcttttctcaggttttcttccgccatctgtgacagcttcttgatctgtccccaggtaggtggctgcattcgacgggtgttgctcatgacagttggggtcctcctcagtgtcaatttggacaatgctgccaccggtgggtctttgggatcctcccgaaacctcttcctgggtatctggctcatgataaagttttcaggtgtcttgatggtatccaaatcgactgctggttctggc

SEQ ID NO: 25122 - DNA, 162 bp, Homo sapiens
  MAP TO AC019055.2; EXPRESSED IN BRAIN, SIGNAL = 2.8; EXPRESSED IN PLACENTA, SIGNAL =   2; EXPRESSED IN HELA, SIGNAL = 2.8; EXPRESSED IN ADULT LIVER, SIGNAL =   5; EXPRESSED IN BONE MARROW, SIGNAL = 2.8; EXPRESSED IN FETAL LIVER, SIGNAL = 3.5; EXPRESSED IN HEART, SIGNAL = 2.7; EXPRESSED IN LUNG, SIGNAL = 2.2; SWISSPROT HIT: P40583, EVALUE 3.00e+00; NT HIT: AJ297357.1, EVALUE 3.70e-01
cgttcctggtatttttgctaccagagcaataaccttccccatgcatttttttacatgttggaggaggagctatccagtgatctcaaagcatatgtttttgattctcataagattatggataccaaaggaataaaaatggaaatcactactgccaagatatga

SEQ ID NO: 25123 - DNA, 123 bp, Homo sapiens
  MAP TO AC008786.6; EXPRESSED IN HELA, SIGNAL = 3.5; EXPRESSED IN HEART, SIGNAL = 2.9; EXPRESSED IN LUNG, SIGNAL = 2.8; EXPRESSED IN PLACENTA, SIGNAL = 2.2; EXPRESSED IN BRAIN, SIGNAL = 2.4; EXPRESSED IN FETAL LIVER, SIGNAL = 3.3; EXPRESSED IN ADULT LIVER, SIGNAL = 2.3; EXPRESSED IN BONE MARROW, SIGNAL = 2.3; SWISSPROT HIT: P09511, EVALUE 9.20e+00; EST_HUMAN HIT: BF242946.1, EVALUE 1.00e-01
tgttttgggaagacaaccagtagcagtgctggctccctatcttggagtggatgggctttatgtccaggcagccatctgtgggagtggtagcctggagccaggtcttggagctacctgtgcatg

SEQ ID NO: 25124 - DNA, 84 bp, Homo sapiens
  MAP TO AC007262.4; EXPRESSED IN BRAIN, SIGNAL =   2; EXPRESSED IN PLACENTA, SIGNAL = 2.7; EXPRESSED IN ADULT LIVER, SIGNAL =   2; EXPRESSED IN FETAL LIVER, SIGNAL =   2; EXPRESSED IN HELA, SIGNAL = 2.1; EXPRESSED IN HEART, SIGNAL =   2; NT HIT: AF055066.1, EVALUE 1.00e-20; SWISSPROT HIT: P11369, EVALUE 5.70e-02; EST_HUMAN HIT: AA579013.1, EVALUE 3.00e-25
ggacttggatggagctggaggccattatcctccgcaaactaacagaggaacagaaaacaaaataccacatgttctcacttataa

SEQ ID NO: 25125 - DNA, 455 bp, Homo sapiens
  MAP TO AL122010.2; EXPRESSED IN BONE MARROW, SIGNAL = 2.4; EXPRESSED IN HEART, SIGNAL = 3.8; EXPRESSED IN LUNG, SIGNAL = 2.5; EXPRESSED IN PLACENTA, SIGNAL = 2.4; EXPRESSED IN ADULT LIVER, SIGNAL = 2.7; EXPRESSED IN FETAL LIVER, SIGNAL = 3.2; EXPRESSED IN HELA, SIGNAL = 3.4; EXPRESSED IN BRAIN, SIGNAL = 2.6; EST_HUMAN HIT: BE182360.1, EVALUE 0.00e+00; SWISSPROT HIT: O95377, EVALUE 2.00e-89; NT HIT: gi11426249, EVALUE 0.00e+00
agcccagaaagatgaggtcacccgaaaggaggtcgtcttgtttgcaggaagaggtggtaccgtgggggtgatgacctgtgcacatggcttgagctttccttgctgccaggcactcgtggcatctcttgctcaccaggtagatgagctccacgaggttgagcaggatgcagatggcagctgtggccaccatgaagagggtgaaaatgttcttctctgagggcttggagatgaagcagtccactatattgggacatggatctgcgtggcacttgaccacaggagggaggatatatttggggtagaatgagtggaacacatagagaaaggcgatgtccacgctcgccttgaacactaggctgcagacatatgtccaccagagcccaccccgcttcttgccggggttcaggtagaggcgcccactgttctccccatgggcttctcggtgcctcttctcc

SEQ ID NO: 25126 - DNA, 169 bp, Homo sapiens
  MAP TO AC024019.2; EXPRESSED IN ADULT LIVER, SIGNAL = 3.6; EXPRESSED IN FETAL LIVER, SIGNAL = 3.7; EXPRESSED IN HEART, SIGNAL = 3.2; EXPRESSED IN PLACENTA, SIGNAL = 3.3; EXPRESSED IN BONE MARROW, SIGNAL = 2.7; EXPRESSED IN LUNG, SIGNAL = 3.3; EXPRESSED IN BRAIN, SIGNAL =   4; EXPRESSED IN HELA, SIGNAL = 3.7; NT HIT: gi11419715, EVALUE 6.10e+00; SWISSPROT HIT: O15266, EVALUE 6.70e+00; EST_HUMAN HIT: BF700092.1, EVALUE 5.80e-01
tttggccaaaacaacaacaacaacaacaacaacaaacacttagaggccttcttcatgtggctgggtctcagacaaggccaggagctcaatattgaaatcaggttctgggaagaaaagtcagtggactttaaaggcgagagatgggtgttgcagaggttctttgaagagc

SEQ ID NO: 25127 - DNA, 157 bp, Homo sapiens
  MAP TO AC009009.2; EXPRESSED IN FETAL LIVER, SIGNAL = 3.6; EXPRESSED IN HELA, SIGNAL = 3.4; EXPRESSED IN HEART, SIGNAL = 2.8; EST_HUMAN HIT: AA435719.1, EVALUE 9.00e-43; SWISSPROT HIT: Q42679, EVALUE 1.80e+00; NT HIT: U39725.1, EVALUE 3.60e-01
cttgtaaacagcatggagaacagcttctttatccatccaaatggcagagggcttaggacactagtgaggaataaagtcaacttcaccaagattgacctgatgaataccatgtctttcaaaagcatagaaatggagaccatagtagtggttgtcagga

SEQ ID NO: 25128 - DNA, 105 bp, Homo sapiens
  MAP TO AC010253.2; EXPRESSED IN ADULT LIVER, SIGNAL = 4.3; EXPRESSED IN HELA, SIGNAL = 4.7; EXPRESSED IN HEART, SIGNAL = 3.5; EXPRESSED IN LUNG, SIGNAL = 4.1; EXPRESSED IN BRAIN, SIGNAL = 4.2; EXPRESSED IN PLACENTA, SIGNAL = 3.7; EXPRESSED IN BONE MARROW, SIGNAL = 4.1; EXPRESSED IN FETAL LIVER, SIGNAL = 4.4; EST_HUMAN HIT: BE560267.1, EVALUE 1.00e-22; NT HIT: gi5031952, EVALUE 7.00e-23
gtctggaggtagatcaagaagacaagcagcaaggtggccaggcagagcacagcaaagatgttctggacatgtgaatgtcagtgcctcggccaggggcatagaaca

SEQ ID NO: 25129 - DNA, 101 bp, Homo sapiens
  MAP TO AL160007.1; EXPRESSED IN BRAIN, SIGNAL = 1.9; EXPRESSED IN PLACENTA, SIGNAL = 1.8; EXPRESSED IN ADULT LIVER, SIGNAL = 2.1; EXPRESSED IN FETAL LIVER, SIGNAL =   2; EXPRESSED IN HELA, SIGNAL = 2.2; EXPRESSED IN HEART, SIGNAL =   2; EXPRESSED IN BONE MARROW, SIGNAL = 1.6; EST_HUMAN HIT: T49153.1, EVALUE 5.00e-03; SWISSPROT HIT: P33247, EVALUE 1.90e+00; NT HIT: AF079826.1, EVALUE 2.20e-01
atttccaaggtcattttccaagagacctctgtgagcttggactggatagcgcagcacagggccagcgatggcagctggaagggtggctgcctaggaaggag

SEQ ID NO: 25130 - DNA, 181 bp, Homo sapiens
  MAP TO AC018760.4; EXPRESSED IN PLACENTA, SIGNAL = 1.4; EXPRESSED IN FETAL LIVER, SIGNAL = 3.7; EXPRESSED IN HEART, SIGNAL = 2.2; EXPRESSED IN LUNG, SIGNAL = 1.8; EXPRESSED IN BRAIN, SIGNAL = 2.7; EXPRESSED IN HELA, SIGNAL = 2.1; EXPRESSED IN BONE MARROW, SIGNAL = 2.4; EXPRESSED IN ADULT LIVER, SIGNAL = 1.9; NT HIT: AB023489.1, EVALUE 4.20e-01; SWISSPROT HIT: P36225, EVALUE 3.00e+00
gaagccagcactgtcctgcactacgtgctccagcaacctcctgagctgctgcaagagcctgtgggggctcaggttccttcagagacacatgggaggcccctcggaggagctatcgggggagccactgtctgaggagccacagaagagacctccccagaaagcggtgaggacgctgccctct

SEQ ID NO: 25131 - DNA, 203 bp, Homo sapiens
  MAP TO AL139289.4; EXPRESSED IN BONE MARROW, SIGNAL =   3; EXPRESSED IN HELA, SIGNAL = 5.4; EXPRESSED IN LUNG, SIGNAL = 3.7; EXPRESSED IN BRAIN, SIGNAL = 4.3; EXPRESSED IN PLACENTA, SIGNAL = 3.3; EXPRESSED IN ADULT LIVER, SIGNAL = 7.9; EXPRESSED IN FETAL LIVER, SIGNAL = 4.9; EXPRESSED IN HEART, SIGNAL = 4.5; SWISSPROT HIT: P40238, EVALUE 2.00e-31; NT HIT: U68159.1, EVALUE 1.00e-111; EST_HUMAN HIT: AW904850.1, EVALUE 4.60e-02
ctacactgtccacaaagaggactcgctgagtccgagtctggtttaggaacacattcttcacccagaggtgcagcggaaagaagagacgcacttcctcctggtctggaaactggcacacgtatcgggttccaaagtggggcatgctctgggaactcagggggcaagcacggggcttctccctgttggcatagaagaggtccctc

SEQ ID NO: 25132 - DNA, 132 bp, Homo sapiens
  MAP TO AC000097.1; EXPRESSED IN BRAIN, SIGNAL = 3.9; EXPRESSED IN ADULT LIVER, SIGNAL = 3.5; EXPRESSED IN HEART, SIGNAL = 2.9; EXPRESSED IN PLACENTA, SIGNAL = 3.1; EXPRESSED IN LUNG, SIGNAL = 3.3; EXPRESSED IN HELA, SIGNAL = 3.4; EXPRESSED IN FETAL LIVER, SIGNAL = 3.8; EXPRESSED IN BONE MARROW, SIGNAL = 3.5; SWISSPROT HIT: P27410, EVALUE 4.10e+00; NT HIT: gi11426065, EVALUE 1.20e+00; EST_HUMAN HIT: R23708.1, EVALUE 1.10e-01
aaagtcggccctgggtccaccagccgcccctctgccctgcctttcctgggtcccgccttccctttctagggctatggctgcttgtggacaagcgtctcacgggtaggaaacgggacctctgagagctcctgg

SEQ ID NO: 25133 - DNA, 245 bp, Homo sapiens
  MAP TO AC011431.2; EXPRESSED IN BRAIN, SIGNAL =   4; EXPRESSED IN ADULT LIVER, SIGNAL = 3.1; EXPRESSED IN HELA, SIGNAL = 3.1; EXPRESSED IN HEART, SIGNAL = 3.7; EXPRESSED IN PLACENTA, SIGNAL = 3.4; EXPRESSED IN LUNG, SIGNAL = 3.9; EXPRESSED IN FETAL LIVER, SIGNAL = 2.9; EXPRESSED IN BONE MARROW, SIGNAL = 3.3; SWISSPROT HIT: P18172, EVALUE 2.10e+00; EST_HUMAN HIT: BE063509.1, EVALUE 3.00e-13; NT HIT: gi11693124, EVALUE 9.20e+00
agagtatagcatcctctcccccccggttattagtaaatatatcacaggggggaagtacacaacctgcgatattgggagtaatatcattttctccccttctggaattacaaacaatatcacaagagggttgtacaatctctatgatattgggataagaacattctctccctctctggatattaggaacaatatcaggggtgcgtacaccacctgcgatattgggagtaatatcatcctctttcccc

SEQ ID NO: 25134 - DNA, 226 bp, Homo sapiens
  MAP TO AC000134.14; EXPRESSED IN BRAIN, SIGNAL = 1.6; EXPRESSED IN PLACENTA, SIGNAL = 1.6; EXPRESSED IN HEART, SIGNAL = 2.2; EXPRESSED IN ADULT LIVER, SIGNAL = 1.5; EXPRESSED IN BONE MARROW, SIGNAL = 1.5; EXPRESSED IN LUNG, SIGNAL = 1.7; EST_HUMAN HIT: BF670784.1, EVALUE 1.00e-115; NT HIT: U94776.1, EVALUE 1.00e-124; SWISSPROT HIT: P11217, EVALUE 1.00e-33
cctctttggtcaagcttatccacatcctccacccgcatgccaaagatgaagaagttttcctctcccgcctcttctgccatctccacattggccccgtccatggtgccaatggtcagagccccgttgagcatgaacttcatgttgccggtgcctgaggcttcagtgcccgcagtggagatctgctcagagaggtctgcagctgggatcactgtggggtggcagcagg

SEQ ID NO: 25135 - DNA, 279 bp, Homo sapiens
  MAP TO AL133375.3; EXPRESSED IN BRAIN, SIGNAL = 4.1; EXPRESSED IN PLACENTA, SIGNAL =   3; EXPRESSED IN BONE MARROW, SIGNAL = 2.8; EXPRESSED IN HEART, SIGNAL = 3.5; EXPRESSED IN LUNG, SIGNAL = 4.3; EXPRESSED IN HELA, SIGNAL = 3.8; EXPRESSED IN ADULT LIVER, SIGNAL = 3.7; EXPRESSED IN FETAL LIVER, SIGNAL = 3.2; SWISSPROT HIT: P73532, EVALUE 7.10e-01; NT HIT: AB014608.1, EVALUE 0.00e+00; EST_HUMAN HIT: BE896423.1, EVALUE 0.00e+00
aagctgtggctaccctggcatctctacagctgcctgcaggccgcaccatgagcccccaggaagtagaagggttgatgaagcagacggtgcgtcaggtgcaggagacgctgaacttagagccagatgtcgctcagcaccttttggctcattcccactggggcgctgaacagctgctgcagagctacagtgaggaccctgagccactgctgctggcagctgggctgtgcgtacaccaggctcaggctgtacccgtacggcctgaccactgccccgtctgtg

SEQ ID NO: 25136 - DNA, 125 bp, Homo sapiens
  MAP TO AC019224.2; EXPRESSED IN PLACENTA, SIGNAL = 4.3; EXPRESSED IN BONE MARROW, SIGNAL = 4.6; EXPRESSED IN FETAL LIVER, SIGNAL = 5.4; EXPRESSED IN HELA, SIGNAL = 5.7; EXPRESSED IN LUNG, SIGNAL = 3.6; EXPRESSED IN HEART, SIGNAL = 6.4; EXPRESSED IN BRAIN, SIGNAL =   6; EXPRESSED IN ADULT LIVER, SIGNAL = 4.8; SWISSPROT HIT: Q04689, EVALUE 7.00e+00; NT HIT: S77770.1, EVALUE 7.00e-02; EST_HUMAN HIT: AI922911.1, EVALUE 2.00e-64
gcagtcagcgagctcctgcaggtcctgctctgtaagcagaaagctggaggctgcaccccagatcaaggccctcacacctcaaaggttctcacggaggcctcgtctctgccccgcatctccagaat

SEQ ID NO: 25137 - DNA, 173 bp, Homo sapiens
  MAP TO AC017079.2; EXPRESSED IN ADULT LIVER, SIGNAL =   3; EXPRESSED IN HEART, SIGNAL = 2.2; EXPRESSED IN BRAIN, SIGNAL = 2.6; EXPRESSED IN PLACENTA, SIGNAL = 2.1; EXPRESSED IN BONE MARROW, SIGNAL =   5; EXPRESSED IN FETAL LIVER, SIGNAL = 2.6; EXPRESSED IN HELA, SIGNAL = 2.6; EXPRESSED IN LUNG, SIGNAL = 8.2; SWISSPROT HIT: P06925, EVALUE 3.40e-01; NT HIT: AF109905.1, EVALUE 1.60e+00
atgctggtgaccaggtgtggcttccacagtacgcctgcccccagccctgcacctgggccacgtcaagggggccgtgtgttcgcggaggtgtctacctggggcgctgtgtgcacgggggtatctctgggttcttgggccctgaagctgagcagctccagtccctctcccagcaa

SEQ ID NO: 25138 - DNA, 140 bp, Homo sapiens
  MAP TO AL157955.1; EXPRESSED IN BRAIN, SIGNAL = 3.4; EXPRESSED IN BONE MARROW, SIGNAL = 2.6; EXPRESSED IN FETAL LIVER, SIGNAL = 3.5; EXPRESSED IN HEART, SIGNAL = 3.8; EXPRESSED IN LUNG, SIGNAL = 7.2; EXPRESSED IN ADULT LIVER, SIGNAL = 3.3; EXPRESSED IN PLACENTA, SIGNAL = 2.9; EXPRESSED IN HELA, SIGNAL =   4; EST_HUMAN HIT: AW950637.1, EVALUE 3.00e-73; NT HIT: gi4557612, EVALUE 2.00e-73; SWISSPROT HIT: O02791, EVALUE 7.00e-25
tccaatataatcaatgtccaaatcatggtaacgcttggcgcccacaatccaggtcacgacataataggcagtcagctgaagattgacataaggccagtcgaaaccttttcccagccatccagggaatgaccatggcaacc

SEQ ID NO: 25139 - DNA, 252 bp, Homo sapiens
  MAP TO AL049780.2; EXPRESSED IN ADULT LIVER, SIGNAL = 1.6; EXPRESSED IN HEART, SIGNAL = 1.7; EXPRESSED IN LUNG, SIGNAL = 4.4; EXPRESSED IN PLACENTA, SIGNAL = 1.8; EXPRESSED IN BRAIN, SIGNAL = 1.9; EXPRESSED IN BONE MARROW, SIGNAL = 2.3; EXPRESSED IN FETAL LIVER, SIGNAL = 1.7; EST_HUMAN HIT: AW500307.1, EVALUE 0.00e+00; SWISSPROT HIT: Q92834, EVALUE 8.00e-05
atgagggtcagctctatgccttcggatcagattattatggctgcatgggggtggacaaagttgctggccctgaagtgctagaacccatgcagctgaacttcttcctcagcaatccagtggagcaggtctcctgtggagataatcatgtggtggttctgacacgaaacaaggaagtctattcttggggctgtggcgaatatggtaggggtagccttgtctctgtccacttcttcacaggtatacaacctgact

SEQ ID NO: 25140 - DNA, 76 bp, Homo sapiens
  MAP TO AC013329.3; EXPRESSED IN ADULT LIVER, SIGNAL = 1.8; EXPRESSED IN HEART, SIGNAL = 1.8; EXPRESSED IN BRAIN, SIGNAL = 1.5; EXPRESSED IN PLACENTA, SIGNAL = 1.4; EXPRESSED IN FETAL LIVER, SIGNAL = 2.1; EXPRESSED IN HELA, SIGNAL =   2; EST_HUMAN HIT: AW955695.1, EVALUE 8.90e-01; NT HIT: AJ131892.1, EVALUE 6.00e-01
ctacactgttttgcctctctgtgtgtcaactttggccttcttttcttgctcctttgcagcactgctgtctctttga

SEQ ID NO: 25141 - DNA, 124 bp, Homo sapiens
  MAP TO AC019043.2; EXPRESSED IN ADULT LIVER, SIGNAL = 1.6; EXPRESSED IN HEART, SIGNAL =   2; EXPRESSED IN BRAIN, SIGNAL = 1.6; EXPRESSED IN PLACENTA, SIGNAL =   2; EXPRESSED IN FETAL LIVER, SIGNAL = 2.2; EXPRESSED IN HELA, SIGNAL = 2.1; EXPRESSED IN LUNG, SIGNAL = 2.2; SWISSPROT HIT: P81265, EVALUE 5.40e+00; EST_HUMAN HIT: BE350127.1, EVALUE 2.00e-21; NT HIT: AF223391.1, EVALUE 2.00e-20
acagggcaggctcatcaatatcactgtcttccacctccacatcttgtcccacaggaaggtcttcaggggcaatagcacatgtggggccatcatctcctatgagaagaatgccttctgccggcat

SEQ ID NO: 25142 - DNA, 181 bp, Homo sapiens
  MAP TO AC017111.2; EXPRESSED IN PLACENTA, SIGNAL = 1.8; EXPRESSED IN FETAL LIVER, SIGNAL = 2.5; EXPRESSED IN ADULT LIVER, SIGNAL = 2.1; EXPRESSED IN LUNG, SIGNAL =   2; EXPRESSED IN BRAIN, SIGNAL = 2.2; EXPRESSED IN HEART, SIGNAL = 2.3; EXPRESSED IN HELA, SIGNAL =   2; EXPRESSED IN BONE MARROW, SIGNAL = 1.5; SWISSPROT HIT: Q51845, EVALUE 1.70e+00; EST_HUMAN HIT: AA877715.1, EVALUE 6.30e-01; NT HIT: gi7305596, EVALUE 1.70e+00
atgagaatactagaaacgactgactgctcctgtaataatcaaatgagtgaccagggtaaagtttgtgtcacatatgaagtatttaatacatgctgtttcctatctctgccctctgtttgctggcccacctaccaacctgccaccataaatcttgcaatgatgtccacattcgaaactggag

SEQ ID NO: 25143 - DNA, 196 bp, Homo sapiens
  MAP TO AC011469.3; EXPRESSED IN BRAIN, SIGNAL = 2.2; EXPRESSED IN PLACENTA, SIGNAL = 2.1; EXPRESSED IN FETAL LIVER, SIGNAL = 2.9; EXPRESSED IN ADULT LIVER, SIGNAL = 1.9; EXPRESSED IN BONE MARROW, SIGNAL = 2.8; EXPRESSED IN HELA, SIGNAL = 2.6; EXPRESSED IN HEART, SIGNAL = 2.3; EXPRESSED IN LUNG, SIGNAL = 1.9; NT HIT: J05200.1, EVALUE 1.00e-106; SWISSPROT HIT: P21817, EVALUE 1.00e-31; EST_HUMAN HIT: AA775110.1, EVALUE 4.40e-02
gagcctggacagcttcagcgggaagccacggggctcggggccacccgctggcacggcgctgcccatcgagggcgttatcctgagcctgcaggacctcatcatctacttcgagcctccctccgaggacttgcagcacgaggagaagcagagcaagctgcgaagcctgcgcaaccgccagagcctcttccaggaggag

SEQ ID NO: 25144 - DNA, 199 bp, Homo sapiens
  MAP TO AL157789.1; EXPRESSED IN BRAIN, SIGNAL = 1.4; EXPRESSED IN PLACENTA, SIGNAL = 1.8; EXPRESSED IN FETAL LIVER, SIGNAL = 1.9; EXPRESSED IN BONE MARROW, SIGNAL = 1.5; EXPRESSED IN HELA, SIGNAL = 2.3; EXPRESSED IN HEART, SIGNAL = 2.3; SWISSPROT HIT: P34423, EVALUE 6.50e+00; EST_HUMAN HIT: AA714294.1, EVALUE 4.00e-67; NT HIT: AL163246.2, EVALUE 1.00e-63
accataatagctctcaccctaccagtcagggagccaatgtgggggttctgccagctgctaagtatgtctgtgccaattacgcattctggcactggggaaatgaccataggatgagtctggggacccactggacccactgtaagttggacctgagctaaaacaccattaattacctgacctccataagcccctactttaa

SEQ ID NO: 25145 - DNA, 143 bp, Homo sapiens
  MAP TO AC012596.2; EXPRESSED IN PLACENTA, SIGNAL =   3; EXPRESSED IN FETAL LIVER, SIGNAL = 3.9; EXPRESSED IN ADULT LIVER, SIGNAL = 3.1; EXPRESSED IN BRAIN, SIGNAL = 3.2; EXPRESSED IN LUNG, SIGNAL = 2.5; EXPRESSED IN HEART, SIGNAL = 3.3; EXPRESSED IN HELA, SIGNAL = 3.6; EXPRESSED IN BONE MARROW, SIGNAL = 2.6; EST_HUMAN HIT: BE962324.2, EVALUE 1.20e-01; SWISSPROT HIT: Q9VYA0, EVALUE 9.00e+00; NT HIT: AE004471.1, EVALUE 3.20e-01
acaccacatgtgctgtgccctcctacatctgctccacctcccttgccatgaaagcttactcacttcaggtgatctccttcctcgattgtctcaatctgagaaagaagaggcgtgtgaagaagggtcatcaactgtttaaatga

SEQ ID NO: 25146 - DNA, 297 bp, Homo sapiens
  MAP TO AL138806.5; EXPRESSED IN PLACENTA, SIGNAL = 3.1; EXPRESSED IN BRAIN, SIGNAL = 3.1; EXPRESSED IN FETAL LIVER, SIGNAL = 3.5; EXPRESSED IN HELA, SIGNAL = 3.2; EXPRESSED IN ADULT LIVER, SIGNAL = 3.6; EXPRESSED IN BONE MARROW, SIGNAL = 2.8; EXPRESSED IN HEART, SIGNAL = 2.5; EXPRESSED IN LUNG, SIGNAL = 5.7; EST_HUMAN HIT: BF058388.1, EVALUE 5.00e-92; NT HIT: U65590.1, EVALUE 1.00e-94; SWISSPROT HIT: P48498, EVALUE 4.70e-01
gggcgggggtcacaaggtgctcagtaggggagcttctgagccaggagaaggaatttcacaacgttaatcgctcggttaaggtggggcaggaacaaatcacaatggtggaatgtcatcagttaaggcaggaattggccattttcacttcttttgtgattcttcacttgcttcgggccatctggacgtatatacgtgcaggtcacaggggatatgatggcttagcttgggctcagaggcctgacagctgtggcattgtggactttgtcttcgtggtgctcgtggtacgagagagtcagc

SEQ ID NO: 25147 - DNA, 149 bp, Homo sapiens
  MAP TO AL034423.18; EXPRESSED IN BRAIN, SIGNAL = 3.1; EXPRESSED IN PLACENTA, SIGNAL = 1.6; EXPRESSED IN FETAL LIVER, SIGNAL = 2.7; EXPRESSED IN BONE MARROW, SIGNAL = 4.3; EXPRESSED IN HELA, SIGNAL = 1.7; EXPRESSED IN HEART, SIGNAL = 1.8; EXPRESSED IN LUNG, SIGNAL = 4.3; SWISSPROT HIT: P53152, EVALUE 2.00e-13; NT HIT: AY008273.1, EVALUE 9.00e-79; EST_HUMAN HIT: BE549384.1, EVALUE 1.00e-78
gagtaaaagtccctcgcaatttccgactgttggaagaactcgaagaaggccagaaaggagtaggagatggcacagttagctggggtctagaagatgacgaagacatgacacttacaagatggacagggatgataattgggcctccaaga

SEQ ID NO: 25148 - DNA, 109 bp, Homo sapiens
  MAP TO AL133444.1; EXPRESSED IN HEART, SIGNAL = 1.9; EXPRESSED IN BRAIN, SIGNAL = 1.3; EXPRESSED IN ADULT LIVER, SIGNAL = 1.5; EXPRESSED IN FETAL LIVER, SIGNAL = 2.2; EXPRESSED IN HELA, SIGNAL = 2.2; EST_HUMAN HIT: AA195528.1, EVALUE 1.40e+00
ctaaccagtgtcatttgggatcttctgaagtagtacggaaactccacattcttcagaccaacttgcggcatgccagcacattcctctccgatgaggtggaggaatactg

SEQ ID NO: 25149 - DNA, 249 bp, Homo sapiens
  MAP TO AL109925.11; EXPRESSED IN ADULT LIVER, SIGNAL = 3.1; EXPRESSED IN HEART, SIGNAL = 2.4; EXPRESSED IN PLACENTA, SIGNAL = 1.4; EXPRESSED IN FETAL LIVER, SIGNAL = 1.8; EXPRESSED IN LUNG, SIGNAL = 3.6; NT HIT: gi11422524, EVALUE 1.00e-102; SWISSPROT HIT: P36871, EVALUE 1.00e-31; EST_HUMAN HIT: BE897468.1, EVALUE 1.00e-102
ttacacaccggtctgtttctacctgatttcttgaaatgcttccatccactgggtcgctgtattcaaagttatcggccttctccacagtgtaaactttgtcatttgctgagaactgcttccccacaaaggagcgatcaaacatcagggcctccaagtccttcatcattttgtttgcgccctcagcttccacctcctcgtaatcatacctggaagaagtcacgaagttgaggcccacgggctgactgcaga

SEQ ID NO: 25150 - DNA, 135 bp, Homo sapiens
  MAP TO AC011455.3; EXPRESSED IN ADULT LIVER, SIGNAL =   3; EXPRESSED IN BONE MARROW, SIGNAL = 3.1; EXPRESSED IN HEART, SIGNAL = 3.2; EXPRESSED IN LUNG, SIGNAL = 3.7; EXPRESSED IN BRAIN, SIGNAL = 3.8; EXPRESSED IN PLACENTA, SIGNAL = 3.4; EXPRESSED IN FETAL LIVER, SIGNAL = 3.5; EXPRESSED IN HELA, SIGNAL = 3.5; NT HIT: gi8923420, EVALUE 2.00e-70; SWISSPROT HIT: P11930, EVALUE 1.10e+00; EST_HUMAN HIT: AI680404.1, EVALUE 3.00e-70
gacggctcagtgctcgtgccccctgccctccagtcctacctcggcactgatcggatcacagcccctacccacgtgcctctccagtacatcggccccaaccagccccggaagcctgggctgcctggccagcctgct

SEQ ID NO: 25151 - DNA, 85 bp, Homo sapiens
  MAP TO AC018790.3; EXPRESSED IN PLACENTA, SIGNAL = 2.6; EXPRESSED IN BONE MARROW, SIGNAL = 3.7; EXPRESSED IN ADULT LIVER, SIGNAL = 3.7; EXPRESSED IN LUNG, SIGNAL = 2.9; EXPRESSED IN BRAIN, SIGNAL = 2.6; EXPRESSED IN HEART, SIGNAL = 4.1; EXPRESSED IN HELA, SIGNAL =   5; EXPRESSED IN FETAL LIVER, SIGNAL = 4.6; EST_HUMAN HIT: AI671101.1, EVALUE 6.60e-02; NT HIT: AF060669.1, EVALUE 4.40e-02
atgtcatcaagtaacctccccaaagtcgcgtttaacctctgtggcggcatcaacacccacacagctgcggcgccacaaagcagcg

SEQ ID NO: 25152 - DNA, 210 bp, Homo sapiens
  MAP TO AC025488.1; EXPRESSED IN BRAIN, SIGNAL = 2.6; EXPRESSED IN HELA, SIGNAL = 2.1; EXPRESSED IN PLACENTA, SIGNAL = 2.4; EXPRESSED IN LUNG, SIGNAL = 4.6; EXPRESSED IN HEART, SIGNAL =   2; EXPRESSED IN FETAL LIVER, SIGNAL = 6.3; EXPRESSED IN BONE MARROW, SIGNAL = 2.4; EXPRESSED IN ADULT LIVER, SIGNAL =  25; NT HIT: gi4507822, EVALUE 1.00e-102; SWISSPROT HIT: P36537, EVALUE 3.00e-36; EST_HUMAN HIT: AA987868.1, EVALUE 4.00e-92
taaacttccagaaacaaaacagacaacactttgtgatgataaatgtcacagttgccacacaggccagcagaaacccaatcacatccaaagagtggtactggaaccaggtgaggtcacgggctgcaactcgaaggtgtttggctcctttgtggcgcatgacaaattcaatccagaagactgctcgatccaggggcttcactggttgatcac

SEQ ID NO: 25153 - DNA, 175 bp, Homo sapiens
  MAP TO AP001224.1; EXPRESSED IN PLACENTA, SIGNAL = 1.4; EXPRESSED IN BONE MARROW, SIGNAL = 1.7; EXPRESSED IN HELA, SIGNAL = 1.8; EXPRESSED IN HEART, SIGNAL = 1.7; EXPRESSED IN LUNG, SIGNAL = 2.3; EXPRESSED IN ADULT LIVER, SIGNAL = 1.6; EXPRESSED IN BRAIN, SIGNAL = 1.6; EXPRESSED IN FETAL LIVER, SIGNAL = 1.7; SWISSPROT HIT: P90917, EVALUE 3.40e-01; EST_HUMAN HIT: AW841915.1, EVALUE 1.50e-01; NT HIT: gi7212472, EVALUE 6.30e+00
atggggagcctccggaggccgattctgcttggagctggcaaggatggtgtagtagtccactgggactcccacaccaaaatggatatggctggacaacttaaactgcagaaattaatttttatatttctggtggctggaaattgcaagatcaaagtccaacaaggttcactttctg

SEQ ID NO: 25154 - DNA, 115 bp, Homo sapiens
  MAP TO AL133467.1; EXPRESSED IN BRAIN, SIGNAL = 3.4; EXPRESSED IN PLACENTA, SIGNAL =   3; EXPRESSED IN BONE MARROW, SIGNAL = 4.5; EXPRESSED IN LUNG, SIGNAL = 4.3; EXPRESSED IN ADULT LIVER, SIGNAL = 4.4; EXPRESSED IN FETAL LIVER, SIGNAL = 4.3; EXPRESSED IN HELA, SIGNAL = 3.6; EXPRESSED IN HEART, SIGNAL = 2.3; SWISSPROT HIT: P02463, EVALUE 2.40e+00; NT HIT: D50914.1, EVALUE 2.50e-01
ccagccttccaagccctgcacagcgcctccttgtttgtggtctggaatccttccggcaagtgggtgtccagcctcaacgtccccagggcttggggcttgtgaagggctccctctg

SEQ ID NO: 25155 - DNA, 216 bp, Homo sapiens
  MAP TO AC023154.3; EXPRESSED IN BRAIN, SIGNAL = 2.9; EXPRESSED IN PLACENTA, SIGNAL = 2.7; EXPRESSED IN ADULT LIVER, SIGNAL = 2.8; EXPRESSED IN BONE MARROW, SIGNAL = 2.2; EXPRESSED IN FETAL LIVER, SIGNAL = 3.2; EXPRESSED IN HELA, SIGNAL = 3.4; EXPRESSED IN HEART, SIGNAL = 2.9; EXPRESSED IN LUNG, SIGNAL = 2.5; SWISSPROT HIT: P36858, EVALUE 5.40e-01; EST_HUMAN HIT: AI216537.1, EVALUE 7.60e-01; NT HIT: AE004542.1, EVALUE 2.00e+00
tcagaagtttggcttatggtcatctttttcttctctggaggctggcttgaggagctgagccaggccggtggtcaggtggtggaaggctttggaggaaaggtgagctggaagaatttcttcgtaaccagagtttgggtgaagatgaagcaggaggcacaggacgttcactgctccttgattaacaagcaggaacacaatagacatttggtataaatc

SEQ ID NO: 25156 - DNA, 78 bp, Homo sapiens
  MAP TO AL121955.4; EXPRESSED IN FETAL LIVER, SIGNAL = 1.7; EXPRESSED IN HELA, SIGNAL = 1.9; EXPRESSED IN BONE MARROW, SIGNAL = 2.2; EXPRESSED IN HEART, SIGNAL = 1.8; EXPRESSED IN PLACENTA, SIGNAL = 1.4; NT HIT: Y14079.1, EVALUE 2.40e+00
cacttcctgtggaagaagtagttgtaataatcattacaaatatcttgaactgcaaacttagcagcattgttttctttt

SEQ ID NO: 25157 - DNA, 229 bp, Homo sapiens
  MAP TO AL133375.3; EXPRESSED IN BRAIN, SIGNAL = 3.3; EXPRESSED IN PLACENTA, SIGNAL = 9.6; EXPRESSED IN BONE MARROW, SIGNAL = 2.5; EXPRESSED IN HELA, SIGNAL = 3.6; EXPRESSED IN LUNG, SIGNAL = 2.8; EXPRESSED IN FETAL LIVER, SIGNAL = 3.4; EXPRESSED IN HEART, SIGNAL = 4.5; EXPRESSED IN ADULT LIVER, SIGNAL = 3.8; SWISSPROT HIT: O15726, EVALUE 2.00e-03; EST_HUMAN HIT: AI197837.1, EVALUE 2.00e-78
cccagcttctgatcttatcacctctcttagcccctggcttcatcatctcttccttcccatccccctgcccgaggcccgaaccttgcaacttcttgagcacggccacctccatcttgaggacctgcttgggctgctgggctgactccaccttgagggccacattctccctggtcagcaggtccatggcctcgtagatctcaccaaagcccccgcccccgatctttttcag

SEQ ID NO: 25158 - DNA, 119 bp, Homo sapiens
  MAP TO AC016910.2; EXPRESSED IN PLACENTA, SIGNAL = 2.2; EXPRESSED IN BONE MARROW, SIGNAL = 2.3; EXPRESSED IN HEART, SIGNAL =   3; EXPRESSED IN BRAIN, SIGNAL =   5; EXPRESSED IN LUNG, SIGNAL = 2.1; EXPRESSED IN HELA, SIGNAL = 3.1; EXPRESSED IN FETAL LIVER, SIGNAL = 3.8; EXPRESSED IN ADULT LIVER, SIGNAL = 2.8; NT HIT: Z28337.1, EVALUE 8.80e-01; EST_HUMAN HIT: AI954804.1, EVALUE 4.20e+00
gtgatacctataaaactcaggctcttcgtgtcatacgatttcaatacatggcctccattgttgctattgaaggagaagaaagattacgaaaaatcacacagttttctagccagtcctag

SEQ ID NO: 25159 - DNA, 367 bp, Homo sapiens
  MAP TO AP001206.1; EXPRESSED IN ADULT LIVER, SIGNAL = 4.7; EXPRESSED IN BONE MARROW, SIGNAL = 3.3; EXPRESSED IN HEART, SIGNAL = 3.5; EXPRESSED IN LUNG, SIGNAL =   3; EXPRESSED IN PLACENTA, SIGNAL = 4.3; EXPRESSED IN BRAIN, SIGNAL = 4.2; EXPRESSED IN HELA, SIGNAL = 4.1; EXPRESSED IN FETAL LIVER, SIGNAL = 4.2; NT HIT: AJ229043.1, EVALUE 4.00e-12; EST_HUMAN HIT: AW900149.1, EVALUE 6.00e-12
aactgcaagagaataagtctgtgctgtttgaagcctctaagtttgtggtgatttgttacagcagcaataggaaactgatacaactacctctcatcctgcaactgcctttccatgctgacctcacctccacccaactttgctcttccctgacaacctacacattatattcaaatgagggatttgggagtacccagtcctcatcgatcctaaaggacctgtcttgggggttggaggcctcaaggcagcagaatctctgtgccatgaggacaagaaatgattgcaagcaatgggataggatgtgcaggaataatctggagttcaggacagtggtaggggctacagaaaaggattttggaatcattagcac

SEQ ID NO: 25160 - DNA, 140 bp, Homo sapiens
  MAP TO AC023314.3; EXPRESSED IN BRAIN, SIGNAL = 1.8; EXPRESSED IN PLACENTA, SIGNAL = 1.4; EXPRESSED IN ADULT LIVER, SIGNAL = 1.8; EXPRESSED IN BONE MARROW, SIGNAL = 1.8; EXPRESSED IN HELA, SIGNAL = 1.9; EXPRESSED IN FETAL LIVER, SIGNAL = 1.9; EXPRESSED IN HEART, SIGNAL = 1.8; NT HIT: AB028982.1, EVALUE 2.00e-73; SWISSPROT HIT: P32319, EVALUE 7.00e-04; EST_HUMAN HIT: AI929019.1, EVALUE 4.70e-01
cagcaggcagtgcactgggcttcctctcaggtccacatccggagcttgcagcaggcgccaatccctgcctttgttgtaagtgatgtatgtcttcacctggtcgtccaccttcttgtttgccagaaatatccctttgatac

SEQ ID NO: 25161 - DNA, 130 bp, Homo sapiens
  MAP TO AL117356.3; EXPRESSED IN BRAIN, SIGNAL = 1.5; EXPRESSED IN ADULT LIVER, SIGNAL = 1.8; EXPRESSED IN HEART, SIGNAL = 1.8; NT HIT: gi10946753, EVALUE 5.00e-03; SWISSPROT HIT: P02790, EVALUE 5.40e+00; EST_HUMAN HIT: AW057906.1, EVALUE 1.10e-01
aaagccactggcagcaacagcactgcccccagcagtggggctgctatgcattttcacgcatcctgacaaaagggtccaccaccactgccggctgctgttgccatgtgacaaagtgcatcccaatgaagtg

SEQ ID NO: 25162 - DNA, 199 bp, Homo sapiens
  MAP TO AL121975.3; EXPRESSED IN ADULT LIVER, SIGNAL = 2.1; EXPRESSED IN BONE MARROW, SIGNAL = 1.8; EXPRESSED IN HEART, SIGNAL = 2.1; EXPRESSED IN LUNG, SIGNAL = 2.2; EXPRESSED IN PLACENTA, SIGNAL = 1.9; EXPRESSED IN BRAIN, SIGNAL = 2.2; EXPRESSED IN FETAL LIVER, SIGNAL = 2.2; EXPRESSED IN HELA, SIGNAL = 2.4; SWISSPROT HIT: Q59337, EVALUE 1.70e+00; NT HIT: U41069.1, EVALUE 4.70e-01
gtattcagaaagggtgctgctggcaatgtctctactccatgtggcaccaaatgaagtcaccagaggtactgagctggtgaacagattaatctggaggttcttagatggctctgctctcatgtatggcaccgtgacagggatgcttaaaaggctgggctcaggtgggaatgtcaacatgcctctccagcatggcaattac

SEQ ID NO: 25163 - DNA, 108 bp, Homo sapiens
  MAP TO AC012087.10; EXPRESSED IN HELA, SIGNAL = 4.7; EXPRESSED IN HEART, SIGNAL = 4.2; EXPRESSED IN BRAIN, SIGNAL = 4.9; EXPRESSED IN BONE MARROW, SIGNAL = 3.5; EXPRESSED IN LUNG, SIGNAL = 4.9; EXPRESSED IN ADULT LIVER, SIGNAL = 4.4; EXPRESSED IN PLACENTA, SIGNAL =   4; EXPRESSED IN FETAL LIVER, SIGNAL = 4.5; NT HIT: M64990.1, EVALUE 5.90e-02; SWISSPROT HIT: P79274, EVALUE 9.40e+00; EST_HUMAN HIT: BF345600.1, EVALUE 3.00e-54
aaaaaggtggctcagacccaacattttctgactctaaacaagcaacagaaggcagtctaggtaaggtcattcctcctatggctcgaacagaccctctgacaacaccag

SEQ ID NO: 25164 - DNA, 167 bp, Homo sapiens
  MAP TO AC008873.4; EXPRESSED IN HEART, SIGNAL = 7.7; NT HIT: AF003528.1, EVALUE 4.00e-10; EST_HUMAN HIT: BF056899.1, EVALUE 6.00e-04; SWISSPROT HIT: P21414, EVALUE 9.00e-02
cttcagtggccattcaatcattctttcaggccacttgcttcagggtgatgggaaacatgataagaccaatgaattccaagaccatgagcacattagcatatgttatgtgctataaaacaaatttcttggtcagaagcaatgctgtgctgaataccatgaaggtgagt

SEQ ID NO: 25165 - DNA, 84 bp, Homo sapiens
  MAP TO AL133388.2; EXPRESSED IN PLACENTA, SIGNAL = 2.4; EXPRESSED IN BRAIN, SIGNAL = 1.9; EXPRESSED IN HELA, SIGNAL = 2.6; EXPRESSED IN HEART, SIGNAL = 2.3; EXPRESSED IN BONE MARROW, SIGNAL = 1.8; EXPRESSED IN FETAL LIVER, SIGNAL =   3; EXPRESSED IN ADULT LIVER, SIGNAL = 2.2; NT HIT: AJ276675.1, EVALUE 6.80e-01; SWISSPROT HIT: P55067, EVALUE 9.60e+00
atggtcccagacaaaacagctgttcccaacattgctaaaattccagtgtcaccttgtgtgaccacagaatacatagacatgcat

SEQ ID NO: 25166 - DNA, 154 bp, Homo sapiens
  MAP TO AL121997.7; EXPRESSED IN PLACENTA, SIGNAL = 1.6; EXPRESSED IN BONE MARROW, SIGNAL = 2.9; EXPRESSED IN FETAL LIVER, SIGNAL =   2; EXPRESSED IN LUNG, SIGNAL = 2.9; EXPRESSED IN HEART, SIGNAL =   2; EXPRESSED IN BRAIN, SIGNAL =   2; EXPRESSED IN HELA, SIGNAL = 2.2; EXPRESSED IN ADULT LIVER, SIGNAL = 1.8; NT HIT: U84744.1, EVALUE 1.00e-81; SWISSPROT HIT: Q99698, EVALUE 1.00e-13; EST_HUMAN HIT: AW844986.1, EVALUE 1.00e-81
gaccgatgtcaaccggctttgcaatgcagtggtccagagggtggaggccagggaggaagaagaggaggagacgcacatggcaacccttggacagtaccttgtccatggtcgaggatttctattacttaccaagctaaattctataattgatcag

SEQ ID NO: 25167 - DNA, 187 bp, Homo sapiens
  MAP TO AC021881.2; EXPRESSED IN PLACENTA, SIGNAL =  12; EXPRESSED IN BRAIN, SIGNAL =   4; EXPRESSED IN FETAL LIVER, SIGNAL = 3.7; EXPRESSED IN HELA, SIGNAL = 4.4; EXPRESSED IN HEART, SIGNAL = 3.7; EXPRESSED IN LUNG, SIGNAL = 4.6; EXPRESSED IN BONE MARROW, SIGNAL = 3.1; EXPRESSED IN ADULT LIVER, SIGNAL = 3.9; NT HIT: Z95154.1, EVALUE 1.70e+00; EST_HUMAN HIT: BF692493.1, EVALUE 4.00e-08; SWISSPROT HIT: Q05594, EVALUE 5.10e+00
gactgaagtccccattttcttgctggctgtcagccagggacttctctcagtttctttagaccaccttctcacaaagtctccatctataacccagcaacaacatgccaaatcttccttatgcctcaaatttgagctcctcttctgccaccagccacagaaaaccctcggagtttttaaaggatctcac

SEQ ID NO: 25168 - DNA, 151 bp, Homo sapiens
  MAP TO AL078590.27; EXPRESSED IN ADULT LIVER, SIGNAL = 2.4; EXPRESSED IN HELA, SIGNAL = 2.8; EXPRESSED IN HEART, SIGNAL = 2.3; EXPRESSED IN BRAIN, SIGNAL = 2.2; EXPRESSED IN PLACENTA, SIGNAL = 1.9; EXPRESSED IN BONE MARROW, SIGNAL = 1.7; EXPRESSED IN FETAL LIVER, SIGNAL = 2.7; EXPRESSED IN LUNG, SIGNAL =   2; SWISSPROT HIT: P48372, EVALUE 1.80e+00; NT HIT: AF045981.1, EVALUE 3.40e-01; EST_HUMAN HIT: R30779.1, EVALUE 5.10e-01
atcccctaacgactggtcagcattttcatcccagagagtcaaaactgacctttcagtagcagaggttgctttaggtttgtgcaaaataacgttaaggacaaattcccacttttggggcgccaccgccgtccctttcattgcctgcagtttc

SEQ ID NO: 25169 - DNA, 240 bp, Homo sapiens
  MAP TO AF223391.1; EXPRESSED IN PLACENTA, SIGNAL = 2.2; EXPRESSED IN FETAL LIVER, SIGNAL = 3.1; EXPRESSED IN HELA, SIGNAL = 4.1; EXPRESSED IN HEART, SIGNAL = 2.6; EXPRESSED IN BRAIN, SIGNAL = 2.6; EXPRESSED IN LUNG, SIGNAL = 2.5; EXPRESSED IN BONE MARROW, SIGNAL = 2.1; EXPRESSED IN ADULT LIVER, SIGNAL = 2.9; NT HIT: AF223391.1, EVALUE 1.00e-75; EST_HUMAN HIT: AI569143.1, EVALUE 8.60e-01; SWISSPROT HIT: P18246, EVALUE 7.80e+00
aagaagcagtgaatggaccacatgcaattggggagacagaagcagaagaaaaaggggagggtggggtgggggagaaagcaggtgggggctgggaagttctgcctatgtgcattgtcttccaggtgcttttgtaagcctgagccatgcccaaggcagcactggcagctcaagctcaggccaaacacacacgagaagagtatcgtattgtgtttccttttcttcgtgtttttgaaacaggaa

SEQ ID NO: 25170 - DNA, 301 bp, Homo sapiens
  MAP TO AC016025.11; EXPRESSED IN PLACENTA, SIGNAL = 3.2; EXPRESSED IN BRAIN, SIGNAL = 8.7; EXPRESSED IN FETAL LIVER, SIGNAL = 5.2; EXPRESSED IN HELA, SIGNAL = 5.1; EXPRESSED IN ADULT LIVER, SIGNAL = 3.9; EXPRESSED IN LUNG, SIGNAL = 5.6; EXPRESSED IN HEART, SIGNAL =   4; EXPRESSED IN BONE MARROW, SIGNAL = 4.1; NT HIT: gi11526297, EVALUE 0.00e+00; EST_HUMAN HIT: BE897953.1, EVALUE 0.00e+00; SWISSPROT HIT: O25899, EVALUE 1.80e+00
aacttgatgaagaagaggtgaaagcagcaacaactgaacctactgaagtggaggaggtggtccccgcactggaacccacagaaacgctgctgagtgagaaggagataaacgcaagggaagagagccttgtggaagagctgtcccctgccagcgagaagaagcccgtgccgccgtctgagggcaagtctagactgtcccccgccggtgagatgaagcccatgccgctgtctgagggcaagtctatactgctgtttggaggggctgctgctgttgccatcctggcagtggccatcggggtagc

SEQ ID NO: 25171 - DNA, 352 bp, Homo sapiens
  MAP TO AC009144.4; EXPRESSED IN BRAIN, SIGNAL = 1.9; EXPRESSED IN PLACENTA, SIGNAL = 2.2; EXPRESSED IN HELA, SIGNAL = 1.9; EXPRESSED IN LUNG, SIGNAL =   6; EXPRESSED IN ADULT LIVER, SIGNAL = 1.7; EXPRESSED IN BONE MARROW, SIGNAL = 1.6; EXPRESSED IN FETAL LIVER, SIGNAL =   2; EXPRESSED IN HEART, SIGNAL =   2; NT HIT: gi11432141, EVALUE 0.00e+00; SWISSPROT HIT: P29788, EVALUE 4.10e+00; EST_HUMAN HIT: AI459545.1, EVALUE 0.00e+00
tgacagaggccttcctcctcatcaccagggggccgcacatggcagctgtcgcagaagtccaggggcccatccagagcatcatcgatgagtgtgttgaactctttgaggtcatcgtcatggtggccccggttgcacacacacacttcaatgcccgagtcacctgtgaagcggcgatgtctcccaggcgtcttctctttgctgtcgggtgcgccgtgttcagagctgtcatctttcagcagctcctccctacattctgcatctttgtccaggaaggcccccgggtccagctcccccaggccagccacagagccactgggctccatccctggggctttggtggctgctcggtcaa

SEQ ID NO: 25172 - DNA, 77 bp, Homo sapiens
  MAP TO AL158841.1; EXPRESSED IN BRAIN, SIGNAL = 1.3; EXPRESSED IN HELA, SIGNAL = 1.7; EXPRESSED IN ADULT LIVER, SIGNAL = 1.7; EXPRESSED IN FETAL LIVER, SIGNAL = 1.6; EXPRESSED IN HEART, SIGNAL = 1.8; EST_HUMAN HIT: BE143888.1, EVALUE 6.20e-01; NT HIT: AF119117.1, EVALUE 1.30e-01
agagttttgaagattttgcaaacatggaaatccttaaggaaatacaaatcaccaaaaatcttactcagaagagataa

SEQ ID NO: 25173 - DNA, 206 bp, Homo sapiens
  MAP TO AC008458.3; EXPRESSED IN ADULT LIVER, SIGNAL = 1.9; EXPRESSED IN FETAL LIVER, SIGNAL = 1.8; EXPRESSED IN PLACENTA, SIGNAL = 2.2; EXPRESSED IN BONE MARROW, SIGNAL = 1.7; EXPRESSED IN LUNG, SIGNAL = 2.5; EXPRESSED IN BRAIN, SIGNAL = 1.9; EXPRESSED IN HEART, SIGNAL = 1.7; EXPRESSED IN HELA, SIGNAL =   2; EST_HUMAN HIT: BE280479.1, EVALUE 1.00e-112; SWISSPROT HIT: Q60396, EVALUE 5.70e-01; NT HIT: gi11416847, EVALUE 1.00e-112
aactttcagccaacacagctgcctttgctaaaagtgctgccatgttaggtaattctgaggatcatactgctttatctagagctttgtctcagcttgcagaggttgaggagaagatagaccagttacatcaagaacaagcttttgctgacttttatatgttttcagaactacttagtgactacattcgtcttattgctgcagtgaaa

SEQ ID NO: 25174 - DNA, 126 bp, Homo sapiens
  MAP TO AC008649.3; EXPRESSED IN FETAL LIVER, SIGNAL = 3.4; EXPRESSED IN HELA, SIGNAL = 2.7; EXPRESSED IN ADULT LIVER, SIGNAL = 1.6; EXPRESSED IN BRAIN, SIGNAL = 3.7; EXPRESSED IN PLACENTA, SIGNAL = 1.9; EXPRESSED IN LUNG, SIGNAL = 9.8; EXPRESSED IN HEART, SIGNAL = 7.5; EXPRESSED IN BONE MARROW, SIGNAL =   6; NT HIT: AF119846.1, EVALUE 4.00e-65; EST_HUMAN HIT: AA047576.1, EVALUE 6.00e-65
tgtcaaagtcaatcttctccacaatgttcttgggtttaatgctctcttcttggctacagatgaagatctgccccgactcgtcggcactccagccgtatttgctcatccacacctttagctggctgt

SEQ ID NO: 25175 - DNA, 175 bp, Homo sapiens
  MAP TO AC011298.2; EXPRESSED IN BRAIN, SIGNAL = 3.3; EXPRESSED IN HELA, SIGNAL = 1.8; EXPRESSED IN ADULT LIVER, SIGNAL = 1.8; EXPRESSED IN FETAL LIVER, SIGNAL = 1.6; EXPRESSED IN BONE MARROW, SIGNAL = 3.8; EXPRESSED IN HEART, SIGNAL = 1.7; EXPRESSED IN LUNG, SIGNAL = 4.3; EXPRESSED IN PLACENTA, SIGNAL = 1.9; NT HIT: gi4757821, EVALUE 3.00e-94; EST_HUMAN HIT: BF376765.1, EVALUE 5.00e-94; SWISSPROT HIT: Q12756, EVALUE 4.00e-17
ttgaactggcagaagatgtcggcatattcggcagagatgctggacgcctgcaggactgtcacacggaaggtgaaggtgttgcccaggcggaggtggtccagggcagcatccaggggcccatccagggcggctttctcagagctgtctaggaggaggccttctgggggcactgctg

SEQ ID NO: 25176 - DNA, 106 bp, Homo sapiens
  MAP TO AC008557.3; EXPRESSED IN BRAIN, SIGNAL = 2.5; EXPRESSED IN PLACENTA, SIGNAL = 2.4; EXPRESSED IN FETAL LIVER, SIGNAL = 6.5; EXPRESSED IN HELA, SIGNAL = 6.5; EXPRESSED IN BONE MARROW, SIGNAL = 2.1; EXPRESSED IN HEART, SIGNAL = 6.5; EXPRESSED IN ADULT LIVER, SIGNAL = 1.9; SWISSPROT HIT: Q9QYA9, EVALUE 5.50e+00; EST_HUMAN HIT: AL119158.1, EVALUE 6.00e-43; NT HIT: AL163282.2, EVALUE 9.00e-35
ctttgctccagtttccaacaagttcctcatttccatctgagaccacctcagcctggaccttattgttcatatcactatcagcatttttgtcaaagccattcaacat

SEQ ID NO: 25177 - DNA, 124 bp, Homo sapiens
  MAP TO AC015755.4; EXPRESSED IN BRAIN, SIGNAL = 3.7; EXPRESSED IN HELA, SIGNAL = 3.9; EXPRESSED IN ADULT LIVER, SIGNAL = 4.1; EXPRESSED IN BONE MARROW, SIGNAL = 3.1; EXPRESSED IN FETAL LIVER, SIGNAL = 3.8; EXPRESSED IN HEART, SIGNAL = 4.4; EXPRESSED IN LUNG, SIGNAL = 4.3; EXPRESSED IN PLACENTA, SIGNAL = 2.9; SWISSPROT HIT: P07333, EVALUE 1.80e+00; NT HIT: AF012862.1, EVALUE 1.10e+00
tgtcattgctgacattcataacatcagccacttttcaatctttatcaacaacaacattatcaatgctgcacagagactaacagctggcaccttcattggtgcgaaaaccacctcatctcaccaa

SEQ ID NO: 25178 - DNA, 202 bp, Homo sapiens
  MAP TO AC010358.5; EXPRESSED IN ADULT LIVER, SIGNAL = 3.9; EXPRESSED IN FETAL LIVER, SIGNAL = 3.8; EXPRESSED IN PLACENTA, SIGNAL = 3.2; EXPRESSED IN BRAIN, SIGNAL = 3.4; EXPRESSED IN HELA, SIGNAL = 4.5; EXPRESSED IN BONE MARROW, SIGNAL = 2.6; EXPRESSED IN HEART, SIGNAL = 3.8; EXPRESSED IN LUNG, SIGNAL = 4.9; NT HIT: AF247457.2, EVALUE 2.00e-99; EST_HUMAN HIT: AW772260.1, EVALUE 6.00e-97; SWISSPROT HIT: P97479, EVALUE 8.00e-13
ctgatgaggatgcactggttgtcgtggcgcttccacaggcagcggtagcactcgttggcgatggcgaagatgtgcgggggcagctcgcccaggtggcgccggctgtactgctccatggtggcaggctcgtacagcccggcgatgggctggtaggggttcacagaggccaggatggagccgatgtaggtctgcaagcacagag

SEQ ID NO: 25179 - DNA, 150 bp, Homo sapiens
  MAP TO AP001329.1; EXPRESSED IN FETAL LIVER, SIGNAL = 2.1; EXPRESSED IN HEART, SIGNAL = 1.8; EXPRESSED IN PLACENTA, SIGNAL = 1.8; EXPRESSED IN BRAIN, SIGNAL = 1.6; EXPRESSED IN HELA, SIGNAL = 1.8; NT HIT: AJ271735.1, EVALUE 1.00e-10; EST_HUMAN HIT: BF035327.1, EVALUE 3.00e-36
atgcaacatgaagcagcaagtgctgatggagaagctgcagcaagttatgcagaagatctagctaagatcattgatgaaggtgactatacttcaaaacagattttcaatgtggatgaaatcgcctctgattggaagaagatgccatctaga

SEQ ID NO: 25180 - DNA, 158 bp, Homo sapiens
  MAP TO AC022324.2; EXPRESSED IN PLACENTA, SIGNAL = 3.3; EXPRESSED IN BRAIN, SIGNAL = 4.1; EXPRESSED IN BONE MARROW, SIGNAL = 3.3; EXPRESSED IN HELA, SIGNAL = 3.9; EXPRESSED IN LUNG, SIGNAL = 4.1; EXPRESSED IN ADULT LIVER, SIGNAL = 3.8; EXPRESSED IN FETAL LIVER, SIGNAL = 4.1; EXPRESSED IN HEART, SIGNAL = 3.7; NT HIT: AB004293.1, EVALUE 3.60e-01; EST_HUMAN HIT: AW591229.1, EVALUE 5.40e-01; SWISSPROT HIT: Q16650, EVALUE 4.00e+00
cggcctggtcctgcaggcacccaggggctggcactccaccaggccattcctccaaacaaagtcggcctttcatcaatggtcccaagtgcaagattccccttcctacacactctaggcatcaacacatcttcatgccttatccgatcttggttatcaaa

SEQ ID NO: 25181 - DNA, 356 bp, Homo sapiens
  MAP TO AC007845.12; EXPRESSED IN ADULT LIVER, SIGNAL = 1.4; EXPRESSED IN FETAL LIVER, SIGNAL = 1.7; EXPRESSED IN HEART, SIGNAL = 1.8; EXPRESSED IN PLACENTA, SIGNAL = 1.3; EXPRESSED IN BRAIN, SIGNAL = 2.1; EXPRESSED IN LUNG, SIGNAL = 1.7; SWISSPROT HIT: O42184, EVALUE 5.60e+00; NT HIT: AB020626.1, EVALUE 1.00e-101; EST_HUMAN HIT: AW501086.1, EVALUE 2.00e-86
tcaggaccagttaaggctgaagcccttggacagcatggcagcctccaggtccttgtcctcctctctctcccggagccgctgctcctccagcagcgccaccagtgagtctctctgctccaccacctccagcatctcattgagaatctgcttctcttctgacagctcctcctcagtcttaaggtgatcttgaaggagaagaaggcatgaggtgaggggcctggaggtggcacccaccctggcctccatgggtgccttaccccactcaccttccactgccatgcgttcccggagctcctgctgcagtcgactctgccggtcttccagctccagctcccgggcactgaggaggcagggca

SEQ ID NO: 25182 - DNA, 409 bp, Homo sapiens
  MAP TO AC005323.1; EXPRESSED IN BONE MARROW, SIGNAL = 4.2; EXPRESSED IN HEART, SIGNAL =  89; EST_HUMAN HIT: F00884.1, EVALUE 0.00e+00; SWISSPROT HIT: gi127772, EVALUE 5.00e-33; NT HIT: gi7669505, EVALUE 0.00e+00
tgtgaagtgttgattgtaccttggctttggagacagtctccatgttactagcaaggtcatcgatctccatcttcatctcactcttctccttctccagcttctgcttcactcgctgcaggttgtcaatctgctccccaagctcggccacactatctgcatgcttcttcctcagggtggccgccgtggcttcatgctgtagggtggcctcctccaggtccctgcgcattttctggaactcagcctcccgcttcttgttcatctcaatctgggctgaggtggccccaccggcttcttccagcctctcgctgatctcctccagctcccgggagagatcagagcgctgcttctctgctttggcccgggaggcccgctctgcctcgatttcctcctccagctcctcaatgcgggc

SEQ ID NO: 25183 - DNA, 85 bp, Homo sapiens
  MAP TO AC023111.2; EXPRESSED IN BRAIN, SIGNAL = 9.1; EXPRESSED IN FETAL LIVER, SIGNAL = 8.7; EXPRESSED IN ADULT LIVER, SIGNAL = 9.7; EXPRESSED IN BONE MARROW, SIGNAL =   8; EXPRESSED IN HELA, SIGNAL = 8.8; EXPRESSED IN LUNG, SIGNAL =  16; EXPRESSED IN HEART, SIGNAL = 7.9; EXPRESSED IN PLACENTA, SIGNAL = 6.8; EST_HUMAN HIT: T24706.1, EVALUE 2.60e-01; SWISSPROT HIT: P54147, EVALUE 7.30e+00; NT HIT: gi7106300, EVALUE 1.70e-01
cctttgatgacttcccagatggttccagagaagatggcagtgaatgtggagactctgagaagaattatcccatagacataagaaa

SEQ ID NO: 25184 - DNA, 84 bp, Homo sapiens
  MAP TO AL157830.2; EXPRESSED IN FETAL LIVER, SIGNAL = 2.4; EXPRESSED IN HEART, SIGNAL = 2.1; EXPRESSED IN BRAIN, SIGNAL = 1.5; EXPRESSED IN PLACENTA, SIGNAL = 1.6; EXPRESSED IN BONE MARROW, SIGNAL = 1.5; EXPRESSED IN ADULT LIVER, SIGNAL = 1.7; EXPRESSED IN HELA, SIGNAL = 2.6; NT HIT: AL163202.2, EVALUE 1.00e-08; EST_HUMAN HIT: AA035369.1, EVALUE 2.00e-11
attcagggtttacatgttcaggattgttacctggatatattccgtgatgctgaggttttggggatgtatgatcccatcctccag

SEQ ID NO: 25185 - DNA, 84 bp, Homo sapiens
  MAP TO AC008583.4; EXPRESSED IN PLACENTA, SIGNAL = 1.9; EXPRESSED IN BRAIN, SIGNAL = 2.4; EXPRESSED IN BONE MARROW, SIGNAL = 1.8; EXPRESSED IN FETAL LIVER, SIGNAL = 2.2; EXPRESSED IN HELA, SIGNAL = 2.4; EXPRESSED IN HEART, SIGNAL = 2.6; EXPRESSED IN ADULT LIVER, SIGNAL = 2.6; EST_HUMAN HIT: AI309636.1, EVALUE 1.00e+00; NT HIT: AF038939.1, EVALUE 6.80e-01
atggttaagagagcgcatcctgaagctaaagtgcctgtttccaaaggaggcactgagaaagactggcaatgtggccttgggcaa

SEQ ID NO: 25186 - DNA, 81 bp, Homo sapiens
  MAP TO AL121857.2; EXPRESSED IN BRAIN, SIGNAL = 4.3; EXPRESSED IN ADULT LIVER, SIGNAL = 3.9; EXPRESSED IN BONE MARROW, SIGNAL = 3.8; EXPRESSED IN HEART, SIGNAL = 7.6; EXPRESSED IN PLACENTA, SIGNAL = 3.6; EXPRESSED IN LUNG, SIGNAL = 3.3; EXPRESSED IN HELA, SIGNAL = 8.9; EXPRESSED IN FETAL LIVER, SIGNAL =   8; EST_HUMAN HIT: AW771701.1, EVALUE 2.40e-01; NT HIT: AF106064.1, EVALUE 1.60e-01
agtcttgtaggggagattaataacaacagtaaccaacccatttatggtgtgcttaattgtgccaaacagcaggctaagcat

SEQ ID NO: 25187 - DNA, 97 bp, Homo sapiens
  MAP TO AC011449.3; EXPRESSED IN BONE MARROW, SIGNAL = 2.5; EXPRESSED IN FETAL LIVER, SIGNAL = 3.4; EXPRESSED IN BRAIN, SIGNAL = 3.1; EXPRESSED IN PLACENTA, SIGNAL = 3.1; EXPRESSED IN ADULT LIVER, SIGNAL = 3.7; EXPRESSED IN HELA, SIGNAL = 3.3; EXPRESSED IN HEART, SIGNAL = 3.2; EXPRESSED IN LUNG, SIGNAL = 3.3; EST_HUMAN HIT: BE393813.1, EVALUE 9.00e-48; NT HIT: M28624.1, EVALUE 5.20e-02
atgaaacaagcaatgaaagaactacagttaaaacttaagggaatggaaaaagagaagagaaagctcaaagaggctgagaaggcgtcgtcacaggaag

SEQ ID NO: 25188 - DNA, 109 bp, Homo sapiens
  MAP TO AL157789.1; EXPRESSED IN BRAIN, SIGNAL = 2.7; EXPRESSED IN PLACENTA, SIGNAL = 2.8; EXPRESSED IN FETAL LIVER, SIGNAL = 3.1; EXPRESSED IN BONE MARROW, SIGNAL = 3.4; EXPRESSED IN HELA, SIGNAL =   3; EXPRESSED IN LUNG, SIGNAL = 4.3; EXPRESSED IN ADULT LIVER, SIGNAL = 2.8; EXPRESSED IN HEART, SIGNAL = 3.2; SWISSPROT HIT: P40602, EVALUE 1.10e+00; EST_HUMAN HIT: BE264455.1, EVALUE 8.80e-02
ggatcccttggtgcttgtgaccttcacatggggaggagtcatatttgtctcttacgcttctccatggctgacagtgatcaaccggccagggtggccaggaccaacgctg

SEQ ID NO: 25189 - DNA, 299 bp, Homo sapiens
  MAP TO AC024007.2; EXPRESSED IN PLACENTA, SIGNAL = 2.3; EXPRESSED IN BRAIN, SIGNAL =   2; EXPRESSED IN HELA, SIGNAL = 2.2; EXPRESSED IN ADULT LIVER, SIGNAL = 1.6; EXPRESSED IN LUNG, SIGNAL = 1.8; EXPRESSED IN FETAL LIVER, SIGNAL = 1.9; EXPRESSED IN HEART, SIGNAL = 1.9; NT HIT: AF224669.1, EVALUE 5.00e-85; EST_HUMAN HIT: AW340174.1, EVALUE 1.00e-68; SWISSPROT HIT: P32542, EVALUE 5.40e+00
ctccattgtaaggtagtagactgatttcatatggataatctgggtcagtcatgccagcaaacactgtaattcccttcttagccttttgatttaaaagtaggaggagcccaaagtgtccaggtggcaatcttaacttgcagtttaatggaatcattgtgtctcctggtggcggcatttctccccctggaacaaagacctctaggccaccagaacgtagtgtcacaggaacaggaagcaaaaattttgctagtggatcactaggggtgatggtgagtggtgccacttccacttccaccgct

SEQ ID NO: 25190 - DNA, 200 bp, Homo sapiens
  MAP TO AC016886.3; EXPRESSED IN BRAIN, SIGNAL = 1.9; EXPRESSED IN PLACENTA, SIGNAL = 1.5; EXPRESSED IN BONE MARROW, SIGNAL = 1.7; EXPRESSED IN HELA, SIGNAL =   2; EXPRESSED IN ADULT LIVER, SIGNAL = 1.6; EXPRESSED IN FETAL LIVER, SIGNAL =   2; EXPRESSED IN HEART, SIGNAL =   2; EXPRESSED IN LUNG, SIGNAL = 1.8; SWISSPROT HIT: Q61137, EVALUE 7.50e-01; NT HIT: AF105037.1, EVALUE 1.90e+00; EST_HUMAN HIT: AV763842.1, EVALUE 7.00e-01
aggatcccactccacctgcactgcaccaagaacccacaatggggcctcagcaggagtccacggaggaggacgcccactgcctgcacctcaaccagagacttttcaaggtgcaaaaaaatttgaaacgtgtgtgttacacccgcaactactacaagaaaatggcgcagaaccactacaagaagacctggcccaggaattga

SEQ ID NO: 25191 - DNA, 153 bp, Homo sapiens
  MAP TO AC013290.3; EXPRESSED IN BRAIN, SIGNAL = 3.6; EXPRESSED IN PLACENTA, SIGNAL = 3.3; EXPRESSED IN BONE MARROW, SIGNAL = 2.5; EXPRESSED IN FETAL LIVER, SIGNAL = 3.5; EXPRESSED IN HELA, SIGNAL = 4.1; EXPRESSED IN ADULT LIVER, SIGNAL = 3.3; EXPRESSED IN HEART, SIGNAL = 3.4; EXPRESSED IN LUNG, SIGNAL = 3.6; NT HIT: AL163208.2, EVALUE 8.80e-02; SWISSPROT HIT: Q60925, EVALUE 5.20e+00; EST_HUMAN HIT: BF691107.1, EVALUE 3.30e-02
gaactcaaggttgatcaccatgttccaagagaggcaaaggacaaagaacactggactgagcattataaagatgatggggccagagatctgagaataatttcatttgcagatattgaaagggacttttcagatagcatggccctctatgatctc

SEQ ID NO: 25192 - DNA, 198 bp, Homo sapiens
  MAP TO AC016025.11; EXPRESSED IN BRAIN, SIGNAL = 2.8; EXPRESSED IN ADULT LIVER, SIGNAL = 2.8; EXPRESSED IN HELA, SIGNAL = 2.8; EXPRESSED IN HEART, SIGNAL = 2.6; EXPRESSED IN PLACENTA, SIGNAL = 1.9; EXPRESSED IN LUNG, SIGNAL =  13; EXPRESSED IN FETAL LIVER, SIGNAL = 3.4; EXPRESSED IN BONE MARROW, SIGNAL = 3.7; NT HIT: gi11526299, EVALUE 2.00e-96; EST_HUMAN HIT: AI479829.1, EVALUE 9.00e-99; SWISSPROT HIT: P55957, EVALUE 1.00e-21
ggttctggttaataaagttcactgttgtgtgaaagacatcacggagcaaggacggcgtgtgactggccaccttcttggccagcagcagggccagcaccagcatggtcttctccttctccatgtctctagggtaggcctgcagcagctgctccagggcagtggccaggtccctgttccggtcctgcacagaggggcaca

SEQ ID NO: 25193 - DNA, 270 bp, Homo sapiens
  MAP TO AL121965.19; EXPRESSED IN PLACENTA, SIGNAL = 1.9; EXPRESSED IN BRAIN, SIGNAL = 1.8; EXPRESSED IN ADULT LIVER, SIGNAL =   2; EXPRESSED IN BONE MARROW, SIGNAL = 1.5; EXPRESSED IN HELA, SIGNAL = 1.8; EXPRESSED IN FETAL LIVER, SIGNAL = 1.7; EXPRESSED IN HEART, SIGNAL = 1.7; NT HIT: AJ223948.1, EVALUE 1.00e-113; EST_HUMAN HIT: AW500519.1, EVALUE 1.00e-113; SWISSPROT HIT: P53327, EVALUE 7.00e-11
aatgcagctagaattgtccgtgctctttttgaaattgctctgaggaaacgttggcctaccatgacctacaggctcctgaatcttagtaaagtcattgacaagaggctttggggttgggctagccctttgagacaattttcaatcctaccaccacacatcctaacaagattagaagaaaaaaagcttactgtggataagctgaaagacatgaggaaagatgaaataggtaagaaggaagcaaatatgtttgaatgtattgttttgtgcaaa

SEQ ID NO: 25194 - DNA, 189 bp, Homo sapiens
  MAP TO AC011467.3; EXPRESSED IN BRAIN, SIGNAL = 3.9; EXPRESSED IN ADULT LIVER, SIGNAL = 2.1; EXPRESSED IN HELA, SIGNAL = 6.1; EXPRESSED IN BONE MARROW, SIGNAL =   2; EXPRESSED IN PLACENTA, SIGNAL =   3; EXPRESSED IN LUNG, SIGNAL = 3.3; EXPRESSED IN HEART, SIGNAL = 3.3; EXPRESSED IN FETAL LIVER, SIGNAL = 3.5; NT HIT: gi9635487, EVALUE 3.00e-76; SWISSPROT HIT: O75593, EVALUE 5.00e+00; EST_HUMAN HIT: N66951.1, EVALUE 2.00e-78
gctgctcctcgccaggccaagctaggtcccaattcttcctcagcctccgctcctccaccctataatcttttcatcacctcccctcctcacagctggtccggcttacagcttcattccgtgactagccctcccccacctgcccagcaatttactcttaaaaaggtggctggagcgaaaggcatagtcaag

SEQ ID NO: 25195 - DNA, 201 bp, Homo sapiens
  MAP TO AC008417.3; EXPRESSED IN BONE MARROW, SIGNAL = 1.7; EXPRESSED IN FETAL LIVER, SIGNAL =   2; EXPRESSED IN BRAIN, SIGNAL = 1.8; EXPRESSED IN PLACENTA, SIGNAL = 1.6; EXPRESSED IN ADULT LIVER, SIGNAL = 1.7; EXPRESSED IN HELA, SIGNAL =   2; EXPRESSED IN HEART, SIGNAL = 1.9; NT HIT: gi4758697, EVALUE 1.00e-109; SWISSPROT HIT: Q16706, EVALUE 1.00e-32; EST_HUMAN HIT: AU121370.1, EVALUE 1.00e-109
ataccgccattgggactgaaagtgtataagattttggaatcagcaagttcaaattcacatttagctgattatgtcttgtataagaataaagtagaagatagcggaattttcaccataaagaatatgataaatactgaagaaggtataacactagagaactcctttgttttacttcggtttgatcaaactggacttatgaag

SEQ ID NO: 25196 - DNA, 283 bp, Homo sapiens
  MAP TO AC018388.4; EXPRESSED IN BRAIN, SIGNAL = 3.7; EXPRESSED IN HELA, SIGNAL =  10; EXPRESSED IN HEART, SIGNAL = 6.4; EXPRESSED IN PLACENTA, SIGNAL = 8.7; EXPRESSED IN FETAL LIVER, SIGNAL =  15; EXPRESSED IN BONE MARROW, SIGNAL =  19; EXPRESSED IN ADULT LIVER, SIGNAL = 2.2; EXPRESSED IN LUNG, SIGNAL =  17; SWISSPROT HIT: P80272, EVALUE 3.00e-05; NT HIT: M12623.1, EVALUE 1.00e-119; EST_HUMAN HIT: BE296387.1, EVALUE 1.00e-120
atcctgccgccaccatgcccaagagaaaggctgaaggggatgctaaaggagataaagccaaggtgaaggacgaatcacacagaagatccatgaggttgtcagctaaacctgctcctccaaagccagaacccaagcgtaaaaaggcccctgcaaagaagggagagaaagtacccaaagggaaaaagggaaaagctgatgctggcaaggaggggaatagccctgtagaaaatggagatgccaaaacagaccaggcacataaaactgaaggtgctggagacgccaa

SEQ ID NO: 25197 - DNA, 299 bp, Homo sapiens
  MAP TO AC022325.3; EXPRESSED IN PLACENTA, SIGNAL = 3.1; EXPRESSED IN BRAIN, SIGNAL = 4.8; EXPRESSED IN HELA, SIGNAL = 4.7; EXPRESSED IN ADULT LIVER, SIGNAL = 4.5; EXPRESSED IN BONE MARROW, SIGNAL = 3.4; EXPRESSED IN FETAL LIVER, SIGNAL = 3.9; EXPRESSED IN HEART, SIGNAL = 3.9; EXPRESSED IN LUNG, SIGNAL =   4; NT HIT: AB032969.1, EVALUE 9.00e-19; SWISSPROT HIT: O13798, EVALUE 6.30e-01; EST_HUMAN HIT: BF057040.1, EVALUE 1.00e-18
tcactttcttacaggcccaggaacctcaacttttttgaggtcctcaagaagagaagggtttacccatttcatgcaggtatctgcagtcgtaggtgaatccttggctgggcttgagaggcctttgaaggtaaagacagattccttgtgagaggttccagcaaagccaatataggagggcctatatggacaatgattcttgctaaactttgtgtgggtaatcaggccaaatatagtgggaatgagcgtattttgcagatagatttgtcttgctatgacttgcttttggtaaaagttgggaa

SEQ ID NO: 25198 - DNA, 192 bp, Homo sapiens
  MAP TO AC024581.1; EXPRESSED IN BRAIN, SIGNAL =   2; EXPRESSED IN HEART, SIGNAL = 2.2; EXPRESSED IN ADULT LIVER, SIGNAL = 1.9; EXPRESSED IN BONE MARROW, SIGNAL = 2.5; EXPRESSED IN FETAL LIVER, SIGNAL = 2.1; EXPRESSED IN HELA, SIGNAL = 2.5; EXPRESSED IN PLACENTA, SIGNAL = 1.5; SWISSPROT HIT: Q10309, EVALUE 6.60e+00
atgaaaaatgggtattatgtcccttttaaaaaggagagacccaagattaaggaatttgcccaggaccacccagccaataaggaaaagagcaggaaattgaactggatctgtctgagactaaagcttgtatcctctcaagcacacctggctggcgatgcctgggacgtcatggtctttgaccttttgatatag

SEQ ID NO: 25199 - DNA, 113 bp, Homo sapiens
  MAP TO AL160006.1; EXPRESSED IN PLACENTA, SIGNAL =   5; EXPRESSED IN FETAL LIVER, SIGNAL = 6.1; EXPRESSED IN HELA, SIGNAL = 6.9; EXPRESSED IN HEART, SIGNAL = 5.6; EXPRESSED IN BRAIN, SIGNAL = 4.1; EXPRESSED IN LUNG, SIGNAL = 3.8; EXPRESSED IN BONE MARROW, SIGNAL = 4.5; EXPRESSED IN ADULT LIVER, SIGNAL = 5.8; NT HIT: AL163206.2, EVALUE 4.00e-03; EST_HUMAN HIT: BE144818.1, EVALUE 2.30e-02; SWISSPROT HIT: P87253, EVALUE 3.20e+00
ttaggctgctgccgtgaagatattgaccgggttgtgttctcctctggaggcttggcaggggaggaattggcgtccaaattcctgtggttggcagaattgattttcttgcagtt

SEQ ID NO: 25200 - DNA, 127 bp, Homo sapiens; identical to SEQ ID NO: 23863
  MAP TO AP001331.1; EXPRESSED IN BRAIN, SIGNAL = 2.2; EXPRESSED IN PLACENTA, SIGNAL = 1.9; EXPRESSED IN BONE MARROW, SIGNAL = 2.4; EXPRESSED IN HELA, SIGNAL = 2.8; EXPRESSED IN LUNG, SIGNAL = 3.9; EXPRESSED IN ADULT LIVER, SIGNAL = 2.7; EXPRESSED IN HEART, SIGNAL = 2.2; EXPRESSED IN FETAL LIVER, SIGNAL = 2.8; EST_HUMAN HIT: BF698707.1, EVALUE 1.00e-65; NT HIT: U54562.1, EVALUE 1.00e-65; SWISSPROT HIT: Q64252, EVALUE 6.00e-18

SEQ ID NO: 25201 - DNA, 127 bp, Homo sapiens
  MAP TO AC018720.2; EXPRESSED IN BRAIN, SIGNAL = 2.3; EXPRESSED IN FETAL LIVER, SIGNAL = 2.3; EXPRESSED IN HELA, SIGNAL = 2.3; EXPRESSED IN HEART, SIGNAL =   2; EXPRESSED IN PLACENTA, SIGNAL =   2; EXPRESSED IN LUNG, SIGNAL = 4.4; EXPRESSED IN BONE MARROW, SIGNAL = 2.1; EXPRESSED IN ADULT LIVER, SIGNAL = 1.8; NT HIT: gi11419251, EVALUE 6.00e-61; SWISSPROT HIT: Q99676, EVALUE 9.00e-11; EST_HUMAN HIT: AW134709.1, EVALUE 4.00e-63
ccaaggaaactagatggctgtagttctccaacatcacatccccgtatgttatcttctcatcagggtccagttgccgccactcctcctgggtgaaatccacagccacatctttgaatgacactggccc

SEQ ID NO: 25202 - DNA, 325 bp, Homo sapiens
  MAP TO AC007686.5; EXPRESSED IN BRAIN, SIGNAL = 6.2; EXPRESSED IN ADULT LIVER, SIGNAL = 5.6; EXPRESSED IN HELA, SIGNAL =  18; EXPRESSED IN BONE MARROW, SIGNAL =  13; EXPRESSED IN PLACENTA, SIGNAL =  10; EXPRESSED IN LUNG, SIGNAL =  39; EXPRESSED IN HEART, SIGNAL =  19; EXPRESSED IN FETAL LIVER, SIGNAL =  15; NT HIT: gi4506668, EVALUE 1.00e-92; EST_HUMAN HIT: AV692051.1, EVALUE 4.00e-93; SWISSPROT HIT: P19944, EVALUE 3.00e-24
atggcctccatctccgagctcgcctgcatctactcagccctcattctgcacgacaatgaggtgactgtcacagagtataagatcaaggccctcattaaagcagctggtgtaaatgttgaaccttttcggcctggcttgtttgcaaaggccccggccaatgtcaacattaggagcctcatctgcaatgtaggggctggaggacctgctccagcagctggtgctgcaccagcaggaggtgatccacccgcatcaacctccctaagtgctgggataataggcatgagccaccgtggtcagccaagaatgcgcatactctctccattct

SEQ ID NO: 25203 - DNA, 134 bp, Homo sapiens
  MAP TO AC010582.6; EXPRESSED IN BRAIN, SIGNAL = 1.6; EXPRESSED IN PLACENTA, SIGNAL = 3.6; EXPRESSED IN HELA, SIGNAL = 2.2; EXPRESSED IN BONE MARROW, SIGNAL = 1.5; EXPRESSED IN FETAL LIVER, SIGNAL = 1.9; EXPRESSED IN HEART, SIGNAL = 1.7; SWISSPROT HIT: P11675, EVALUE 1.10e+00; NT HIT: AL163246.2, EVALUE 6.00e-18; EST_HUMAN HIT: AA601143.1, EVALUE 1.00e-13
ggctctgcaagagatccatactgctgtgcaagctgctttgccactggggccatatgatccagccgatccagtattgcctgaagtctcagtggcagacaggaatgctgatggagtctttggaaggctcctgtagg

SEQ ID NO: 25204 - DNA, 213 bp, Homo sapiens
  MAP TO AL136980.2; EXPRESSED IN ADULT LIVER, SIGNAL = 3.2; EXPRESSED IN BONE MARROW, SIGNAL = 2.6; EXPRESSED IN LUNG, SIGNAL = 2.7; EXPRESSED IN HEART, SIGNAL = 3.2; EXPRESSED IN PLACENTA, SIGNAL = 2.6; EXPRESSED IN BRAIN, SIGNAL = 2.8; EXPRESSED IN HELA, SIGNAL = 3.8; EXPRESSED IN FETAL LIVER, SIGNAL = 3.6; EST_HUMAN HIT: AI367140.1, EVALUE 1.00e-116; NT HIT: AF017449.1, EVALUE 2.00e+00; SWISSPROT HIT: Q09216, EVALUE 8.00e-04
tcttatgtttgggctgcaaaaattttttgcccaggtacaaaacaacacccattaccaccatgtagtttatgattgagccaatacgagaggggtaggcaatgacaaacaggcccagcacatcaaagaagaccatgtttccatgtcgatacttagaagcagcagccagcatatcagatgtagctagatgcttaagaactgctaaaatgttgtcac

SEQ ID NO: 25205 - DNA, 228 bp, Homo sapiens
  MAP TO AC018843.2; EXPRESSED IN FETAL LIVER, SIGNAL =   4; EXPRESSED IN HEART, SIGNAL = 5.1; EXPRESSED IN BRAIN, SIGNAL = 3.9; EXPRESSED IN PLACENTA, SIGNAL = 3.3; EXPRESSED IN ADULT LIVER, SIGNAL = 3.7; EXPRESSED IN BONE MARROW, SIGNAL =   3; EXPRESSED IN HELA, SIGNAL = 4.5; EXPRESSED IN LUNG, SIGNAL = 2.9; SWISSPROT HIT: P23692, EVALUE 4.10e-02; EST_HUMAN HIT: AV733927.1, EVALUE 2.00e-47; NT HIT: AB014567.1, EVALUE 1.00e-125
ctagctgagctccattgagtctgtgctgggggctgaagcggaatccttctggatgctttcaaagagggcagcaagttcagggttggatctgatttgggaagagaagtcggccatgatggggcttttccccacctcggggatggtcagcagggcagccactgccctcattgcagagcgcttcagttcatcttgcttttcaaactcctgcttcacagaaccagctttgac

SEQ ID NO: 25206 - DNA, 110 bp, Homo sapiens
  MAP TO AC018552.2; EXPRESSED IN BRAIN, SIGNAL = 2.7; EXPRESSED IN PLACENTA, SIGNAL = 2.3; EXPRESSED IN HELA, SIGNAL = 2.8; EXPRESSED IN ADULT LIVER, SIGNAL =   3; EXPRESSED IN BONE MARROW, SIGNAL =   2; EXPRESSED IN FETAL LIVER, SIGNAL = 2.9; EXPRESSED IN HEART, SIGNAL = 2.6; EXPRESSED IN LUNG, SIGNAL = 2.2; SWISSPROT HIT: P11369, EVALUE 4.80e-01; NT HIT: AF224669.1, EVALUE 4.00e-03; EST_HUMAN HIT: AW073078.1, EVALUE 9.00e-05
ggatacccaactgttctagcaccatttattgaaaagtcaactcttccttcaatattcagaaatgtcacctctgtcataaaccaggcagccacatgtgtattagactgctg

SEQ ID NO: 25207 - DNA, 249 bp, Homo sapiens
  MAP TO AC008056.6; EXPRESSED IN BRAIN, SIGNAL =   4; EXPRESSED IN PLACENTA, SIGNAL = 3.8; EXPRESSED IN ADULT LIVER, SIGNAL = 3.1; EXPRESSED IN BONE MARROW, SIGNAL = 2.8; EXPRESSED IN FETAL LIVER, SIGNAL = 3.6; EXPRESSED IN HELA, SIGNAL = 4.3; EXPRESSED IN HEART, SIGNAL = 3.9; EXPRESSED IN LUNG, SIGNAL = 3.7; NT HIT: gi4758827, EVALUE 0.00e+00; EST_HUMAN HIT: AW894889.1, EVALUE 7.00e-91; SWISSPROT HIT: Q17127, EVALUE 1.70e+00
gacgcctcttccaaggccaactctctgggctctattatgatggtttgaaagtactgaacatggcggctgagaacaaccccaatattaaaatcaatggaagtgttcggctggttggagaagtcccatcaattttgggaacaacacagacgacctccatgccaccagaaatgtctactactgtcatggaaaccactactacaatggcgactaccacaacccgtaagaatcgctctacagccagcattcagg

SEQ ID NO: 25208 - DNA, 548 bp, Homo sapiens
  MAP TO AC008651.4; EXPRESSED IN BONE MARROW, SIGNAL = 3.4; EXPRESSED IN LUNG, SIGNAL =  18; EXPRESSED IN ADULT LIVER, SIGNAL = 3.3; EXPRESSED IN BRAIN, SIGNAL = 2.7; EXPRESSED IN PLACENTA, SIGNAL =  24; EXPRESSED IN FETAL LIVER, SIGNAL = 8.7; EXPRESSED IN HELA, SIGNAL =  20; EXPRESSED IN HEART, SIGNAL = 4.5; EST_HUMAN HIT: BF206561.1, EVALUE 0.00e+00; SWISSPROT HIT: P05787, EVALUE 3.00e-59; NT HIT: gi4504918, EVALUE 0.00e+00
cttgttcttgtaagcttcatccatatccttcttgatgaggacaaattcattctccatctctgtatgctttttgatatcatcctcgtacttgttcttgaagtcctccaccagcccctgcatgttatcaagttccacctccagcttcagcttctcttggcccagagtgtacagctgccagcagaagtttgttgatgtagctctcgaacatgttgtccatgttgctctgagccgtcttctgccgctgcaggggcctccacttggtctccagcatcttgttctgctgctgcaggaactgtaccttgtcaatgaaggaggcaaacttgttgttgagggtcttgatctgctccttcacctgggtgcacacagcttggatgttggggtccacctccaggttaagggggctcagcaggctctggttgaccgtgactggggtgatgcctcccctaccactggccctgccaaagtctccacccaggctaccccggaaactgctgctgcccattcgggagaagctcgaggagctgatgcaggcactgggcccacacatg

SEQ ID NO: 25209 - DNA, 169 bp, Homo sapiens; identical to SEQ ID NO: 25126
  MAP TO AC020912.3; EXPRESSED IN BRAIN, SIGNAL =   2; EXPRESSED IN HELA, SIGNAL = 2.1; EXPRESSED IN HEART, SIGNAL = 1.8; EXPRESSED IN PLACENTA, SIGNAL = 1.4; EXPRESSED IN FETAL LIVER, SIGNAL =   2; EXPRESSED IN BONE MARROW, SIGNAL = 1.6; EXPRESSED IN ADULT LIVER, SIGNAL =   2; EXPRESSED IN LUNG, SIGNAL = 2.4; EST_HUMAN HIT: BF700092.1, EVALUE 5.80e-01; SWISSPROT HIT: O15266, EVALUE 6.70e+00; NT HIT: gi11419715, EVALUE 6.10e+00

SEQ ID NO: 25210 - DNA, 264 bp, Homo sapiens
  MAP TO AL136418.1; EXPRESSED IN PLACENTA, SIGNAL =  12; EXPRESSED IN BONE MARROW, SIGNAL =  13; EXPRESSED IN LUNG, SIGNAL = 8.8; EXPRESSED IN HEART, SIGNAL =  16; EXPRESSED IN BRAIN, SIGNAL =  12; EXPRESSED IN HELA, SIGNAL =  21; EXPRESSED IN FETAL LIVER, SIGNAL =  20; EXPRESSED IN ADULT LIVER, SIGNAL =  14; EST_HUMAN HIT: AW207734.1, EVALUE 0.00e+00; SWISSPROT HIT: P00847, EVALUE 4.80e-01
aaagccgaagtgaattcttagagaagttacaaagagctcgaggccaagtaaagccatctacttcaagtcaacctatactgtcagcaccaggacccactaaacttactgtaggaaattggtcactgacatgtttgaaagaaggagaaattgctattcataattcagatggtcagcaagctacaatattgaaagaagatttacctggttttgtatttgaatctaatagaggaaccaaacattcatttactgcagaaacttccctgg

SEQ ID NO: 25211 - DNA, 246 bp, Homo sapiens
  MAP TO AC008481.4; EXPRESSED IN BONE MARROW, SIGNAL = 5.1; EXPRESSED IN LUNG, SIGNAL = 7.9; EXPRESSED IN HEART, SIGNAL = 3.8; SWISSPROT HIT: P51911, EVALUE 2.00e-36; EST_HUMAN HIT: AW604975.1, EVALUE 0.00e+00; NT HIT: S80560.1, EVALUE 0.00e+00
ctaggcggaattgtagtagttgtgtgcgtggtggttgtgggcgggctcacccagctctgggtactcgggagtcagacagtacttggggtcgtagacctggcgtggcagcccatacaccgtcatgccccgctgcgaggcgcccttgttgctgcccatctgcaggctgacattgagcgtgtcgcagtgctccatgcccagccccggctcgaagatctgccgcttggtccctggcgcagtcatgccagc

SEQ ID NO: 25212 - DNA, 229 bp, Homo sapiens
  MAP TO AL121933.9; EXPRESSED IN PLACENTA, SIGNAL = 2.6; EXPRESSED IN BRAIN, SIGNAL = 2.9; EXPRESSED IN BONE MARROW, SIGNAL =   2; EXPRESSED IN FETAL LIVER, SIGNAL = 2.2; EXPRESSED IN HELA, SIGNAL = 2.6; EXPRESSED IN ADULT LIVER, SIGNAL = 2.5; EXPRESSED IN HEART, SIGNAL = 2.1; EST_HUMAN HIT: AA777084.1, EVALUE 8.00e-04; NT HIT: Z73018.1, EVALUE 2.20e+00
ctaataatcttcaatggtgactacatttttcctaatcacaactccatctccacgtaaggactgaaaatacatgtacgtgtgtgtgtgtgtgtgtgtgtgtgtgtgtgtggcgtttaaattcattgctttcattcttttggttgttccaatagtctcatcttcggccagtgagagtcccttcaagttgtaccttctaaacctttgatatgtctccagcggcctttcatag

SEQ ID NO: 25213 - DNA, 137 bp, Homo sapiens
  MAP TO AC008865.3; EXPRESSED IN HEART, SIGNAL = 2.3; EXPRESSED IN LUNG, SIGNAL = 2.1; EXPRESSED IN BRAIN, SIGNAL = 1.7; EXPRESSED IN PLACENTA, SIGNAL = 3.2; EXPRESSED IN BONE MARROW, SIGNAL = 2.3; EXPRESSED IN FETAL LIVER, SIGNAL = 1.8; EXPRESSED IN HELA, SIGNAL = 2.2; NT HIT: gi11417191, EVALUE 1.00e-71; EST_HUMAN HIT: H08895.1, EVALUE 2.00e-15; SWISSPROT HIT: P97449, EVALUE 2.00e-11
actttgaagcaggagcaatggaaaattggggtttgctcaccttccgagaggagacacttctgtatgacagtaacacttcttcaatggcggatagaaagctggtgactaaaatcattgctcatgagctggcccaccag

SEQ ID NO: 25214 - DNA, 143 bp, Homo sapiens
  MAP TO AC006548.20; EXPRESSED IN FETAL LIVER, SIGNAL = 1.6; EXPRESSED IN LUNG, SIGNAL = 2.1; EXPRESSED IN BRAIN, SIGNAL = 1.6; EXPRESSED IN ADULT LIVER, SIGNAL = 1.6; EXPRESSED IN BONE MARROW, SIGNAL = 1.6; EXPRESSED IN HELA, SIGNAL = 1.8; EXPRESSED IN HEART, SIGNAL = 1.9; EXPRESSED IN PLACENTA, SIGNAL = 1.7; EST_HUMAN HIT: BF314481.1, EVALUE 1.20e-01; SWISSPROT HIT: P42759, EVALUE 8.00e-01
cctggctatcctggctgaggagcagacgctctgcctctttcctaccctggagcagcctggaggcctcatagtgccctgggccctgactgctccactcccagacggcgtggttccccacagtccaggagtgtggtccgggcccc

SEQ ID NO: 25215 - DNA, 285 bp, Homo sapiens
  MAP TO AC007868.2; EXPRESSED IN BRAIN, SIGNAL = 4.2; EXPRESSED IN ADULT LIVER, SIGNAL = 3.2; EXPRESSED IN PLACENTA, SIGNAL = 3.9; EXPRESSED IN LUNG, SIGNAL = 9.4; EXPRESSED IN HEART, SIGNAL = 6.9; EXPRESSED IN HELA, SIGNAL = 6.9; EXPRESSED IN FETAL LIVER, SIGNAL = 6.4; EXPRESSED IN BONE MARROW, SIGNAL = 2.9; EST_HUMAN HIT: BF035374.1, EVALUE 1.00e-113; SWISSPROT HIT: O43167, EVALUE 3.30e-01; NT HIT: AB018260.1, EVALUE 0.00e+00
acaaatcccggctgatggtggtggtgaagatggacagttccatccagccggggcccttccgggctgtcctcaagtacctgtacacgggggagctagatgagaacgagcgtgacctcatgcacattgcccacattgctgagctgctcgaggtctttgatctgcgcatgatggtggccaacattctcaacaatgaggccttcatgaaccaggagatcaccaaggccttccacgtccgccggaccaaccgggttaaggagtgcttggcaaaaggcaccttctcaggta

SEQ ID NO: 25216 - DNA, 185 bp, Homo sapiens
  MAP TO AC011501.2; EXPRESSED IN PLACENTA, SIGNAL = 1.3; EXPRESSED IN BRAIN, SIGNAL = 1.6; EXPRESSED IN ADULT LIVER, SIGNAL =   2; EXPRESSED IN HEART, SIGNAL = 1.9; SWISSPROT HIT: P43631, EVALUE 2.00e-05; NT HIT: AF133901.1, EVALUE 6.00e-68
atggaagaaaggatccctggactcccagggcccaatttagataacagagtgttggccatgaaccaaactcaaagatttccactgatagaggacagacaccctcatttcctcacctctctcctgtctcatgttctggaaacccttcaaatagttggccttcacccactgaaccaagctccaaaacg

SEQ ID NO: 25217 - DNA, 267 bp, Homo sapiens
  MAP TO AC011462.3; EXPRESSED IN BRAIN, SIGNAL = 2.7; EXPRESSED IN FETAL LIVER, SIGNAL = 3.3; EXPRESSED IN HEART, SIGNAL = 2.6; EXPRESSED IN PLACENTA, SIGNAL = 2.6; EXPRESSED IN LUNG, SIGNAL = 9.2; EXPRESSED IN HELA, SIGNAL = 3.2; EXPRESSED IN BONE MARROW, SIGNAL = 3.5; EXPRESSED IN ADULT LIVER, SIGNAL =   5; SWISSPROT HIT: Q00839, EVALUE 3.00e-24; EST_HUMAN HIT: BE206846.1, EVALUE 0.00e+00; NT HIT: gi11424059, EVALUE 0.00e+00
gattttgaatgtggaaatgacgtggaactgtcttttaccaagaatggaaagtggatgggcattgctttccgaatccagaaggaagccttggggggtcaggccctctatcctcatgtcctggtgaagaattgcgcagtggagttcaacttcggacagagagcagagccctactgttctgtcctcccggggtttaccttcatccagcaccttccccttagtgagcgtatccggggcaccgttggaccaaagagcaaggcagaatgtgag

SEQ ID NO: 25218 - DNA, 134 bp, Homo sapiens
  MAP TO AL159141.1; EXPRESSED IN BRAIN, SIGNAL = 1.8; EXPRESSED IN PLACENTA, SIGNAL = 2.6; EXPRESSED IN FETAL LIVER, SIGNAL = 2.3; EXPRESSED IN ADULT LIVER, SIGNAL =   3; EXPRESSED IN BONE MARROW, SIGNAL = 3.1; EXPRESSED IN HELA, SIGNAL =   3; EXPRESSED IN LUNG, SIGNAL = 4.4; EXPRESSED IN HEART, SIGNAL = 1.9; NT HIT: M69197.1, EVALUE 8.00e-05; SWISSPROT HIT: P19070, EVALUE 3.10e+00; EST_HUMAN HIT: T52150.1, EVALUE 4.50e-01
atgaagagacaatggtctggttagcaggtgtagaagaggatagacgtggagatatgagggatggagatgtactgaggtgcaactcgaagaatcctatggggtctttccctcttacatctgctcccataccatag

SEQ ID NO: 25219 - DNA, 238 bp, Homo sapiens
  MAP TO AC011375.3; EXPRESSED IN BRAIN, SIGNAL = 3.1; EXPRESSED IN PLACENTA, SIGNAL =   3; EXPRESSED IN HEART, SIGNAL = 4.8; EXPRESSED IN HELA, SIGNAL = 5.7; EXPRESSED IN ADULT LIVER, SIGNAL = 3.3; EXPRESSED IN BONE MARROW, SIGNAL = 3.2; EXPRESSED IN FETAL LIVER, SIGNAL =   5; EXPRESSED IN LUNG, SIGNAL = 2.3; NT HIT: AF181897.1, EVALUE 3.00e-30; EST_HUMAN HIT: BF035327.1, EVALUE 3.00e-34; SWISSPROT HIT: P47544, EVALUE 3.40e+00
aaggctgtttcgtctacactgaaaatctcttgtttagtgtaattgccctcatcgataaccttaacttgatcttctggataacttgctacagcttctacatcagcacgtgctgcttcctcttgcacttatgttatggagatggcttcttacttaaatctcatgtaccaacctctactagcttccaactcttcttctgcagctttctcaccactctcagccttcacagaactgagggcag

SEQ ID NO: 25220 - DNA, 235 bp, Homo sapiens
  MAP TO AL139121.2; EXPRESSED IN PLACENTA, SIGNAL = 3.5; EXPRESSED IN BONE MARROW, SIGNAL = 6.8; EXPRESSED IN HELA, SIGNAL = 7.4; EXPRESSED IN LUNG, SIGNAL =   3; EXPRESSED IN BRAIN, SIGNAL = 3.7; EXPRESSED IN FETAL LIVER, SIGNAL = 6.9; EXPRESSED IN ADULT LIVER, SIGNAL =   4; EXPRESSED IN HEART, SIGNAL = 6.4; EST_HUMAN HIT: BF035327.1, EVALUE 3.00e-31; NT HIT: AL163201.2, EVALUE 2.00e-13; SWISSPROT HIT: O88627, EVALUE 7.30e+00
atggcatcttcttccaataaaaggctgttgagtatagccacctccatcaatgatctcagcaagatcttctggataacttgctgctgcttctacctcataacttgtggcttcaccttgcacttttatattatggagatggcttatttccttaaaccttacaatccaatgtctgctagcttcaaacttttcttgagcaatttcctaccctctctcagcattcataaaattgaagaga

SEQ ID NO: 25221 - DNA, 205 bp, Homo sapiens
  MAP TO AC008897.4; EXPRESSED IN ADULT LIVER, SIGNAL = 3.7; EXPRESSED IN BONE MARROW, SIGNAL = 9.7; EXPRESSED IN LUNG, SIGNAL = 8.6; EXPRESSED IN BRAIN, SIGNAL = 8.5; EXPRESSED IN PLACENTA, SIGNAL =   6; EXPRESSED IN FETAL LIVER, SIGNAL = 6.1; EXPRESSED IN HELA, SIGNAL = 6.9; EXPRESSED IN HEART, SIGNAL = 4.9; SWISSPROT HIT: P35570, EVALUE 7.70e-02; EST_HUMAN HIT: BE394525.1, EVALUE 8.00e-81; NT HIT: L78810.1, EVALUE 2.00e-71
cagactcaggagcccagatggcttcacccagtggatcctgcaccagggctgcaggtggagctgcctgccagtcccgcgccgtgcgctcacactcctcagcccttgggtggtcgatgggactgggcgccgtggagcagggggtggtgctcgtcggagaggctggggctgcacaggaacccacggagtgggtgggaggctcaggcat

SEQ ID NO: 25222 - DNA, 99 bp, Homo sapiens
  MAP TO AC009013.2; EXPRESSED IN PLACENTA, SIGNAL = 2.8; EXPRESSED IN BRAIN, SIGNAL = 2.5; EXPRESSED IN FETAL LIVER, SIGNAL = 6.3; EXPRESSED IN HELA, SIGNAL = 7.8; EXPRESSED IN ADULT LIVER, SIGNAL = 2.3; EXPRESSED IN BONE MARROW, SIGNAL =   2; EXPRESSED IN HEART, SIGNAL = 6.7; EST_HUMAN HIT: BF304683.1, EVALUE 4.00e-28; SWISSPROT HIT: Q89940, EVALUE 5.50e+00; NT HIT: AL163210.2, EVALUE 5.00e-30
agacgtgttgaatgactttgacaaaaatgctgatagtgatatgaataataaggtccaagcacaggtggtctccgatggagatgaggaacttgttggaaa

SEQ ID NO: 25223 - DNA, 148 bp, Homo sapiens
  MAP TO AC021881.2; EXPRESSED IN FETAL LIVER, SIGNAL =  13; EXPRESSED IN LUNG, SIGNAL = 6.8; EXPRESSED IN BRAIN, SIGNAL = 8.9; EXPRESSED IN ADULT LIVER, SIGNAL =  10; EXPRESSED IN BONE MARROW, SIGNAL = 8.1; EXPRESSED IN HELA, SIGNAL =  13; EXPRESSED IN HEART, SIGNAL =  11; EXPRESSED IN PLACENTA, SIGNAL =   8; NT HIT: AF155510.1, EVALUE 8.50e-02
ttaatagaggcagagaagggtctggtgcattttcttcctctggttgcaattccttggtggccagatcacactgtgcgctgtagcagtaatattgagaagttgattgctcctctaatggagcaggatgccattgctgtcttaatttcat

SEQ ID NO: 25224 - DNA, 251 bp, Homo sapiens
  MAP TO AC018499.2; EXPRESSED IN BRAIN, SIGNAL = 3.1; EXPRESSED IN FETAL LIVER, SIGNAL = 3.8; EXPRESSED IN LUNG, SIGNAL = 3.4; EXPRESSED IN PLACENTA, SIGNAL = 2.6; EXPRESSED IN HEART, SIGNAL = 3.4; EXPRESSED IN HELA, SIGNAL =   4; EXPRESSED IN BONE MARROW, SIGNAL = 2.6; EXPRESSED IN ADULT LIVER, SIGNAL = 3.2; SWISSPROT HIT: P05997, EVALUE 1.30e+00; NT HIT: M86524.1, EVALUE 2.00e-03; EST_HUMAN HIT: AV759949.1, EVALUE 1.00e-03
gccaccccctctgccagggatgccttccctttccacttctctgcctggagaactcctactgatccttcaagactcagctccagcagcccctcctccatgaagccttccttgattttccctccgtcccccttttccccatgccccaagaagagttttttgcaattaacctttttatatgcatctgtgttgtccatctggctggggtactccccagggacaggaaactgggtctcatttgcctgagttatccc

SEQ ID NO: 25225 - DNA, 275 bp, Homo sapiens
  MAP TO AC011381.3; EXPRESSED IN BRAIN, SIGNAL = 7.9; EXPRESSED IN BONE MARROW, SIGNAL = 5.1; EXPRESSED IN FETAL LIVER, SIGNAL = 6.5; EXPRESSED IN LUNG, SIGNAL = 8.1; EXPRESSED IN HEART, SIGNAL = 6.7; EXPRESSED IN PLACENTA, SIGNAL = 5.6; EXPRESSED IN HELA, SIGNAL = 6.5; EXPRESSED IN ADULT LIVER, SIGNAL = 7.6; EST_HUMAN HIT: BE274795.1, EVALUE 1.00e-126; SWISSPROT HIT: O35501, EVALUE 1.00e-11; NT HIT: gi11417339, EVALUE 1.00e-127
ctggctcttcttggttggaatagtggtattcctattaataagtttggtaaagacacctcctagagtttcaatacccagagacaggggagtgacatcaaggagcagcacatccgtgacatcgccggccaacacacctccctgaatggcagctccaatggccacagcctcatcaggattgacagctttacttggggctctgccaaaaagatcctgtacagtctgctgaacctgaacatcaaggaaaaagaacctgtcggcccacacttgggaactac

SEQ ID NO: 25226 - DNA, 260 bp, Homo sapiens
  MAP TO AL136038.1; EXPRESSED IN BRAIN, SIGNAL = 3.1; EXPRESSED IN PLACENTA, SIGNAL = 3.2; EXPRESSED IN BONE MARROW, SIGNAL = 4.2; EXPRESSED IN HELA, SIGNAL = 9.2; EXPRESSED IN LUNG, SIGNAL = 3.5; EXPRESSED IN ADULT LIVER, SIGNAL = 3.2; EXPRESSED IN FETAL LIVER, SIGNAL =   7; EXPRESSED IN HEART, SIGNAL = 7.1; EST_HUMAN HIT: AA192513.1, EVALUE 8.00e-66; SWISSPROT HIT: P12947, EVALUE 9.00e-30; NT HIT: X69181.1, EVALUE 6.00e-66
aattttcatcctcgttacgttttctggacaaccacacagggatacggtatgggacaatccttattcctttggcccaaacagctttgttgagcctagtatcaatgtgcacatctggagtgcccatctccttcatggcacatttttggatctcttcgagtgcccgaggggcacacttcttgaagcccacaccatggatgcgcttgtgaatgctgatggcagaaaggctcttcttcttgccatccttctttgcaagagcgatc

SEQ ID NO: 25227 - DNA, 206 bp, Homo sapiens
  MAP TO AC007497.2; EXPRESSED IN BRAIN, SIGNAL = 1.6; EXPRESSED IN PLACENTA, SIGNAL = 2.3; EXPRESSED IN LUNG, SIGNAL = 2.8; EXPRESSED IN HEART, SIGNAL = 1.8; NT HIT: gi11968026, EVALUE 1.00e-112; SWISSPROT HIT: P41245, EVALUE 5.70e-01; EST_HUMAN HIT: AI792603.1, EVALUE 1.00e-112
aattctgcaagaagagagtattccaggtagaagggtccataggacgcatgcgtgccatttgttgactgtgctgctggggcaggagatgtaggcttagttatgggcaaagcatttttgggaatagaaggcagctgtttctttggtgcagttcgtggaggactggttttcacgtcccctgttaatgtcttctcttcaccttcagatcg

SEQ ID NO: 25228 - DNA, 122 bp, Homo sapiens
  MAP TO AC023128.2; EXPRESSED IN BRAIN, SIGNAL = 3.1; EXPRESSED IN PLACENTA, SIGNAL = 5.9; EXPRESSED IN BONE MARROW, SIGNAL =   9; EXPRESSED IN FETAL LIVER, SIGNAL = 7.9; EXPRESSED IN HEART, SIGNAL = 2.9; EXPRESSED IN LUNG, SIGNAL = 9.5; EXPRESSED IN ADULT LIVER, SIGNAL =   7; EXPRESSED IN HELA, SIGNAL = 6.8; EST_HUMAN HIT: AW630624.1, EVALUE 1.00e-04; SWISSPROT HIT: P72702, EVALUE 7.10e+00; NT HIT: gi10835046, EVALUE 7.00e-05
cccaataatgcaattgccctggtgatggtaccctgcagacccctgtgcttgcataggacaagttcaggggacacgcgggatgagcctgtgatggttgtcacattcttgatgacagtattcat

SEQ ID NO: 25229 - DNA, 132 bp, Homo sapiens
  MAP TO AC011366.3; EXPRESSED IN ADULT LIVER, SIGNAL = 2.1; EXPRESSED IN FETAL LIVER, SIGNAL = 2.9; EXPRESSED IN LUNG, SIGNAL =  18; EXPRESSED IN PLACENTA, SIGNAL = 1.8; EXPRESSED IN BRAIN, SIGNAL = 1.7; EXPRESSED IN HEART, SIGNAL = 2.7; EXPRESSED IN BONE MARROW, SIGNAL = 1.9; EXPRESSED IN HELA, SIGNAL = 2.7; NT HIT: V01394.1, EVALUE 2.90e-01; SWISSPROT HIT: Q05057, EVALUE 7.00e+00; EST_HUMAN HIT: BF694751.1, EVALUE 4.40e-01
attttccccagctggattcttgctttgaaaaccaatttctcactccaaagttacagatccctgatgattctggatctgaactcatctacgttattaggcctttgagggctcaaggacttaccaaccacacag

SEQ ID NO: 25230 - DNA, 180 bp, Homo sapiens
  MAP TO AC011510.3; EXPRESSED IN PLACENTA, SIGNAL =   2; EXPRESSED IN BRAIN, SIGNAL = 1.9; EXPRESSED IN HELA, SIGNAL = 1.7; EXPRESSED IN ADULT LIVER, SIGNAL = 1.8; EXPRESSED IN HEART, SIGNAL = 1.8; EXPRESSED IN BONE MARROW, SIGNAL = 2.1; EXPRESSED IN FETAL LIVER, SIGNAL = 1.9; NT HIT: gi11863122, EVALUE 4.00e-97; EST_HUMAN HIT: BE548133.1, EVALUE 8.00e-93; SWISSPROT HIT: P30530, EVALUE 8.00e-30
ccaggggcacctgggtctgggtgctgtccgcgagctccaggatctgtccatcccgaagccaatgtacctcggggggctctccctgaacctggagctgacaccgaagggtgcccgtgagtccccgggcacctgtgatattccctgggttgcccacgaagggactttcttcagcctgcgtgc

SEQ ID NO: 25231 - DNA, 90 bp, Homo sapiens
  MAP TO AC010289.2; EXPRESSED IN BRAIN, SIGNAL = 3.8; EXPRESSED IN PLACENTA, SIGNAL = 2.9; EXPRESSED IN BONE MARROW, SIGNAL = 3.9; EXPRESSED IN HEART, SIGNAL = 3.4; EXPRESSED IN LUNG, SIGNAL = 3.1; EXPRESSED IN ADULT LIVER, SIGNAL = 4.6; EXPRESSED IN FETAL LIVER, SIGNAL = 3.9; EXPRESSED IN HELA, SIGNAL = 3.6; EST_HUMAN HIT: BF304127.1, EVALUE 1.00e-43; SWISSPROT HIT: O00142, EVALUE 2.00e-12; NT HIT: Y10498.2, EVALUE 8.00e-44
ctgaggacgagtatgcctgtccagcatggtgagctgcacataagtctgtagcgtaagaccccagcgagaggcatcgtggtacatcaggcc

SEQ ID NO: 25232 - DNA, 163 bp, Homo sapiens
  MAP TO AC005301.22; EXPRESSED IN HELA, SIGNAL = 3.9; EXPRESSED IN BRAIN, SIGNAL = 3.4; EXPRESSED IN ADULT LIVER, SIGNAL =   4; EXPRESSED IN BONE MARROW, SIGNAL = 5.1; EXPRESSED IN FETAL LIVER, SIGNAL =   5; EXPRESSED IN HEART, SIGNAL = 4.3; EXPRESSED IN LUNG, SIGNAL = 5.2; EXPRESSED IN PLACENTA, SIGNAL = 3.4; SWISSPROT HIT: P04275, EVALUE 6.00e-22; NT HIT: M60676.1, EVALUE 4.00e-87; EST_HUMAN HIT: AL133966.1, EVALUE 3.00e-70
gttttctggtgtcagcagactgcgagctcactttccaggagttcccaaagtccacagggtcttcctccacttggaggttgctgctggtgaggtcactgttctggatgccatcaaaattcccacacaggccacacactttctccttgagagacaagttgaggga

SEQ ID NO: 25233 - DNA, 111 bp, Homo sapiens
  MAP TO AC002523.1; EXPRESSED IN HELA, SIGNAL = 2.1; EXPRESSED IN PLACENTA, SIGNAL = 1.5; EXPRESSED IN BRAIN, SIGNAL = 2.1; EXPRESSED IN ADULT LIVER, SIGNAL =   2; EXPRESSED IN BONE MARROW, SIGNAL = 1.9; EXPRESSED IN FETAL LIVER, SIGNAL = 1.9; EXPRESSED IN HEART, SIGNAL = 1.8; NT HIT: gi7305072, EVALUE 9.60e-01; SWISSPROT HIT: Q62930, EVALUE 9.30e+00; EST_HUMAN HIT: AA435819.1, EVALUE 4.00e-13
atcattgtggacagggcccacacctatggcaaagtgaccaatgtctccaactgttggatctgcactgtccttccagcagcagctgtagatggcctgccgtggcatgtacat

SEQ ID NO: 25234 - DNA, 125 bp, Homo sapiens
  MAP TO AL139342.2; EXPRESSED IN ADULT LIVER, SIGNAL = 2.5; EXPRESSED IN HELA, SIGNAL = 2.6; EXPRESSED IN BRAIN, SIGNAL = 3.5; EXPRESSED IN PLACENTA, SIGNAL = 2.2; EXPRESSED IN BONE MARROW, SIGNAL = 2.7; EXPRESSED IN FETAL LIVER, SIGNAL = 2.3; EXPRESSED IN HEART, SIGNAL = 2.5; EXPRESSED IN LUNG, SIGNAL = 2.9; NT HIT: L40609.1, EVALUE 1.50e-02; EST_HUMAN HIT: BE219381.1, EVALUE 2.80e-01
ctggttagtctttttctatttgtcttattagcacagactcttttaactttcatatctttgtcattttcaacaccctttattatgtttagatttgtttgtttcactgtatcaattttcttcagttc

SEQ ID NO: 25235 - DNA, 220 bp, Homo sapiens
  MAP TO AC008372.6; EXPRESSED IN ADULT LIVER, SIGNAL = 1.7; EXPRESSED IN BONE MARROW, SIGNAL = 1.5; EXPRESSED IN HEART, SIGNAL = 2.3; EXPRESSED IN BRAIN, SIGNAL =   2; EXPRESSED IN PLACENTA, SIGNAL =   2; EXPRESSED IN FETAL LIVER, SIGNAL = 2.5; EXPRESSED IN HELA, SIGNAL = 2.5; SWISSPROT HIT: P41820, EVALUE 8.00e+00
gaatgctttaggattggagatgcctgatgtgatggtgtttgctgctgtggttctaaagcagtgatcttttccaaaggccacagctataatgaaacaaaacaaccccctgggtttttggtggtatgagcccgttgctgtgtgctgggcatctctccattctgatcagcacacagttcctctcgtgtgcatgtctgcagctccctcacctatgtgggctgcc

SEQ ID NO: 25236 - DNA, 81 bp, Homo sapiens
  MAP TO AC023153.2; EXPRESSED IN HELA, SIGNAL = 4.8; EXPRESSED IN BRAIN, SIGNAL = 3.6; EXPRESSED IN ADULT LIVER, SIGNAL = 5.8; EXPRESSED IN BONE MARROW, SIGNAL = 3.9; EXPRESSED IN FETAL LIVER, SIGNAL = 5.2; EXPRESSED IN HEART, SIGNAL = 4.5; EXPRESSED IN LUNG, SIGNAL = 4.3; EXPRESSED IN PLACENTA, SIGNAL = 3.6; EST_HUMAN HIT: BF511209.1, EVALUE 9.70e-01
aagcagcaggtgtcagagctgagatttgctcctggactgattccaaagctgcagactgaccaatgcatcttccaaccgaaa

SEQ ID NO: 25237 - DNA, 291 bp, Homo sapiens
  MAP TO AC005323.1; EXPRESSED IN HEART, SIGNAL = 2.8; EXPRESSED IN BRAIN, SIGNAL = 1.5; EXPRESSED IN PLACENTA, SIGNAL = 1.7; EXPRESSED IN ADULT LIVER, SIGNAL = 2.4; EXPRESSED IN BONE MARROW, SIGNAL = 2.1; NT HIT: gi11024711, EVALUE 0.00e+00; SWISSPROT HIT: gi127772, EVALUE 4.00e-47; EST_HUMAN HIT: AA195905.1, EVALUE 2.00e-48
gtttctaagattccttagtgcctcagcagcctggcggttggcatggttcagctggatttccatttcattaagatctccctccatcttcttcttgatcctcagagcatcatttctgctcctgatctcagcatccagtgtactctgcattgactccacaactctgagatggttcctctttagctgatcgagttcttcatctttttcagcaatttttcggtcaatctcagatttcacctgatttagctcaagttgaatgcgaagaattttgccttcttcatgctcaagagatgc

SEQ ID NO: 25238 - DNA, 149 bp, Homo sapiens
  MAP TO AC009396.5; EXPRESSED IN PLACENTA, SIGNAL = 3.8; EXPRESSED IN HELA, SIGNAL = 4.5; EXPRESSED IN LUNG, SIGNAL = 5.9; EXPRESSED IN HEART, SIGNAL = 4.1; EXPRESSED IN BRAIN, SIGNAL = 4.4; EXPRESSED IN FETAL LIVER, SIGNAL = 4.4; EXPRESSED IN BONE MARROW, SIGNAL = 4.1; EXPRESSED IN ADULT LIVER, SIGNAL = 3.6; SWISSPROT HIT: P47691, EVALUE 7.90e-01; EST_HUMAN HIT: AA355797.1, EVALUE 5.00e-01; NT HIT: AB001562.1, EVALUE 8.50e-02
gtctatgtctaaaggataagagtttccacaagttgattgtggatatctgaaatcaaatttaattacatgtgatggatcaacttcttgaactcccatatttctttcattgtcttcttcggattccatgcctcacctttgtggaaactgaa

SEQ ID NO: 25239 - DNA, 236 bp, Homo sapiens
  MAP TO AL049829.3; EXPRESSED IN HEART, SIGNAL =  32; EST_HUMAN HIT: F00725.1, EVALUE 2.00e-35; SWISSPROT HIT: P13533, EVALUE 2.00e-26; NT HIT: M25140.1, EVALUE 1.00e-130
ctgtcagcatgtactgataggcgttgtcggagatggagaagatgtggggcggggcctcactcctcttcttgccccggtaggcggccaccacctcggcattgtacaccggcagccacttgtaggggttgacagtgacacagaagaggcccgagtaggtctggagcaggagacaaggctgggcatgaggttggtggggagagcctgggacaggcagtggtggcagccaggcatgtccc

SEQ ID NO: 25240 - DNA, 306 bp, Homo sapiens
  MAP TO AL160008.1; EXPRESSED IN HEART, SIGNAL =   2; EXPRESSED IN LUNG, SIGNAL =  16; EXPRESSED IN PLACENTA, SIGNAL =   2; EXPRESSED IN FETAL LIVER, SIGNAL =   2; EST_HUMAN HIT: BF093687.1, EVALUE 0.00e+00; SWISSPROT HIT: P32455, EVALUE 6.00e-46; NT HIT: gi11424288, EVALUE 0.00e+00
cgtatacatttgagacaaaaattaccgctaactccttttgaaatagatggtccacatctttgaaggaactcctgatgaagacttcaatggcctctctctcactgtccctgtgcaggtccagcagctcctggagggtttctgtgggcagctgcaccttctggcccatctgctgttcatagtgggcaatagccttttgcactgcagctgagttctctatctgggccaaggccaggactgcgttctccatgcacggcagatccccactgctgatggcattgacgtaggtcagcaccaggctctctagac

SEQ ID NO: 25241 - DNA, 81 bp, Homo sapiens
  MAP TO AL133244.1; EXPRESSED IN BRAIN, SIGNAL = 1.6; EXPRESSED IN BONE MARROW, SIGNAL = 2.6; EXPRESSED IN ADULT LIVER, SIGNAL = 2.5; EXPRESSED IN HEART, SIGNAL = 1.9; NT HIT: AJ243213.1, EVALUE 2.00e-04; EST_HUMAN HIT: BF439442.1, EVALUE 4.00e-03; SWISSPROT HIT: P46973, EVALUE 9.60e+00
cttactactgctagaggtgagggtgggcaaactttttctgtgaagggctggatggtaagtacagttgtccctcagtacgca

SEQ ID NO: 25242 - DNA, 102 bp, Homo sapiens
  MAP TO AL121852.2; EXPRESSED IN PLACENTA, SIGNAL = 2.7; EXPRESSED IN ADULT LIVER, SIGNAL = 3.4; EXPRESSED IN BONE MARROW, SIGNAL = 3.5; EXPRESSED IN FETAL LIVER, SIGNAL = 5.4; EXPRESSED IN HELA, SIGNAL = 4.5; EXPRESSED IN LUNG, SIGNAL = 4.6; EXPRESSED IN HEART, SIGNAL =   4; EXPRESSED IN BRAIN, SIGNAL = 4.2; NT HIT: gi7706370, EVALUE 2.00e-45; EST_HUMAN HIT: AA458770.1, EVALUE 2.00e-45; SWISSPROT HIT: P16121, EVALUE 9.40e+00
cataatgcttttaagtcgtttgacctcatcttcctgtgctctgtaagattctagttcttgctgaactgattctgcaacttctgggaatggactaaaacagta

SEQ ID NO: 25243 - DNA, 162 bp, Homo sapiens
  MAP TO AL136980.2; EXPRESSED IN ADULT LIVER, SIGNAL = 3.2; EXPRESSED IN FETAL LIVER, SIGNAL = 3.5; EXPRESSED IN PLACENTA, SIGNAL = 2.5; EXPRESSED IN BONE MARROW, SIGNAL = 2.4; EXPRESSED IN HELA, SIGNAL = 3.5; EXPRESSED IN HEART, SIGNAL = 3.4; EXPRESSED IN LUNG, SIGNAL = 2.1; EXPRESSED IN BRAIN, SIGNAL = 2.5; EST_HUMAN HIT: AA001786.1, EVALUE 5.00e-35; NT HIT: AL163248.2, EVALUE 9.00e-33; SWISSPROT HIT: O29766, EVALUE 5.20e+00
tcaaatgataagagtttgtctctgtgtttccacaattttagctctttctctataggagataagaccctcactcagggcaatcttagcagttttgaggctcagtatctgcttctgggagatggaatccctgagttcatcattttctttcatcaccttgttcac

SEQ ID NO: 25244 - DNA, 253 bp, Homo sapiens
  MAP TO AC018720.2; EXPRESSED IN BRAIN, SIGNAL = 3.8; EXPRESSED IN PLACENTA, SIGNAL = 4.6; EXPRESSED IN LUNG, SIGNAL = 7.2; EXPRESSED IN HEART, SIGNAL = 2.9; EXPRESSED IN HELA, SIGNAL =   3; EXPRESSED IN FETAL LIVER, SIGNAL = 3.4; EXPRESSED IN BONE MARROW, SIGNAL = 3.7; EXPRESSED IN ADULT LIVER, SIGNAL = 2.4; SWISSPROT HIT: Q03391, EVALUE 8.70e+00; EST_HUMAN HIT: BE148076.1, EVALUE 0.00e+00
caagcagcctgttgaaggcctcgtggtgctcagggagcacgagcgacactcgccgtcgcttcagcttcatcttgaggccacacagcatctccgccacccagatctcctcaggctcaggggcgagcaccttccgtggctcctcctccaacgactcctcagattcgtcccaccactccatcttccttttccagcaaaaggacctatgcggggggctgggatctaccccaggggctgagtaaagaaaccaggccat

SEQ ID NO: 25245 - DNA, 190 bp, Homo sapiens
  MAP TO AC010369.3; EXPRESSED IN HELA, SIGNAL = 1.9; EXPRESSED IN HEART, SIGNAL = 1.9; EXPRESSED IN BRAIN, SIGNAL = 1.6; EXPRESSED IN FETAL LIVER, SIGNAL = 1.7; SWISSPROT HIT: P23677, EVALUE 1.00e+00; NT HIT: X70058.1, EVALUE 1.10e-01
ggtagagagataatcctattatagattattttgatgggcctattggtgtaaccatgagtttctttgtaagacacaggcagagggagagggtgacagcactgaggaggagaggtaatatgaggaaggaagcagagatcaaagtgctgctgctgtgaactaagaaacccagaaattgcagcagcctccagat

SEQ ID NO: 25246 - DNA, 100 bp, Homo sapiens
  MAP TO AC019219.2; EXPRESSED IN BRAIN, SIGNAL = 1.7; EXPRESSED IN PLACENTA, SIGNAL = 1.9; EXPRESSED IN FETAL LIVER, SIGNAL = 3.4; EXPRESSED IN ADULT LIVER, SIGNAL = 2.2; EXPRESSED IN BONE MARROW, SIGNAL = 1.5; EXPRESSED IN HEART, SIGNAL = 2.9; EXPRESSED IN HELA, SIGNAL = 3.2; NT HIT: AL163246.2, EVALUE 4.00e-06; EST_HUMAN HIT: AI891052.1, EVALUE 9.00e-08
ccaaatgtcatctcagatagtaatccccatgtatcaggggagagagcaggtaggaggtgattggatcctcggggaagtttcccccatgctgttcccgtta

SEQ ID NO: 25247 - DNA, 206 bp, Homo sapiens
  MAP TO AC022845.2; EXPRESSED IN ADULT LIVER, SIGNAL = 4.3; EXPRESSED IN HEART, SIGNAL =   5; EXPRESSED IN BRAIN, SIGNAL = 6.6; EXPRESSED IN PLACENTA, SIGNAL = 4.8; EXPRESSED IN FETAL LIVER, SIGNAL = 4.7; EXPRESSED IN BONE MARROW, SIGNAL = 3.6; EXPRESSED IN HELA, SIGNAL = 4.6; EXPRESSED IN LUNG, SIGNAL =   6; EST_HUMAN HIT: AW377670.1, EVALUE 1.00e-112; SWISSPROT HIT: Q06846, EVALUE 3.00e-06; NT HIT: AB046817.1, EVALUE 1.00e-110
taccatccttccagatacaagtaggaaaagtcgccagaagacaagagctgtagggaaaaccaccaaccctatcttcaaccacactatggtgtatgatgggttcaggcctgaagatctgatggaagcctgtgtagagcttactgtctgggaccattacaaattaaccaaccaatttttgggaggtcttcgtattggctttggaacag

SEQ ID NO: 25248 - DNA, 161 bp, Homo sapiens
  MAP TO AC016372.2; EXPRESSED IN BRAIN, SIGNAL = 3.2; EXPRESSED IN PLACENTA, SIGNAL = 4.7; EXPRESSED IN HELA, SIGNAL =   3; EXPRESSED IN FETAL LIVER, SIGNAL = 2.9; EXPRESSED IN ADULT LIVER, SIGNAL = 4.3; EXPRESSED IN BONE MARROW, SIGNAL = 3.4; EXPRESSED IN LUNG, SIGNAL = 4.4; EXPRESSED IN HEART, SIGNAL = 2.2; SWISSPROT HIT: P22214, EVALUE 9.00e-06; EST_HUMAN HIT: AA306105.1, EVALUE 6.00e-81; NT HIT: gi4759085, EVALUE 4.00e-81
caaattcaataaaggaatagggtcgggacacagtgggcaccttctttccatgctgttcatcaaattctgagtgcaaatcttctaggtaggcaaaagccaacgtcttagggaaggcagcttcacataaaaccaaatcacacaccccctgctcaataatgtag

SEQ ID NO: 25249 - DNA, 198 bp, Homo sapiens
  MAP TO AC023490.4; EXPRESSED IN BRAIN, SIGNAL = 3.4; EXPRESSED IN HELA, SIGNAL =  11; EXPRESSED IN HEART, SIGNAL = 2.5; EXPRESSED IN PLACENTA, SIGNAL = 1.6; EXPRESSED IN LUNG, SIGNAL = 2.1; EXPRESSED IN FETAL LIVER, SIGNAL = 3.1; EXPRESSED IN BONE MARROW, SIGNAL = 2.4; EXPRESSED IN ADULT LIVER, SIGNAL = 2.1; NT HIT: gi11417866, EVALUE 7.00e-28; EST_HUMAN HIT: AU142027.1, EVALUE 1.00e-27
cgtacaatatttgagaagaccttggagtcagcagcaacagcggcgtgggcaaaggccgggggtcaaatggggcctggtgtcgagagaggaccacagccagcacaatgacagccagcgccagccccagccccagccccagcaggaccaggtcacccatggctccgtagtcctgggccatggctctgcggcccagaagga

SEQ ID NO: 25250 - DNA, 250 bp, Homo sapiens
  MAP TO AL158075.2; EXPRESSED IN HELA, SIGNAL = 4.1; EXPRESSED IN BRAIN, SIGNAL = 4.4; EXPRESSED IN PLACENTA, SIGNAL = 3.1; EXPRESSED IN LUNG, SIGNAL =   4; EXPRESSED IN HEART, SIGNAL = 3.9; EXPRESSED IN FETAL LIVER, SIGNAL = 4.2; EXPRESSED IN BONE MARROW, SIGNAL = 3.2; EXPRESSED IN ADULT LIVER, SIGNAL = 3.8; SWISSPROT HIT: O00154, EVALUE 5.00e+00; EST_HUMAN HIT: AI752685.1, EVALUE 5.70e-02; NT HIT: AF046923.1, EVALUE 9.40e+00
ctgccaccgcctcggtcacctcctgcttgcctgccttgtagtaggtgaagccccggatcacagcctgctgctgggccagggcgcggggcttggctgtgggctggaggaaactgcccttgccgctctcctttctcagcttctccacctgaagcagcttctccttgggaggttttgggaggcctctgtctgcaaagcttttctgcacactgccatacttgctgatgtccttgccttttcctctagctgtgtc

SEQ ID NO: 25251 - DNA, 365 bp, Homo sapiens
  MAP TO AC023344.2; EXPRESSED IN BRAIN, SIGNAL = 1.8; EXPRESSED IN PLACENTA, SIGNAL = 2.2; EXPRESSED IN FETAL LIVER, SIGNAL = 1.9; EXPRESSED IN HELA, SIGNAL = 1.8; EXPRESSED IN BONE MARROW, SIGNAL = 1.7; EXPRESSED IN ADULT LIVER, SIGNAL = 2.1; EXPRESSED IN HEART, SIGNAL = 2.8; NT HIT: AJ250189.1, EVALUE 2.30e-01; SWISSPROT HIT: P09933, EVALUE 1.00e+01
tccatcctgctcgggcctctcctcagcctctcctccatagccgctgtcctctgtgtctacgctgtcactcctccatgtgggctcctcctgctccatcactctccagcccttggttagctcagacaccaggttggcacattttctcctccgcgttggggagccgtggctgtggaggattctgtcaatgtcattctctggctgcccaggttcaagcacaccagcatccctctcgtacctgtggctgaggtggctcacgtcccctcctctctcataagtcttgctgaccaccgttttggacacctctttctttttgatgtgagaaacctcaggggctttctctgagctttgtccatctccatgtcctt

SEQ ID NO: 25252 - DNA, 409 bp, Homo sapiens
  MAP TO AC005323.1; EXPRESSED IN BONE MARROW, SIGNAL = 7.6; EXPRESSED IN HEART, SIGNAL = 6.5; SWISSPROT HIT: P13535, EVALUE 6.00e-50; NT HIT: gi8923939, EVALUE 0.00e+00; EST_HUMAN HIT: AA195905.1, EVALUE 0.00e+00
ctcagggttgcaggcaccccaatagtcctgggaccatctcttggacatatttaccttgaggatgccttgggtgttcctgtagttcctcagggcctcagcagccatgcggttggcatggttcagctggatttccatttcattgaggtctccctccatcttcttcttgagcctaatggcatcattcctactcctgatctcagcatccagcgtgctctgcatggactccacgattctaatgtggtttctcttcagctggtcaatttcctcatctttttcagcaattttcctatcaacctcagacttgacttggttcaactcaagctggatgcgcaggatctttccctcttcatgttcaagagatgccttaatgacagcaagaggtgacattagcaaggaaccaaaagcttta

SEQ ID NO: 25253 - DNA, 209 bp, Homo sapiens
  MAP TO AC021876.2; EXPRESSED IN PLACENTA, SIGNAL = 8.1; EXPRESSED IN HELA, SIGNAL = 3.8; EXPRESSED IN HEART, SIGNAL = 4.6; EXPRESSED IN BRAIN, SIGNAL =   3; EXPRESSED IN LUNG, SIGNAL =  10; EXPRESSED IN FETAL LIVER, SIGNAL = 3.3; EXPRESSED IN BONE MARROW, SIGNAL =   3; EXPRESSED IN ADULT LIVER, SIGNAL = 2.8; NT HIT: AF322909.1, EVALUE 1.00e-114; EST_HUMAN HIT: AV733454.1, EVALUE 1.00e-114; SWISSPROT HIT: Q14956, EVALUE 1.00e-35
ctctgtcaggaacagaaatcagggtgctcgtgagagccaggcttgtgtcatcccccagggtgaggttcacacagtacgtcccagacccattgaaggttcgtctcacagtcagcagacacatctcatccacatccacagggctgcagactgtgttctgggtgatctcgcaggtggggtcagaaatgatggtacagacctccgtgggaatg

SEQ ID NO: 25254 - DNA, 136 bp, Homo sapiens
  MAP TO AC022845.2; EXPRESSED IN BRAIN, SIGNAL = 2.6; EXPRESSED IN ADULT LIVER, SIGNAL = 2.7; EXPRESSED IN BONE MARROW, SIGNAL =   2; EXPRESSED IN FETAL LIVER, SIGNAL = 2.2; EXPRESSED IN HELA, SIGNAL = 2.4; EXPRESSED IN HEART, SIGNAL =   2; EXPRESSED IN PLACENTA, SIGNAL = 2.1; SWISSPROT HIT: P20401, EVALUE 5.30e+00; NT HIT: gi11438069, EVALUE 5.00e-71; EST_HUMAN HIT: AV683938.1, EVALUE 1.10e-01
ctcgggcttgctggtgctgcatcctcttctggctcttctacaacgccagccagctctggaggaaggaaagcatctttgttgacattattcacccagctttcctttgccccattttctctgtctttactctgctcag

SEQ ID NO: 25255 - DNA, 75 bp, Homo sapiens
  MAP TO AC008498.3; EXPRESSED IN PLACENTA, SIGNAL =   2; EXPRESSED IN BRAIN, SIGNAL =   2; EXPRESSED IN BONE MARROW, SIGNAL = 1.5; EXPRESSED IN HELA, SIGNAL = 2.2; EXPRESSED IN HEART, SIGNAL = 2.4; EXPRESSED IN LUNG, SIGNAL = 3.6; EXPRESSED IN ADULT LIVER, SIGNAL = 2.8; EXPRESSED IN FETAL LIVER, SIGNAL = 2.2; NT HIT: AF064626.1, EVALUE 5.90e-01
gaaatgattcagctctttttaagaggtgaacataatctgataccaaaaatcagaagaggccagtacaagaaaaag

SEQ ID NO: 25256 - DNA, 127 bp, Homo sapiens
  MAP TO AC012627.4; EXPRESSED IN ADULT LIVER, SIGNAL = 1.8; EXPRESSED IN FETAL LIVER, SIGNAL = 2.5; EXPRESSED IN BRAIN, SIGNAL = 1.7; EXPRESSED IN PLACENTA, SIGNAL = 1.8; EXPRESSED IN HEART, SIGNAL = 2.8; EXPRESSED IN BONE MARROW, SIGNAL = 1.7; EXPRESSED IN HELA, SIGNAL = 2.5; EXPRESSED IN LUNG, SIGNAL =   2; NT HIT: AB040906.1, EVALUE 4.00e-37; SWISSPROT HIT: P28160, EVALUE 2.00e-12; EST_HUMAN HIT: AW409714.1, EVALUE 8.00e-55
gatgtggccatagaattctctctggaggagtgggaatgcctgaaccctgctcagcagaatttatatatgaatgtgatgttagagaactacaaaaacctggtcttcttgggtgagaataactttaata

SEQ ID NO: 25257 - DNA, 167 bp, Homo sapiens
  MAP TO AC023404.2; EXPRESSED IN ADULT LIVER, SIGNAL = 2.1; EXPRESSED IN FETAL LIVER, SIGNAL = 2.3; EXPRESSED IN BRAIN, SIGNAL = 2.8; EXPRESSED IN PLACENTA, SIGNAL = 1.7; EXPRESSED IN HEART, SIGNAL =   2; EXPRESSED IN BONE MARROW, SIGNAL =   2; EXPRESSED IN HELA, SIGNAL = 2.4; EXPRESSED IN LUNG, SIGNAL = 1.9; EST_HUMAN HIT: AA514694.1, EVALUE 8.90e+00; NT HIT: U58337.1, EVALUE 9.70e-02; SWISSPROT HIT: Q26422, EVALUE 7.80e-01
agacgaacctggaaacaaccaggcctggcagcatagctaggtgcataagcaccttccagagcctcagtaccctcctcagcaccagcatcttccatagcaccaacaaccttcagagcaccagtaacctttagagcaccagcactctccttggcaccagctgcctccat

SEQ ID NO: 25258 - DNA, 114 bp, Homo sapiens
  MAP TO AC011447.2; EXPRESSED IN PLACENTA, SIGNAL = 4.8; EXPRESSED IN BRAIN, SIGNAL = 4.9; EXPRESSED IN HELA, SIGNAL = 8.1; EXPRESSED IN HEART, SIGNAL = 3.4; EXPRESSED IN ADULT LIVER, SIGNAL = 3.5; EXPRESSED IN BONE MARROW, SIGNAL =   3; EXPRESSED IN FETAL LIVER, SIGNAL = 3.7; EXPRESSED IN LUNG, SIGNAL = 3.8; NT HIT: AF289204.1, EVALUE 6.00e-39; EST_HUMAN HIT: T03007.1, EVALUE 2.00e-43
atgagaggttctaagaggcaagctagtggcttgtactatagcatcacctgcctttgctggtgtgtggcgattaggcctggtgtaaccgccatcaataaatcaagtgtgatcagg

SEQ ID NO: 25259 - DNA, 197 bp, Homo sapiens
  MAP TO AC007500.2; EXPRESSED IN ADULT LIVER, SIGNAL = 2.9; EXPRESSED IN FETAL LIVER, SIGNAL = 2.6; EXPRESSED IN PLACENTA, SIGNAL = 3.1; EXPRESSED IN BONE MARROW, SIGNAL = 2.6; EXPRESSED IN HELA, SIGNAL = 3.3; EXPRESSED IN LUNG, SIGNAL = 6.3; EXPRESSED IN BRAIN, SIGNAL = 2.8; EXPRESSED IN HEART, SIGNAL = 2.4; EST_HUMAN HIT: AA496739.1, EVALUE 4.40e-02; SWISSPROT HIT: P22327, EVALUE 1.70e+00; NT HIT: AE004012.1, EVALUE 4.60e-01
cccagctctgaacagtggaattccaacttgtgctccacgtgggaccttgcggtcttgatgagccagaaacctgacagccatcttagacttctttcctcaaacccagtcccactgattcttctctggagtatttctcccctacacttcatctccgtagccatcaccctgtccaggccaccagtgtctcttgccgacat

SEQ ID NO: 25260 - DNA, 111 bp, Homo sapiens
  MAP TO AC011453.2; EXPRESSED IN BRAIN, SIGNAL = 2.1; EXPRESSED IN PLACENTA, SIGNAL =   8; EXPRESSED IN HEART, SIGNAL = 2.4; EXPRESSED IN BONE MARROW, SIGNAL = 1.5; EXPRESSED IN FETAL LIVER, SIGNAL = 2.3; EXPRESSED IN HELA, SIGNAL = 2.3; EXPRESSED IN ADULT LIVER, SIGNAL = 2.1; NT HIT: Z21647.1, EVALUE 2.40e-01; SWISSPROT HIT: P51532, EVALUE 4.20e+00
tcactccttccagtaccccaggagggtcaccttgcagttctcagggaggaagatgtggtcttccacccttgtgagcttcccaggcatcagggtctgcccgcccgactccat

SEQ ID NO: 25261 - DNA, 254 bp, Homo sapiens
  MAP TO AC016289.3; EXPRESSED IN BRAIN, SIGNAL = 6.3; EXPRESSED IN PLACENTA, SIGNAL = 6.6; EXPRESSED IN ADULT LIVER, SIGNAL = 2.2; EXPRESSED IN FETAL LIVER, SIGNAL =  11; EXPRESSED IN HELA, SIGNAL =  11; EXPRESSED IN BONE MARROW, SIGNAL =  13; EXPRESSED IN HEART, SIGNAL = 9.7; EXPRESSED IN LUNG, SIGNAL =  24; NT HIT: U43701.1, EVALUE 1.00e-119; SWISSPROT HIT: P29316, EVALUE 7.00e-42; EST_HUMAN HIT: BF569571.1, EVALUE 1.00e-119
gccgaatcagggtgttgaccttggccacattggtgtcatagagcttcttcacagcctgtttaatctggtgcttgttggctttaacatccacaatgaacacaagtgtattgttgtcttctatcttcttcatggcagactcagtggtcagcggaaacttgatgatagcatagtggtcaagtttgtttctcctgggggcgctcttccgaggatatttgggctgcctccggagtcgcagtgtcttgggccgccggaag

SEQ ID NO: 25262 - DNA, 151 bp, Homo sapiens
  MAP TO AL158058.1; EXPRESSED IN PLACENTA, SIGNAL = 3.1; EXPRESSED IN FETAL LIVER, SIGNAL = 6.1; EXPRESSED IN HELA, SIGNAL = 6.1; EXPRESSED IN HEART, SIGNAL = 5.3; EXPRESSED IN BRAIN, SIGNAL = 3.1; EXPRESSED IN LUNG, SIGNAL = 2.6; EXPRESSED IN BONE MARROW, SIGNAL = 3.1; EXPRESSED IN ADULT LIVER, SIGNAL = 3.3; SWISSPROT HIT: P25333, EVALUE 5.20e+00; EST_HUMAN HIT: AI831462.1, EVALUE 2.00e-52; NT HIT: AL163246.2, EVALUE 6.00e-49
ctttattccagttcccaacaagttcctcatctccatccgagaccacgtcagcctggactttattgtccatatcactatcagcattttgatcaaagccattcgacaagtctctaggaagttccaaactttcccacattttcctgtcttcttc

SEQ ID NO: 25263 - DNA, 129 bp, Homo sapiens
  MAP TO AC010369.3; EXPRESSED IN BRAIN, SIGNAL = 1.3; EXPRESSED IN HELA, SIGNAL = 1.8; EXPRESSED IN BONE MARROW, SIGNAL = 1.8; EXPRESSED IN HEART, SIGNAL =   2; EST_HUMAN HIT: AW993658.1, EVALUE 4.30e-01; SWISSPROT HIT: Q10064, EVALUE 2.40e+00
cggcagatcctgcttctggatccagagacagaccctcccatttttctcatagaactctgtggcacttgaaaaaggtcctcggggaagtaaattctttgagacaaactgtttctggctgctaataactga

SEQ ID NO: 25264 - DNA, 230 bp, Homo sapiens
  MAP TO AL157951.1; EXPRESSED IN HEART, SIGNAL = 2.4; EXPRESSED IN BRAIN, SIGNAL = 2.5; EXPRESSED IN ADULT LIVER, SIGNAL = 1.6; EXPRESSED IN BONE MARROW, SIGNAL = 5.7; EXPRESSED IN FETAL LIVER, SIGNAL = 1.8; EXPRESSED IN HELA, SIGNAL = 2.6; EXPRESSED IN LUNG, SIGNAL =   3; EXPRESSED IN PLACENTA, SIGNAL = 1.5; SWISSPROT HIT: P34056, EVALUE 3.00e-30; NT HIT: X77343.2, EVALUE 4.00e-08; EST_HUMAN HIT: H13488.1, EVALUE 1.00e-08
gcagatctgcaaggagtttgcagacttgatggctcaggaccgctcaccgctgggcaacagccgcccagcactcatcctggagcccggagtacagagctgcttgacacactttagcctcatcacccatggcttcggtgggcctgccatctgtgctgccctcactgccttccagaactatttgctggagtcactcaaggggctggacaagatgtttctaagcagtgtgggca

SEQ ID NO: 25265 - DNA, 181 bp, Homo sapiens
  MAP TO AC002041.1; EXPRESSED IN BRAIN, SIGNAL = 3.2; EXPRESSED IN PLACENTA, SIGNAL = 2.6; EXPRESSED IN HEART, SIGNAL = 3.2; EXPRESSED IN ADULT LIVER, SIGNAL = 2.7; EXPRESSED IN BONE MARROW, SIGNAL = 2.2; EXPRESSED IN HELA, SIGNAL = 3.1; EXPRESSED IN LUNG, SIGNAL = 2.8; EXPRESSED IN FETAL LIVER, SIGNAL = 3.4; SWISSPROT HIT: P02847, EVALUE 5.90e-01; EST_HUMAN HIT: AI951490.1, EVALUE 1.60e-01; NT HIT: Z11910.1, EVALUE 1.10e-01
tgttccgctgctgctgtttcacacccacagccaatcccccacaaatgctgttggcatcacttttacaaccctcatggccaccctgccctcctgctgggctgtagcttttgtcccctccatccatctgccccttggcagccacctgagcccccaagcactgctgtgctcacacctacagtag

SEQ ID NO: 25266 - DNA, 104 bp, Homo sapiens
  MAP TO AC010457.3; EXPRESSED IN BRAIN, SIGNAL = 1.8; EXPRESSED IN PLACENTA, SIGNAL = 2.4; EXPRESSED IN HELA, SIGNAL =   2; EXPRESSED IN HEART, SIGNAL = 2.2; EXPRESSED IN ADULT LIVER, SIGNAL =   2; EXPRESSED IN BONE MARROW, SIGNAL = 1.6; EXPRESSED IN FETAL LIVER, SIGNAL = 1.8; EXPRESSED IN LUNG, SIGNAL = 2.2; EST_HUMAN HIT: BE048172.1, EVALUE 6.00e-52; SWISSPROT HIT: P98160, EVALUE 2.40e+00
ccacatacagagctccattgatgttaagctgccgcatcatgcctggggatttgcctgttctggctccatagtcatccacggttatctttcctgactggccatcc

SEQ ID NO: 25267 - DNA, 109 bp, Homo sapiens
  MAP TO AC002039.1; EXPRESSED IN BONE MARROW, SIGNAL = 8.3; EXPRESSED IN FETAL LIVER, SIGNAL =  14; EXPRESSED IN LUNG, SIGNAL = 5.1; EXPRESSED IN BRAIN, SIGNAL =  10; EXPRESSED IN ADULT LIVER, SIGNAL =  10; EXPRESSED IN HELA, SIGNAL =  16; EXPRESSED IN HEART, SIGNAL =  13; EXPRESSED IN PLACENTA, SIGNAL = 8.1; NT HIT: AF042810.1, EVALUE 3.70e+00; EST_HUMAN HIT: AI561056.1, EVALUE 7.00e-55
tccggagactggcggctgcccctccctgtctagtcttgcaagagaggcagctggcaagaggacagaagccggcagctgctgcgttttcatcctgtttctgctcttggag

SEQ ID NO: 25268 - DNA, 127 bp, Homo sapiens
  MAP TO AC017004.2; EXPRESSED IN ADULT LIVER, SIGNAL = 2.6; EXPRESSED IN HEART, SIGNAL = 2.4; EXPRESSED IN PLACENTA, SIGNAL = 2.6; EXPRESSED IN BRAIN, SIGNAL = 2.3; EXPRESSED IN HELA, SIGNAL = 2.6; EXPRESSED IN BONE MARROW, SIGNAL = 1.9; EXPRESSED IN FETAL LIVER, SIGNAL = 2.3; EXPRESSED IN LUNG, SIGNAL = 3.2; NT HIT: M84337.1, EVALUE 2.00e-36; EST_HUMAN HIT: AI621017.1, EVALUE 1.00e-65; SWISSPROT HIT: Q06141, EVALUE 2.00e-17
ggctctgagcctgatggagatggatgggagtggagtagcactgatgtgatgaattactttgcatgggagaaaaatccctccaccatcttaaaccctggccactgtgggagcctgtcaagaagcacag

SEQ ID NO: 25269 - DNA, 153 bp, Homo sapiens
  MAP TO AL133391.5; EXPRESSED IN FETAL LIVER, SIGNAL = 2.7; EXPRESSED IN PLACENTA, SIGNAL = 1.9; EXPRESSED IN BRAIN, SIGNAL =   2; EXPRESSED IN HEART, SIGNAL = 2.5; EXPRESSED IN ADULT LIVER, SIGNAL = 2.6; EXPRESSED IN BONE MARROW, SIGNAL = 2.2; EXPRESSED IN HELA, SIGNAL =   3; SWISSPROT HIT: P19022, EVALUE 7.90e-01
gtggcagccatcagctctaagaccccagctcagtgaccaggccatcaaagaggctgccaagatcagacaggctgtattctctcacagctttttacaggaagcaaaggagctaaagggaataatgacagaggtagcctgcaaacgtaaccagag

SEQ ID NO: 25270 - DNA, 113 bp, Homo sapiens
  MAP TO AC011366.3; EXPRESSED IN BRAIN, SIGNAL = 2.5; EXPRESSED IN HELA, SIGNAL = 2.9; EXPRESSED IN HEART, SIGNAL = 2.5; EXPRESSED IN ADULT LIVER, SIGNAL = 2.4; EXPRESSED IN FETAL LIVER, SIGNAL = 2.5; EXPRESSED IN PLACENTA, SIGNAL = 2.1; EXPRESSED IN LUNG, SIGNAL = 2.4; EXPRESSED IN BONE MARROW, SIGNAL = 1.7; NT HIT: AL161508.2, EVALUE 1.60e-02; SWISSPROT HIT: Q10231, EVALUE 5.40e+00
ctatgcactgtgttttgatgaagcaatgtactatacagggcaattgggaggaactggacaaatatatgaaaatgatttctgttttaaaaccagagaacttatggtagaagaaa

SEQ ID NO: 25271 - DNA, 106 bp, Homo sapiens
  MAP TO AC000134.14; EXPRESSED IN BRAIN, SIGNAL = 2.8; EXPRESSED IN ADULT LIVER, SIGNAL = 2.9; EXPRESSED IN PLACENTA, SIGNAL =   3; EXPRESSED IN LUNG, SIGNAL = 3.1; EXPRESSED IN HEART, SIGNAL = 3.3; EXPRESSED IN HELA, SIGNAL = 3.5; EXPRESSED IN FETAL LIVER, SIGNAL =   4; EXPRESSED IN BONE MARROW, SIGNAL = 2.9; NT HIT: gi11441357, EVALUE 6.00e-45; SWISSPROT HIT: P12349, EVALUE 9.40e+00; EST_HUMAN HIT: BF128701.1, EVALUE 4.00e-53
gctcctctgctggagggtcagtggggagtggccctaggaacggggcccgcttgatggttcccatggtatcgtctggggagtccagctcctggtaggaggggcaggg

SEQ ID NO: 25272 - DNA, 332 bp, Homo sapiens
  MAP TO AC018801.2; EXPRESSED IN BRAIN, SIGNAL = 6.2; EXPRESSED IN HELA, SIGNAL = 4.6; EXPRESSED IN ADULT LIVER, SIGNAL = 5.1; EXPRESSED IN PLACENTA, SIGNAL = 4.8; EXPRESSED IN LUNG, SIGNAL = 7.3; EXPRESSED IN HEART, SIGNAL = 4.5; EXPRESSED IN FETAL LIVER, SIGNAL = 5.4; EXPRESSED IN BONE MARROW, SIGNAL = 5.2; NT HIT: U95026.1, EVALUE 5.20e-02; EST_HUMAN HIT: BF507876.1, EVALUE 0.00e+00; SWISSPROT HIT: P34657, EVALUE 3.00e-21
tgggaagacacccagtaatgaacatgctgctgtctgggttcctgactctgaggcaactgtatgtatgcgttgtcagaaagcaaaattcacacctgttaatcgtcgccaccattgccgcaaatgtggttttgttgtctgtgggccctgctctgaaaagagatttcttcttcccagccagtcctctaagcctgtgcggatttgtgacttctgctatgacctgctttctgctggggacatggccacatgccagcctgctagatcagactcttacagccagtcattgaagtctcctttaaatgatatgtctgatgatgatgacgatgatgatagca

SEQ ID NO: 25273 - DNA, 105 bp, Homo sapiens
  MAP TO AL138828.4; EXPRESSED IN FETAL LIVER, SIGNAL = 3.9; EXPRESSED IN ADULT LIVER, SIGNAL = 3.2; EXPRESSED IN HEART, SIGNAL = 3.1; EXPRESSED IN BRAIN, SIGNAL = 3.1; EXPRESSED IN PLACENTA, SIGNAL = 2.5; EXPRESSED IN LUNG, SIGNAL = 2.2; EXPRESSED IN HELA, SIGNAL = 3.7; EXPRESSED IN BONE MARROW, SIGNAL = 2.7; EST_HUMAN HIT: AV715377.1, EVALUE 2.00e-52; SWISSPROT HIT: Q15390, EVALUE 6.00e-03; NT HIT: AB032055.1, EVALUE 8.90e-01
ctcaaaattaggtcttcgacaaggttccagtggaagcattttcccaataatacgaacaatactcctagttgatccatagtctttattttcccaaatcagcaaaac

SEQ ID NO: 25274 - DNA, 93 bp, Homo sapiens
  MAP TO AC015971.2; EXPRESSED IN BONE MARROW, SIGNAL = 2.5; EXPRESSED IN HEART, SIGNAL = 4.5; EXPRESSED IN LUNG, SIGNAL = 3.8; EXPRESSED IN PLACENTA, SIGNAL =   3; EXPRESSED IN BRAIN, SIGNAL =   3; EXPRESSED IN HELA, SIGNAL = 4.2; EXPRESSED IN ADULT LIVER, SIGNAL = 2.9; EXPRESSED IN FETAL LIVER, SIGNAL = 5.2; SWISSPROT HIT: P39188, EVALUE 3.00e-08; NT HIT: AF261279.1, EVALUE 2.00e-20; EST_HUMAN HIT: AI801412.1, EVALUE 2.00e-26
ctgtaattgtagcattttgggaagccaaggcaggaggatcacttgagcccaggagttccagaccatcctgggcagcatagtgagaccctgtct

SEQ ID NO: 25275 - DNA, 110 bp, Homo sapiens
  MAP TO AL135792.3; EXPRESSED IN ADULT LIVER, SIGNAL = 1.7; EXPRESSED IN FETAL LIVER, SIGNAL = 1.7; EXPRESSED IN HEART, SIGNAL = 1.7; EXPRESSED IN BRAIN, SIGNAL = 1.5; EXPRESSED IN HELA, SIGNAL = 1.7; NT HIT: AJ297357.1, EVALUE 2.00e-11; EST_HUMAN HIT: AV730030.1, EVALUE 4.00e-16; SWISSPROT HIT: P08547, EVALUE 2.00e-04
ttaaggtactgttgaatttggtttgctaatattttgttggggatttttacattcatattcatcagggatactgacctgcagttttcttgcggtctcattctctgactttg

SEQ ID NO: 25276 - DNA, 123 bp, Homo sapiens
  MAP TO AL078594.36; EXPRESSED IN BRAIN, SIGNAL = 1.7; EXPRESSED IN HELA, SIGNAL = 2.1; EXPRESSED IN ADULT LIVER, SIGNAL = 1.8; EXPRESSED IN BONE MARROW, SIGNAL = 2.7; EXPRESSED IN FETAL LIVER, SIGNAL = 2.1; EXPRESSED IN HEART, SIGNAL = 2.1; EXPRESSED IN PLACENTA, SIGNAL = 1.7; NT HIT: AK024445.1, EVALUE 1.70e-02; SWISSPROT HIT: P31311, EVALUE 3.10e+00; EST_HUMAN HIT: BE001828.1, EVALUE 4.00e-07
aatgtgatggtatttggatatggagactttgggaggaaattaggtttagatgaagctgagtctcccatgataagactagtgtacttccaagaagaagaagagaccggagctctctctgccaag

SEQ ID NO: 25277 - DNA, 269 bp, Homo sapiens
  MAP TO AL137852.2; EXPRESSED IN BRAIN, SIGNAL = 1.6; EXPRESSED IN PLACENTA, SIGNAL = 4.7; EXPRESSED IN HEART, SIGNAL = 2.2; EXPRESSED IN ADULT LIVER, SIGNAL = 1.7; EXPRESSED IN BONE MARROW, SIGNAL = 3.5; EXPRESSED IN HELA, SIGNAL = 2.3; EXPRESSED IN LUNG, SIGNAL = 5.7; EXPRESSED IN FETAL LIVER, SIGNAL = 3.8; NT HIT: gi11429198, EVALUE 0.00e+00; EST_HUMAN HIT: AU135170.1, EVALUE 0.00e+00; SWISSPROT HIT: P51022, EVALUE 4.70e-01
cccaaagcagtgtccacaccagcaccagctacaactcagcagtcagctcctgccagcactacagcagttacttcctccaccaccacaactgtggctcaggctccaacccctgtccctgccttggcccccacttccacacctgcatccatcactccagcatcagcgacagcatcttctgaacctgcacctgctagtgcagctaaacaagagaagcctgcagaaaagccagcagagacaccagtggctactagcccaacagcaactgacag

SEQ ID NO: 25278 - DNA, 234 bp, Homo sapiens
  MAP TO AL121716.16; EXPRESSED IN PLACENTA, SIGNAL = 3.3; EXPRESSED IN HEART, SIGNAL = 3.5; EXPRESSED IN ADULT LIVER, SIGNAL = 3.2; EXPRESSED IN BRAIN, SIGNAL =   4; EXPRESSED IN LUNG, SIGNAL = 4.1; EXPRESSED IN HELA, SIGNAL = 3.5; EXPRESSED IN FETAL LIVER, SIGNAL = 3.3; EXPRESSED IN BONE MARROW, SIGNAL = 2.7; SWISSPROT HIT: Q9Y3R5, EVALUE 2.00e-08; NT HIT: U59237.1, EVALUE 2.20e+00; EST_HUMAN HIT: AA625526.1, EVALUE 1.00e-129
aaatgcttgtcactctcctctcctggataacagggagacttattccaataacgttctgcttgtacacgctgtactgaaaccctctgagtttttggatgaagcaggagcaatagcaatggttccaaaactcgtgcaatatcatgtctttgtaggacttggttcagccaggcttgtcccacagagctagtagaaccatcgagactgttaaggctatctaacatgatgaacagtgac

SEQ ID NO: 25279 - DNA, 151 bp, Homo sapiens
  MAP TO AC009144.4; EXPRESSED IN PLACENTA, SIGNAL =  21; EXPRESSED IN BRAIN, SIGNAL =  27; EXPRESSED IN HEART, SIGNAL =  51; EXPRESSED IN HELA, SIGNAL =  22; EXPRESSED IN BONE MARROW, SIGNAL =  20; EXPRESSED IN FETAL LIVER, SIGNAL =  23; EXPRESSED IN LUNG, SIGNAL =  26; EXPRESSED IN ADULT LIVER, SIGNAL =  33; EST_HUMAN HIT: N42483.1, EVALUE 9.00e-80; SWISSPROT HIT: Q56308, EVALUE 9.10e-02; NT HIT: AF226730.1, EVALUE 6.00e-80
ctggcctttggtcatgtctattccagtcacgtgtcctttttcaccaaccagctggctaagtacatagcaatctctgccacttccactacccagatccaaaatccagcagttttctagatgctcagggatcaccagaccacagccataatat

SEQ ID NO: 25280 - DNA, 153 bp, Homo sapiens
  MAP TO AC008882.3; EXPRESSED IN BRAIN, SIGNAL = 6.2; EXPRESSED IN PLACENTA, SIGNAL = 4.5; EXPRESSED IN FETAL LIVER, SIGNAL = 6.3; EXPRESSED IN BONE MARROW, SIGNAL = 4.4; EXPRESSED IN HELA, SIGNAL = 6.2; EXPRESSED IN HEART, SIGNAL =   5; EXPRESSED IN LUNG, SIGNAL = 2.4; EXPRESSED IN ADULT LIVER, SIGNAL = 6.7; SWISSPROT HIT: P09122, EVALUE 4.00e+00; NT HIT: AB006682.1, EVALUE 1.40e+00
  unsure 117
  unsure 121
  unsure 127
  unsure 129
  unsure 138
  unsure 151
gctggagtgcagctggactggttgaatttcgtcaaggctgcagctgacagtccctcccggccgtcccccaggctttgcaaggggcggaagtttgcgtgcgcttgggccgcgtgcaangccncttgcncncggaagtanggctgggactacnag

SEQ ID NO: 25281 - DNA, 351 bp, Homo sapiens
  MAP TO AL132821.17; EXPRESSED IN BONE MARROW, SIGNAL =  17; EXPRESSED IN LUNG, SIGNAL =  31; EXPRESSED IN BRAIN, SIGNAL = 5.5; EXPRESSED IN PLACENTA, SIGNAL = 4.1; EXPRESSED IN ADULT LIVER, SIGNAL = 7.1; EXPRESSED IN FETAL LIVER, SIGNAL = 8.6; EXPRESSED IN HELA, SIGNAL =  11; EXPRESSED IN HEART, SIGNAL = 5.6; NT HIT: gi11429885, EVALUE 0.00e+00; SWISSPROT HIT: P30050, EVALUE 4.00e-56; EST_HUMAN HIT: BE876401.1, EVALUE 0.00e+00
acgatctcatcaaaagtgatattcccactgtgtttaatgtttttctgtttctttctgtctcttggtggttccttgagggctttgatgatcatggcagaggcagaaggcaccacctcaatctgggcctgtctgttctgaatggttagtttcactgtaatcctcaggcccttccagtcacccattgccttggcaatgtcatcaccaaccttttttggagacagacccagggggccgatcttgggggccagggcagaagtggcaccgacttcacctccggtgcacctcaggtatacgactttgatctcgttcgggtcgaacttcggcagcatggtggaggcagctggtgtcgga

SEQ ID NO: 25282 - DNA, 347 bp, Homo sapiens
  MAP TO AC017016.3; EXPRESSED IN BRAIN, SIGNAL = 2.1; EXPRESSED IN ADULT LIVER, SIGNAL =   2; EXPRESSED IN BONE MARROW, SIGNAL = 1.9; EXPRESSED IN FETAL LIVER, SIGNAL = 1.8; EXPRESSED IN HEART, SIGNAL = 1.8; EXPRESSED IN PLACENTA, SIGNAL =   2; NT HIT: X57147.1, EVALUE 3.00e-65; SWISSPROT HIT: P26810, EVALUE 7.00e-26; EST_HUMAN HIT: BE295714.1, EVALUE 2.00e-67
aggatgaggaaccaatcgagcatgacagccaacaaattatagtccagacttatgccacccgagatgatctcttagaagtccccttagctaatcctgaccttaacctatatgccgatggaagttcatttgtggagaatgggatacgaaggtcaggttatgccatagttactgatgtagctgtacttgaaagtaagcctcttcccccagggaccagcacccagttagcagaactagtggcacttacccaagacttagaactgggaaagggaaaaagaataaatgtgtatacacatagcaagtatgcttatctaatcctacatgcccatgctgcaatatggaaagaaagg

SEQ ID NO: 25283 - DNA, 236 bp, Homo sapiens
  MAP TO AC019224.2; EXPRESSED IN BRAIN, SIGNAL = 2.3; EXPRESSED IN PLACENTA, SIGNAL = 2.3; EXPRESSED IN ADULT LIVER, SIGNAL = 2.4; EXPRESSED IN FETAL LIVER, SIGNAL = 4.9; EXPRESSED IN HELA, SIGNAL = 5.6; EXPRESSED IN HEART, SIGNAL = 4.5; EXPRESSED IN BONE MARROW, SIGNAL = 2.9; SWISSPROT HIT: O66392, EVALUE 2.00e+00; NT HIT: AJ271735.1, EVALUE 1.00e-32; EST_HUMAN HIT: W28189.1, EVALUE 4.00e-55
cagcaagtgctgatggagaagctgcagcaagttatccagaagatctagctaagatcactgccgagggtggttacactaaacaagagattttcaatgtagacaaagtcgctttctattggaagaagacgccatctaggactttcaccgctagagaaaagtcaatgcctggcttcaaagcatcaaaagacaggctgactctcttgttaggggccaatggtgcgggtgactttaattga

SEQ ID NO: 25284 - DNA, 227 bp, Homo sapiens
  MAP TO AL136080.6; EXPRESSED IN PLACENTA, SIGNAL = 1.4; EXPRESSED IN HEART, SIGNAL = 1.8; EXPRESSED IN ADULT LIVER, SIGNAL =   2; EXPRESSED IN BONE MARROW, SIGNAL = 1.6; EXPRESSED IN FETAL LIVER, SIGNAL = 2.1; EXPRESSED IN HELA, SIGNAL = 2.2; EXPRESSED IN BRAIN, SIGNAL = 1.6; EST_HUMAN HIT: BE294933.1, EVALUE 5.20e-02; NT HIT: D63548.1, EVALUE 1.00e-105; SWISSPROT HIT: Q14031, EVALUE 2.00e-18
actttctcctggcattcctgggaaacctgtgatcccagaggaccccttcaggccaggtaagccccggattcccatgaagccagggggccctggctttccactaactcctttgataatgcctgggaggccaggagctccaggtaggcctggtggtccaggtcgaccagcctctcctttgtcacctgtaaaagaaataaaaagacttggaaaaagacactgggcaagaa

SEQ ID NO: 25285 - DNA, 105 bp, Homo sapiens
  MAP TO AC007501.2; EXPRESSED IN BRAIN, SIGNAL =  12; EXPRESSED IN PLACENTA, SIGNAL = 9.3; EXPRESSED IN HEART, SIGNAL =  13; EXPRESSED IN HELA, SIGNAL =  12; EXPRESSED IN ADULT LIVER, SIGNAL = 8.4; EXPRESSED IN BONE MARROW, SIGNAL = 8.2; EXPRESSED IN FETAL LIVER, SIGNAL =  18; EXPRESSED IN LUNG, SIGNAL = 5.7; SWISSPROT HIT: P49960, EVALUE 4.20e+00; NT HIT: AF094574.1, EVALUE 8.90e-01; EST_HUMAN HIT: BE219351.1, EVALUE 3.30e-01
aatgtgcatggctttgatgctgttattgcaatcaacatgaaaaataccaccacagtgcttatccggacgtctcagttgttttgcctcatagcacaagtgattgtt

SEQ ID NO: 25286 - DNA, 199 bp, Homo sapiens
  MAP TO AC011467.3; EXPRESSED IN PLACENTA, SIGNAL = 2.3; EXPRESSED IN FETAL LIVER, SIGNAL = 4.1; EXPRESSED IN ADULT LIVER, SIGNAL = 2.5; EXPRESSED IN BRAIN, SIGNAL = 2.7; EXPRESSED IN LUNG, SIGNAL = 1.7; EXPRESSED IN HEART, SIGNAL = 3.1; EXPRESSED IN HELA, SIGNAL = 3.5; EXPRESSED IN BONE MARROW, SIGNAL = 2.4; SWISSPROT HIT: Q00121, EVALUE 3.40e-01; NT HIT: M81357.1, EVALUE 3.00e-02; EST_HUMAN HIT: AI076550.1, EVALUE 4.50e-02
aagaagccggccagccctcatgtgcccctgcagagtgctctcctcactggccattctgcatacatggctgctggtcaaccagactgtggtgctgggcggtgaggtgaagctccgctgtgaggtgtgcagggacttagcatttggaggcgaacagcagcaaggtgggcaccaatgtcatgccctcctcaccatgctcaag

SEQ ID NO: 25287 - DNA, 164 bp, Homo sapiens
  MAP TO AL117692.1; EXPRESSED IN BRAIN, SIGNAL = 5.4; EXPRESSED IN PLACENTA, SIGNAL = 5.6; EXPRESSED IN BONE MARROW, SIGNAL = 8.2; EXPRESSED IN FETAL LIVER, SIGNAL =   7; EXPRESSED IN HELA, SIGNAL = 3.1; EXPRESSED IN HEART, SIGNAL =  13; EXPRESSED IN LUNG, SIGNAL =  28; EXPRESSED IN ADULT LIVER, SIGNAL =  12; SWISSPROT HIT: O00151, EVALUE 2.00e-16; EST_HUMAN HIT: AA304026.1, EVALUE 6.00e-44; NT HIT: U90878.1, EVALUE 4.00e-44
cactaacgccagggtcatcacaaaccagtacaacaacccagctggcctctactcttctgaaaatatatccaacttcaacaacgccctggagtcagactgctaccagcggggtagaggcgaacatgctcagcctccaatcagccttgtcatcgacaaagaatctg

SEQ ID NO: 25288 - DNA, 243 bp, Homo sapiens; identical to SEQ ID NO: 24143
  MAP TO AL157957.1; EXPRESSED IN PLACENTA, SIGNAL = 1.5; EXPRESSED IN FETAL LIVER, SIGNAL = 1.8; EXPRESSED IN HELA, SIGNAL = 2.1; EXPRESSED IN HEART, SIGNAL = 1.8; NT HIT: AL163246.2, EVALUE 3.00e-64; EST_HUMAN HIT: AW340174.1, EVALUE 7.00e-60; SWISSPROT HIT: P32542, EVALUE 1.60e+00

SEQ ID NO: 25289 - DNA, 318 bp, Homo sapiens
  MAP TO AL158137.1; EXPRESSED IN FETAL LIVER, SIGNAL = 5.3; EXPRESSED IN HEART, SIGNAL =  10; EXPRESSED IN LUNG, SIGNAL = 7.8; EXPRESSED IN PLACENTA, SIGNAL = 3.9; EXPRESSED IN ADULT LIVER, SIGNAL = 3.8; EXPRESSED IN BONE MARROW, SIGNAL = 5.4; EXPRESSED IN HELA, SIGNAL = 4.8; EXPRESSED IN BRAIN, SIGNAL =   6; NT HIT: gi4757811, EVALUE 1.00e-119; EST_HUMAN HIT: BF240536.1, EVALUE 0.00e+00; SWISSPROT HIT: P56134, EVALUE 2.00e-40
aaaataagcgggcttaagaaaacagaagaacacagcggacaccaggactctaagatagcgtcagttgtaccagtgaaggacaagaaacttctggaggtcaaactgggggagctgccaagctggatcttgatgggggacttcagccctagtggcattttcggagcgtttcaaagaggttactactggtactacaagtacatcaatgtgaagaaggggagcatctcgggggttaccatggtgctggcatgctacgtgctcttcagctactccttttcctacaagcatctcaagcacgagtggctccgcaaataccactga

SEQ ID NO: 25290 - DNA, 107 bp, Homo sapiens
  MAP TO AC011431.2; EXPRESSED IN BRAIN, SIGNAL = 1.8; EXPRESSED IN PLACENTA, SIGNAL = 1.6; EXPRESSED IN HELA, SIGNAL = 1.8; EXPRESSED IN HEART, SIGNAL = 1.8; EXPRESSED IN ADULT LIVER, SIGNAL = 2.1; EXPRESSED IN LUNG, SIGNAL = 1.6; EXPRESSED IN FETAL LIVER, SIGNAL =   2; SWISSPROT HIT: P02000, EVALUE 9.40e+00; NT HIT: X78898.1, EVALUE 3.60e+00; EST_HUMAN HIT: AI287878.1, EVALUE 9.00e-05
gaacagatcattgaaggagtgtacaccacccgacatattgggagtaatattatccctttcatcctggatattaggaacaatatcacaggggtggtgtacacctcggc

SEQ ID NO: 25291 - DNA, 145 bp, Homo sapiens
  MAP TO AL138725.4; EXPRESSED IN BRAIN, SIGNAL = 3.4; EXPRESSED IN PLACENTA, SIGNAL =   3; EXPRESSED IN ADULT LIVER, SIGNAL = 2.8; EXPRESSED IN BONE MARROW, SIGNAL = 2.7; EXPRESSED IN FETAL LIVER, SIGNAL = 3.4; EXPRESSED IN HELA, SIGNAL = 3.2; EXPRESSED IN HEART, SIGNAL = 3.2; EXPRESSED IN LUNG, SIGNAL = 5.2; NT HIT: gi7661955, EVALUE 9.00e-11; EST_HUMAN HIT: BF331571.1, EVALUE 5.00e-72; SWISSPROT HIT: P50876, EVALUE 3.00e-18
atccaagttctggaggcagtaccagcaaaatgtatgcttgcagtttttgcacatcatctgagcgcagccttcattgcgttcgatataaacccggcaaactgggcactgcttaatgggggcttctgcatctgtcccaaagagggct

SEQ ID NO: 25292 - DNA, 132 bp, Homo sapiens
  MAP TO AC008934.4; EXPRESSED IN BRAIN, SIGNAL = 2.1; EXPRESSED IN PLACENTA, SIGNAL = 1.7; EXPRESSED IN BONE MARROW, SIGNAL = 2.5; EXPRESSED IN ADULT LIVER, SIGNAL = 2.1; EXPRESSED IN FETAL LIVER, SIGNAL = 2.6; EXPRESSED IN HELA, SIGNAL = 2.7; EXPRESSED IN HEART, SIGNAL = 2.4; SWISSPROT HIT: P81230, EVALUE 5.30e+00; EST_HUMAN HIT: AI491983.1, EVALUE 1.00e-07; NT HIT: AF253417.1, EVALUE 8.00e-08
caccataacttgattttgcctgttcttgttcttcatagaaatggaatgataccttatatttgctttcttttgctcaatattgtgtttgtgagattcatgtgtattcttgcctatggtataataaataatcat

SEQ ID NO: 25293 - DNA, 221 bp, Homo sapiens
  MAP TO AL109766.3; EXPRESSED IN PLACENTA, SIGNAL = 1.8; EXPRESSED IN BONE MARROW, SIGNAL = 1.8; EXPRESSED IN HEART, SIGNAL = 1.9; EXPRESSED IN FETAL LIVER, SIGNAL = 1.6; EXPRESSED IN HELA, SIGNAL = 1.8; EST_HUMAN HIT: BF691545.1, EVALUE 3.00e-46; NT HIT: gi7657233, EVALUE 2.00e-46
tcggcgacattgtggacttggcttcagtgaggtagaagattatgatggagaaggtgatgtggctggagatgatgatgatgacgatgatgattcacctgatcctgaaagtctagatgattctgaaagtgattcagagccatagaaagaagaatctgctgaagaactccaagctgctgagcaccctgatgaagtggaggatcccaaaaacaaaaaagatgcaa

SEQ ID NO: 25294 - DNA, 97 bp, Homo sapiens
  MAP TO AF233439.1; EXPRESSED IN ADULT LIVER, SIGNAL = 3.1; EXPRESSED IN HELA, SIGNAL = 2.8; EXPRESSED IN HEART, SIGNAL = 2.4; EXPRESSED IN BRAIN, SIGNAL = 2.9; EXPRESSED IN PLACENTA, SIGNAL = 1.8; EXPRESSED IN BONE MARROW, SIGNAL = 4.1; EXPRESSED IN LUNG, SIGNAL = 4.8; EXPRESSED IN FETAL LIVER, SIGNAL =   3; SWISSPROT HIT: P35084, EVALUE 5.50e+00; NT HIT: AL163281.2, EVALUE 9.00e-07; EST_HUMAN HIT: AA195490.1, EVALUE 8.00e-05
ctcccattctattcaacctgcctcccattctattcaacctgcctcccattctattcaacctgcctcccattctagtcaaagttatctccctgctcat

SEQ ID NO: 25295 - DNA, 91 bp, Homo sapiens
  MAP TO AC023404.2; EXPRESSED IN PLACENTA, SIGNAL = 1.6; EXPRESSED IN BRAIN, SIGNAL = 1.9; EXPRESSED IN BONE MARROW, SIGNAL = 2.6; EXPRESSED IN FETAL LIVER, SIGNAL = 2.5; EXPRESSED IN HELA, SIGNAL = 2.3; EXPRESSED IN LUNG, SIGNAL = 2.9; EXPRESSED IN ADULT LIVER, SIGNAL = 2.1; EXPRESSED IN HEART, SIGNAL = 2.1; EST_HUMAN HIT: AW971568.1, EVALUE 7.00e-33; NT HIT: AF003528.1, EVALUE 1.00e-27
ctttctttggtgcctccttgagtagctcagtaattgaccttctgaattctttttctggcaattcagagatttcttcttggtttggatccat

SEQ ID NO: 25296 - DNA, 107 bp, Homo sapiens
  MAP TO AC020557.2; EXPRESSED IN BRAIN, SIGNAL = 4.6; EXPRESSED IN HELA, SIGNAL =   4; EXPRESSED IN ADULT LIVER, SIGNAL = 2.7; EXPRESSED IN HEART, SIGNAL = 3.6; EXPRESSED IN LUNG, SIGNAL = 3.5; EXPRESSED IN PLACENTA, SIGNAL =   3; EXPRESSED IN FETAL LIVER, SIGNAL = 4.7; EXPRESSED IN BONE MARROW, SIGNAL = 2.5; NT HIT: AB001509.1, EVALUE 2.30e-01; EST_HUMAN HIT: BF305606.1, EVALUE 8.60e-02
tggaggccactgccagctccactggcgccaagtccctgcagtttcactggagccatcacctcttcctccttttcttcccccacggccaaacgcacaccaatgacact

SEQ ID NO: 25297 - DNA, 129 bp, Homo sapiens
  MAP TO AC024496.2; EXPRESSED IN BRAIN, SIGNAL = 1.5; EXPRESSED IN PLACENTA, SIGNAL = 1.5; EXPRESSED IN BONE MARROW, SIGNAL = 1.7; EXPRESSED IN HELA, SIGNAL = 1.9; EXPRESSED IN HEART, SIGNAL = 1.8; EXPRESSED IN FETAL LIVER, SIGNAL = 1.9; EXPRESSED IN ADULT LIVER, SIGNAL = 1.8; SWISSPROT HIT: O22469, EVALUE 7.00e+00
ttggatgcggatgatgacagtggagaggacagattttaaagagtttgggaagtgaaatctgtgggacttggagacaaactggtaatagaacataaaggagaggaaggtgtcaggagaagcaggtaagtt

SEQ ID NO: 25298 - DNA, 219 bp, Homo sapiens
  MAP TO AC023066.2; EXPRESSED IN PLACENTA, SIGNAL = 3.2; EXPRESSED IN BRAIN, SIGNAL = 3.3; EXPRESSED IN FETAL LIVER, SIGNAL = 5.1; EXPRESSED IN ADULT LIVER, SIGNAL = 4.3; EXPRESSED IN BONE MARROW, SIGNAL = 3.6; EXPRESSED IN HELA, SIGNAL = 6.1; EXPRESSED IN LUNG, SIGNAL = 2.5; EXPRESSED IN HEART, SIGNAL = 5.1; SWISSPROT HIT: P38964, EVALUE 1.90e-01; NT HIT: gi6671745, EVALUE 1.30e-01
tcaaggcatcagaacactgccacagtgattagaaaagttacacaagttatgagacagaagacaaaagaagccacccaagtatttgaggtaactttttccattgaggcaattgccaaatctgaaagcaaaagcaacagctggaaggctgagaagctgagtatagcttctggcaatcttcacacaaattggaacttggggaccatcaaagaggaggggttt

SEQ ID NO: 25299 - DNA, 249 bp, Homo sapiens
  MAP TO AL136418.1; EXPRESSED IN BRAIN, SIGNAL =   2; EXPRESSED IN PLACENTA, SIGNAL = 1.8; EXPRESSED IN HEART, SIGNAL =   3; EXPRESSED IN ADULT LIVER, SIGNAL = 2.2; EXPRESSED IN BONE MARROW, SIGNAL = 1.7; EXPRESSED IN FETAL LIVER, SIGNAL =   3; EXPRESSED IN LUNG, SIGNAL = 2.3; EXPRESSED IN HELA, SIGNAL = 3.3; NT HIT: AB037737.1, EVALUE 0.00e+00; SWISSPROT HIT: P47122, EVALUE 6.50e+00; EST_HUMAN HIT: BE546371.1, EVALUE 5.00e-21
gtggtgctttctacacagcagagactagtgaaaatgcaaaattgcattattacaactcctgggcacttatcctccatgctacagcattgtggcttacaagcacgggttttgttgttgctgacccagatgaaggagcatctaatctctccaggcctgtaacaccaacttccatgtgtcagggttcatcatctggggctaccataaagtcccctgaggatgtctacactgatagattccatcttattttag

SEQ ID NO: 25300 - DNA, 155 bp, Homo sapiens
  MAP TO AC021107.2; EXPRESSED IN BRAIN, SIGNAL = 1.8; EXPRESSED IN PLACENTA, SIGNAL = 1.9; EXPRESSED IN BONE MARROW, SIGNAL = 1.5; EXPRESSED IN HELA, SIGNAL = 1.9; EXPRESSED IN ADULT LIVER, SIGNAL = 1.7; EXPRESSED IN FETAL LIVER, SIGNAL = 1.9; EXPRESSED IN HEART, SIGNAL =   2; SWISSPROT HIT: P70213, EVALUE 2.00e-05; EST_HUMAN HIT: AA001786.1, EVALUE 8.00e-34; NT HIT: AL163209.2, EVALUE 5.00e-34
atgatgaaagaaaatgatgaactcagggatactgtctcccaacttcagaagcagatactgaggctcaaatctgctaattttgccctgagtgagaatcttatcatttgtagagcaagagctaaaattgtggaaaagcagacacaggctcttatcat

SEQ ID NO: 25301 - DNA, 207 bp, Homo sapiens
  MAP TO AC021097.3; EXPRESSED IN BRAIN, SIGNAL = 2.6; EXPRESSED IN LUNG, SIGNAL = 3.7; EXPRESSED IN PLACENTA, SIGNAL = 2.8; EXPRESSED IN HEART, SIGNAL = 2.6; EXPRESSED IN HELA, SIGNAL = 2.6; EXPRESSED IN FETAL LIVER, SIGNAL = 2.7; EXPRESSED IN BONE MARROW, SIGNAL = 2.5; EXPRESSED IN ADULT LIVER, SIGNAL = 2.6; NT HIT: AF190493.1, EVALUE 1.20e-01; SWISSPROT HIT: Q00071, EVALUE 2.50e-01; EST_HUMAN HIT: AA677783.1, EVALUE 7.30e-01
ctactcatgctcatggctaccttgtctgtttccttggatggactggctcggaaacacaggtggcatgagagaggcggcaggactggaggagccacgctgcctggggccctcccctgtggccggtccagggaggaatagctccaggagggagcctcgtggtggcagctgagggccaaatgagcaggtcagttcttcgagcacgtgtga

SEQ ID NO: 25302 - DNA, 102 bp, Homo sapiens
  MAP TO AC006946.20; EXPRESSED IN BRAIN, SIGNAL = 1.5; EXPRESSED IN HELA, SIGNAL = 2.1; EXPRESSED IN ADULT LIVER, SIGNAL = 1.7; EXPRESSED IN HEART, SIGNAL = 1.7; EXPRESSED IN PLACENTA, SIGNAL = 1.8; EXPRESSED IN LUNG, SIGNAL = 1.7; EXPRESSED IN FETAL LIVER, SIGNAL = 1.8; EXPRESSED IN BONE MARROW, SIGNAL = 1.6; EST_HUMAN HIT: AW401745.1, EVALUE 3.20e-01; NT HIT: gi11526289, EVALUE 6.00e-51
actacatgcccctgtgggtgtactggttcatcacgggcatctccatcctgctggtgggctccgtcatcctgctcatcgtctgcatgacctggaggctagctg

SEQ ID NO: 25303 - DNA, 239 bp, Homo sapiens
  MAP TO AC007342.2; EXPRESSED IN ADULT LIVER, SIGNAL = 3.4; EXPRESSED IN BONE MARROW, SIGNAL = 3.4; EXPRESSED IN FETAL LIVER, SIGNAL = 3.6; EXPRESSED IN BRAIN, SIGNAL = 4.2; EXPRESSED IN PLACENTA, SIGNAL = 3.1; EXPRESSED IN HELA, SIGNAL = 4.1; EXPRESSED IN HEART, SIGNAL = 3.5; EXPRESSED IN LUNG, SIGNAL = 6.1; EST_HUMAN HIT: BE925857.1, EVALUE 1.00e-126; NT HIT: gi11430868, EVALUE 0.00e+00; SWISSPROT HIT: Q08999, EVALUE 1.00e-33
cttgcacaggaatggttaccgtttgcccattgttggctgtgacagtggcggttgccatggtgaccaaagtctgtccaggaactggtgtgacagaaacagtctccccagatacattctgcacagggacagcattgactaggggctgtgggggcatgcgcccaggcgtccctccatcagaggggctatcattctcaacaaatagccgccttctggtagtgctggctggtggggagctgtac

SEQ ID NO: 25304 - DNA, 85 bp, Homo sapiens
  MAP TO AL133380.3; EXPRESSED IN PLACENTA, SIGNAL = 2.1; EXPRESSED IN BRAIN, SIGNAL = 2.4; EXPRESSED IN HELA, SIGNAL = 2.3; EXPRESSED IN FETAL LIVER, SIGNAL = 1.9; EXPRESSED IN ADULT LIVER, SIGNAL = 2.1; EXPRESSED IN BONE MARROW, SIGNAL =   2; EXPRESSED IN HEART, SIGNAL = 3.6; EXPRESSED IN LUNG, SIGNAL = 1.8; SWISSPROT HIT: P49263, EVALUE 4.30e+00; NT HIT: D89013.1, EVALUE 6.90e-01
tttacaaggaggaaattggaacaaggctggctgctgtgtttcaagacaaagactgctgccacaccggggagaggatggggccagg

SEQ ID NO: 25305 - DNA, 155 bp, Homo sapiens
  MAP TO AL139342.2; EXPRESSED IN BRAIN, SIGNAL =  14; EXPRESSED IN HELA, SIGNAL =  24; EXPRESSED IN ADULT LIVER, SIGNAL =  18; EXPRESSED IN FETAL LIVER, SIGNAL =  23; EXPRESSED IN BONE MARROW, SIGNAL =  15; EXPRESSED IN HEART, SIGNAL =  19; EXPRESSED IN LUNG, SIGNAL =  12; EXPRESSED IN PLACENTA, SIGNAL =  15; SWISSPROT HIT: O65787, EVALUE 3.00e+00; EST_HUMAN HIT: AA927874.1, EVALUE 3.00e-67
tctgccatgctgttttctgttggtgaggcctgggacagtttcttcatccttatgtctcagtttactcttatcaaaatgagaatagtatatgcttctcagggtattctgagggttcgctacatgaatacacttgaagtaggtaggacactcagtgt

SEQ ID NO: 25306 - DNA, 245 bp, Homo sapiens
  MAP TO AC011465.4; EXPRESSED IN BONE MARROW, SIGNAL = 2.9; EXPRESSED IN HEART, SIGNAL = 3.4; EXPRESSED IN LUNG, SIGNAL = 2.7; EXPRESSED IN PLACENTA, SIGNAL = 2.9; EXPRESSED IN BRAIN, SIGNAL = 2.8; EXPRESSED IN HELA, SIGNAL = 3.6; EXPRESSED IN ADULT LIVER, SIGNAL = 3.2; EXPRESSED IN FETAL LIVER, SIGNAL = 3.5; SWISSPROT HIT: P13186, EVALUE 1.40e-01; NT HIT: X84737.1, EVALUE 6.00e-04; EST_HUMAN HIT: BE292968.1, EVALUE 1.00e-113
ctcaccatccgtaatcatcatcatggaaaagcgagtgataatcacagtgagataccgtgacacacctgcttcagtggctacgataaaaagagggcacggaggagctgaggtcagagagttccacaggaggtctgctagggactggggccttttccttacatggatagggggagggttctgagcagaggaaggacatgatctgacccatagattaatagagtccctctggctgtgtgtggcagcag

SEQ ID NO: 25307 - DNA, 109 bp, Homo sapiens
  MAP TO AC008407.3; EXPRESSED IN PLACENTA, SIGNAL = 5.2; EXPRESSED IN FETAL LIVER, SIGNAL =  11; EXPRESSED IN HELA, SIGNAL =  12; EXPRESSED IN ADULT LIVER, SIGNAL = 6.4; EXPRESSED IN HEART, SIGNAL =  11; EXPRESSED IN BRAIN, SIGNAL = 6.9; EXPRESSED IN LUNG, SIGNAL = 4.9; EXPRESSED IN BONE MARROW, SIGNAL = 5.8; EST_HUMAN HIT: AL040129.1, EVALUE 8.80e-02; NT HIT: AB022685.1, EVALUE 9.30e-01
ctcttcattcccacccacgcacttctcgacgtaatacaggctagaccaaagcaaagtcatgcaactgcttccattttttatggcagcttgtagcacattcaggtcagta

SEQ ID NO: 25308 - DNA, 265 bp, Homo sapiens
  MAP TO AL133262.2; EXPRESSED IN ADULT LIVER, SIGNAL = 2.1; EXPRESSED IN BONE MARROW, SIGNAL =   2; EXPRESSED IN HEART, SIGNAL = 2.1; EXPRESSED IN PLACENTA, SIGNAL = 2.1; EXPRESSED IN BRAIN, SIGNAL =   2; EXPRESSED IN FETAL LIVER, SIGNAL = 2.2; EXPRESSED IN HELA, SIGNAL = 2.3; EST_HUMAN HIT: AA992690.1, EVALUE 3.80e+00; SWISSPROT HIT: Q62563, EVALUE 1.40e+00; NT HIT: AF157559.1, EVALUE 1.00e-02
tttttataaaatcataatcaagaagtctatgctatcacagagcaaaactttggatgtgtgcatgtcctttgatcatcttcagggaaggaacaattctgagccccaaatcaagaataaaacagctgaagaccaggtgaatgaggaagaggtcacagcacacctttttgtacaggaaactcacaagtggcagcatttacaccacggagaacagcagcagccactgggacatgacaacaggcagggcagggcagggcacagggactag

SEQ ID NO: 25309 - DNA, 148 bp, Homo sapiens
  MAP TO AC008649.3; EXPRESSED IN BRAIN, SIGNAL = 2.8; EXPRESSED IN PLACENTA, SIGNAL = 2.4; EXPRESSED IN FETAL LIVER, SIGNAL = 2.5; EXPRESSED IN HELA, SIGNAL = 2.3; EXPRESSED IN BONE MARROW, SIGNAL = 2.2; EXPRESSED IN LUNG, SIGNAL = 8.7; EXPRESSED IN HEART, SIGNAL = 4.9; SWISSPROT HIT: Q50589, EVALUE 1.80e+00; NT HIT: gi11425574, EVALUE 5.00e-62; EST_HUMAN HIT: BF182912.1, EVALUE 7.00e-62
cccccggccccagtgctggaaggatacatgtgcctggtcgatcatgcacttgcacagggtgaagtctgtgtgcggcaagttggtgagggccttcagcaggatctgggcggtgaccgtggtctgaaagaaggctgggttgaactggtac

SEQ ID NO: 25310 - DNA, 84 bp, Homo sapiens
  MAP TO AL136117.2; EXPRESSED IN BRAIN, SIGNAL = 8.4; EXPRESSED IN HELA, SIGNAL =  15; EXPRESSED IN ADULT LIVER, SIGNAL =  11; EXPRESSED IN FETAL LIVER, SIGNAL =  14; EXPRESSED IN BONE MARROW, SIGNAL = 9.3; EXPRESSED IN HEART, SIGNAL =  11; EXPRESSED IN LUNG, SIGNAL = 8.1; EXPRESSED IN PLACENTA, SIGNAL = 9.1; NT HIT: gi6005813, EVALUE 3.00e-40; SWISSPROT HIT: P53894, EVALUE 1.00e-04; EST_HUMAN HIT: BE886996.1, EVALUE 4.00e-40
ctgctctttttcaagcatatctgctttacggagtattttcattgcatacacatgtcccgtatctttcttctgaacaagccgtac

SEQ ID NO: 25311 - DNA, 235 bp, Homo sapiens
  MAP TO AC023109.2; EXPRESSED IN BRAIN, SIGNAL = 1.6; EXPRESSED IN ADULT LIVER, SIGNAL = 1.9; EXPRESSED IN HEART, SIGNAL = 2.1; EXPRESSED IN LUNG, SIGNAL = 2.3; SWISSPROT HIT: Q10484, EVALUE 2.20e-01; NT HIT: AL163248.2, EVALUE 2.00e-09; EST_HUMAN HIT: AW362637.1, EVALUE 5.40e-02
agtgcatagatgccagtggctctgctccccccatgatgacaccaccaccattgtaaacacacacatgaacaccagtaaccttgcccaaccccgtgctgtgaccaccatgaatgtgcacatggaggccagtaatccccatgcccaccagtacccccactgcactgctgctgccagtgtgagtgcaaatacagacaccagcaaacctgcccctgactgtgccccagtgctggcatga

SEQ ID NO: 25312 - DNA, 144 bp, Homo sapiens
  MAP TO AL121953.10; EXPRESSED IN BRAIN, SIGNAL = 1.8; EXPRESSED IN HELA, SIGNAL = 2.1; EXPRESSED IN ADULT LIVER, SIGNAL = 1.9; EXPRESSED IN FETAL LIVER, SIGNAL = 1.9; EXPRESSED IN HEART, SIGNAL = 2.4; EXPRESSED IN BONE MARROW, SIGNAL = 1.7; EST_HUMAN HIT: BE786184.1, EVALUE 1.00e-20; NT HIT: gi7706668, EVALUE 7.00e-21
cttttcagcttcttctgcttctttttctttttgtttcttttcttcttctcttctagtttttatctgatctactatttcatttaatttttcttgcacagctgtcactagagtaaaaatcatcaccataccaagattttcttcagc

SEQ ID NO: 25313 - DNA, 99 bp, Homo sapiens
  MAP TO AL122023.2; EXPRESSED IN HEART, SIGNAL = 2.2; EXPRESSED IN BRAIN, SIGNAL = 1.5; EXPRESSED IN PLACENTA, SIGNAL = 2.3; EXPRESSED IN FETAL LIVER, SIGNAL = 1.9; EXPRESSED IN HELA, SIGNAL = 2.7; EST_HUMAN HIT: AA403053.1, EVALUE 3.00e-29; NT HIT: AL163209.2, EVALUE 5.00e-27
ctggtctcatcctgtggtcatttccccagtgctagaatgcataattggcattaacatacttagcagcttgcagaacccccacattggctccctgactgg

SEQ ID NO: 25314 - DNA, 113 bp, Homo sapiens
  MAP TO AC008891.4; EXPRESSED IN PLACENTA, SIGNAL = 1.5; EXPRESSED IN BONE MARROW, SIGNAL = 1.9; EXPRESSED IN HELA, SIGNAL = 2.5; EXPRESSED IN LUNG, SIGNAL = 2.4; EXPRESSED IN ADULT LIVER, SIGNAL = 2.3; EXPRESSED IN HEART, SIGNAL = 2.2; EXPRESSED IN BRAIN, SIGNAL = 2.4; EXPRESSED IN FETAL LIVER, SIGNAL =   2; EST_HUMAN HIT: N30022.1, EVALUE 6.00e-03; SWISSPROT HIT: O94759, EVALUE 1.00e-04; NT HIT: gi11424084, EVALUE 2.00e-57
cctgtgggagctcggaggcctcagcctacctggatgagctgcgtttggctgtggcttggaaccgcgtggacattgcccagagtgaactctttcggggggacatccaatggcgg

SEQ ID NO: 25315 - DNA, 207 bp, Homo sapiens
  MAP TO AC023154.3; EXPRESSED IN BRAIN, SIGNAL = 3.8; EXPRESSED IN HELA, SIGNAL = 5.7; EXPRESSED IN LUNG, SIGNAL = 3.3; EXPRESSED IN PLACENTA, SIGNAL = 3.5; EXPRESSED IN HEART, SIGNAL = 4.3; EXPRESSED IN FETAL LIVER, SIGNAL = 4.2; EXPRESSED IN BONE MARROW, SIGNAL = 3.3; EXPRESSED IN ADULT LIVER, SIGNAL =   4; NT HIT: AJ006917.1, EVALUE 1.20e-01; SWISSPROT HIT: P55040, EVALUE 9.00e-04; EST_HUMAN HIT: AW966185.1, EVALUE 1.00e-108
ctgtttgatgtgcaacaggtcagctttgttggccacgaccaccacaggcagccgggtgcccaggtgtagctgctgcacgtgctggtggagctggctgatgagttcatagctcttgtagtcagtgatggagaaaacgatcaccacagcatctgcccagcgaatgcacctattcagctgttcactgcagctcaggctgttctcatggac

SEQ ID NO: 25316 - DNA, 214 bp, Homo sapiens
  MAP TO AC011497.3; EXPRESSED IN BRAIN, SIGNAL = 3.3; EXPRESSED IN PLACENTA, SIGNAL = 2.5; EXPRESSED IN FETAL LIVER, SIGNAL = 3.5; EXPRESSED IN HELA, SIGNAL = 2.7; EXPRESSED IN ADULT LIVER, SIGNAL = 2.7; EXPRESSED IN BONE MARROW, SIGNAL = 2.7; EXPRESSED IN HEART, SIGNAL =   4; EXPRESSED IN LUNG, SIGNAL = 2.7; EST_HUMAN HIT: AW899314.1, EVALUE 5.00e-45; NT HIT: AB011541.1, EVALUE 1.00e-117; SWISSPROT HIT: Q07954, EVALUE 7.90e-02
ctgtcctcttgaactgccgcgtccacatgcacttgccctcccgcgtgcactgctcgcagtcagcagccccgcacgcagcctcggagcagttccctgcccagaagacctctcgctggttgatccgacagtcattctcagaggtgcaggacccattgcgtccaatgcaagcaccttcggggcagttggtacaccacttacagcggggggtggacgc

SEQ ID NO: 25317 - DNA, 447 bp, Homo sapiens
  MAP TO AC011489.3; EXPRESSED IN ADULT LIVER, SIGNAL = 9.1; EXPRESSED IN PLACENTA, SIGNAL = 6.1; EXPRESSED IN BONE MARROW, SIGNAL = 6.4; EXPRESSED IN FETAL LIVER, SIGNAL = 9.1; EXPRESSED IN LUNG, SIGNAL =   7; EXPRESSED IN HEART, SIGNAL = 6.1; EXPRESSED IN BRAIN, SIGNAL = 6.2; EXPRESSED IN HELA, SIGNAL =  10; SWISSPROT HIT: P10159, EVALUE 2.00e-31; NT HIT: gi4503544, EVALUE 0.00e+00; EST_HUMAN HIT: BE887589.1, EVALUE 1.00e-130
atgcagtgctcagcattatgtaacactggcttcgtggtgctcaaaggctggccctgtaaggtctttgagatgtctgcttggaagactggcaagcacagccgcgtcaaggtccacctggttggtattgacatctttactgggaagaaatataaaaataactgcctgtcaccttataatgtgggtgtccccagcatcaaaaggaatgactcccagttgattggcatccaggaaggtacccctcactgctccaggacagcagggaggtgcgagaggaccttcttcgtctgccagaggagaccttggcaaggagatgagcaaaagtaccgctgtggagaagggaccctgatcaccgtgctgtctgccatgacagaggaggcagctgttgcagtcaaggccatggcaaaagaactggctcccagggtgacagtggtggcagcagtgatcttc

SEQ ID NO: 25318 - DNA, 230 bp, Homo sapiens
  MAP TO AL117258.2; EXPRESSED IN BRAIN, SIGNAL = 8.7; EXPRESSED IN ADULT LIVER, SIGNAL = 9.1; EXPRESSED IN BONE MARROW, SIGNAL = 8.3; EXPRESSED IN HELA, SIGNAL =  12; EXPRESSED IN HEART, SIGNAL =  11; EXPRESSED IN PLACENTA, SIGNAL = 7.6; EXPRESSED IN LUNG, SIGNAL = 7.1; EXPRESSED IN FETAL LIVER, SIGNAL =  11; NT HIT: gi11433924, EVALUE 9.00e-80; EST_HUMAN HIT: N46160.1, EVALUE 8.00e-69; SWISSPROT HIT: P77504, EVALUE 8.20e-01
gttcctgaggctgtggattgctgtgctggtgatctaccccaccaaccaggctgtcatcgccctcaccttctccaactacgtgctgcagccgctcttccccacctgcttccccccagagtctcgcttcggctcctggctgccatctgcttatgtaagtgtcatctgggtcttggtagcaagacagcctcttttattatatttattattattatttttagaaacagagtctt

SEQ ID NO: 25319 - DNA, 270 bp, Homo sapiens
  MAP TO AC010582.6; EXPRESSED IN BRAIN, SIGNAL =  10; EXPRESSED IN PLACENTA, SIGNAL = 3.8; EXPRESSED IN FETAL LIVER, SIGNAL = 4.9; EXPRESSED IN HELA, SIGNAL = 5.5; EXPRESSED IN ADULT LIVER, SIGNAL = 1.5; EXPRESSED IN BONE MARROW, SIGNAL = 6.5; EXPRESSED IN HEART, SIGNAL = 3.1; EXPRESSED IN LUNG, SIGNAL =  11; NT HIT: gi11436604, EVALUE 1.00e-118; SWISSPROT HIT: Q15701, EVALUE 1.00e-40; EST_HUMAN HIT: AA315007.1, EVALUE 1.00e-118
gaagaatggccacttggcccaggtagaagtagatgaagtgtttggtttcatgtgtcacgtaactactgaagttcctccccaggatgcagtgccaggtggcattgtacttcttgtcacattccttcttgatatgagccgcagtgttcttctctatgttgtatttctccagcgcctgaggagcgcactccactgagttctgttgcatctcctccgacatgtccgcatttttgatcacggcctttcggtcgcacatggttaccatggagaaag

SEQ ID NO: 25320 - DNA, 92 bp, Homo sapiens
  MAP TO AC019155.2; EXPRESSED IN BRAIN, SIGNAL = 4.5; EXPRESSED IN FETAL LIVER, SIGNAL = 4.6; EXPRESSED IN HELA, SIGNAL = 4.1; EXPRESSED IN ADULT LIVER, SIGNAL = 3.6; EXPRESSED IN BONE MARROW, SIGNAL =   4; EXPRESSED IN HEART, SIGNAL = 3.5; EXPRESSED IN LUNG, SIGNAL = 4.4; EXPRESSED IN PLACENTA, SIGNAL = 3.6; NT HIT: gi6680296, EVALUE 7.60e-01; EST_HUMAN HIT: BF674023.1, EVALUE 2.80e-01
gcccagtagttagaggtggtaagaaaggagacaaacagcaggtacgtgagctgtgtgagaagccagagggcagtagagcaggaaaatggcag

SEQ ID NO: 25321 - DNA, 99 bp, Homo sapiens
  MAP TO AC008458.3; EXPRESSED IN BRAIN, SIGNAL = 2.5; EXPRESSED IN ADULT LIVER, SIGNAL = 4.4; EXPRESSED IN BONE MARROW, SIGNAL =   2; EXPRESSED IN HELA, SIGNAL = 2.6; EXPRESSED IN LUNG, SIGNAL = 2.6; EXPRESSED IN HEART, SIGNAL = 2.9; EXPRESSED IN PLACENTA, SIGNAL = 3.4; EXPRESSED IN FETAL LIVER, SIGNAL = 3.7; EST_HUMAN HIT: AW452218.1, EVALUE 6.00e-49
ctaacaagcagcctttttatcttcagatcctaaatgaatgtcccaaagatggtaagccctccatgactgttgatagtgctgatgggagaagtgagatac

SEQ ID NO: 25322 - DNA, 296 bp, Homo sapiens
  MAP TO AL135931.4; EXPRESSED IN BRAIN, SIGNAL = 4.2; EXPRESSED IN FETAL LIVER, SIGNAL = 4.7; EXPRESSED IN HELA, SIGNAL = 4.9; EXPRESSED IN HEART, SIGNAL = 3.7; EXPRESSED IN PLACENTA, SIGNAL = 3.8; EXPRESSED IN LUNG, SIGNAL = 6.3; EXPRESSED IN BONE MARROW, SIGNAL = 4.1; EXPRESSED IN ADULT LIVER, SIGNAL = 4.8; NT HIT: gi5803136, EVALUE 5.00e-51; SWISSPROT HIT: P98179, EVALUE 1.00e-32; EST_HUMAN HIT: AU121407.1, EVALUE 8.00e-51
cacgcccatgggccccaaagtcacctcctctggttccccagcagacttgcctgcatgatccacgcggatctggtgaccatccagggactctctgttcatggctctcatggcgtctgggttggtgatggtgatgaaaccaaaacccctggaccactgagtctccttgacaatgaccacctcagagacaggcccgaagctgctgaagtcgtcttccagcacctgctcgtcggtgttaatgttgagccctcccacgaagatctttccttctttagtggacatggcagcgagttcaagtc

SEQ ID NO: 25323 - DNA, 193 bp, Homo sapiens
  MAP TO AC008917.3; EXPRESSED IN BRAIN, SIGNAL = 2.4; EXPRESSED IN PLACENTA, SIGNAL = 1.9; EXPRESSED IN ADULT LIVER, SIGNAL =   2; EXPRESSED IN BONE MARROW, SIGNAL = 2.9; EXPRESSED IN HELA, SIGNAL = 2.3; EXPRESSED IN FETAL LIVER, SIGNAL = 2.1; EXPRESSED IN HEART, SIGNAL = 2.1; EST_HUMAN HIT: BE893569.1, EVALUE 1.00e-104; NT HIT: gi7705936, EVALUE 1.00e-105; SWISSPROT HIT: Q99104, EVALUE 5.00e+00
cttcaaaatttttggatggcttataagcataatttttgacaatcatcttaataagattcatacattggacaatgaatcgttcaaatgtaacgccttcaccaacttctgtaaaaacatagcttacagaaaattccagtgatctctgaattagaggagtaaatgaaaaaggatgctgatccaagaagtccaaaag

SEQ ID NO: 25324 - DNA, 447 bp, Homo sapiens
  MAP TO AL132819.1; EXPRESSED IN PLACENTA, SIGNAL = 2.1; EXPRESSED IN BRAIN, SIGNAL = 1.4; EXPRESSED IN BONE MARROW, SIGNAL = 2.3; EXPRESSED IN FETAL LIVER, SIGNAL = 1.7; EXPRESSED IN HELA, SIGNAL = 1.8; EXPRESSED IN LUNG, SIGNAL =   6; EXPRESSED IN HEART, SIGNAL = 2.5; EST_HUMAN HIT: BF576267.1, EVALUE 0.00e+00; NT HIT: AF030252.1, EVALUE 1.10e+00; SWISSPROT HIT: Q10411, EVALUE 3.40e-01
gaagataaatccgtcttgaaaaaccacgatctttctgttcgtgcaaaaatggccatcaaattgcgcttaggtgagaaagagattttggaaaaagcagtaaagagtgcagctgtcaaccgggaatactatcgccaacagatggaggaaaaggctccgcttcccaaatatgaagagagtaaccttgggctgttggagagcagcgtgggggactcgaggctccccctggtcttgagaaacctcgaggaggaggctggagtgcaggatgccttgaacatcagagaggcaatcagcaaagcaaaggccacagaaaacgggcttgtaaacggtgaaaactctatccctaatgggaccaggtccgaaaatgaaagtctcaatcaagaaagtaaaagagcagttgaagacgccaaaggatcttcttcagacagcactgctggagttaaggagtag

SEQ ID NO: 25325 - DNA, 150 bp, Homo sapiens
  MAP TO AL109938.8; EXPRESSED IN BRAIN, SIGNAL = 1.6; EXPRESSED IN FETAL LIVER, SIGNAL = 1.9; EXPRESSED IN ADULT LIVER, SIGNAL = 1.6; EXPRESSED IN HELA, SIGNAL = 1.9; EXPRESSED IN HEART, SIGNAL = 1.8; EXPRESSED IN PLACENTA, SIGNAL = 1.9; NT HIT: M25856.1, EVALUE 3.40e-01
acaaatgtcaggcattcctgccagatggccaggacccagacttgagtggtcaccacagaaatcaggtgggagagaaatttgagaggcaccactaaggagaataatcagagtgtggtggttaagaagtaagtataagacaggatgataagg

SEQ ID NO: 25326 - DNA, 327 bp, Homo sapiens
  MAP TO AC007226.2; EXPRESSED IN BONE MARROW, SIGNAL = 5.5; EXPRESSED IN HEART, SIGNAL = 5.4; EXPRESSED IN LUNG, SIGNAL = 6.4; EXPRESSED IN PLACENTA, SIGNAL = 3.5; EXPRESSED IN HELA, SIGNAL = 7.5; EXPRESSED IN ADULT LIVER, SIGNAL = 3.2; EXPRESSED IN BRAIN, SIGNAL = 5.8; EXPRESSED IN FETAL LIVER, SIGNAL = 6.4; EST_HUMAN HIT: AW328173.1, EVALUE 0.00e+00; SWISSPROT HIT: Q08696, EVALUE 3.50e-01; NT HIT: AJ007398.1, EVALUE 0.00e+00
attcaaaaacatgccacaggaaagaagtctccagcaaagagtcctaatcccagcacacctcgtgggaagaaaagaaaggctttgccagcatctgagaccccaaaagctgcagagtctgagaccccagggaaaagcccagagaagaagccaaaaatcaaagaagaggcagtgaaggaaaaaagtccttcgctggggaaaaaagatgcgagacagactccaaaaaagccagaggccaagtttttcaccactcctagtaaatctgtgagaaaagcttcccacacccccaaaaaatggcccaaaaaacccaaagtaccccagtcgacctaa

SEQ ID NO: 25327 - DNA, 326 bp, Homo sapiens
  MAP TO AC008569.3; EXPRESSED IN PLACENTA, SIGNAL = 1.5; EXPRESSED IN BONE MARROW, SIGNAL = 1.8; EXPRESSED IN HELA, SIGNAL = 3.6; EXPRESSED IN FETAL LIVER, SIGNAL = 2.6; EXPRESSED IN LUNG, SIGNAL =  10; EXPRESSED IN HEART, SIGNAL = 2.1; EST_HUMAN HIT: BE867045.1, EVALUE 2.00e-82; NT HIT: X94633.1, EVALUE 1.00e-100; SWISSPROT HIT: P48960, EVALUE 3.00e-27
atcactctgcctctctggggtggtggggtaggtacatgtgcacctgtcccatctcagacgccaggcactgaccctacaaccaaggccctgctctctggatgctgccagaatggctctggtgaccccaaacctcatggatggaaagtcagaggacgtggggtggttcttaccttgacaggtgttctcgctctcattcttgaatgtttttgccccagaaacaggctcatatcccgggctgcacacgcagtcgtagctcccctctgtgttccagcagtccgagaattttccgcatgacactttcgacggtgttgcacactcgttgatgt

SEQ ID NO: 25328 - DNA, 156 bp, Homo sapiens
  MAP TO AC019140.2; EXPRESSED IN BRAIN, SIGNAL = 1.6; EXPRESSED IN FETAL LIVER, SIGNAL = 2.5; EXPRESSED IN BONE MARROW, SIGNAL = 1.5; EXPRESSED IN HEART, SIGNAL = 1.9; EXPRESSED IN LUNG, SIGNAL = 1.8; EXPRESSED IN PLACENTA, SIGNAL =   2; EXPRESSED IN HELA, SIGNAL = 1.7; EXPRESSED IN ADULT LIVER, SIGNAL = 8.7; SWISSPROT HIT: P53838, EVALUE 6.80e+00; EST_HUMAN HIT: BF680078.1, EVALUE 1.00e-11; NT HIT: gi7705408, EVALUE 1.00e-07
aacctgtgaacatgttaccttcaacgacaaaagggactttgcagatgtgatgaaggatcttgagaaggagggttattttggttatgcaggtggtcacaatgttatcataaggacccttatgagagggaagcaagaggatcaaaatcagaaaaagat

SEQ ID NO: 25329 - DNA, 300 bp, Homo sapiens
  MAP TO AC024183.2; EXPRESSED IN BRAIN, SIGNAL =  72; EXPRESSED IN FETAL LIVER, SIGNAL =  47; EXPRESSED IN ADULT LIVER, SIGNAL =  26; EXPRESSED IN BONE MARROW, SIGNAL =  83; EXPRESSED IN HELA, SIGNAL =  41; EXPRESSED IN LUNG, SIGNAL = 1.2e+02; EXPRESSED IN HEART, SIGNAL = 1.2e+02; EXPRESSED IN PLACENTA, SIGNAL =  42; EST_HUMAN HIT: AW403996.1, EVALUE 1.00e-105; SWISSPROT HIT: O18500, EVALUE 3.00e-42; NT HIT: M55083.1, EVALUE 0.00e+00
atgactcagattatgtttgagaccttcaataccccggccatgtacgtggccatccgggatgtgctgtccctctatgcctttgggcgcaccactggcattgtcatggactgtggacacagggtcacccacacggtgcccatctacgagggctactcccttccccatgccatcctgcatctggacctgactggctgggacttgactgagtacctcaagaagatcctcaaggagagaggctacagcttcaccaacacagcccagcgggaaatcatgcgcgatatcaaggagaagctgtgctag

SEQ ID NO: 25330 - DNA, 256 bp, Homo sapiens
  MAP TO AC005323.1; EXPRESSED IN BRAIN, SIGNAL = 1.7; EXPRESSED IN PLACENTA, SIGNAL = 2.1; EXPRESSED IN ADULT LIVER, SIGNAL = 1.9; EXPRESSED IN BONE MARROW, SIGNAL = 2.1; EXPRESSED IN HELA, SIGNAL = 1.8; EXPRESSED IN HEART, SIGNAL = 2.9; EXPRESSED IN LUNG, SIGNAL = 2.5; EXPRESSED IN FETAL LIVER, SIGNAL = 1.6; EST_HUMAN HIT: AA418467.1, EVALUE 3.00e-28; SWISSPROT HIT: P02565, EVALUE 2.00e-26; NT HIT: gi7669505, EVALUE 1.00e-125
agcttgaacctggagttgcaagtcatttttttcttgcatcagagtaaccattttttcttccagctctttcctttttgcctcggtcttagccagctcttctttggttttctcaaattcttccttcatgttggccatctccttctctgtctctgcacttttgaggaggggtttgatcttgaaatacagcttcatccagggccagtgcttcacattcatgaaggcacggacattgtactggatgcagaagatggactct

SEQ ID NO: 25331 - DNA, 143 bp, Homo sapiens
  MAP TO AC011478.2; EXPRESSED IN BRAIN, SIGNAL = 8.9; EXPRESSED IN FETAL LIVER, SIGNAL =  14; EXPRESSED IN BONE MARROW, SIGNAL = 6.4; EXPRESSED IN LUNG, SIGNAL = 3.2; EXPRESSED IN PLACENTA, SIGNAL = 7.2; EXPRESSED IN HEART, SIGNAL =  11; EXPRESSED IN HELA, SIGNAL =  12; EXPRESSED IN ADULT LIVER, SIGNAL = 8.5; NT HIT: Z83860.1, EVALUE 5.00e+00; EST_HUMAN HIT: AW581192.1, EVALUE 7.50e+00
ctagtttcgtagaaggctgatctccgaagggaattttcctgggcttcctgtcctagtgatctgagctgagtggcattgttccggttgcttgaccttcacctggggcgtgggcttggggtcatccctggtggctgtaaagtctc

SEQ ID NO: 25332 - DNA, 259 bp, Homo sapiens
  MAP TO AC020749.2; EXPRESSED IN BRAIN, SIGNAL = 4.3; EXPRESSED IN FETAL LIVER, SIGNAL = 7.4; EXPRESSED IN HELA, SIGNAL = 6.6; EXPRESSED IN BONE MARROW, SIGNAL = 3.3; EXPRESSED IN LUNG, SIGNAL = 2.4; EXPRESSED IN PLACENTA, SIGNAL = 3.4; EXPRESSED IN HEART, SIGNAL = 6.2; EXPRESSED IN ADULT LIVER, SIGNAL = 3.8; EST_HUMAN HIT: AI160189.1, EVALUE 7.00e-54; SWISSPROT HIT: O27648, EVALUE 3.60e-01; NT HIT: AL163280.2, EVALUE 8.00e-53
cggcaggagaagatgaggaagaagcaaaagcagaaacccctgaagaacccgtcagatctcgtgagacttattcactattatgagaatagcacgggcaagagcagctcccatgattcaattaccacaccccggtccctcccacaacatgtgggaattctggaagatacaattcaagttgagatttgggtggggacacagccaaaccatgttatctataaaattcatgtgatcattggaagcaaaggattatttgagaaaa

SEQ ID NO: 25333 - DNA, 344 bp, Homo sapiens
  MAP TO AL122127.3; EXPRESSED IN PLACENTA, SIGNAL = 1.8; EXPRESSED IN BONE MARROW, SIGNAL = 1.6e+02; EXPRESSED IN LUNG, SIGNAL = 1.9e+02; EXPRESSED IN ADULT LIVER, SIGNAL = 2.9; EXPRESSED IN HEART, SIGNAL = 3.2; NT HIT: Z17370.1, EVALUE 0.00e+00; EST_HUMAN HIT: AI660968.1, EVALUE 0.00e+00; SWISSPROT HIT: P01857, EVALUE 1.00e-48
tgcatcacggagcatgagaagacgttcccctgctgccacctgctcttgtccacggtgagcttgctgtagaggaagaaggagccgtcggagtccagcacgggaggcgtggtcttgtagttgttctccggctgcccattgctctcccactccacggcgatgtcgctgggatagaagcctttgaccaggcaggtcaggctgacctggttcttggtcagctcatcccgggatgggggcagggtgtacacctgtggttctcggggctgccctgtagggacagaggttggtacagcggtcactctcagggcagagggtgggccgagccggcctctgtccatgtggccctc

SEQ ID NO: 25334 - DNA, 237 bp, Homo sapiens
  MAP TO AL158802.1; EXPRESSED IN BRAIN, SIGNAL = 1.7; EXPRESSED IN FETAL LIVER, SIGNAL = 1.8; EXPRESSED IN ADULT LIVER, SIGNAL = 1.8; EXPRESSED IN HELA, SIGNAL = 2.1; EXPRESSED IN HEART, SIGNAL = 1.9; EXPRESSED IN PLACENTA, SIGNAL = 1.9; SWISSPROT HIT: P72855, EVALUE 4.40e+00; NT HIT: X66092.1, EVALUE 1.40e-01
attagaacatccaaaattatgaatcatgaaaagaattggaggctgtttaacataccggtaagaattttaaattgtttttatgacagccaacgtggcagtgtccagactaaacaagacagactacagaccttgccagcaacatacacaatcctgcagctgatacaaagttatgttgcctttaggaagagattatctgttatgattctcataagttctaataagtgtcactgtgaaaag

SEQ ID NO: 25335 - DNA, 313 bp, Homo sapiens
  MAP TO AC005664.2; EXPRESSED IN BRAIN, SIGNAL = 2.9; EXPRESSED IN PLACENTA, SIGNAL = 3.4; EXPRESSED IN ADULT LIVER, SIGNAL = 2.5; EXPRESSED IN BONE MARROW, SIGNAL = 2.3; EXPRESSED IN HELA, SIGNAL = 3.5; EXPRESSED IN HEART, SIGNAL = 3.6; EXPRESSED IN LUNG, SIGNAL = 2.9; EXPRESSED IN FETAL LIVER, SIGNAL = 5.5; SWISSPROT HIT: P35085, EVALUE 3.60e-01; EST_HUMAN HIT: BF306996.1, EVALUE 0.00e+00
aaacacgaccctcctctgagtagcatcccttgtctgcattataagaaaatgaaggacaacgaggaacgggagcaaagcagtgacctcacccctagtggggatgtgtcccccgtcaagcccctgagccgatctgcagagctggagtttcccctggatgagcctgactctatgggtgctgacccggggcccccggacgagaaagacccactaggggctgaggcagcccctggggccctggggcaggtgaaggccaaagtcgaggtgtgcaaagatgaatccgttggtgagtttttgaaggactcttcccttcttg

SEQ ID NO: 25336 - DNA, 228 bp, Homo sapiens
  MAP TO AL049829.3; EXPRESSED IN PLACENTA, SIGNAL = 5.3; EXPRESSED IN BONE MARROW, SIGNAL =   5; EXPRESSED IN FETAL LIVER, SIGNAL = 6.4; EXPRESSED IN LUNG, SIGNAL =  11; EXPRESSED IN HEART, SIGNAL = 5.1; EXPRESSED IN BRAIN, SIGNAL = 4.8; EXPRESSED IN HELA, SIGNAL =   6; EXPRESSED IN ADULT LIVER, SIGNAL = 3.4; NT HIT: AF026029.1, EVALUE 1.00e-125; EST_HUMAN HIT: AA377551.1, EVALUE 1.00e-115; SWISSPROT HIT: P24783, EVALUE 3.50e-01
atcccaaaacgaaccaacagaccaggcatcagcacaacagaccggggttttccacgagcccgctaccgcgcccggaccaccaactacaacagctcccgctctcgattctacagtggttttaacagcaggccccggggtcgcgtctacaggtcaggatagatgggctgctcctctttcccccgcctcccgtgagccccgtatgcttcctcctctctggtctgaggaacc

SEQ ID NO: 25337 - DNA, 207 bp, Homo sapiens
  MAP TO AC007954.6; EXPRESSED IN PLACENTA, SIGNAL = 1.9; EXPRESSED IN BRAIN, SIGNAL =   2; EXPRESSED IN HELA, SIGNAL = 2.6; EXPRESSED IN HEART, SIGNAL = 2.2; EXPRESSED IN ADULT LIVER, SIGNAL = 2.4; EXPRESSED IN BONE MARROW, SIGNAL =   2; EXPRESSED IN LUNG, SIGNAL = 2.9; EXPRESSED IN FETAL LIVER, SIGNAL = 2.5; SWISSPROT HIT: P00498, EVALUE 4.90e+00; NT HIT: gi7662423, EVALUE 1.20e-01; EST_HUMAN HIT: AI571099.1, EVALUE 8.00e-04
atgaaagctgagaagtgtggaaacacatcatggctgcctgccaataggacagactggatcactcacgtaggtgcccacactaagggcaggtactctcgtaagactgactggaatcaaactgctgatccagcctgcaccaccaagactgctgccatagccacctggattcatgcaaccggtgtggaaacatctaccatcatgggctag

SEQ ID NO: 25338 - DNA, 197 bp, Homo sapiens
  MAP TO AC018720.2; EXPRESSED IN FETAL LIVER, SIGNAL = 2.4; EXPRESSED IN LUNG, SIGNAL = 4.4; EXPRESSED IN BRAIN, SIGNAL = 2.1; EXPRESSED IN ADULT LIVER, SIGNAL = 2.4; EXPRESSED IN BONE MARROW, SIGNAL = 3.1; EXPRESSED IN HELA, SIGNAL = 1.9; EXPRESSED IN HEART, SIGNAL = 1.8; EXPRESSED IN PLACENTA, SIGNAL =  45; EST_HUMAN HIT: BE720191.1, EVALUE 1.00e-104; SWISSPROT HIT: P53972, EVALUE 6.60e-02; NT HIT: gi11419251, EVALUE 1.00e-102
gaagatctttgcctttgacctggatgccaagcggctggcatccatggccacgctgctggcctgggttggcgtctcctgctgtgagctggctgaggaggacttcctggcggtctcccccttagatccgcgctatcgtgaggtccactatgtcctgctggatccttcctgcagtggctcgggtgagatggtgagaaggc

SEQ ID NO: 25339 - DNA, 325 bp, Homo sapiens
  MAP TO AC023000.2; EXPRESSED IN PLACENTA, SIGNAL = 1.6; EXPRESSED IN ADULT LIVER, SIGNAL = 1.4; EXPRESSED IN HEART, SIGNAL = 1.8; EXPRESSED IN FETAL LIVER, SIGNAL = 2.2; EXPRESSED IN HELA, SIGNAL = 1.9; NT HIT: AF164151.1, EVALUE 6.80e-01; EST_HUMAN HIT: BE336733.1, EVALUE 3.20e+00
tcagcacaaagactttaaggtttgcatataaagtttcacaagctgccatgtggcaaatccatacaacactgggaaaaccaagaagctcatacactgtagaaaatattgattgtttaagaaaatgattatcataatggtgatgatgatggtgatggtgttgatggccattatgttgatgatggtgactatgatgatgatgatgatgatgatgataatggtgattgtgatgataatgatgatgatgatgatagtgatggtgatgatggtgataatgatgatggtgatgatgatgatgatgatggtgatagtgatgatgatgatgatg

SEQ ID NO: 25340 - DNA, 488 bp, Homo sapiens
  MAP TO AC007216.2; EXPRESSED IN BRAIN, SIGNAL = 1.1e+02; EXPRESSED IN ADULT LIVER, SIGNAL =  42; EXPRESSED IN BONE MARROW, SIGNAL =  60; EXPRESSED IN HEART, SIGNAL =  27; EXPRESSED IN PLACENTA, SIGNAL =  47; EXPRESSED IN LUNG, SIGNAL =  99; EXPRESSED IN HELA, SIGNAL =  26; EXPRESSED IN FETAL LIVER, SIGNAL =  45; NT HIT: D86974.1, EVALUE 0.00e+00; EST_HUMAN HIT: BF362462.1, EVALUE 0.00e+00; SWISSPROT HIT: P30640, EVALUE 1.00e-04
gtcagaatggcggcagcggagcatcgtcattcttcaggattgccctactggccctacctcacagctgaaactttaaaaaacaggatgggccaccagccacctcctccaactcaacaacattctataactgataactccctgagcctcaagacacctcccgagtgtctgctcactccccttccaccctcagcggatgataatctcaagacacctcccgagtgtctgctcactccccttccaccctcagctccaccctcagcggatgataatctcaagacacctcccttagctactcaggaggctgaggcagaaaaaccacccaaacccaagaggtggagagcggctgagatggaatcaccacccgaacccaagaggcggagggccgctgaggtggaatcaccacccgaacccaagaggcggagggccgctgaggtggaaccatcatcacccgagcccaagaggcggaggttgagtaagctgagaacagg

SEQ ID NO: 25341 - DNA, 203 bp, Homo sapiens
  MAP TO AL136980.2; EXPRESSED IN BRAIN, SIGNAL =   2; EXPRESSED IN PLACENTA, SIGNAL = 1.4; EXPRESSED IN BONE MARROW, SIGNAL = 1.5; EXPRESSED IN ADULT LIVER, SIGNAL = 1.8; EXPRESSED IN HELA, SIGNAL = 2.4; EXPRESSED IN HEART, SIGNAL = 2.3; EXPRESSED IN LUNG, SIGNAL =   2; EXPRESSED IN FETAL LIVER, SIGNAL =   2; EST_HUMAN HIT: AA337561.1, EVALUE 3.00e-49; NT HIT: AF154505.1, EVALUE 1.90e+00; SWISSPROT HIT: Q09216, EVALUE 1.00e-03
ctgatcagaaagtgcactggaagataccaaggaaaaccacaaagaggtgcattctcctcacagtgagctcggatactatcattgatctcaggaatgtgaggggttatgtgagaaattccagtataatcaaacccattgatccatattccagagtcccgtttaactgcatttccttccaagtcatggaatgttctagtcatatg

SEQ ID NO: 25342 - DNA, 113 bp, Homo sapiens
  MAP TO AC004548.1; EXPRESSED IN BRAIN, SIGNAL =   2; EXPRESSED IN PLACENTA, SIGNAL = 9.9; EXPRESSED IN LUNG, SIGNAL = 2.7; EXPRESSED IN ADULT LIVER, SIGNAL = 1.8; EXPRESSED IN BONE MARROW, SIGNAL = 2.2; EXPRESSED IN HELA, SIGNAL = 2.9; EXPRESSED IN FETAL LIVER, SIGNAL = 2.4; EXPRESSED IN HEART, SIGNAL =   2; NT HIT: AF020503.1, EVALUE 8.30e-01; EST_HUMAN HIT: BE467459.1, EVALUE 1.00e+00
gaatgggagaaggagtaaaatgtgacaaaactatgacaaaggagttagaaaaaacatttcaggaacaaagagaactaattaactcaaacatacggttcatctcactctgctaa

SEQ ID NO: 25343 - DNA, 240 bp, Homo sapiens
  MAP TO AC008417.3; EXPRESSED IN FETAL LIVER, SIGNAL = 1.7; EXPRESSED IN LUNG, SIGNAL = 1.7; EXPRESSED IN BRAIN, SIGNAL = 1.7; EXPRESSED IN HEART, SIGNAL = 1.8; EXPRESSED IN HELA, SIGNAL = 1.7; SWISSPROT HIT: P14779, EVALUE 3.50e+00; NT HIT: AB009668.1, EVALUE 6.00e-41; EST_HUMAN HIT: T77380.1, EVALUE 4.00e-43
gtattccatctcctgttacaattcttcaaagaaatgtttcaggatcttgatcccacttatttaaaatttccattgaaagccctgctcttgtctgcagctgatctggacgcaatggttttggcacccattgagtggaaagtttcctcaactttaatttttcagtcagaattgtataagctgctaattgttagttctcttcagttagagcaggagcaaacttaatttttttcttgaaaattg

SEQ ID NO: 25344 - DNA, 179 bp, Homo sapiens; identical to SEQ ID NO: 20443
  MAP TO AL049837.4; EXPRESSED IN PLACENTA, SIGNAL = 2.7; EXPRESSED IN BONE MARROW, SIGNAL =   3; EXPRESSED IN HELA, SIGNAL = 6.3; EXPRESSED IN LUNG, SIGNAL =   2; EXPRESSED IN HEART, SIGNAL = 5.6; EXPRESSED IN BRAIN, SIGNAL = 3.1; EXPRESSED IN FETAL LIVER, SIGNAL = 5.4; EXPRESSED IN ADULT LIVER, SIGNAL = 3.5; SWISSPROT HIT: P02564, EVALUE 4.50e-01; EST_HUMAN HIT: AI440282.1, EVALUE 2.00e-04; NT HIT: U80017.1, EVALUE 2.70e-02

SEQ ID NO: 25345 - DNA, 208 bp, Homo sapiens
  MAP TO AC007686.5; EXPRESSED IN BRAIN, SIGNAL = 2.8; EXPRESSED IN PLACENTA, SIGNAL = 3.2; EXPRESSED IN HEART, SIGNAL = 2.8; EXPRESSED IN BONE MARROW, SIGNAL = 3.7; EXPRESSED IN HELA, SIGNAL = 3.4; EXPRESSED IN ADULT LIVER, SIGNAL = 2.6; EXPRESSED IN LUNG, SIGNAL = 4.6; EXPRESSED IN FETAL LIVER, SIGNAL =   3; NT HIT: X99673.1, EVALUE 1.20e-01; EST_HUMAN HIT: BF030010.1, EVALUE 1.90e-01; SWISSPROT HIT: P17437, EVALUE 1.10e-01
atgcccacgggccttttcctcaggggtcaagctctcaatctgtaattgtctcagaaagacccggagagctttaaaatatccagagtccacgtcccgcccctgcacctccagagggagaccatcctggggcagggccttgctcagtgaaagctccaacagggacgctgatgggcttgatgggccaagactgagaaccaccagccagggc

SEQ ID NO: 25346 - DNA, 190 bp, Homo sapiens
  MAP TO AC008392.3; EXPRESSED IN BRAIN, SIGNAL = 2.5; EXPRESSED IN ADULT LIVER, SIGNAL = 2.3; EXPRESSED IN BONE MARROW, SIGNAL = 2.7; EXPRESSED IN HELA, SIGNAL = 2.5; EXPRESSED IN HEART, SIGNAL = 2.3; EXPRESSED IN PLACENTA, SIGNAL = 2.8; EXPRESSED IN LUNG, SIGNAL = 3.5; EXPRESSED IN FETAL LIVER, SIGNAL = 2.3; SWISSPROT HIT: P37709, EVALUE 8.80e-02; NT HIT: U32574.1, EVALUE 1.10e-01; EST_HUMAN HIT: BE815822.1, EVALUE 4.20e-02
tgaggagatccggcgcttggaggaggtacggggcgatctccaggtgcagatcagcgcagcccagaaccaggtcaagcggcttcgggacagtcagcggctggagaacatggaccgcctgctgaagggccgggcccaggtgcaggcggagatcgaggagctgcaggagcagaccagggccctggacaagcag

SEQ ID NO: 25347 - DNA, 512 bp, Homo sapiens
  MAP TO AC007501.2; EXPRESSED IN FETAL LIVER, SIGNAL =   9; EXPRESSED IN HEART, SIGNAL =   7; EXPRESSED IN BRAIN, SIGNAL = 4.4; EXPRESSED IN PLACENTA, SIGNAL = 2.6; EXPRESSED IN BONE MARROW, SIGNAL = 2.3; EXPRESSED IN LUNG, SIGNAL = 2.5; EXPRESSED IN ADULT LIVER, SIGNAL = 1.4; EXPRESSED IN HELA, SIGNAL = 5.2; EST_HUMAN HIT: AW389850.1, EVALUE 8.00e-80; NT HIT: U80736.1, EVALUE 2.00e-82
ctgcgataatacttgagtctgtgtctgagactgtatttgcgactggtgctgctgagaggctggctgggggctcccgatggcagggatgggggatgttatctgagaggcgacaggggagtgctgccgaggagaaggctgagactggtgctgcatgtgttgcagctgctgcagctggaggcgctgctgcagctgctgctgcagctgctgttgattaatttgctgctggagatgctgctgctgctgctgcaggtgctgctgcatgtggtgctggaaatgctgctgctgcatctgctgctggatttgctgatgcatttggtgctgctggagttgctgctgctgcatctgttgcatctgttgttgttgctgctgctgctgctgctgcaattgcatctgatgctgctgggtttgcaccgaaggactcacttgggtggagggtgctgagccaaccatggtcgttcccatggagcttatcagtggagccccaatgttcgagggcatgttggctgcaatgg

SEQ ID NO: 25348 - DNA, 181 bp, Homo sapiens
  MAP TO AC011449.3; EXPRESSED IN BRAIN, SIGNAL =   2; EXPRESSED IN BONE MARROW, SIGNAL = 1.7; EXPRESSED IN FETAL LIVER, SIGNAL = 3.5; EXPRESSED IN ADULT LIVER, SIGNAL = 1.7; EXPRESSED IN HELA, SIGNAL = 3.6; EXPRESSED IN HEART, SIGNAL = 2.8; EXPRESSED IN PLACENTA, SIGNAL = 1.4; EST_HUMAN HIT: AA553761.1, EVALUE 1.00e-97; SWISSPROT HIT: Q62209, EVALUE 1.70e+00; NT HIT: U88826.1, EVALUE 4.20e-01
tttctaagctgactaaacaactaatgctcctggaggcaaaaacccacggccaggaaaaggagctggcggagaacagggaacagctggagattttacgtgccaaatgccaagaactcaaaacacactcggatggcaaaatcgcagtggaagttcataaatcaattgtgaatgaattaaaaag

SEQ ID NO: 25349 - DNA, 100 bp, Homo sapiens
  MAP TO AC020714.2; EXPRESSED IN PLACENTA, SIGNAL = 2.9; EXPRESSED IN BRAIN, SIGNAL = 3.3; EXPRESSED IN BONE MARROW, SIGNAL = 3.1; EXPRESSED IN LUNG, SIGNAL = 4.3; EXPRESSED IN ADULT LIVER, SIGNAL = 5.9; EXPRESSED IN HELA, SIGNAL =   4; EXPRESSED IN HEART, SIGNAL = 3.9; EXPRESSED IN FETAL LIVER, SIGNAL = 3.5; NT HIT: gi11427366, EVALUE 1.00e-49; SWISSPROT HIT: P17399, EVALUE 3.20e+00; EST_HUMAN HIT: BE890046.1, EVALUE 2.00e-45
gcggctctcatccatgtacatccggaagagaatgcgcagccacaggccaggctgctggtctcctgcttcagaaggttgggcttggatttgcctttgaatc

SEQ ID NO: 25350 - DNA, 151 bp, Homo sapiens
  MAP TO AL079306.2; EXPRESSED IN HEART, SIGNAL = 1.8; EXPRESSED IN BRAIN, SIGNAL = 2.6; EXPRESSED IN PLACENTA, SIGNAL = 1.5; EXPRESSED IN ADULT LIVER, SIGNAL = 1.7; EXPRESSED IN BONE MARROW, SIGNAL = 1.8; EXPRESSED IN FETAL LIVER, SIGNAL = 1.8; EXPRESSED IN HELA, SIGNAL = 2.2; EST_HUMAN HIT: AL134021.1, EVALUE 8.00e+00; NT HIT: AJ007763.1, EVALUE 8.70e-02
ccttgcctctccttccctgctggcatgtggatgtatgtgcacccaccatgccattgctgctgttgtgagtgcaccacctgccctgcatcacgatgctgccattgctggcgcaaacacatgcacagacaccagcaacaccacccccactcca

SEQ ID NO: 25351 - DNA, 111 bp, Homo sapiens
  MAP TO AC002045.1; EXPRESSED IN BRAIN, SIGNAL = 6.4; EXPRESSED IN PLACENTA, SIGNAL = 4.6; EXPRESSED IN LUNG, SIGNAL =  11; EXPRESSED IN ADULT LIVER, SIGNAL = 1.8; EXPRESSED IN BONE MARROW, SIGNAL = 4.6; EXPRESSED IN FETAL LIVER, SIGNAL = 6.3; EXPRESSED IN HELA, SIGNAL = 5.2; EXPRESSED IN HEART, SIGNAL = 3.9; EST_HUMAN HIT: AL045297.1, EVALUE 4.00e-56; NT HIT: gi5902013, EVALUE 3.00e-56
gagggagatggcaaatttataacttctcagaaacacagtaatgataagtaaccaaggacttccaccaaagtcagtcccacgatgacgatggtcagccagagtattgataac

SEQ ID NO: 25352 - DNA, 77 bp, Homo sapiens
  MAP TO AC023202.2; EXPRESSED IN BRAIN, SIGNAL = 4.1; EXPRESSED IN PLACENTA, SIGNAL = 3.5; EXPRESSED IN BONE MARROW, SIGNAL = 3.4; EXPRESSED IN HEART, SIGNAL = 3.7; EXPRESSED IN ADULT LIVER, SIGNAL = 4.3; EXPRESSED IN FETAL LIVER, SIGNAL = 3.8; EXPRESSED IN HELA, SIGNAL = 4.2; EXPRESSED IN LUNG, SIGNAL = 2.3; NT HIT: AF044083.1, EVALUE 1.00e-08; SWISSPROT HIT: P22621, EVALUE 6.50e-01; EST_HUMAN HIT: AI251748.1, EVALUE 6.00e-08
gattaaaaggaaaggaaattctgccatttatgacaacatcaatgaacctggaagacattatggcaagtaaagttaaa

SEQ ID NO: 25353 - DNA, 118 bp, Homo sapiens
  MAP TO AC007857.2; EXPRESSED IN BRAIN, SIGNAL = 2.4; EXPRESSED IN PLACENTA, SIGNAL = 3.1; EXPRESSED IN BONE MARROW, SIGNAL = 3.2; EXPRESSED IN HELA, SIGNAL = 4.5; EXPRESSED IN HEART, SIGNAL = 3.6; EXPRESSED IN ADULT LIVER, SIGNAL =   3; EXPRESSED IN LUNG, SIGNAL = 1.7; EXPRESSED IN FETAL LIVER, SIGNAL = 4.6; NT HIT: AF029308.1, EVALUE 5.00e-18; EST_HUMAN HIT: AW979107.1, EVALUE 5.00e-25
aatgttacagctctcaaagatggcacgtgcagagttgttccttcctcctggtgggttcatggtcttgctgacttcaggaatgaagccgcagactttcgcagtgagtgttacagctctt

SEQ ID NO: 25354 - DNA, 176 bp, Homo sapiens
  MAP TO AC020752.3; EXPRESSED IN BRAIN, SIGNAL = 2.8; EXPRESSED IN PLACENTA, SIGNAL = 1.9; EXPRESSED IN BONE MARROW, SIGNAL = 1.9; EXPRESSED IN FETAL LIVER, SIGNAL = 2.1; EXPRESSED IN LUNG, SIGNAL = 2.3; EXPRESSED IN ADULT LIVER, SIGNAL = 2.4; EXPRESSED IN HELA, SIGNAL = 2.5; EXPRESSED IN HEART, SIGNAL = 2.2; EST_HUMAN HIT: AI272244.1, EVALUE 1.00e-94; NT HIT: U35371.1, EVALUE 7.00e-46; SWISSPROT HIT: Q12860, EVALUE 7.00e-12
ccctccaactctttcaaagtggtccccatctctgtcaaagtctatcaggtgtccattaaatgaccaagtaaacacgatgtctagcgagtgatcatgcgttacctggcacggtaaaacaatactctctccaacagtgacatccatactggaagggggtaccattacccttgttggat

SEQ ID NO: 25355 - DNA, 370 bp, Homo sapiens
  MAP TO AC011477.2; EXPRESSED IN ADULT LIVER, SIGNAL = 1.4; EXPRESSED IN BONE MARROW, SIGNAL = 1.7; EXPRESSED IN FETAL LIVER, SIGNAL = 2.2; EXPRESSED IN PLACENTA, SIGNAL = 2.9; EXPRESSED IN BRAIN, SIGNAL = 1.3; EXPRESSED IN HELA, SIGNAL = 2.4; EXPRESSED IN HEART, SIGNAL = 1.9; SWISSPROT HIT: P28799, EVALUE 5.20e-01; EST_HUMAN HIT: BE973829.1, EVALUE 2.00e-21; NT HIT: AJ271885.2, EVALUE 3.60e+00
gtcgagggcagtggtggtgcagtgctcagggtcagaacgagctggcacccaccatgtcacctttctcgcaccacccacctcccagaccaggccacgtatccagtgttcgtcttcgatacccacatccactccccaagtgatgcccaccttctcgctgacctgctctgcttggatcggaggcattttcttattttctttcctcaagaggtgctgtgccatacagaaggccttctcttgccttgtttccaggccttctctcggtgctgctgaggcacatcagaagtgctggaggacgtggcactgcgccagcactgggcggccggccgtgtgctcatcccgcagatcgtgctctacctgtgcttggagatga

SEQ ID NO: 25356 - DNA, 239 bp, Homo sapiens
  MAP TO AC011683.3; EXPRESSED IN HELA, SIGNAL =   2; EXPRESSED IN BRAIN, SIGNAL = 1.8; EXPRESSED IN ADULT LIVER, SIGNAL = 1.8; EXPRESSED IN BONE MARROW, SIGNAL = 1.8; EXPRESSED IN FETAL LIVER, SIGNAL = 2.6; EXPRESSED IN HEART, SIGNAL =   2; EXPRESSED IN LUNG, SIGNAL = 2.4; EXPRESSED IN PLACENTA, SIGNAL = 1.6; SWISSPROT HIT: P13738, EVALUE 2.00e+00; NT HIT: AL163247.2, EVALUE 6.00e-07; EST_HUMAN HIT: AW996818.1, EVALUE 1.00e-33
atctgttcatcactttcagcatagaacttcaacagtttatctttatgtttcttcaggtcatatatggtggttgttctgacaccagactcttcttggagatgcttgacacttataccattgtccagtttcaccaacagcttgattttcttgttacagataaacatatgctttctattcttatcactgttacccatagggttatctgcaggccttttgacatttgcaacaatatctttaca

SEQ ID NO: 25357 - DNA, 209 bp, Homo sapiens
  MAP TO AC018506.3; EXPRESSED IN BRAIN, SIGNAL = 6.7; EXPRESSED IN PLACENTA, SIGNAL = 3.9; EXPRESSED IN ADULT LIVER, SIGNAL = 7.8; EXPRESSED IN BONE MARROW, SIGNAL = 4.8; EXPRESSED IN FETAL LIVER, SIGNAL = 4.4; EXPRESSED IN LUNG, SIGNAL = 6.4; EXPRESSED IN HELA, SIGNAL = 4.2; EXPRESSED IN HEART, SIGNAL = 9.1; EST_HUMAN HIT: BE540550.1, EVALUE 1.00e-107; NT HIT: gi11420735, EVALUE 1.20e-01
gatcataattacggagcccctcctcctccgacacctcctgcttctccccctgtccagacgatcatccctcgttctgacctgaatggcctgccgtcgcctgtagaggaacgctgtggagacagcccgaactctgaaggagaaactgtacctacctggtgtccttgtggtctttctcaggatggcttccttctcaactgtgacaagtgcag

SEQ ID NO: 25358 - DNA, 401 bp, Homo sapiens
  MAP TO AC011595.12; EXPRESSED IN BRAIN, SIGNAL =   3; EXPRESSED IN FETAL LIVER, SIGNAL = 6.3; EXPRESSED IN HELA, SIGNAL =   5; EXPRESSED IN HEART, SIGNAL = 4.1; EXPRESSED IN PLACENTA, SIGNAL = 4.3; EXPRESSED IN LUNG, SIGNAL =  10; EXPRESSED IN BONE MARROW, SIGNAL = 4.7; EXPRESSED IN ADULT LIVER, SIGNAL = 2.6; SWISSPROT HIT: P50502, EVALUE 1.00e-42; NT HIT: gi11418170, EVALUE 0.00e+00; EST_HUMAN HIT: BE897051.1, EVALUE 0.00e+00
cagtgtcttcgtcaaattacagaagccaaatgctgccattcgagactgtgacagagccattgaaataaatcctgattcagctcagccttacaagtggcgagggaaagcacacagacttctaggccactgggaagaagcagcccatgatcttgcccttgcctgtaaattggattatgatgaagatgttagtgcaatgctgaaagaagttcaacctagggcacagaaaattgaagaacatcggagaaagtatgagcgaaaacgtgaagagcgagagatcaaagaaagaatagaacgagttaagaaggctcgagaaaagcatgagagagcccagagggaggaagaagccagatgacagtcaggagctcagtatggctcttttctgggtggctttcctgggggaa

SEQ ID NO: 25359 - DNA, 192 bp, Homo sapiens
  MAP TO AC005212.1; EXPRESSED IN BRAIN, SIGNAL =   5; EXPRESSED IN PLACENTA, SIGNAL = 4.1; EXPRESSED IN HELA, SIGNAL = 5.3; EXPRESSED IN ADULT LIVER, SIGNAL = 2.6; EXPRESSED IN FETAL LIVER, SIGNAL = 5.3; EXPRESSED IN LUNG, SIGNAL =  10; EXPRESSED IN BONE MARROW, SIGNAL = 3.5; EXPRESSED IN HEART, SIGNAL = 4.5; EST_HUMAN HIT: BF684288.1, EVALUE 1.00e-104; NT HIT: AF015608.1, EVALUE 1.00e-104
gtctcggtccagctcgacttccagctcaggctccagcaccagcactggctcaagcagtggctccagctcttcctcagcatccagccgctcaggaagctccagcacctcccgcagctccagctctagcagctcttctggctctccaagtccttctcggcgcagacacgacaacaggaggcgctcccgctccaa

SEQ ID NO: 25360 - DNA, 138 bp, Homo sapiens
  MAP TO AC009818.4; EXPRESSED IN PLACENTA, SIGNAL = 1.7; EXPRESSED IN BRAIN, SIGNAL = 1.7; EXPRESSED IN ADULT LIVER, SIGNAL =   2; EXPRESSED IN BONE MARROW, SIGNAL = 2.1; EXPRESSED IN FETAL LIVER, SIGNAL = 1.9; EXPRESSED IN HELA, SIGNAL =   2; EXPRESSED IN HEART, SIGNAL = 1.8; SWISSPROT HIT: P55495, EVALUE 1.80e+00; EST_HUMAN HIT: BE254462.1, EVALUE 2.00e-03; NT HIT: X87344.1, EVALUE 6.00e-18
atcttcagaaggaaggcacccaaagtggactgagggaagacacagaagctgtactaaagaaggagaaagctgggaacactgcatggggctactgcacacctggactcattcctggccacagtggctccaggggaatgg

SEQ ID NO: 25361 - DNA, 200 bp, Homo sapiens
  MAP TO AC017093.2; EXPRESSED IN BRAIN, SIGNAL = 2.1; EXPRESSED IN PLACENTA, SIGNAL = 2.2; EXPRESSED IN ADULT LIVER, SIGNAL = 1.9; EXPRESSED IN FETAL LIVER, SIGNAL = 5.3; EXPRESSED IN BONE MARROW, SIGNAL = 1.8; EXPRESSED IN HELA, SIGNAL = 5.4; EXPRESSED IN HEART, SIGNAL = 4.2; SWISSPROT HIT: P18891, EVALUE 5.00e+00; NT HIT: AL163210.2, EVALUE 7.00e-71; EST_HUMAN HIT: BE276179.1, EVALUE 7.00e-69
atgtggaagcaactttggaactgggtaacaggcaaaggttggaacagtttggagggctcaaaagaagacaagaaaatgtgggaaagtttggaacttcctagagacttgttgaatggctttgacgaaaatgttgataatgatatggacaatatggtccaggctgaggtggtctcagttggagatgaggaacttgttgggaa

SEQ ID NO: 25362 - DNA, 93 bp, Homo sapiens
  MAP TO AC004554.1; EXPRESSED IN ADULT LIVER, SIGNAL = 4.1; EXPRESSED IN BONE MARROW, SIGNAL = 3.6; EXPRESSED IN FETAL LIVER, SIGNAL = 3.9; EXPRESSED IN HEART, SIGNAL = 3.7; EXPRESSED IN PLACENTA, SIGNAL = 3.4; EXPRESSED IN LUNG, SIGNAL = 3.6; EXPRESSED IN BRAIN, SIGNAL = 3.5; EXPRESSED IN HELA, SIGNAL = 3.9; NT HIT: AF186802.1, EVALUE 1.20e-02; EST_HUMAN HIT: BE048055.1, EVALUE 5.00e-03
aagaacactaaactggcgtgcattctacaaatactaattgttattttgtttgtcaccatcatcatcatcctcacccatcaacgattatttgac

SEQ ID NO: 25363 - DNA, 225 bp, Homo sapiens
  MAP TO AC009330.5; EXPRESSED IN PLACENTA, SIGNAL = 3.9; EXPRESSED IN BRAIN, SIGNAL = 3.5; EXPRESSED IN HELA, SIGNAL = 3.5; EXPRESSED IN ADULT LIVER, SIGNAL = 3.5; EXPRESSED IN BONE MARROW, SIGNAL =   6; EXPRESSED IN HEART, SIGNAL = 2.2; EXPRESSED IN FETAL LIVER, SIGNAL = 3.8; EXPRESSED IN LUNG, SIGNAL = 6.7; NT HIT: AF010497.1, EVALUE 5.40e-01; EST_HUMAN HIT: AW665663.1, EVALUE 1.00e-124; SWISSPROT HIT: Q60610, EVALUE 2.90e+00
agactgaaacacccgcccatcttgctgttctgcctaggctggaagacctggcccaggtcatggaggcccctgctccacttgccagattcgcaggagtcttctgaccagagctgtcgcaccttgctgctgccactggcactgctgccattctcatcctcttgggggccttcattggtgccacattctttgtagccacctgggctgtcagccatgagggaaggaccc

SEQ ID NO: 25364 - DNA, 102 bp, Homo sapiens
  MAP TO AC008843.4; EXPRESSED IN BRAIN, SIGNAL = 1.8; EXPRESSED IN PLACENTA, SIGNAL = 1.4; EXPRESSED IN FETAL LIVER, SIGNAL = 1.9; EXPRESSED IN HEART, SIGNAL = 1.8; EXPRESSED IN LUNG, SIGNAL = 3.3; EST_HUMAN HIT: AW274791.1, EVALUE 1.30e+00
atgctgagtaaggacaccaagccatacattgccgagggccgctcctccacagtccccctgtggctgtggcaacagccaagactgctgctgctgctgctgctg

SEQ ID NO: 25365 - DNA, 183 bp, Homo sapiens
  MAP TO AC013827.4; EXPRESSED IN FETAL LIVER, SIGNAL =  15; EXPRESSED IN HEART, SIGNAL =  12; EXPRESSED IN BRAIN, SIGNAL = 9.3; EXPRESSED IN PLACENTA, SIGNAL = 6.2; EXPRESSED IN LUNG, SIGNAL =   4; EXPRESSED IN HELA, SIGNAL =  14; EXPRESSED IN BONE MARROW, SIGNAL =   7; EXPRESSED IN ADULT LIVER, SIGNAL = 8.4; EST_HUMAN HIT: AI904160.1, EVALUE 6.30e-01; SWISSPROT HIT: Q06461, EVALUE 1.70e+00
ctccagaatttctatttttttttttcatttctctgttacatttttcattttggtcagttactgttttccgaatttcatagaattttctttccatatttgcttgaaggagactgagcttccttgaaagaattgcttcaaattccttgtcaggaaatttgtttatctcaactgctttgacattag

SEQ ID NO: 25366 - DNA, 509 bp, Homo sapiens
  MAP TO AC010931.5; EXPRESSED IN BRAIN, SIGNAL = 3.6; EXPRESSED IN PLACENTA, SIGNAL = 2.3; EXPRESSED IN BONE MARROW, SIGNAL = 1.5; EXPRESSED IN HELA, SIGNAL = 3.2; EXPRESSED IN LUNG, SIGNAL =  12; EXPRESSED IN ADULT LIVER, SIGNAL = 1.8; EXPRESSED IN FETAL LIVER, SIGNAL = 2.8; EXPRESSED IN HEART, SIGNAL = 2.9; NT HIT: gi8923698, EVALUE 0.00e+00; SWISSPROT HIT: Q08379, EVALUE 5.00e-07; EST_HUMAN HIT: BE297491.1, EVALUE 5.00e-04
ctgagcccccatccctggcacccccagcagtgacctctgtggtggaacagctacaagatgaggccaaacacctgaggcaggaggtggaaggtctggagggaaagctccagtcccaggtggaaaacaatcaggccttgagtctccttagcaaggaacaaaagcagagactccaggagcaggaggagatgctccgagagcaggaggcgcagagagtgcgggagcaggagagactgtgtgaacaaaacgagaggcttcgggagcagcagaagatgctacaggagcagggtgagaggctgcgaaagcaggagcagaggctacgcaaacaggaggagaggctgcgaaaggaggaggagaggctgcaaaagcaggaaaagaggctgtgggaccaggaggagaggctgtggaagaaggaggagaggctacaaaagcaggaggagaggctcgcgctctcccagaaccacaagctcgacaagcagctggccgagccacagtgcagcttcgaggatctg

SEQ ID NO: 25367 - DNA, 178 bp, Homo sapiens
  MAP TO AC011683.3; EXPRESSED IN BONE MARROW, SIGNAL = 1.7; EXPRESSED IN HELA, SIGNAL = 2.3; EXPRESSED IN LUNG, SIGNAL = 2.1; EXPRESSED IN BRAIN, SIGNAL = 2.1; EXPRESSED IN PLACENTA, SIGNAL = 2.3; EXPRESSED IN ADULT LIVER, SIGNAL =   2; EXPRESSED IN FETAL LIVER, SIGNAL = 2.1; EXPRESSED IN HEART, SIGNAL = 2.2; SWISSPROT HIT: P16557, EVALUE 4.00e-02; NT HIT: M28587.1, EVALUE 1.00e-04; EST_HUMAN HIT: AL041362.1, EVALUE 3.90e-02
gtataatttttgtctccacaaacatttttctggccacatgaggctgtgggattgctccagtcagcagctcaatgacctcaaagcccagagaagccctggagctgtgaatatagatgaggggggccttgggaacctgcttggtcaggacttcctcagcagatggctctcgctttatgtc

SEQ ID NO: 25368 - DNA, 470 bp, Homo sapiens
  MAP TO AP000963.2; EXPRESSED IN PLACENTA, SIGNAL = 2.1; EXPRESSED IN ADULT LIVER, SIGNAL = 1.8; EXPRESSED IN HEART, SIGNAL = 2.2; EXPRESSED IN BRAIN, SIGNAL = 2.7; EXPRESSED IN LUNG, SIGNAL = 4.1; EXPRESSED IN HELA, SIGNAL = 3.2; EXPRESSED IN FETAL LIVER, SIGNAL = 2.6; EXPRESSED IN BONE MARROW, SIGNAL = 2.2; EST_HUMAN HIT: BF207662.1, EVALUE 0.00e+00; NT HIT: AF200465.1, EVALUE 0.00e+00; SWISSPROT HIT: P20290, EVALUE 9.00e-48
attctttgatgcctcatcaaaattttctacaagatcgggaacatcatcatcctcctcatcagtgtcttctggttttgctgctttactgtccaagacttgccgtgggaactgttcagctaacttcctaaggcttgttaaactgtcagcaccaagctgacttaatattccaggtatcatttctgtgattggtttggcttctgcatgaccagtaattgcaaaggtgttagcagaaagggaagcttggactttgggattgttgaagtgaataactgtcccatcatctttaatcatgttcatctcttcaataccaactatattattcacagccagtttttttagagaactctgaagctttttgtcatcagccatggctgttttatgtaccaccttctttctgcgagctgtacccttgccccctatccggacctgagcctgaagtttggctaacttttcttgattcatgctgttgg

SEQ ID NO: 25369 - DNA, 290 bp, Homo sapiens
  MAP TO AC011462.3; EXPRESSED IN BRAIN, SIGNAL = 7.1; EXPRESSED IN ADULT LIVER, SIGNAL = 5.4; EXPRESSED IN HELA, SIGNAL =  10; EXPRESSED IN HEART, SIGNAL = 7.5; EXPRESSED IN PLACENTA, SIGNAL = 7.4; EXPRESSED IN LUNG, SIGNAL =  17; EXPRESSED IN FETAL LIVER, SIGNAL = 9.3; EXPRESSED IN BONE MARROW, SIGNAL = 7.5; NT HIT: gi11424059, EVALUE 4.00e-58; SWISSPROT HIT: P55948, EVALUE 3.70e-01; EST_HUMAN HIT: BE277093.1, EVALUE 3.00e-53
gtttcaaccgcagcggaggtggtggctatagccagaaccgctggggtaacaacaaccgggataacaacaactccaacaacagaggcagctacaaccgggctccccagcaacagccgccaccacagcagcctccgccaccacagccaccaccccagcagccaccgccaccacccagctacagccctgctcggaaccccccaggggccagcacctacaataagaacagcaacatccctggctcaagcgccaataccagcacccccaccgtcagcagctacagccctccacag

SEQ ID NO: 25370 - DNA, 315 bp, Homo sapiens
  MAP TO AC010620.3; EXPRESSED IN FETAL LIVER, SIGNAL =  32; EXPRESSED IN HEART, SIGNAL =  16; EXPRESSED IN BRAIN, SIGNAL =  15; EXPRESSED IN PLACENTA, SIGNAL =  14; EXPRESSED IN ADULT LIVER, SIGNAL = 9.5; EXPRESSED IN BONE MARROW, SIGNAL =  34; EXPRESSED IN HELA, SIGNAL =  33; EXPRESSED IN LUNG, SIGNAL =  71; SWISSPROT HIT: P12970, EVALUE 5.00e-46; NT HIT: gi11429611, EVALUE 1.00e-115; EST_HUMAN HIT: BE269856.1, EVALUE 1.00e-117
ttcacccagggcctggaccaccaaacagctactcagctgcttaagctagcctacaagtacagaccagagacaaagcaagaggagaagcagaggctgttggcccgggccgagaagaaagctgctgacaaaggggacatccttattaagagaccacgtgtccttcgagcaggaattaacactgtcaccaccttggtggagaaaaagaaagttcagctggtggtgattgcgcatgatgtggatcccatcaagctggttgtcttcttgcctgccctgtgtcataaaaggggagtcccttactgcattatcaaggggaag

SEQ ID NO: 25371 - DNA, 128 bp, Homo sapiens
  MAP TO AC024593.1; EXPRESSED IN BRAIN, SIGNAL = 2.1; EXPRESSED IN HELA, SIGNAL = 2.6; EXPRESSED IN BONE MARROW, SIGNAL = 1.8; EXPRESSED IN FETAL LIVER, SIGNAL = 2.7; EXPRESSED IN HEART, SIGNAL =   2; EXPRESSED IN ADULT LIVER, SIGNAL = 2.4; EXPRESSED IN PLACENTA, SIGNAL = 1.9; EST_HUMAN HIT: BE966485.2, EVALUE 4.20e-01; SWISSPROT HIT: P27398, EVALUE 4.10e+00; NT HIT: AJ235272.1, EVALUE 1.10e+00
agttctggattgtggtggtgatggtgatagttggaggaaaaggctatccaaccacatttgaagggatgttaacatttggattcaagactagactttctaatcctctcctagggagttttagtaactaa

SEQ ID NO: 25372 - DNA, 286 bp, Homo sapiens
  MAP TO AC006146.2; EXPRESSED IN ADULT LIVER, SIGNAL = 4.3; EXPRESSED IN BRAIN, SIGNAL = 4.5; EXPRESSED IN PLACENTA, SIGNAL = 3.8; EXPRESSED IN HEART, SIGNAL = 4.7; EXPRESSED IN BONE MARROW, SIGNAL = 3.7; EXPRESSED IN FETAL LIVER, SIGNAL = 4.6; EXPRESSED IN HELA, SIGNAL = 4.9; EXPRESSED IN LUNG, SIGNAL = 5.3; EST_HUMAN HIT: BE185656.1, EVALUE 0.00e+00; NT HIT: AF287967.1, EVALUE 4.40e-02; SWISSPROT HIT: P55266, EVALUE 2.20e+00
tcagatttttctgggagggtggtggaaagagcaaggacttggaagacacaagataaagatttgaatcttgcttctggctctgtaacagcagagcctcaacttccctctggagaatgaggacataagactcctccataggaggtttataagcatggattcgaatttgtagaggacccagcccagcgaagtactcgttagctcccttcttttgggaaggatctgtcttttggatattttgtagattggccatggaagtggaaatatttgcctgtggccatttttccta

SEQ ID NO: 25373 - DNA, 210 bp, Homo sapiens
  MAP TO AF223391.1; EXPRESSED IN BRAIN, SIGNAL = 2.3; EXPRESSED IN HELA, SIGNAL = 2.6; EXPRESSED IN HEART, SIGNAL = 2.3; EXPRESSED IN PLACENTA, SIGNAL = 2.4; EXPRESSED IN LUNG, SIGNAL = 2.5; EXPRESSED IN FETAL LIVER, SIGNAL = 2.6; EXPRESSED IN BONE MARROW, SIGNAL = 2.1; EXPRESSED IN ADULT LIVER, SIGNAL = 2.3; SWISSPROT HIT: Q15878, EVALUE 6.00e-35; NT HIT: gi4502528, EVALUE 1.00e-115; EST_HUMAN HIT: F21454.1, EVALUE 1.90e-01
gcacacctctggcccgagccagtatcaaaagtgcaaaggtagacggggtctcttatttccggcacaaggaaaggcttctgcgcatctccattcgccacatggttaaatcccaggtgttttactggattgtgctgagccttgtggcactcaacactgcctgtgtggccattgtccatcacaaccagccccagtggctcacccacctcctct

SEQ ID NO: 25374 - DNA, 120 bp, Homo sapiens
  MAP TO AC006111.2; EXPRESSED IN PLACENTA, SIGNAL = 3.4; EXPRESSED IN BRAIN, SIGNAL = 4.5; EXPRESSED IN FETAL LIVER, SIGNAL = 4.1; EXPRESSED IN HELA, SIGNAL = 4.2; EXPRESSED IN HEART, SIGNAL = 3.9; EXPRESSED IN ADULT LIVER, SIGNAL = 4.4; EXPRESSED IN BONE MARROW, SIGNAL =   6; EXPRESSED IN LUNG, SIGNAL =  11; NT HIT: AB012588.1, EVALUE 4.10e+00; SWISSPROT HIT: P24362, EVALUE 7.10e+00; EST_HUMAN HIT: AL134197.1, EVALUE 1.50e+00
atgtggactataataagtctgattgtttatattcagaaggaaatagctacagaagaaatcaggagcattttattccatcagggaggacccagcagagaactctgctgctccaggatgcag

SEQ ID NO: 25375 - DNA, 123 bp, Homo sapiens
  MAP TO AL158148.1; EXPRESSED IN PLACENTA, SIGNAL = 3.6; EXPRESSED IN BRAIN, SIGNAL = 5.2; EXPRESSED IN HELA, SIGNAL = 4.7; EXPRESSED IN FETAL LIVER, SIGNAL =   5; EXPRESSED IN ADULT LIVER, SIGNAL = 4.8; EXPRESSED IN BONE MARROW, SIGNAL = 3.2; EXPRESSED IN LUNG, SIGNAL = 5.8; EXPRESSED IN HEART, SIGNAL = 4.4; EST_HUMAN HIT: BE790543.1, EVALUE 1.00e-01; SWISSPROT HIT: P55316, EVALUE 9.20e+00; NT HIT: U36394.1, EVALUE 2.70e-01
tggtctggaaatttcctttgcccacaagaagaaacaccaacaccctgagaagacagtgcaggagaggcaggaagggacacaggggcctgttactggggccttcttccccagtgatgaaagaat

SEQ ID NO: 25376 - DNA, 228 bp, Homo sapiens
  MAP TO AL157996.1; EXPRESSED IN HELA, SIGNAL = 3.2; EXPRESSED IN BRAIN, SIGNAL = 1.9; EXPRESSED IN PLACENTA, SIGNAL = 2.3; EXPRESSED IN LUNG, SIGNAL =   2; EXPRESSED IN HEART, SIGNAL = 2.5; EXPRESSED IN FETAL LIVER, SIGNAL =   3; EXPRESSED IN BONE MARROW, SIGNAL = 1.7; EXPRESSED IN ADULT LIVER, SIGNAL = 2.2; NT HIT: gi11435233, EVALUE 1.00e-125; SWISSPROT HIT: P40544, EVALUE 5.30e-02; EST_HUMAN HIT: AW812899.1, EVALUE 1.00e-125
atgctggtgtcctactgacaggatgagagggatgaggcaacccagaaccagggctgccacttccaggcggctgaggcctctccctcccgtggcatcgggcttgtggctgtgccctattccgcccacctcagggaggacatgtactgtggcaacataaagaaatgtcccggcagagaaaagcatggccactcccgtggcgttcacctctgaaagggcttctttactgct

SEQ ID NO: 25377 - DNA, 92 bp, Homo sapiens
  MAP TO AL133551.4; EXPRESSED IN BRAIN, SIGNAL = 3.2; EXPRESSED IN PLACENTA, SIGNAL = 3.5; EXPRESSED IN HELA, SIGNAL = 3.8; EXPRESSED IN HEART, SIGNAL = 3.8; EXPRESSED IN ADULT LIVER, SIGNAL = 3.7; EXPRESSED IN BONE MARROW, SIGNAL = 3.4; EXPRESSED IN FETAL LIVER, SIGNAL = 3.7; EXPRESSED IN LUNG, SIGNAL =   4; NT HIT: AF008303.1, EVALUE 4.90e-02; EST_HUMAN HIT: BF237787.1, EVALUE 2.80e-01; SWISSPROT HIT: P50988, EVALUE 4.20e+00
ctcttcatcctggagaactcctatgcattcttcaaaagccagtacagatatccatacctccatgaagacctctctgattcctcccccacaag

SEQ ID NO: 25378 - DNA, 206 bp, Homo sapiens
  MAP TO AL158137.1; EXPRESSED IN BRAIN, SIGNAL = 4.9; EXPRESSED IN HELA, SIGNAL = 4.1; EXPRESSED IN BONE MARROW, SIGNAL = 5.3; EXPRESSED IN HEART, SIGNAL = 3.6; EXPRESSED IN LUNG, SIGNAL = 3.3; EXPRESSED IN PLACENTA, SIGNAL = 3.4; EXPRESSED IN FETAL LIVER, SIGNAL = 4.3; EXPRESSED IN ADULT LIVER, SIGNAL = 4.1; EST_HUMAN HIT: AA913328.1, EVALUE 4.60e-02; SWISSPROT HIT: P07866, EVALUE 9.80e-01
ctgtggaactttgaacacagattctcagcctcatcccagagcttctgaatcagaattcctagggctggggccaggaaggtgtttttagtttttttgggttttaactccacagctgatttcaatgctctaccaccatcgagaactgaattaaggcaacctgaacatgcacttctgctccctgcaacctgagtcagtttaatgctcat

SEQ ID NO: 25379 - DNA, 188 bp, Homo sapiens
  MAP TO AC011510.3; EXPRESSED IN BRAIN, SIGNAL =   3; EXPRESSED IN PLACENTA, SIGNAL = 2.5; EXPRESSED IN BONE MARROW, SIGNAL = 2.7; EXPRESSED IN FETAL LIVER, SIGNAL = 3.6; EXPRESSED IN HELA, SIGNAL = 3.5; EXPRESSED IN HEART, SIGNAL = 2.8; EXPRESSED IN ADULT LIVER, SIGNAL = 2.9; EXPRESSED IN LUNG, SIGNAL = 2.8; EST_HUMAN HIT: BF359243.1, EVALUE 1.00e-102; NT HIT: AP000060.1, EVALUE 2.80e-02; SWISSPROT HIT: P24461, EVALUE 1.00e-14
ctggggcagggtgtaccctcggaagcgggtggtccgcatgagggtgcggggtattcccatgggcaccagcgccagcagccgctgcgcctcatgcagaaccgcgtcggtgtaagggaggcgggtacggtcccctaggcttggtgcctggccagcccccagctcccgattcagctcctcacgtacccact

SEQ ID NO: 25380 - DNA, 110 bp, Homo sapiens
  MAP TO AC019248.3; EXPRESSED IN BRAIN, SIGNAL = 4.4; EXPRESSED IN ADULT LIVER, SIGNAL = 5.4; EXPRESSED IN HELA, SIGNAL = 3.8; EXPRESSED IN HEART, SIGNAL = 5.2; EXPRESSED IN PLACENTA, SIGNAL = 3.5; EXPRESSED IN LUNG, SIGNAL = 3.3; EXPRESSED IN FETAL LIVER, SIGNAL = 3.9; EXPRESSED IN BONE MARROW, SIGNAL = 2.8; EST_HUMAN HIT: BE962107.2, EVALUE 1.40e+00; NT HIT: AF035194.1, EVALUE 3.70e+00
gatctacaccattatacgcagctacgggccacattctgggagcaaacatttcctggcacaactgcgatggacctggagcttgaattacgttctaagtcttgtggatgtgg

SEQ ID NO: 25381 - DNA, 201 bp, Homo sapiens
  MAP TO AL138831.2; EXPRESSED IN HELA, SIGNAL = 6.2; EXPRESSED IN BRAIN, SIGNAL =  12; EXPRESSED IN PLACENTA, SIGNAL = 4.5; EXPRESSED IN LUNG, SIGNAL = 4.2; EXPRESSED IN HEART, SIGNAL = 4.8; EXPRESSED IN FETAL LIVER, SIGNAL = 6.8; EXPRESSED IN BONE MARROW, SIGNAL = 5.5; EXPRESSED IN ADULT LIVER, SIGNAL = 4.7; SWISSPROT HIT: Q61136, EVALUE 2.00e-32; NT HIT: AB011108.1, EVALUE 1.00e-109; EST_HUMAN HIT: W16510.1, EVALUE 1.00e-109
gagaaagttactgttatgagcaccattaatccaactaaggacctgttggctgacttgattgggtgccagagacttcctgaagaccaacgtaagaaagtacaccagctaaaggacttgttggaccagattctgatgttggacccagctaaacgaattagcatcaaccaggccctacagcacgccttcatccaggaaaaaatt

SEQ ID NO: 25382 - DNA, 186 bp, Homo sapiens
  MAP TO AC010093.2; EXPRESSED IN BRAIN, SIGNAL = 1.3; EXPRESSED IN HEART, SIGNAL = 2.1; EXPRESSED IN HELA, SIGNAL = 1.7; NT HIT: gi11428189, EVALUE 1.00e-47; SWISSPROT HIT: P48774, EVALUE 2.00e-20; EST_HUMAN HIT: AA633467.1, EVALUE 8.00e-50
tcaacggcacatgaaagccttaagatgtgggaactcatccaggcacttgggctcaaacatgcacttttgatccaggacgtcatagatgggaaaatccacaaaggtgagctttcccctgcaaaccatgagaatttctcccaggaacatggagaattgtttcagttgttcaggtagctgttccaagta

SEQ ID NO: 25383 - DNA, 423 bp, Homo sapiens
  MAP TO AC018552.2; EXPRESSED IN ADULT LIVER, SIGNAL = 5.7; EXPRESSED IN HEART, SIGNAL = 4.7; EXPRESSED IN BRAIN, SIGNAL = 7.8; EXPRESSED IN BONE MARROW, SIGNAL = 5.4; EXPRESSED IN FETAL LIVER, SIGNAL = 5.8; EXPRESSED IN HELA, SIGNAL = 6.3; EXPRESSED IN LUNG, SIGNAL = 6.5; EXPRESSED IN PLACENTA, SIGNAL = 7.2; SWISSPROT HIT: P28984, EVALUE 3.70e-01; NT HIT: AJ011001.1, EVALUE 0.00e+00; EST_HUMAN HIT: AL046540.1, EVALUE 0.00e+00
gtgcccacggcaggggccacagggaagactttcgcttctgcagccagcggaaccagacacacaggagcagcctccactacaaacccacaccagacctgcgcatctccatcgagaactccgaagaggccctcacagtccatgcccctttccctgcagcccaccctgcttcccgatccttccctgaccccaggggcctctaccacttctgcctctactggaaccgacatgctgggagattacatcttctctatggcaagcgtgacttcttgctgagtgacaaagcctctagcctcctctgcttccagcaccaggaggagagcctggctcagggccccccgctgttagccacttctgtcacctcctggtggagccctcagaacatcagcctgcccagtgccgccagcttcaccttctccttccaca

SEQ ID NO: 25384 - DNA, 89 bp, Homo sapiens
  MAP TO AC007341.3; EXPRESSED IN BRAIN, SIGNAL = 7.3; EXPRESSED IN HELA, SIGNAL =  12; EXPRESSED IN HEART, SIGNAL =  10; EXPRESSED IN ADULT LIVER, SIGNAL =   8; EXPRESSED IN PLACENTA, SIGNAL = 7.5; EXPRESSED IN LUNG, SIGNAL = 4.6; EXPRESSED IN FETAL LIVER, SIGNAL =  11; EXPRESSED IN BONE MARROW, SIGNAL = 6.6; NT HIT: gi6671552, EVALUE 1.60e-01; EST_HUMAN HIT: BE253600.1, EVALUE 1.90e-01
ctcaagtcagccaggtctccttgagggatcagcttcttggtatgcctgtcacccagagttggcttgactgaggtgctgatgaagttcat

SEQ ID NO: 25385 - DNA, 167 bp, Homo sapiens
  MAP TO AC007611.2; EXPRESSED IN BRAIN, SIGNAL = 1.5; EXPRESSED IN PLACENTA, SIGNAL = 1.7; EXPRESSED IN FETAL LIVER, SIGNAL = 3.5; EXPRESSED IN HELA, SIGNAL = 3.5; EXPRESSED IN HEART, SIGNAL = 3.2; EXPRESSED IN BONE MARROW, SIGNAL = 2.7; NT HIT: AJ271735.1, EVALUE 5.00e-28; EST_HUMAN HIT: BF035327.1, EVALUE 4.00e-42; SWISSPROT HIT: P12957, EVALUE 2.30e+00
ctcttacaagactgagagagatgaggaggctacagaagaaaagtttgaagctagcagaagttagttctttaggtttgaggaaagaagccatctccataacacaaaagtgcaagatgaagcagcaagtgctgatggagaagctgcagcaagttacccagaagctctaa

SEQ ID NO: 25386 - DNA, 82 bp, Homo sapiens
  MAP TO AC003677.1; EXPRESSED IN FETAL LIVER, SIGNAL = 1.6; EXPRESSED IN BONE MARROW, SIGNAL = 1.9; EXPRESSED IN HEART, SIGNAL = 5.6; EST_HUMAN HIT: AA661489.1, EVALUE 3.90e+00
atgtcatccacccaggacaacactgaaccccaaatcactgctttcccttctcaaaaatcttccaatgcaagtcagtctttta

SEQ ID NO: 25387 - DNA, 183 bp, Homo sapiens
  MAP TO AC010198.8; EXPRESSED IN BRAIN, SIGNAL = 2.1; EXPRESSED IN PLACENTA, SIGNAL = 1.7; EXPRESSED IN BONE MARROW, SIGNAL = 1.8; EXPRESSED IN FETAL LIVER, SIGNAL =   2; EXPRESSED IN HELA, SIGNAL = 2.2; EXPRESSED IN HEART, SIGNAL = 1.8; EXPRESSED IN LUNG, SIGNAL = 2.2; EST_HUMAN HIT: AA134604.1, EVALUE 9.00e-99; SWISSPROT HIT: Q14444, EVALUE 5.00e-06; NT HIT: M19169.1, EVALUE 1.70e+00
caaattatcatcctgatggaactattcaagtaagcaatggtagccttgccttttacccagcacagacgaatgtgtttcccagacctactcagccatttgtcaatagccggggatctgttagaggatgtactcgtggtgggagattaataaccaattcctatcggtcccctggtggttataaag

SEQ ID NO: 25388 - DNA, 213 bp, Homo sapiens
  MAP TO AL133475.14; EXPRESSED IN BRAIN, SIGNAL = 2.2; EXPRESSED IN PLACENTA, SIGNAL = 2.2; EXPRESSED IN HELA, SIGNAL = 2.5; EXPRESSED IN ADULT LIVER, SIGNAL = 2.3; EXPRESSED IN BONE MARROW, SIGNAL = 1.9; EXPRESSED IN FETAL LIVER, SIGNAL = 2.6; EXPRESSED IN HEART, SIGNAL = 2.3; NT HIT: L77570.1, EVALUE 1.30e-01; SWISSPROT HIT: P11369, EVALUE 6.00e-08; EST_HUMAN HIT: AW341333.1, EVALUE 8.00e-04
aaccctgactaatacaacaaccactttagaaaacaatttgtcagtttcttcaaaagttgcatatacacctagcagaagatacagccattccactcctaggtatttactcaagagaagaggaaacatagtccttaaaataatttatatgaatgttcttaacagctttacttgtaatcacaccaaactgaaaacaatccaagtgtgcatcaacag

SEQ ID NO: 25389 - DNA, 319 bp, Homo sapiens
  MAP TO AC021881.2; EXPRESSED IN BONE MARROW, SIGNAL = 2.5; EXPRESSED IN FETAL LIVER, SIGNAL = 3.2; EXPRESSED IN LUNG, SIGNAL = 2.8; EXPRESSED IN PLACENTA, SIGNAL = 2.6; EXPRESSED IN BRAIN, SIGNAL = 3.4; EXPRESSED IN HELA, SIGNAL = 3.2; EXPRESSED IN ADULT LIVER, SIGNAL = 3.2; EXPRESSED IN HEART, SIGNAL = 2.6; SWISSPROT HIT: Q13206, EVALUE 1.00e-45; EST_HUMAN HIT: BE747617.1, EVALUE 2.00e-82; NT HIT: gi11438573, EVALUE 6.00e-85
caatgacgaagtggaagaatttagagcctacttcaatgagaaaatgtccatccttcaaaaaggtggaaaaagactcgaagggacagagcacagacaggataatgatactggtaatgaagaacaggaagaagaagaagacgatgaagaagaaatggaagagaaactggcaaaagcaaaaggatctcaagccccatctcttcctaacaccagtgaggcacagaagatcaaggaagttcctacacagttcttggacagagatgaggaggaagaagatgctgatttcttgaaggtgaagcggcataatgtgtttggattggac

SEQ ID NO: 25390 - DNA, 473 bp, Homo sapiens
  MAP TO AC020557.2; EXPRESSED IN ADULT LIVER, SIGNAL =   2; EXPRESSED IN FETAL LIVER, SIGNAL = 1.8; EXPRESSED IN HEART, SIGNAL =   2; EXPRESSED IN LUNG, SIGNAL = 2.2; EXPRESSED IN BRAIN, SIGNAL = 2.1; EXPRESSED IN PLACENTA, SIGNAL = 1.5; EXPRESSED IN BONE MARROW, SIGNAL = 1.6; EXPRESSED IN HELA, SIGNAL =   2; SWISSPROT HIT: Q28824, EVALUE 1.00e-17
ttagtttcccaaatgctttaaatgagaaccagcagttgagtcactggccaagacctccctcctcctgttccccagcttcatggccgagacctccctcctcctgttccccagcttcatggccgagacctccctcctcctgttccccagcttcatggccgagacctccctcctcctgttccccagcttcatggccgagacctccctcctcctgttccccagcttcatggccgagacctccctcctcctgttccccagcttcatggccgagacctccctcctcctgttccccagcttcatggccgagacctccctcctcctgttccccagcttcatggccaagacctgagcagcattcagattctggctcacaccctgcatccaaaccccagaagttctcatacagggaaagacagagaagggagagggtcatcaagattagggaaaaaaacaacaaaaaaaggaaaaccaactag

SEQ ID NO: 25391 - DNA, 364 bp, Homo sapiens
  MAP TO AL138761.3; EXPRESSED IN ADULT LIVER, SIGNAL =   2; EXPRESSED IN BONE MARROW, SIGNAL = 1.8; EXPRESSED IN LUNG, SIGNAL = 1.8; EXPRESSED IN PLACENTA, SIGNAL = 2.1; EXPRESSED IN FETAL LIVER, SIGNAL = 2.2; EXPRESSED IN HELA, SIGNAL =   2; EXPRESSED IN HEART, SIGNAL = 1.8; EXPRESSED IN BRAIN, SIGNAL = 2.4; NT HIT: AF055066.1, EVALUE 2.00e-26; EST_HUMAN HIT: AI671518.1, EVALUE 8.50e-02; SWISSPROT HIT: P10272, EVALUE 4.00e-11
aaggccaagaaggcactgtatatactaattccaaatatgcctgtggaatagtacacacctttaaaaagatctggacagagcggggcctaataaatagcagggagaaagaatttgtacatggggaactgatcaaacaagttttaaaaagcctcttgcttctagcagagatagccataggcaaaactatagaagctgtggggaacaggcttgcagataaagctgctaagcaagcttccctggaggaagaagttagattgtttagcctaatcccacagatccctaaggtgatattaaaacccaaattttctaaaaaggaggaggaagagctgggcaagataggggccactcaaactgaggatgggag

SEQ ID NO: 25392 - DNA, 148 bp, Homo sapiens
  MAP TO Z97197.2; EXPRESSED IN BONE MARROW, SIGNAL = 1.6; EXPRESSED IN HEART, SIGNAL =   2; EXPRESSED IN LUNG, SIGNAL = 2.3; EXPRESSED IN BRAIN, SIGNAL = 5.2; EXPRESSED IN PLACENTA, SIGNAL = 1.8; EXPRESSED IN ADULT LIVER, SIGNAL = 2.3; EXPRESSED IN FETAL LIVER, SIGNAL = 2.1; EXPRESSED IN HELA, SIGNAL = 2.2; NT HIT: AF169148.1, EVALUE 4.00e-78; EST_HUMAN HIT: AF149229.1, EVALUE 2.00e-59; SWISSPROT HIT: P24044, EVALUE 6.00e-07
tttgacaccaatggtgatggggaaataagcaccagtgagctgcgagaggctatgaggaagctcctgggtcatcaggtgggacaccgagacatagaggaaattatccgagatgtggacctcaatggggatggacgagtggactttgaag

SEQ ID NO: 25393 - DNA, 397 bp, Homo sapiens; identical to SEQ ID NO: 18290
  MAP TO AC007376.8; EXPRESSED IN BRAIN, SIGNAL = 5.9; EXPRESSED IN HELA, SIGNAL =  25; EXPRESSED IN HEART, SIGNAL =  13; EXPRESSED IN ADULT LIVER, SIGNAL = 7.6; EXPRESSED IN PLACENTA, SIGNAL =  10; EXPRESSED IN LUNG, SIGNAL =  36; EXPRESSED IN FETAL LIVER, SIGNAL =  17; EXPRESSED IN BONE MARROW, SIGNAL =  19; EST_HUMAN HIT: AI923116.1, EVALUE 0.00e+00; SWISSPROT HIT: P08865, EVALUE 5.00e-58; NT HIT: gi11427320, EVALUE 0.00e+00

SEQ ID NO: 25394 - DNA, 103 bp, Homo sapiens
  MAP TO AL137852.2; EXPRESSED IN BRAIN, SIGNAL = 4.8; EXPRESSED IN HELA, SIGNAL = 5.4; EXPRESSED IN ADULT LIVER, SIGNAL = 5.4; EXPRESSED IN PLACENTA, SIGNAL = 5.1; EXPRESSED IN LUNG, SIGNAL = 3.2; EXPRESSED IN HEART, SIGNAL = 4.9; EXPRESSED IN FETAL LIVER, SIGNAL = 5.6; EXPRESSED IN BONE MARROW, SIGNAL = 3.8; NT HIT: X01918.1, EVALUE 2.20e-01
atctctgcagctggaagtcggcctgggccacaactgcaaaccaggctatacccagacacagccacaacaacaacaacggcaacagcagcgatcatggttactt

SEQ ID NO: 25395 - DNA, 206 bp, Homo sapiens
  MAP TO AC021097.3; EXPRESSED IN BRAIN, SIGNAL = 3.2; EXPRESSED IN HELA, SIGNAL = 4.9; EXPRESSED IN ADULT LIVER, SIGNAL = 4.6; EXPRESSED IN FETAL LIVER, SIGNAL =   5; EXPRESSED IN HEART, SIGNAL = 3.9; EXPRESSED IN LUNG, SIGNAL = 5.4; EXPRESSED IN BONE MARROW, SIGNAL = 3.2; EXPRESSED IN PLACENTA, SIGNAL = 3.7; SWISSPROT HIT: P47953, EVALUE 3.30e-01; EST_HUMAN HIT: T80123.1, EVALUE 7.20e-01; NT HIT: M17440.1, EVALUE 7.60e+00
tggcactcgataaaccactgtcggatttgctccttcattttctccttcatgtcaggcccctctgtctctaccagagaatcatgggccttcaccattgctgcccggaactcctcctctttctccatctggcggagcctctggacatcctccacgaggcatggctgggagatgatgctcaggtgctctacctggttgggtgaggggag

SEQ ID NO: 25396 - DNA, 138 bp, Homo sapiens
  MAP TO AL136298.1; EXPRESSED IN ADULT LIVER, SIGNAL = 1.7; EXPRESSED IN HELA, SIGNAL = 2.4; EXPRESSED IN HEART, SIGNAL =   2; EXPRESSED IN BRAIN, SIGNAL = 3.8; EXPRESSED IN PLACENTA, SIGNAL = 1.5; EXPRESSED IN BONE MARROW, SIGNAL = 1.9; EXPRESSED IN FETAL LIVER, SIGNAL = 2.2; EXPRESSED IN LUNG, SIGNAL = 2.4; EST_HUMAN HIT: AW817817.1, EVALUE 1.20e+00; NT HIT: gi7662361, EVALUE 4.10e+00
atgttctcactcgatgatcaaaagctgctcagtgaagtagggggcatggtcttcctccaggagaagtggggaggtgagataatggggaggggtttgaggcaaagtttggactggctgctgagagaacaggaaaaagat

SEQ ID NO: 25397 - DNA, 226 bp, Homo sapiens
  MAP TO AL109985.2; EXPRESSED IN HELA, SIGNAL = 1.9; EXPRESSED IN HEART, SIGNAL = 1.7; EXPRESSED IN PLACENTA, SIGNAL = 1.6; EXPRESSED IN BRAIN, SIGNAL =   3; EXPRESSED IN BONE MARROW, SIGNAL = 1.5; EXPRESSED IN FETAL LIVER, SIGNAL = 1.8; SWISSPROT HIT: P25059, EVALUE 2.00e-07; NT HIT: AL163246.2, EVALUE 8.00e-65; EST_HUMAN HIT: BE064410.1, EVALUE 7.00e-66
gacacttactccagatataggtttgcctatcctgcatgcagtgcttctgccaaaactaccatccatggactcatggaatgccttatcctccatcatggtattccatacagcattgcctctgaccaaggcactcactttacagctaaagaagtgtggcagtgcgctcatgttcatggaattcactggtcttaccatgttccccatcgtcctgaggcagctggatgaa

SEQ ID NO: 25398 - DNA, 112 bp, Homo sapiens
  MAP TO AC025286.1; EXPRESSED IN PLACENTA, SIGNAL = 1.5; EXPRESSED IN BRAIN, SIGNAL = 1.5; EXPRESSED IN HELA, SIGNAL =   2; EXPRESSED IN FETAL LIVER, SIGNAL = 1.9; EXPRESSED IN HEART, SIGNAL = 1.8; EXPRESSED IN LUNG, SIGNAL = 2.4; SWISSPROT HIT: Q07071, EVALUE 1.80e+00; NT HIT: AJ242735.1, EVALUE 6.20e-02; EST_HUMAN HIT: AL036641.1, EVALUE 9.10e-02
cctcatgtccttctttccactgtggaggatcaggagcgtgggtctccccagccttccttccaaaggcttcattcagcctcagttgcttccattcttttgcaaatttggagtc

SEQ ID NO: 25399 - DNA, 113 bp, Homo sapiens
  MAP TO AC021012.2; EXPRESSED IN BRAIN, SIGNAL = 9.6; EXPRESSED IN FETAL LIVER, SIGNAL =  12; EXPRESSED IN HELA, SIGNAL =  13; EXPRESSED IN BONE MARROW, SIGNAL = 7.4; EXPRESSED IN HEART, SIGNAL =  11; EXPRESSED IN LUNG, SIGNAL = 5.4; EXPRESSED IN PLACENTA, SIGNAL = 6.8; EXPRESSED IN ADULT LIVER, SIGNAL = 8.8; NT HIT: AL163246.2, EVALUE 1.60e-02; SWISSPROT HIT: P10677, EVALUE 8.20e-01; EST_HUMAN HIT: AA704735.1, EVALUE 7.00e-12
ttagtcaggcccaagaaccctcaagaggccactgctgcaagttccagagtccaaaagctgaagaagctggagttggatgtccaaaggcaggaagaggaaaagcattctgctcc

SEQ ID NO: 25400 - DNA, 145 bp, Homo sapiens
  MAP TO AC007216.2; EXPRESSED IN BRAIN, SIGNAL = 7.1; EXPRESSED IN PLACENTA, SIGNAL = 4.1; EXPRESSED IN FETAL LIVER, SIGNAL = 5.7; EXPRESSED IN ADULT LIVER, SIGNAL = 1.6; EXPRESSED IN BONE MARROW, SIGNAL = 9.4; EXPRESSED IN HELA, SIGNAL = 4.3; EXPRESSED IN LUNG, SIGNAL = 9.5; EXPRESSED IN HEART, SIGNAL =   4; NT HIT: D86974.1, EVALUE 3.00e-54; EST_HUMAN HIT: AI208681.1, EVALUE 7.00e-62
gttatcaatactctggctgaccatcatcatcgtgggactgactttggtggaagtccttggttacgtatcattattgcatttccgagaagttataaagttgtccttaccctctggacagtttacctttgggtgagtgtactaactt

SEQ ID NO: 25401 - DNA, 106 bp, Homo sapiens
  MAP TO AL133286.5; EXPRESSED IN PLACENTA, SIGNAL = 2.4; EXPRESSED IN BRAIN, SIGNAL =   3; EXPRESSED IN FETAL LIVER, SIGNAL = 2.5; EXPRESSED IN HELA, SIGNAL = 2.2; EXPRESSED IN ADULT LIVER, SIGNAL = 3.1; EXPRESSED IN LUNG, SIGNAL = 3.8; EXPRESSED IN BONE MARROW, SIGNAL = 2.6; EXPRESSED IN HEART, SIGNAL = 2.4; NT HIT: AE002167.2, EVALUE 2.30e-01; SWISSPROT HIT: P06958, EVALUE 4.20e+00; EST_HUMAN HIT: AI337413.1, EVALUE 1.30e+00
ggaaaacagaccctgtatttttgggattcctgaaaggtgaccaggtgagagcaaagcccaacttcctggggaaaagctctcagcgcagtgaatgctacattcggag

SEQ ID NO: 25402 - DNA, 408 bp, Homo sapiens
  MAP TO AC008545.3; EXPRESSED IN BRAIN, SIGNAL = 1.7; EXPRESSED IN HEART, SIGNAL = 2.1; EXPRESSED IN ADULT LIVER, SIGNAL = 1.4; EXPRESSED IN BONE MARROW, SIGNAL =  13; EXPRESSED IN FETAL LIVER, SIGNAL = 1.9; EXPRESSED IN HELA, SIGNAL = 2.1; EXPRESSED IN LUNG, SIGNAL = 1.9; EXPRESSED IN PLACENTA, SIGNAL = 1.5; EST_HUMAN HIT: W70260.1, EVALUE 2.00e-52; NT HIT: AF149047.1, EVALUE 2.60e-01
tgatgctggcgccccacccaaggacagcacgctgctgagagaccatgagatccgtgccagcctcaccaaacactttgggctgctggagaccgccctggaggaggaagacctggcctcctgcaagagccctgagtatgacactgtctttgaagacagcagcagcagcagcggcgagagcagcttcctcccagaggaggaagaggaagaaggggaggaggaggaggaggacgatgaagaagaggactcaggggtcagccccacttgctctgaccactgcccctaccagagcccaccaagcaaggccaaccggcagctctgttcccgcagccgctcaagctctggctcttcaccctgccactcctggtcaccagccactcgaaggaacttcaggtatgaacagggggctgc

SEQ ID NO: 25403 - DNA, 186 bp, Homo sapiens
  MAP TO AF111170.3; EXPRESSED IN BRAIN, SIGNAL = 4.5; EXPRESSED IN ADULT LIVER, SIGNAL = 4.7; EXPRESSED IN HEART, SIGNAL = 4.6; EXPRESSED IN PLACENTA, SIGNAL = 3.9; EXPRESSED IN LUNG, SIGNAL = 4.9; EXPRESSED IN HELA, SIGNAL = 4.3; EXPRESSED IN FETAL LIVER, SIGNAL = 4.3; EXPRESSED IN BONE MARROW, SIGNAL = 3.6; EST_HUMAN HIT: T68286.1, EVALUE 1.60e-01; SWISSPROT HIT: P46070, EVALUE 4.00e-07; NT HIT: AF111170.3, EVALUE 1.00e-100
gcgccacatccaccacctggggaaccagctgcagctgaaccagcactgcctggacaccgccttcaacttcttcaagatggccgtgagcaggcacctgacccgcggccggaagatggcccacgtgattgctgcctgcctctacctggtctgccgtacggagggcacgccgcgtatcctttggtttga

SEQ ID NO: 25404 - DNA, 267 bp, Homo sapiens
  MAP TO AC011510.3; EXPRESSED IN BRAIN, SIGNAL =   4; EXPRESSED IN PLACENTA, SIGNAL = 4.5; EXPRESSED IN BONE MARROW, SIGNAL = 4.1; EXPRESSED IN ADULT LIVER, SIGNAL =   4; EXPRESSED IN HELA, SIGNAL = 4.8; EXPRESSED IN LUNG, SIGNAL = 8.4; EXPRESSED IN FETAL LIVER, SIGNAL = 5.5; EXPRESSED IN HEART, SIGNAL = 4.6; SWISSPROT HIT: Q00839, EVALUE 3.00e-24; NT HIT: gi11424059, EVALUE 0.00e+00; EST_HUMAN HIT: BE206846.1, EVALUE 0.00e+00
ctcacattctgccttgctctttggtccaacggtgccccggatacgctcactaaggggaaggtgctggatgaaggtaaaccccgggaggacagaacagtagggctctgctctctgtccgaagttgaactccactgcgcaattcttcaccaggacatgaggatagagggcctgaccccccaaggcttccttctggattcggaaagcaatgcccatccactttccattcttggtaaaagacagttccacgtcatttccacattcaaaatc

SEQ ID NO: 25405 - DNA, 90 bp, Homo sapiens
  MAP TO AL158148.1; EXPRESSED IN BRAIN, SIGNAL = 4.6; EXPRESSED IN HELA, SIGNAL = 5.2; EXPRESSED IN PLACENTA, SIGNAL =   4; EXPRESSED IN FETAL LIVER, SIGNAL =   6; EXPRESSED IN ADULT LIVER, SIGNAL = 4.2; EXPRESSED IN BONE MARROW, SIGNAL = 3.4; EXPRESSED IN LUNG, SIGNAL = 6.3; EXPRESSED IN HEART, SIGNAL = 4.7; SWISSPROT HIT: P54069, EVALUE 7.30e+00; EST_HUMAN HIT: AI809699.1, EVALUE 1.10e+00
cttcgtccccttctctgacagatgcgcacgtccccacagctctaagcagaagccaccaaccaggggggtgccgtgagggaagactcccat

SEQ ID NO: 25406 - DNA, 486 bp, Homo sapiens
  MAP TO AC011447.2; EXPRESSED IN PLACENTA, SIGNAL = 3.6; EXPRESSED IN BONE MARROW, SIGNAL = 3.8; EXPRESSED IN FETAL LIVER, SIGNAL = 4.6; EXPRESSED IN LUNG, SIGNAL =   2; EXPRESSED IN HEART, SIGNAL =   3; EXPRESSED IN BRAIN, SIGNAL = 3.9; EXPRESSED IN HELA, SIGNAL = 5.1; EXPRESSED IN ADULT LIVER, SIGNAL = 1.8; SWISSPROT HIT: P11227, EVALUE 1.00e-13; EST_HUMAN HIT: AW753028.1, EVALUE 0.00e+00; NT HIT: D10083.1, EVALUE 0.00e+00
gctggccatcatgtctccgtgcagccgctgctgctgccctaatacttgtagaggccctcaaaatcacaaactatgctcaactcactctctacagctctcataatttccaaaatctattttcttcctcacacctgacacatatactttctgctccccggctccttctgctatactcactctttgttgagtctcccacaattaccattgttcctggcctggacttaaatgcggcctcccacattattccggataccacacctgaccctcatgactgcatctctctgatccacctgacattcacatttccccaaatttccttcttccctgtttctcaccctgatcacacttggtttattgatggcagttccaccaggcctaatcaccactcaccagcaaaggcaggctatgctatagtatcttccacatctatcattgaggctaccgctctgcctccctccactacctctcagcaagccgaactagtta

SEQ ID NO: 25407 - DNA, 92 bp, Homo sapiens
  MAP TO AL157915.1; EXPRESSED IN BRAIN, SIGNAL = 2.7; EXPRESSED IN PLACENTA, SIGNAL = 2.3; EXPRESSED IN FETAL LIVER, SIGNAL = 2.7; EXPRESSED IN ADULT LIVER, SIGNAL = 2.5; EXPRESSED IN BONE MARROW, SIGNAL = 2.1; EXPRESSED IN HELA, SIGNAL = 2.9; EXPRESSED IN HEART, SIGNAL = 2.3; EXPRESSED IN LUNG, SIGNAL = 1.9; EST_HUMAN HIT: AW269155.1, EVALUE 4.40e+00; NT HIT: X86347.1, EVALUE 7.60e-01
atgtttcaaatgccgtttgattgtaagttcctacaatggggaagtcggcagttttctgttgtgggtatagggtagcaggttgatctgtgtct

SEQ ID NO: 25408 - DNA, 77 bp, Homo sapiens
  MAP TO AC018499.2; EXPRESSED IN BRAIN, SIGNAL = 2.2; EXPRESSED IN FETAL LIVER, SIGNAL = 2.3; EXPRESSED IN LUNG, SIGNAL = 2.1; EXPRESSED IN PLACENTA, SIGNAL = 2.4; EXPRESSED IN HEART, SIGNAL = 2.5; EXPRESSED IN HELA, SIGNAL = 2.7; EXPRESSED IN BONE MARROW, SIGNAL = 2.1; EXPRESSED IN ADULT LIVER, SIGNAL = 2.5; NT HIT: AF158652.2, EVALUE 2.40e+00; EST_HUMAN HIT: BE274978.1, EVALUE 3.60e+00
tggaggccaaggccttgaatgaccacccggcccttgacatcgtagcttcgcagcatcctccctgcgttgaggccacc

SEQ ID NO: 25409 - DNA, 178 bp, Homo sapiens
  MAP TO AL133257.2; EXPRESSED IN PLACENTA, SIGNAL = 1.7; EXPRESSED IN BRAIN, SIGNAL =   2; EXPRESSED IN FETAL LIVER, SIGNAL = 2.7; EXPRESSED IN HELA, SIGNAL = 2.5; EXPRESSED IN BONE MARROW, SIGNAL = 1.8; EXPRESSED IN LUNG, SIGNAL = 1.8; EXPRESSED IN HEART, SIGNAL = 2.9; EXPRESSED IN ADULT LIVER, SIGNAL = 2.1
aaaaattctaatctgcaagataatccgttcctggtctttattcctggacagtctctctgtctctattccctcctctctctcttcttcctcctcctgcttcttactactcttactcctattcctcttcctcttcttcttcttcctcttcctcttcttcttcttttctctctcactgtct

SEQ ID NO: 25410 - DNA, 171 bp, Homo sapiens
  MAP TO AC006530.4; EXPRESSED IN BRAIN, SIGNAL = 1.6; EXPRESSED IN ADULT LIVER, SIGNAL = 1.4; EXPRESSED IN BONE MARROW, SIGNAL = 1.7; EXPRESSED IN HELA, SIGNAL = 2.3; EXPRESSED IN HEART, SIGNAL = 3.2; EXPRESSED IN PLACENTA, SIGNAL = 1.9; EXPRESSED IN LUNG, SIGNAL = 4.2; EXPRESSED IN FETAL LIVER, SIGNAL = 2.6; SWISSPROT HIT: P36957, EVALUE 6.00e-28; NT HIT: gi4503340, EVALUE 8.00e-92; EST_HUMAN HIT: AA262060.1, EVALUE 3.00e-89
gcccgaaagaatgaacttgccattgaagatatggatggcggtaccttcaccattagcaatggaggcgtttttggctcgctctttggaacacccattatcaacccccctcagtctgccatcctggggatgcatggcatctttgacaggccagtggctataggaggcaaggta

SEQ ID NO: 25411 - DNA, 249 bp, Homo sapiens
  MAP TO AL117694.3; EXPRESSED IN PLACENTA, SIGNAL =   3; EXPRESSED IN BRAIN, SIGNAL = 3.1; EXPRESSED IN BONE MARROW, SIGNAL =   5; EXPRESSED IN HELA, SIGNAL = 3.3; EXPRESSED IN ADULT LIVER, SIGNAL = 2.1; EXPRESSED IN FETAL LIVER, SIGNAL = 3.4; EXPRESSED IN LUNG, SIGNAL = 5.9; EXPRESSED IN HEART, SIGNAL = 2.4; EST_HUMAN HIT: AA558707.1, EVALUE 0.00e+00; NT HIT: X15804.1, EVALUE 1.00e-102; SWISSPROT HIT: P12814, EVALUE 2.00e-32
gtggtcccatttgccattgatctcctgaggcgtgatggttgtgtaggggttggtgcccgccatattgacgtggtaggtctggacaatcttggacacctcattgtggatgcccaggatggccaggcgctccttgtcggcatcagggagggtggccttgaactgctcatgggctgtggtcagtccctggacagagatgggaatatgtgggcaagaggaacaaagggagcgctagaagtgagtggaagggcc

SEQ ID NO: 25412 - DNA, 363 bp, Homo sapiens
  MAP TO AL133380.3; EXPRESSED IN PLACENTA, SIGNAL = 7.5; EXPRESSED IN LUNG, SIGNAL =  24; EXPRESSED IN BRAIN, SIGNAL = 7.5; EXPRESSED IN HELA, SIGNAL =  11; EXPRESSED IN HEART, SIGNAL = 7.4; EXPRESSED IN FETAL LIVER, SIGNAL = 9.5; EXPRESSED IN BONE MARROW, SIGNAL = 9.3; EXPRESSED IN ADULT LIVER, SIGNAL =  12; SWISSPROT HIT: P23821, EVALUE 2.00e-43; NT HIT: gi4506740, EVALUE 0.00e+00; EST_HUMAN HIT: AW327895.1, EVALUE 0.00e+00
ttaagcgataaagacaacatgcttcccactgaactttttctccaattcacatactagccggacttggattttctggaaagatttcagttgaggaacgggaacaaagattatgatagctttctgaccaccaccaacctcaatttccttggctgccataatattcagctccctgagctgagccttgaggtccaagttcatctccagctccagaagagcctgggagatgcgggactcgaactcgtccggcttctcgccattaggcttcacgatcttggcgctcgtactgaacatggccttctcctgggagaacttgccgagcgccggcttaggaagagcagaaggatgccttttaagcaactccat

SEQ ID NO: 25413 - DNA, 235 bp, Homo sapiens
  MAP TO AL157955.1; EXPRESSED IN ADULT LIVER, SIGNAL = 2.2; EXPRESSED IN FETAL LIVER, SIGNAL = 1.9; EXPRESSED IN BRAIN, SIGNAL = 2.1; EXPRESSED IN PLACENTA, SIGNAL = 1.7; EXPRESSED IN BONE MARROW, SIGNAL = 1.6; EXPRESSED IN HELA, SIGNAL =   2; EXPRESSED IN HEART, SIGNAL =   2; EXPRESSED IN LUNG, SIGNAL = 3.9; SWISSPROT HIT: Q07411, EVALUE 2.50e+00; EST_HUMAN HIT: H58041.1, EVALUE 7.00e-60
ctgcagaatctctgatcagacagaacatttgctccaaagccattgaatgggctgggatggagcatgcatggttttagcttcatctcccacaactgtggctttgttctgtgttggtggcaggtggtttccaaaaggaaaagctttgggagatagaagtcctcgttttgacctctgccctccttgtacaccaggagccagaaaaacttcatctcttttacaagaaacattgagattc

SEQ ID NO: 25414 - DNA, 116 bp, Homo sapiens
  MAP TO AH009158.1; EXPRESSED IN ADULT LIVER, SIGNAL = 4.2; EXPRESSED IN BONE MARROW, SIGNAL = 3.3; EXPRESSED IN HEART, SIGNAL = 3.2; EXPRESSED IN PLACENTA, SIGNAL = 3.1; EXPRESSED IN HELA, SIGNAL = 3.9; EXPRESSED IN LUNG, SIGNAL = 4.7; EXPRESSED IN BRAIN, SIGNAL = 4.8; EXPRESSED IN FETAL LIVER, SIGNAL = 3.7; SWISSPROT HIT: Q15878, EVALUE 5.00e-16; EST_HUMAN HIT: AV701967.1, EVALUE 5.90e+00; NT HIT: gi11424378, EVALUE 1.00e-43
ggaatttgccaaagagagagagagagtggagaaccgaagggctttcatgaagctgcggcgccagcagcagattgagcgtgagctgaatggctaccgtgcctggatagacaaagcag

SEQ ID NO: 25415 - DNA, 136 bp, Homo sapiens
  MAP TO AL121975.3; EXPRESSED IN FETAL LIVER, SIGNAL = 2.5; EXPRESSED IN BRAIN, SIGNAL =   2; EXPRESSED IN PLACENTA, SIGNAL = 2.3; EXPRESSED IN HEART, SIGNAL = 2.1; EXPRESSED IN ADULT LIVER, SIGNAL = 2.2; EXPRESSED IN BONE MARROW, SIGNAL = 2.4; EXPRESSED IN HELA, SIGNAL = 2.6; EXPRESSED IN LUNG, SIGNAL = 2.8; NT HIT: Z78698.1, EVALUE 1.00e-62; SWISSPROT HIT: Q66802, EVALUE 1.40e+00; EST_HUMAN HIT: W80738.1, EVALUE 7.00e-03
gttctatattggtagcaaatactgtgattataaagggcaatttgtttcccaaatgcactgtgatgtaatcatcaatctggagtacatggggattaaagatggctgcaaagtctttgacacatcctccgttgagagc

SEQ ID NO: 25416 - DNA, 186 bp, Homo sapiens
  MAP TO AC018553.2; EXPRESSED IN FETAL LIVER, SIGNAL =   2; EXPRESSED IN HELA, SIGNAL = 2.1; EXPRESSED IN HEART, SIGNAL =   2; EXPRESSED IN LUNG, SIGNAL = 3.4; EXPRESSED IN BRAIN, SIGNAL =   2; EXPRESSED IN ADULT LIVER, SIGNAL = 1.9; EXPRESSED IN BONE MARROW, SIGNAL = 2.1; EXPRESSED IN PLACENTA, SIGNAL = 1.9; SWISSPROT HIT: P51957, EVALUE 6.60e+00; NT HIT: AF156673.1, EVALUE 1.10e-01; EST_HUMAN HIT: AV760016.1, EVALUE 1.00e-02
tttgctgaccagggatttttgccctacaggctcccaaagcactgggttgctctcctcgccagttctcacggaagatgaacacattttgcccttgttgacgtgctgctgtaactgcctccttgtcgcctggatcatttgctcctgagaggctgcatctgttctattcattgccgtgtcccggtgcat

SEQ ID NO: 25417 - DNA, 116 bp, Homo sapiens
  MAP TO AL138734.2; EXPRESSED IN PLACENTA, SIGNAL = 2.9; EXPRESSED IN BRAIN, SIGNAL = 3.3; EXPRESSED IN HELA, SIGNAL = 3.1; EXPRESSED IN FETAL LIVER, SIGNAL = 4.4; EXPRESSED IN ADULT LIVER, SIGNAL = 2.8; EXPRESSED IN LUNG, SIGNAL = 4.3; EXPRESSED IN BONE MARROW, SIGNAL = 2.1; EXPRESSED IN HEART, SIGNAL = 3.3; EST_HUMAN HIT: AA393362.1, EVALUE 3.00e-54
cacactttcatattccccatcacattggctgaagtcgtcctcaggcctcactcctatccatcaaagaagacaggactcaccttgctggctgctgccagcattgcttacatcagccg

SEQ ID NO: 25418 - DNA, 200 bp, Homo sapiens
  MAP TO AL121997.7; EXPRESSED IN ADULT LIVER, SIGNAL =   3; EXPRESSED IN BONE MARROW, SIGNAL = 2.8; EXPRESSED IN PLACENTA, SIGNAL = 2.2; EXPRESSED IN FETAL LIVER, SIGNAL = 2.8; EXPRESSED IN LUNG, SIGNAL = 1.9; EXPRESSED IN HEART, SIGNAL = 2.2; EXPRESSED IN BRAIN, SIGNAL = 2.7; EXPRESSED IN HELA, SIGNAL = 2.2; SWISSPROT HIT: Q99698, EVALUE 1.00e-34; EST_HUMAN HIT: AW852095.1, EVALUE 7.00e-01; NT HIT: gi4502838, EVALUE 1.00e-109
aatcttctggaatatggtaacatcaccgctctgacaaatttatggtatactgggcaaattactaattttgaatatttgactcacttaaacaaacatgctggccgatccttcaatgatctcatgcagtatcctgtgttcccatttatacttgctgactacgttagtgagacacttgacctcaatgatctgttgatatacag

SEQ ID NO: 25419 - DNA, 199 bp, Homo sapiens
  MAP TO AC022205.2; EXPRESSED IN ADULT LIVER, SIGNAL = 1.6; EXPRESSED IN HEART, SIGNAL =   2; EXPRESSED IN LUNG, SIGNAL =   2; EXPRESSED IN PLACENTA, SIGNAL = 2.8; EXPRESSED IN BRAIN, SIGNAL = 1.7; EXPRESSED IN BONE MARROW, SIGNAL =   2; EXPRESSED IN FETAL LIVER, SIGNAL = 2.9; EXPRESSED IN HELA, SIGNAL = 2.4; SWISSPROT HIT: P20395, EVALUE 1.70e-02; EST_HUMAN HIT: BE867141.1, EVALUE 1.00e-104; NT HIT: gi11441465, EVALUE 1.00e-108
gataacggccattaataaaaatgctagtgagtttaatagcactaacgttacagtgaatcctaatgatggcgtttcacctgtaggaaatggcaaacaaaggggtgatgcagaatattcccctctatggaaaaggggaaaacagcctgctactgtagcacctaggaaagccaaaagggcagcaacccggaactgtttgaga

SEQ ID NO: 25420 - DNA, 141 bp, Homo sapiens
  MAP TO AC005137.1; EXPRESSED IN BRAIN, SIGNAL = 2.2; EXPRESSED IN ADULT LIVER, SIGNAL = 2.1; EXPRESSED IN HELA, SIGNAL = 3.2; EXPRESSED IN FETAL LIVER, SIGNAL = 2.9; EXPRESSED IN BONE MARROW, SIGNAL = 2.3; EXPRESSED IN HEART, SIGNAL = 2.5; EXPRESSED IN PLACENTA, SIGNAL = 1.9; SWISSPROT HIT: Q03477, EVALUE 8.00e-01; NT HIT: D88184.1, EVALUE 2.00e-02
gaggcagctcagacactgcttaaggacaatgacttggctctagtccaggagttttctaggagctctggctatgagaagctgcgtgcttgggccattccttcaggctgggagaaggctggggatgggctggagaaaggtggc

SEQ ID NO: 25421 - DNA, 89 bp, Homo sapiens
  MAP TO AL138970.2; EXPRESSED IN BRAIN, SIGNAL =   5; EXPRESSED IN HELA, SIGNAL = 2.7; EXPRESSED IN ADULT LIVER, SIGNAL = 3.2; EXPRESSED IN FETAL LIVER, SIGNAL = 2.7; EXPRESSED IN HEART, SIGNAL = 2.4; EXPRESSED IN BONE MARROW, SIGNAL = 2.2; EXPRESSED IN LUNG, SIGNAL = 2.5; EXPRESSED IN PLACENTA, SIGNAL = 2.6; SWISSPROT HIT: Q58588, EVALUE 3.20e+00; EST_HUMAN HIT: AA724295.1, EVALUE 7.00e-02; NT HIT: gi11525786, EVALUE 7.30e-01
ctcccattctctcctgatccctctccacccaggcttctgccccaccattcctccataattgctgctgtgaccatcatcaagaccgccat

SEQ ID NO: 25422 - DNA, 167 bp, Homo sapiens
  MAP TO AC002401.1; EXPRESSED IN BONE MARROW, SIGNAL = 2.6; EXPRESSED IN HEART, SIGNAL = 2.6; EXPRESSED IN LUNG, SIGNAL = 8.8; EXPRESSED IN BRAIN, SIGNAL = 2.8; EXPRESSED IN PLACENTA, SIGNAL = 2.6; EXPRESSED IN ADULT LIVER, SIGNAL = 2.5; EXPRESSED IN FETAL LIVER, SIGNAL = 2.6; EXPRESSED IN HELA, SIGNAL = 3.3; EST_HUMAN HIT: BE907730.1, EVALUE 3.00e-89; NT HIT: gi11434411, EVALUE 2.00e-89; SWISSPROT HIT: P26006, EVALUE 6.00e-20
agagggttgataaggtctccaggtggtcggcagggccaggacccattgccatggacggtgatctccgtgggatacagcagccacttgccattgctgacttcgtagggccactccagacctaggaccagggtccccaggcccaccagcccctcccccattgggcccac

SEQ ID NO: 25423 - DNA, 191 bp, Homo sapiens
  MAP TO AL158137.1; EXPRESSED IN BRAIN, SIGNAL = 2.8; EXPRESSED IN PLACENTA, SIGNAL = 2.7; EXPRESSED IN FETAL LIVER, SIGNAL = 2.5; EXPRESSED IN ADULT LIVER, SIGNAL = 9.9; EXPRESSED IN HELA, SIGNAL = 2.7; EXPRESSED IN LUNG, SIGNAL = 2.9; EXPRESSED IN BONE MARROW, SIGNAL = 2.6; EXPRESSED IN HEART, SIGNAL = 2.6; SWISSPROT HIT: Q9UNI6, EVALUE 2.90e+00; NT HIT: gi7657436, EVALUE 1.00e-103; EST_HUMAN HIT: AU136283.1, EVALUE 1.00e-103
gactattgctgggaagatcatggttattctttggtaaatcgcctttatccagatgtgggacagttgattgatgaaaaatttcacattgcttacaatcttacttataatacaatggcaatgcacaaagatgttgatacctcaatgcttagacgggcaatttggaactatattcactgcatgtttggaataag

SEQ ID NO: 25424 - DNA, 140 bp, Homo sapiens
  MAP TO AL139342.2; EXPRESSED IN PLACENTA, SIGNAL = 1.5; EXPRESSED IN ADULT LIVER, SIGNAL = 1.6; EXPRESSED IN BONE MARROW, SIGNAL = 1.5; EXPRESSED IN FETAL LIVER, SIGNAL = 2.9; EXPRESSED IN HELA, SIGNAL =   3; EXPRESSED IN HEART, SIGNAL = 2.4; EXPRESSED IN BRAIN, SIGNAL = 1.7; SWISSPROT HIT: P53382, EVALUE 4.00e+00; EST_HUMAN HIT: AW889448.1, EVALUE 4.70e-01
ctgcgccatgtccacctgacttatctcataccactggctcaggcatttgatctcttctgcacaaggaggcagaaggagatgctgatactggactggcctcgctccttgactgtccctctcctctgccacctcctcctgct

SEQ ID NO: 25425 - DNA, 184 bp, Homo sapiens
  MAP TO AC007497.2; EXPRESSED IN BRAIN, SIGNAL = 2.8; EXPRESSED IN PLACENTA, SIGNAL = 2.8; EXPRESSED IN BONE MARROW, SIGNAL = 2.2; EXPRESSED IN FETAL LIVER, SIGNAL = 2.9; EXPRESSED IN HELA, SIGNAL = 2.7; EXPRESSED IN HEART, SIGNAL = 2.4; EXPRESSED IN LUNG, SIGNAL = 3.8; EXPRESSED IN ADULT LIVER, SIGNAL = 3.3; SWISSPROT HIT: Q91437, EVALUE 3.90e+00; EST_HUMAN HIT: AA309323.1, EVALUE 6.40e-01; NT HIT: AB023222.1, EVALUE 1.00e-99
cattgctatagttatagtagacccactgcccactcttgggttttggaagtgacacgggtgtctcttcagcaggaagactgtagaatcgacactcaacaaacagccgttggatagtgtcatccatggttacttgagaatcattaaggcttagagctatgatctcaatccgaattttttctgatgg

SEQ ID NO: 25426 - DNA, 142 bp, Homo sapiens
  MAP TO AL133444.1; EXPRESSED IN BRAIN, SIGNAL =  11; EXPRESSED IN FETAL LIVER, SIGNAL =  15; EXPRESSED IN LUNG, SIGNAL = 7.8; EXPRESSED IN ADULT LIVER, SIGNAL =  12; EXPRESSED IN HEART, SIGNAL =  14; EXPRESSED IN PLACENTA, SIGNAL = 9.7; EXPRESSED IN HELA, SIGNAL =  16; EXPRESSED IN BONE MARROW, SIGNAL =  10; NT HIT: AF224669.1, EVALUE 9.00e-08; SWISSPROT HIT: P19711, EVALUE 1.80e+00; EST_HUMAN HIT: BF108755.1, EVALUE 1.00e-13
cctcagactggtccatcagggtccattccagtattattgtcacaggagataacagctccatgcactttattgcccgtgaagaccttccagcagaacaagatatggtgatggaagacagtgatatggatgatcccaaccctat

SEQ ID NO: 25427 - DNA, 311 bp, Homo sapiens
  MAP TO AC020557.2; EXPRESSED IN BRAIN, SIGNAL = 1.7; EXPRESSED IN ADULT LIVER, SIGNAL =   2; EXPRESSED IN HELA, SIGNAL = 2.1; EXPRESSED IN FETAL LIVER, SIGNAL = 2.2; EXPRESSED IN HEART, SIGNAL = 2.1; EXPRESSED IN BONE MARROW, SIGNAL = 1.5; EST_HUMAN HIT: AA412609.1, EVALUE 7.20e-02; NT HIT: AF009222.1, EVALUE 3.00e-03
gtggccagcatggagagatgcaacctgggccagagggcccatggaaagccccagtaattctccagttccatcagaccctcccccgccatcagaccctcctccatcagagccttcacctccatcagaccctcctccatcagattctcttccatcagaccctccacctccatcagatcttccactttccagtgattcacagcttgggatcctgggccaggaagattgagatcccaatagtgtctgaacatgagaacctccagggacccagaaccccaggagcccaaggcccactggccttggggaacccctaa

SEQ ID NO: 25428 - DNA, 78 bp, Homo sapiens
  MAP TO AL121769.2; EXPRESSED IN BRAIN, SIGNAL = 4.2; EXPRESSED IN BONE MARROW, SIGNAL =   3; EXPRESSED IN HEART, SIGNAL = 3.9; EXPRESSED IN LUNG, SIGNAL = 5.4; EXPRESSED IN PLACENTA, SIGNAL = 3.5; EXPRESSED IN HELA, SIGNAL =   4; EXPRESSED IN FETAL LIVER, SIGNAL = 4.9; EXPRESSED IN ADULT LIVER, SIGNAL = 3.6; NT HIT: gi11434175, EVALUE 1.00e-36; EST_HUMAN HIT: AW504143.1, EVALUE 1.00e-36
gcttctgagcagcaacacagtgcacaagctatgtttaatctgggatatatgcatgagaaaggactgggcattaaacag

SEQ ID NO: 25429 - DNA, 139 bp, Homo sapiens
  MAP TO AL159141.1; EXPRESSED IN HEART, SIGNAL = 1.8; EXPRESSED IN PLACENTA, SIGNAL = 1.4; EXPRESSED IN BONE MARROW, SIGNAL = 1.6; EXPRESSED IN FETAL LIVER, SIGNAL =   2; EXPRESSED IN HELA, SIGNAL = 1.9; EST_HUMAN HIT: AA828817.1, EVALUE 8.00e-03; NT HIT: U91328.1, EVALUE 3.10e-01; SWISSPROT HIT: Q56578, EVALUE 2.40e+00
ctagtggatgttcactgtggacaggcctgagttaaaactccagggaagccagtcatctaggggcctccacacttttgtgagttttaccaccagtagcttgaccaggttcctgcagtgaatatcaaagatctcatgcatc

SEQ ID NO: 25430 - DNA, 97 bp, Homo sapiens
  MAP TO AL133257.2; EXPRESSED IN BRAIN, SIGNAL =  11; EXPRESSED IN ADULT LIVER, SIGNAL =  12; EXPRESSED IN HELA, SIGNAL = 5.4; EXPRESSED IN HEART, SIGNAL =  23; EXPRESSED IN PLACENTA, SIGNAL = 7.7; EXPRESSED IN LUNG, SIGNAL =  12; EXPRESSED IN FETAL LIVER, SIGNAL = 6.6; EXPRESSED IN BONE MARROW, SIGNAL = 7.7; SWISSPROT HIT: P19827, EVALUE 3.20e+00; NT HIT: U94403.1, EVALUE 3.20e+00; EST_HUMAN HIT: BE160761.1, EVALUE 1.20e+00
atgataaactacaccacagttaacaagaacataaagatgagtatagatgctagtggtagcttcaaaggagatgggattgaaatcctcaactatgaga

SEQ ID NO: 25431 - DNA, 122 bp, Homo sapiens
  MAP TO AC002041.1; EXPRESSED IN BRAIN, SIGNAL = 3.3; EXPRESSED IN PLACENTA, SIGNAL = 2.4; EXPRESSED IN ADULT LIVER, SIGNAL = 2.6; EXPRESSED IN FETAL LIVER, SIGNAL = 3.2; EXPRESSED IN BONE MARROW, SIGNAL =   3; EXPRESSED IN HELA, SIGNAL = 4.1; EXPRESSED IN HEART, SIGNAL = 3.3; EXPRESSED IN LUNG, SIGNAL = 2.3; SWISSPROT HIT: P05850, EVALUE 7.10e+00
atgtctgctgaaggctgctgcacttgttcttcatcacagaggtgggatgaaagcagtctgagggcaccacactccatgatcagggtctacttctggtgccatagctccaggtggaaggacag

SEQ ID NO: 25432 - DNA, 146 bp, Homo sapiens
  MAP TO AC010369.3; EXPRESSED IN ADULT LIVER, SIGNAL = 1.9; EXPRESSED IN HELA, SIGNAL = 2.7; EXPRESSED IN HEART, SIGNAL = 2.1; EXPRESSED IN BRAIN, SIGNAL = 1.9; EXPRESSED IN PLACENTA, SIGNAL = 1.8; EXPRESSED IN BONE MARROW, SIGNAL = 1.8; EXPRESSED IN FETAL LIVER, SIGNAL = 2.7; EST_HUMAN HIT: AA019770.1, EVALUE 8.00e-77; SWISSPROT HIT: Q9ZLD9, EVALUE 2.70e-01; NT HIT: AB035696.1, EVALUE 5.00e-03
agggagcaagaaagtcaaatggctcgtcttaaaaaacagcaggaagaattggaacagatgagactacgttaccttgccgctgaggaaaaagatacagtaaaaaccgagcgacaagaattgttggatataagaaatgaattgaacag

SEQ ID NO: 25433 - DNA, 123 bp, Homo sapiens
  MAP TO AC011349.2; EXPRESSED IN ADULT LIVER, SIGNAL = 2.2; EXPRESSED IN BONE MARROW, SIGNAL =   2; EXPRESSED IN HEART, SIGNAL = 2.1; EXPRESSED IN LUNG, SIGNAL = 2.1; EXPRESSED IN PLACENTA, SIGNAL = 1.6; EXPRESSED IN BRAIN, SIGNAL = 2.3; EXPRESSED IN FETAL LIVER, SIGNAL = 2.4; EXPRESSED IN HELA, SIGNAL = 2.1; SWISSPROT HIT: P41951, EVALUE 1.80e+00; NT HIT: AE002142.1, EVALUE 2.70e-01; EST_HUMAN HIT: AA279351.1, EVALUE 2.60e-02
tctcagaccattcttatgttcctcagtaatggaatattcaatttgggcattaaatttttgtgtctgtgcccagtgagattcaagagcataaacagtgcttgtacttgtcagaatggcaagcat

SEQ ID NO: 25434 - DNA, 370 bp, Homo sapiens
  MAP TO AC008044.4; EXPRESSED IN ADULT LIVER, SIGNAL = 5.4; EXPRESSED IN BONE MARROW, SIGNAL = 8.7; EXPRESSED IN LUNG, SIGNAL =  13; EXPRESSED IN PLACENTA, SIGNAL = 4.5; EXPRESSED IN BRAIN, SIGNAL = 3.4; EXPRESSED IN HELA, SIGNAL = 7.9; EXPRESSED IN FETAL LIVER, SIGNAL =   7; EXPRESSED IN HEART, SIGNAL = 4.2; EST_HUMAN HIT: AA760913.1, EVALUE 0.00e+00; SWISSPROT HIT: Q9SA98, EVALUE 2.00e-08; NT HIT: gi11434913, EVALUE 0.00e+00
gaaaccttctgtactgatgtctcttttttcatcctcgatgggttctagagggaaattctggtctgtggccaggacctgtcggacagtcatgttaacacgagcggtcttcaagtagctggcacacacctgccagtcctccatagaacaaggctctaccattgaatctctcgggaggacagcagggagaggtgcctctaggcagtgaggcaggccttccccttctggatttggaaggacacgagggactgcgtggttcaagaggcggctgaaacccgacattatcatgatgtcaccactgtgcataaacatggccgtgggggcctcatccctttgaagaccacccaggagaaagatggcggactgtccaaag

SEQ ID NO: 25435 - DNA, 299 bp, Homo sapiens
  MAP TO AL121769.2; EXPRESSED IN BONE MARROW, SIGNAL = 1.8; EXPRESSED IN FETAL LIVER, SIGNAL = 1.9; EXPRESSED IN LUNG, SIGNAL = 1.8; EXPRESSED IN PLACENTA, SIGNAL = 1.5; EXPRESSED IN BRAIN, SIGNAL = 1.7; EXPRESSED IN HEART, SIGNAL = 1.9; EXPRESSED IN ADULT LIVER, SIGNAL = 1.8; EXPRESSED IN HELA, SIGNAL = 2.1; NT HIT: AB023431.1, EVALUE 7.30e-01; SWISSPROT HIT: P47003, EVALUE 6.30e-01
accagtccgagagctcctccggggagaaccatgtggtggatggaggctctcaagaccattcccactcggagcaggatgactcctctgaaaagatgggcctcatctctgaagcagcttccccacctgggagccctgagcagcccccacctgacctggcctcggccatcagcaactgggttcagtttgaagatgacacaccctgggccagcacatctccacctcatcaggaaacagctgagacaggtgaggaggtaggaagggcccggcttgggtttgtggtcagcagggatgcttttcag

SEQ ID NO: 25436 - DNA, 198 bp, Homo sapiens
  MAP TO AC012178.2; EXPRESSED IN BRAIN, SIGNAL = 2.9; EXPRESSED IN HELA, SIGNAL = 3.2; EXPRESSED IN ADULT LIVER, SIGNAL = 2.8; EXPRESSED IN PLACENTA, SIGNAL = 2.4; EXPRESSED IN LUNG, SIGNAL = 2.8; EXPRESSED IN HEART, SIGNAL = 2.9; EXPRESSED IN FETAL LIVER, SIGNAL = 2.7; EXPRESSED IN BONE MARROW, SIGNAL = 2.5; NT HIT: U82083.1, EVALUE 4.60e-01; EST_HUMAN HIT: AW136740.1, EVALUE 2.00e-04; SWISSPROT HIT: P91375, EVALUE 5.80e-01
ttaggggtgggcatgtgactcagtggctcggttcttgccaacgacacctaagaaatctaccaggagtttccgacaaacattttcctctctcattaaagaacgattccttccttttggaagagtgtcatcatgtggagatgtattgcttggagtcatagcagccatcttgtgaccatgaggtgagacctcattttcaca

SEQ ID NO: 25437 - DNA, 157 bp, Homo sapiens
  MAP TO AC023000.2; EXPRESSED IN BRAIN, SIGNAL = 3.5; EXPRESSED IN FETAL LIVER, SIGNAL = 3.2; EXPRESSED IN HELA, SIGNAL = 2.9; EXPRESSED IN ADULT LIVER, SIGNAL = 2.9; EXPRESSED IN PLACENTA, SIGNAL = 2.3; EXPRESSED IN LUNG, SIGNAL =   2; EXPRESSED IN HEART, SIGNAL = 2.7; EXPRESSED IN BONE MARROW, SIGNAL = 2.2; NT HIT: U30790.1, EVALUE 1.40e+00
tcgtgctcagatgaatcagcttcattgggcttgacacctccaacctgtatccttgcaggctgaatagaagagggaaacagagaaggagagggggaaggaaagggaagaaaatgaaagggaagagggggacgaagaggagaagcagaagggaagagag

SEQ ID NO: 25438 - DNA, 253 bp, Homo sapiens
  MAP TO AC000026.3; EXPRESSED IN PLACENTA, SIGNAL = 2.2; EXPRESSED IN BRAIN, SIGNAL = 1.9; EXPRESSED IN HEART, SIGNAL = 2.3; EXPRESSED IN FETAL LIVER, SIGNAL =   2; EXPRESSED IN HELA, SIGNAL = 2.5; EXPRESSED IN BONE MARROW, SIGNAL = 3.5; EXPRESSED IN LUNG, SIGNAL = 5.8; EXPRESSED IN ADULT LIVER, SIGNAL = 1.7; NT HIT: gi4885224, EVALUE 0.00e+00; SWISSPROT HIT: P11387, EVALUE 1.70e+00; EST_HUMAN HIT: BE910546.1, EVALUE 0.00e+00
gtggtgatcgtggcagaggtggccctggtggcatgcggggaggaagaggtggcctcatggatcgtggtggtcccggtggaatgttcagaggtggccgtggtggagacagaggtggcttccgtggtggccggggcatggaccgaggtggctttggtggaggaagacgaggtggccctggggggccccctggacctttgatggaacagatgggaggaagaagaggaggacgtggaggacctggaaaaatggataa

SEQ ID NO: 25439 - DNA, 208 bp, Homo sapiens
  MAP TO AC002044.1; EXPRESSED IN BRAIN, SIGNAL = 3.8; EXPRESSED IN PLACENTA, SIGNAL = 3.3; EXPRESSED IN FETAL LIVER, SIGNAL = 3.9; EXPRESSED IN HELA, SIGNAL = 3.7; EXPRESSED IN BONE MARROW, SIGNAL = 3.1; EXPRESSED IN HEART, SIGNAL = 3.3; EXPRESSED IN LUNG, SIGNAL = 3.2; EXPRESSED IN ADULT LIVER, SIGNAL = 3.9; NT HIT: AJ005389.1, EVALUE 7.70e+00; SWISSPROT HIT: P48935, EVALUE 2.90e+00; EST_HUMAN HIT: AA678019.1, EVALUE 7.30e-01
cggctgccctgtcttctctcattatgaaggtgatgaatgtatttgtcagcaaatagtaggaactcaagaggagcctctgggtttgagcaccaaattcatgctctgcagcaacaaccagaaagttgaagagcatgggaggaattttaaagagcattttcctctcgcatttggttgaaattcttctgtaggctcggttccagcaagacat

SEQ ID NO: 25440 - DNA, 79 bp, Homo sapiens
  MAP TO AC018493.4; EXPRESSED IN BRAIN, SIGNAL = 2.2; EXPRESSED IN PLACENTA, SIGNAL = 2.1; EXPRESSED IN BONE MARROW, SIGNAL = 1.7; EXPRESSED IN FETAL LIVER, SIGNAL = 3.1; EXPRESSED IN HELA, SIGNAL = 2.5; EXPRESSED IN HEART, SIGNAL = 2.1; EXPRESSED IN ADULT LIVER, SIGNAL = 2.3; EST_HUMAN HIT: BF669279.1, EVALUE 3.70e+00; NT HIT: gi9634361, EVALUE 9.80e+00
tgatgctatcgtcatcatcatcatcatcatcattatcatcatcatcaaggtcatgacagaaagaggacacattacatga

SEQ ID NO: 25441 - DNA, 151 bp, Homo sapiens
  MAP TO AC023084.2; EXPRESSED IN ADULT LIVER, SIGNAL = 3.7; EXPRESSED IN BONE MARROW, SIGNAL = 2.6; EXPRESSED IN HEART, SIGNAL = 2.3; EXPRESSED IN LUNG, SIGNAL = 2.9; EXPRESSED IN BRAIN, SIGNAL =   3; EXPRESSED IN PLACENTA, SIGNAL = 2.1; EXPRESSED IN FETAL LIVER, SIGNAL = 3.1; EXPRESSED IN HELA, SIGNAL = 2.7; NT HIT: D86964.1, EVALUE 2.00e-39; SWISSPROT HIT: O03733, EVALUE 1.40e+00
tgagaactacctagtgcgatggggcagccggggcttccctaaggagattgagatgctcaacaatctgaaggtggtcttcacggtgagtgtgcaccctcttctcgttaccgtgctccccaaccacaaaaatgtgaccttggaaatgaggctg

SEQ ID NO: 25442 - DNA, 85 bp, Homo sapiens
  MAP TO AL135788.2; EXPRESSED IN FETAL LIVER, SIGNAL = 4.5; EXPRESSED IN HELA, SIGNAL = 5.1; EXPRESSED IN HEART, SIGNAL = 4.4; EXPRESSED IN BRAIN, SIGNAL = 1.7; EXPRESSED IN PLACENTA, SIGNAL = 1.8; EXPRESSED IN ADULT LIVER, SIGNAL = 1.5; EXPRESSED IN BONE MARROW, SIGNAL = 1.5; EST_HUMAN HIT: BE062558.1, EVALUE 8.00e-14; NT HIT: AL163246.2, EVALUE 5.00e-11
tcaggagtgacctttactccagttctcaatgagttcctctttgccatctgagacctcctcagtctggacttcactgttcatatca

SEQ ID NO: 25443 - DNA, 487 bp, Homo sapiens
  MAP TO AC002039.1; EXPRESSED IN BRAIN, SIGNAL =  10; EXPRESSED IN FETAL LIVER, SIGNAL = 3.5; EXPRESSED IN HELA, SIGNAL = 2.9; EXPRESSED IN ADULT LIVER, SIGNAL = 1.8; EXPRESSED IN HEART, SIGNAL = 2.8; EXPRESSED IN PLACENTA, SIGNAL = 3.6; EXPRESSED IN LUNG, SIGNAL =  16; EXPRESSED IN BONE MARROW, SIGNAL =   5; EST_HUMAN HIT: AU125488.1, EVALUE 9.00e-92; NT HIT: L39891.1, EVALUE 0.00e+00; SWISSPROT HIT: P98161, EVALUE 4.00e-53
gtaccacggcccacgtgggcatcatgctgtatggggtggacagccggagcggccaccggcacctggacggcgacagagccttccaccgcaacagtctggacatcttccagatcgccaccccgcacagcctgggtagcgtgtggaagatccgagtgtggcacgacaacaaaggtctgtatggaccctgccaagctctgcccctctgcccctgcattggggcgccctgcgaacctgacctccctcccgcgcctctgcagggctcagccctgcctggttcctgcagcacatcatcgtcagggacctgcagacggcacgcagcaccttcttcctggtcaatgactggctttcggtggagacggaggccaacgggggcctggtggagaaggaggtgctggctgcgagtaaggcctcgttccatgttcccactccgtgggaggttgggcagggtggtcctgccccgtggcctcctgcagtgcggccctccctg

SEQ ID NO: 25444 - DNA, 100 bp, Homo sapiens
  MAP TO AL136294.1; EXPRESSED IN BRAIN, SIGNAL = 2.7; EXPRESSED IN HELA, SIGNAL = 3.1; EXPRESSED IN ADULT LIVER, SIGNAL =   3; EXPRESSED IN BONE MARROW, SIGNAL = 2.3; EXPRESSED IN FETAL LIVER, SIGNAL =   4; EXPRESSED IN LUNG, SIGNAL = 3.2; EXPRESSED IN HEART, SIGNAL = 3.1; EXPRESSED IN PLACENTA, SIGNAL = 2.5; EST_HUMAN HIT: AA928544.1, EVALUE 7.90e-02; NT HIT: AF094481.1, EVALUE 3.00e-03
ctcctaccacagcagacaggttggggcagacaccgtcatggttggggagcaggaggacagcatggggaaaaccactccaggcctttctctcaaaccttag

SEQ ID NO: 25445 - DNA, 94 bp, Homo sapiens
  MAP TO AL121838.2; EXPRESSED IN PLACENTA, SIGNAL = 2.5; EXPRESSED IN BRAIN, SIGNAL = 3.3; EXPRESSED IN BONE MARROW, SIGNAL = 2.8; EXPRESSED IN HEART, SIGNAL = 3.3; EXPRESSED IN ADULT LIVER, SIGNAL = 4.2; EXPRESSED IN HELA, SIGNAL = 3.7; EXPRESSED IN LUNG, SIGNAL = 2.6; EXPRESSED IN FETAL LIVER, SIGNAL = 7.5; NT HIT: S56660.1, EVALUE 3.10e+00; EST_HUMAN HIT: AW241369.1, EVALUE 4.50e+00
ggctgtgccaagggcacctggagaattcaagatagcagggacattgagtcagcaaggacacgtgctttcatctgtgtttaagcttgccggcatt

SEQ ID NO: 25446 - DNA, 227 bp, Homo sapiens
  MAP TO AC025286.1; EXPRESSED IN ADULT LIVER, SIGNAL = 3.4; EXPRESSED IN HEART, SIGNAL = 1.9; EXPRESSED IN BRAIN, SIGNAL = 2.6; EXPRESSED IN BONE MARROW, SIGNAL = 4.1; EXPRESSED IN FETAL LIVER, SIGNAL =   3; EXPRESSED IN HELA, SIGNAL = 3.6; EXPRESSED IN LUNG, SIGNAL = 3.8; EXPRESSED IN PLACENTA, SIGNAL = 2.6; SWISSPROT HIT: P31271, EVALUE 1.00e+00; EST_HUMAN HIT: BE938558.1, EVALUE 8.10e-01
tcagtttctcttcttccgagaggggtctgacctcatggtcaaaggggtgttggttctcagcggccacatcagcgtgtactttccaagctgcgttctccaatgggcagccgggacctgtagcctgggccatctctgtctgctcccatgaatgctgacctacatcctttgcttccaggcggcacgtggccgaaacgtgcatccagggcagatatggcaagagcagggtc

SEQ ID NO: 25447 - DNA, 231 bp, Homo sapiens
  MAP TO AL157817.3; EXPRESSED IN BRAIN, SIGNAL = 2.5; EXPRESSED IN LUNG, SIGNAL = 2.3; EXPRESSED IN PLACENTA, SIGNAL = 2.1; EXPRESSED IN HEART, SIGNAL = 2.1; EXPRESSED IN HELA, SIGNAL = 2.7; EXPRESSED IN FETAL LIVER, SIGNAL = 2.9; EXPRESSED IN BONE MARROW, SIGNAL = 2.1; EXPRESSED IN ADULT LIVER, SIGNAL = 2.7; SWISSPROT HIT: Q09320, EVALUE 5.40e+00; EST_HUMAN HIT: H62969.1, EVALUE 5.30e-02; NT HIT: AJ229042.1, EVALUE 6.00e-04
ttaagccactaagttggtgatgatttgttccagcagtaataggaaatcaatataagcaccttctatgaccaggcactgaccctgccaatgcaaatatgcccggcattccagagacacatagtccagtagggagagaaaattctgcacatgcaggtaaagcaacatgctatgcactaaacatgcatgtaccaagccctgagggagcactgagctgatggtgctcccctttgc

SEQ ID NO: 25448 - DNA, 214 bp, Homo sapiens
  MAP TO AC002122.1; EXPRESSED IN PLACENTA, SIGNAL = 2.9; EXPRESSED IN BRAIN, SIGNAL = 2.8; EXPRESSED IN FETAL LIVER, SIGNAL = 3.8; EXPRESSED IN HELA, SIGNAL = 3.9; EXPRESSED IN HEART, SIGNAL = 3.5; EXPRESSED IN BONE MARROW, SIGNAL = 2.2; EXPRESSED IN ADULT LIVER, SIGNAL = 2.5; EST_HUMAN HIT: AA372637.1, EVALUE 2.00e-41; SWISSPROT HIT: O41033, EVALUE 3.00e-01; NT HIT: AL163246.2, EVALUE 2.00e-37
agggagaaatgctaccaccaagagaaacaacaaggtttccattaaactggaaattaaaattgctacctggacactttgggcttctcctacctttaatccaacaggctaagaagggagtgacagtgttggctggggtaattgacctggactatcaagatgaaatcagtctactactccacagtggaggtaagaagagtatgcatggaatacacga

SEQ ID NO: 25449 - DNA, 230 bp, Homo sapiens
  MAP TO Z97197.2; EXPRESSED IN PLACENTA, SIGNAL = 1.7; EXPRESSED IN BONE MARROW, SIGNAL = 3.1; EXPRESSED IN FETAL LIVER, SIGNAL = 2.4; EXPRESSED IN LUNG, SIGNAL = 2.7; EXPRESSED IN HEART, SIGNAL = 2.1; EXPRESSED IN BRAIN, SIGNAL = 1.9; EXPRESSED IN HELA, SIGNAL = 2.5; EXPRESSED IN ADULT LIVER, SIGNAL = 1.9; EST_HUMAN HIT: AW024510.1, EVALUE 6.00e-88; SWISSPROT HIT: Q14165, EVALUE 3.00e-32; NT HIT: gi7661947, EVALUE 4.00e-88
atgtaccaaagcttcagcctcatccgggattggagaagaaagaagaggaagaagaagaagaagaatatgatgaagggtctaatctcaaaaaacagaccaataagaaccgggtgcagtcaggcccccgcacacccaacccctatgcctcggacaacagcagcctcatgtttcccatcctggtggccttcggagtcttcattccaaccctcttctgcctctgccggttgtga

SEQ ID NO: 25450 - DNA, 263 bp, Homo sapiens
  MAP TO AL121603.2; EXPRESSED IN ADULT LIVER, SIGNAL =   5; EXPRESSED IN HELA, SIGNAL = 6.3; EXPRESSED IN BRAIN, SIGNAL = 5.8; EXPRESSED IN PLACENTA, SIGNAL = 4.9; EXPRESSED IN HEART, SIGNAL = 5.2; EXPRESSED IN BONE MARROW, SIGNAL = 4.6; EXPRESSED IN FETAL LIVER, SIGNAL = 6.1; EXPRESSED IN LUNG, SIGNAL = 4.6; SWISSPROT HIT: P55855, EVALUE 5.00e-14; EST_HUMAN HIT: BE712790.1, EVALUE 2.00e-38; NT HIT: gi5902097, EVALUE 2.00e-38
accgctgccgcctccttcttctgtcactcctggtgctgcactgtgttcgttcagtgagaagctggtacctcttttgtgaagcggcagctgagaagactctggcatttgccatggccgaggaaaagcccaaggcattgtcaatggggcagatcagattccgatttgacagtcagccaatcaatgaaacagacacacctgtacaggtggaaatggaggatatagatataattgatgtgttccaccagcagataggaggtgtctac

SEQ ID NO: 25451 - DNA, 94 bp, Homo sapiens
  MAP TO AL079304.2; EXPRESSED IN ADULT LIVER, SIGNAL = 2.4; EXPRESSED IN HELA, SIGNAL = 2.8; EXPRESSED IN LUNG, SIGNAL = 2.8; EXPRESSED IN BRAIN, SIGNAL = 2.5; EXPRESSED IN PLACENTA, SIGNAL = 2.3; EXPRESSED IN BONE MARROW, SIGNAL = 2.5; EXPRESSED IN FETAL LIVER, SIGNAL = 2.9; EXPRESSED IN HEART, SIGNAL = 2.5; SWISSPROT HIT: P34221, EVALUE 3.20e+00; NT HIT: U67600.1, EVALUE 5.00e-02
aataagaatgttagttactatttgctgtgcaccaacaatggcaggctccatattgggaactttaaatgtatctttaaccttcgcattgagtgag

SEQ ID NO: 25452 - DNA, 198 bp, Homo sapiens
  MAP TO AL109759.3; EXPRESSED IN PLACENTA, SIGNAL = 2.5; EXPRESSED IN BRAIN, SIGNAL = 2.6; EXPRESSED IN BONE MARROW, SIGNAL =   2; EXPRESSED IN HEART, SIGNAL = 2.1; EXPRESSED IN LUNG, SIGNAL = 2.3; EXPRESSED IN ADULT LIVER, SIGNAL = 2.1; EXPRESSED IN FETAL LIVER, SIGNAL = 2.2; EXPRESSED IN HELA, SIGNAL = 2.4; NT HIT: AL163247.2, EVALUE 4.00e-17; SWISSPROT HIT: P08547, EVALUE 3.00e-14; EST_HUMAN HIT: BE004396.1, EVALUE 5.00e-17
ttactcattacaggtctgatcagggtttctatttcttcgtggttcaatctggggaggttgtatgtttccaggaatatatccatttcctctaggttttctagtttgtgtgcacagaggcactcagtatttctgatgatcttttgtacttttttgatatcagttgtattgtcaccattatcatttctgattttacttatg

SEQ ID NO: 25453 - DNA, 520 bp, Homo sapiens
  MAP TO AL049872.3; EXPRESSED IN PLACENTA, SIGNAL =   2; EXPRESSED IN BONE MARROW, SIGNAL = 3.7; EXPRESSED IN BRAIN, SIGNAL = 4.7; EXPRESSED IN LUNG, SIGNAL =   4; EXPRESSED IN HEART, SIGNAL =   4; EXPRESSED IN HELA, SIGNAL =   4; EXPRESSED IN FETAL LIVER, SIGNAL =   4; EXPRESSED IN ADULT LIVER, SIGNAL =   4; SWISSPROT HIT: P49454, EVALUE 1.00e-07; EST_HUMAN HIT: AU138211.1, EVALUE 0.00e+00; NT HIT: gi11434816, EVALUE 0.00e+00
ctgttctttctctttcaatagctgttcaaaagcaagagccttctccttcattgagtggcactcaaactctttttctcgcagcatcatagaaaacttcatgttagtctcttgtaacgcttgatattctgtttcctttcccctgtatgtttccactattttttcattttctccttttagtttgccaatgtccatctctagaattaatattctctccttcaggtttgttactgcctgcctcaaaagttcgttttcatttactttgttagtgaaattttcattggaagaaagtagttgatcacttttggctttgattaagaggtctttttccttaagtaacttttgcaaaacatcttgtttctcctttagctgcttgatttctgaatcggtttgttcgtgttcttttctttctagctctgaggtggcagcaatcgaatcagacaatctgtggttattttcctggagagttctaattgttgcatctttttcctgtagtgattttcttagctcttctaactcttgc

SEQ ID NO: 25454 - DNA, 162 bp, Homo sapiens
  MAP TO AC010253.2; EXPRESSED IN HELA, SIGNAL = 1.9; EXPRESSED IN HEART, SIGNAL = 1.8; EXPRESSED IN BRAIN, SIGNAL = 1.8; EXPRESSED IN ADULT LIVER, SIGNAL =   2; EXPRESSED IN BONE MARROW, SIGNAL = 1.6; EXPRESSED IN FETAL LIVER, SIGNAL = 1.9; EXPRESSED IN LUNG, SIGNAL = 2.3; EXPRESSED IN PLACENTA, SIGNAL = 1.8; SWISSPROT HIT: P28339, EVALUE 1.30e+00; EST_HUMAN HIT: AW861641.1, EVALUE 3.50e-02
cgaaacaagaaggttccagccatctctgctgcaaagggtcttgatgcctacaagacgagtgaggacatcctggaacactatggggatggcagggcaagctcccctatacagccagagcagcagaagctggtctttcccttgcttcttccttccacaacttct

SEQ ID NO: 25455 - DNA, 324 bp, Homo sapiens
  MAP TO AL034347.23; EXPRESSED IN ADULT LIVER, SIGNAL = 2.8; EXPRESSED IN FETAL LIVER, SIGNAL = 3.8; EXPRESSED IN HELA, SIGNAL = 4.5; EXPRESSED IN BRAIN, SIGNAL = 2.5; EXPRESSED IN PLACENTA, SIGNAL = 3.6; EXPRESSED IN HEART, SIGNAL = 4.2; EXPRESSED IN BONE MARROW, SIGNAL = 4.6; EXPRESSED IN LUNG, SIGNAL = 2.2; SWISSPROT HIT: P18128, EVALUE 8.40e-02; NT HIT: AL163282.2, EVALUE 5.00e-79; EST_HUMAN HIT: H04625.1, EVALUE 3.00e-78
acagtggtcctcttctcacagctccactaggcggtgtcccagtagggactctgtgagggggctccaaccccacatttcccttctgcactgccctagccgaggttctccatgagagccccgcccctgcagcaaacttctgcctgggcatccaggcatttccatacatcttctgaaatctagacagaggttcccaaaccccatttcttgacttctgtgcacccacatgctcaacatcacatggaagttgccaaggcttaaggctttcaccctctgaagccatggcctgagcttcatgttggcccctttcagccatggccggagtgg

SEQ ID NO: 25456 - DNA, 181 bp, Homo sapiens
  MAP TO AL121595.3; EXPRESSED IN PLACENTA, SIGNAL = 1.9; EXPRESSED IN BRAIN, SIGNAL = 1.9; EXPRESSED IN HEART, SIGNAL = 4.8; EXPRESSED IN ADULT LIVER, SIGNAL = 2.1; EXPRESSED IN BONE MARROW, SIGNAL = 1.8; EXPRESSED IN FETAL LIVER, SIGNAL = 4.4; EXPRESSED IN HELA, SIGNAL = 4.8; SWISSPROT HIT: P57368, EVALUE 5.10e+00; EST_HUMAN HIT: AI831462.1, EVALUE 2.00e-62; NT HIT: AL163210.2, EVALUE 6.00e-65
tgaatggctttgacaaaaatgctgatagtgatatggacaataaagtccaggctgaggtggtctcaaatggagatgagggacctgttggaactgaagcaaaggtaactcttgttatgttttagcaaagagaatggcagcattttgtccctgcccttgagatttgtggaactttgaacttgag

SEQ ID NO: 25457 - DNA, 183 bp, Homo sapiens
  MAP TO AC007225.2; EXPRESSED IN HEART, SIGNAL = 2.2; NT HIT: D84408.1, EVALUE 7.00e-03; SWISSPROT HIT: P07313, EVALUE 2.00e-13; EST_HUMAN HIT: BF059578.1, EVALUE 6.00e-72
cgtggacgggggtgagctcttcgaccggatcacagatgagaagtaccacctgactgagctggatgtggtcctgttcaccaggcagatctgtgagggtgtgcattacctgcaccagcactacatcctgcacctggacctcaaggtgggttctgccctgggcatgcggtaggggcccctggtgtc

SEQ ID NO: 25458 - DNA, 142 bp, Homo sapiens
  MAP TO AC018765.4; EXPRESSED IN BRAIN, SIGNAL = 2.1; EXPRESSED IN PLACENTA, SIGNAL =   2; EXPRESSED IN ADULT LIVER, SIGNAL = 1.7; EXPRESSED IN BONE MARROW, SIGNAL = 1.5; EXPRESSED IN FETAL LIVER, SIGNAL = 1.9; EXPRESSED IN LUNG, SIGNAL = 3.1; EXPRESSED IN HEART, SIGNAL = 3.4; NT HIT: AL163202.2, EVALUE 8.10e-02; EST_HUMAN HIT: AA704252.1, EVALUE 1.20e-01
cccaatgtctaaatccttgtctctcagggagccatatgttcctaaagtttctgaaagtttcctcttccttcttcttttacctccccttctttctctctccttctcttcttcttcctttttatcctccttcttagttattgtc

SEQ ID NO: 25459 - DNA, 150 bp, Homo sapiens
  MAP TO AC018801.2; EXPRESSED IN BRAIN, SIGNAL = 1.9; EXPRESSED IN ADULT LIVER, SIGNAL = 2.5; EXPRESSED IN BONE MARROW, SIGNAL = 1.6; EXPRESSED IN FETAL LIVER, SIGNAL = 2.3; EXPRESSED IN HELA, SIGNAL = 1.9; EXPRESSED IN HEART, SIGNAL = 1.8; EXPRESSED IN PLACENTA, SIGNAL = 1.7; NT HIT: AB035507.1, EVALUE 3.40e-01; SWISSPROT HIT: P00718, EVALUE 7.90e-01
tgaagcaactttcccagaagcaccacagtggacttgttctcaagtctaattggccagatcagggaaatatgcactgtcctggaccagtcactggtgatgaaagggtaacacccaccaccggggttctgctactacacaggatgaagaaag

SEQ ID NO: 25460 - DNA, 114 bp, Homo sapiens
  MAP TO AL078594.36; EXPRESSED IN BRAIN, SIGNAL = 2.5; EXPRESSED IN ADULT LIVER, SIGNAL = 2.6; EXPRESSED IN BONE MARROW, SIGNAL = 1.9; EXPRESSED IN FETAL LIVER, SIGNAL = 2.6; EXPRESSED IN HELA, SIGNAL = 2.6; EXPRESSED IN HEART, SIGNAL = 2.2; EXPRESSED IN PLACENTA, SIGNAL = 2.1
ttcttcctcctcccccttcccgcttctcccccttccttctttctcccacctcctccttcctcctcctccttactttcttcttctttcttttctttcttcttcacttgccctaca

SEQ ID NO: 25461 - DNA, 228 bp, Homo sapiens
  MAP TO AC022211.2; EXPRESSED IN ADULT LIVER, SIGNAL = 5.4; EXPRESSED IN BONE MARROW, SIGNAL = 4.3; EXPRESSED IN HEART, SIGNAL = 4.4; EXPRESSED IN LUNG, SIGNAL = 4.5; EXPRESSED IN BRAIN, SIGNAL = 3.6; EXPRESSED IN PLACENTA, SIGNAL = 4.7; EXPRESSED IN HELA, SIGNAL = 5.5; EXPRESSED IN FETAL LIVER, SIGNAL = 6.1; EST_HUMAN HIT: BE074267.1, EVALUE 1.00e-125; NT HIT: gi11424791, EVALUE 1.00e-125; SWISSPROT HIT: P38486, EVALUE 3.00e+00
ctagtcggagacttcgctgtagtaatacttgtgggcagctggcgttgtcttccagccggccgcccggaactcaatgatctccagcagcagcagctgggccagggagctgaggccagttgggagcaggaagccatcccggatcagcacaaagagctcatccatgcgctgcccattcattttctccagctgctccccaacccggtgcagctgcagcaccaaacagtccac

SEQ ID NO: 25462 - DNA, 104 bp, Homo sapiens
  MAP TO AC023302.2; EXPRESSED IN PLACENTA, SIGNAL = 3.4; EXPRESSED IN BRAIN, SIGNAL = 1.8; EXPRESSED IN ADULT LIVER, SIGNAL = 1.8; EXPRESSED IN HELA, SIGNAL = 2.5; EXPRESSED IN FETAL LIVER, SIGNAL = 2.3; EXPRESSED IN HEART, SIGNAL = 2.1; EXPRESSED IN BONE MARROW, SIGNAL = 1.7; EST_HUMAN HIT: AW270280.1, EVALUE 2.00e-45; NT HIT: U67586.1, EVALUE 8.80e-01
ggatgcgttcggagagaaggacatggatggtgaagaatttggaaataccttatacaaagaatggtcaagggaactgggaacattccggctgcaaaagagattaa

SEQ ID NO: 25463 - DNA, 273 bp, Homo sapiens
  MAP TO AC012578.5; EXPRESSED IN ADULT LIVER, SIGNAL = 1.7; EXPRESSED IN HELA, SIGNAL =   2; EXPRESSED IN HEART, SIGNAL = 1.7; EXPRESSED IN BRAIN, SIGNAL = 1.7; EXPRESSED IN PLACENTA, SIGNAL = 1.5; EXPRESSED IN FETAL LIVER, SIGNAL = 2.1; SWISSPROT HIT: P44113, EVALUE 5.90e+00; EST_HUMAN HIT: BE619655.1, EVALUE 2.50e-01; NT HIT: AF176458.1, EVALUE 4.20e-02
gttgaggagagggtgcggagccaacatctccagaaaacccacatgtgcttgatgcccagccccgcatggctgctgccgttgctggcgtttgcattgttattgccactcctaccttcttctctgattatcaaacttgcaaaagagttttggttgcatgttttttttcaaacacttcctttaatatccacatgcaggcaaatgtccattgtccctgtgtgtcgtgggagatatcaggcttggcgaggtttgtcgaacctgcacaaaggcccgcgg

SEQ ID NO: 25464 - DNA, 182 bp, Homo sapiens
  MAP TO AC008430.3; EXPRESSED IN BRAIN, SIGNAL = 2.3; EXPRESSED IN ADULT LIVER, SIGNAL = 2.5; EXPRESSED IN BONE MARROW, SIGNAL = 1.7; EXPRESSED IN FETAL LIVER, SIGNAL = 2.2; EXPRESSED IN HELA, SIGNAL = 2.4; EXPRESSED IN HEART, SIGNAL = 2.3; EXPRESSED IN PLACENTA, SIGNAL = 1.5; SWISSPROT HIT: P70490, EVALUE 2.00e-13; NT HIT: gi5031660, EVALUE 3.00e-85; EST_HUMAN HIT: AW965338.1, EVALUE 5.00e-85
tgacttaccttatcttttctttgcttttcatcctggtatacagtccagtgttctccatcattgctgtaagccagtttgtaggagccaacaaactgtacatgaccaaaatctttagctccttgtgtaatgatgccagtcactttggttggaacaagaagatccaccttaaaaaaaagaaaaat

SEQ ID NO: 25465 - DNA, 407 bp, Homo sapiens
  MAP TO AC019224.2; EXPRESSED IN PLACENTA, SIGNAL = 6.4; EXPRESSED IN BRAIN, SIGNAL = 1.9; EXPRESSED IN HELA, SIGNAL = 3.9; EXPRESSED IN FETAL LIVER, SIGNAL = 9.9; EXPRESSED IN BONE MARROW, SIGNAL = 5.8; EXPRESSED IN HEART, SIGNAL = 1.9; EXPRESSED IN LUNG, SIGNAL =   9; SWISSPROT HIT: P57053, EVALUE 3.00e-47; NT HIT: gi11036645, EVALUE 0.00e+00; EST_HUMAN HIT: BE622317.1, EVALUE 0.00e+00
atgccggagccagcgaagtccgctcccgcgcccaagaagggctcgaagaaagccgtgactaaggcgcagaagaaggacggcaggaagcgcaagcgcagccgcaaggagagctactccgtatacgtgtacaaggtgctgaagcaggtccaccccgacaccggcatctcctctaaggccatgggaatcatgaactccttcgtcaacgacatcttcgaacgcatcgcaggtgaggcttcccgcctgccgcattacaacaagcgctcgaccatcacctccagggagatccagacggccgtgcgcctgctgctgcccggggagttggccaagcacgccgtgtccgagggcaccaaggccgtcaccaagtacaccagcgctaagtaaacttgccaaattgatgcctgcagctc

SEQ ID NO: 25466 - DNA, 199 bp, Homo sapiens
  MAP TO AC020647.9; EXPRESSED IN BONE MARROW, SIGNAL = 1.5; EXPRESSED IN FETAL LIVER, SIGNAL = 1.8; EXPRESSED IN HEART, SIGNAL =   2; EXPRESSED IN PLACENTA, SIGNAL = 2.5; EXPRESSED IN BRAIN, SIGNAL = 1.7; EXPRESSED IN HELA, SIGNAL =   2; EXPRESSED IN ADULT LIVER, SIGNAL = 1.4; NT HIT: M65109.1, EVALUE 1.20e-01; SWISSPROT HIT: P03399, EVALUE 2.20e+00
aattgttaaagtattgaaaagcagagagctctggggcctgtgtgtgagtgtgtctgtgtgcctggtggcaatcaagagttgtcaaaggcattttgttaggggatttaataaaatgagtatttgccttttcagtaattttcaaagttattttctcctgtgtatgaaaaagaaattctgcattatcctttgctttcataca

SEQ ID NO: 25467 - DNA, 162 bp, Homo sapiens
  MAP TO AC017079.2; EXPRESSED IN ADULT LIVER, SIGNAL = 3.9; EXPRESSED IN BONE MARROW, SIGNAL = 7.3; EXPRESSED IN LUNG, SIGNAL = 6.9; EXPRESSED IN HEART, SIGNAL =  11; EXPRESSED IN BRAIN, SIGNAL =  11; EXPRESSED IN PLACENTA, SIGNAL = 7.2; EXPRESSED IN HELA, SIGNAL =  12; EXPRESSED IN FETAL LIVER, SIGNAL =  15; EST_HUMAN HIT: AI929244.1, EVALUE 8.00e-65; SWISSPROT HIT: P46778, EVALUE 3.00e-20; NT HIT: X89401.1, EVALUE 1.00e-62
gaagttcatgcatttcaggaagttatctcggctcttagagtgcttactgtgctcaatatgcacactaattctcttggcaagaatcttgccctgaacttgtttgtttacaacaatgccaacagcatgctgagtaacattgtaaactcttccagttttgccatg

SEQ ID NO: 25468 - DNA, 128 bp, Homo sapiens
  MAP TO AC016289.3; EXPRESSED IN BRAIN, SIGNAL = 6.2; EXPRESSED IN PLACENTA, SIGNAL = 4.5; EXPRESSED IN HELA, SIGNAL =   8; EXPRESSED IN ADULT LIVER, SIGNAL = 5.5; EXPRESSED IN HEART, SIGNAL = 8.3; EXPRESSED IN LUNG, SIGNAL = 5.8; EXPRESSED IN BONE MARROW, SIGNAL = 5.1; EXPRESSED IN FETAL LIVER, SIGNAL = 9.3; EST_HUMAN HIT: R35611.1, EVALUE 4.00e-66; NT HIT: gi5453949, EVALUE 3.00e-66; SWISSPROT HIT: Q15172, EVALUE 3.00e-19
ggattccagtgttctttggaaattttgtacaaactggcaaacataattggcagaattttatcaatgttctcctcaatcaaactaagaatatattcgttattccagaagtacaatgccctttctgcaac

SEQ ID NO: 25469 - DNA, 81 bp, Homo sapiens
  MAP TO AL158075.2; EXPRESSED IN PLACENTA, SIGNAL = 2.2; EXPRESSED IN BRAIN, SIGNAL = 1.5; EXPRESSED IN FETAL LIVER, SIGNAL = 2.4; EXPRESSED IN HELA, SIGNAL = 2.2; EXPRESSED IN BONE MARROW, SIGNAL = 1.7; EXPRESSED IN HEART, SIGNAL = 1.9; EXPRESSED IN LUNG, SIGNAL = 4.5; EXPRESSED IN ADULT LIVER, SIGNAL = 2.2; NT HIT: AF266285.1, EVALUE 6.50e-01; SWISSPROT HIT: Q66478, EVALUE 3.30e+00; EST_HUMAN HIT: AI373558.1, EVALUE 1.60e-02
gttccaggtaccaccaactctcatcccccaagccagagatccccaaagactcctcctgggctcccactttaccacccttcc

SEQ ID NO: 25470 - DNA, 149 bp, Homo sapiens
  MAP TO AC011489.3; EXPRESSED IN ADULT LIVER, SIGNAL = 3.3; EXPRESSED IN FETAL LIVER, SIGNAL = 3.3; EXPRESSED IN BRAIN, SIGNAL = 3.5; EXPRESSED IN PLACENTA, SIGNAL = 2.9; EXPRESSED IN HEART, SIGNAL = 2.8; EXPRESSED IN BONE MARROW, SIGNAL =   3; EXPRESSED IN HELA, SIGNAL = 3.3; EXPRESSED IN LUNG, SIGNAL = 5.2; NT HIT: gi11423827, EVALUE 9.00e-79; EST_HUMAN HIT: AW392016.1, EVALUE 3.00e-76
gctggcagagaagaaggcttccatcggttatacctacgaggacagcacggtggccaaggtagagaaggcggcagaaaagccagaggaggaggagtcagcggccgaggaggagagcaactcggacgaagatgaggtcatccccgacatcg

SEQ ID NO: 25471 - DNA, 134 bp, Homo sapiens
  MAP TO AC002041.1; EXPRESSED IN BRAIN, SIGNAL = 2.5; EXPRESSED IN FETAL LIVER, SIGNAL = 2.4; EXPRESSED IN ADULT LIVER, SIGNAL = 1.8; EXPRESSED IN HELA, SIGNAL = 2.2; EXPRESSED IN HEART, SIGNAL =   2; EXPRESSED IN BONE MARROW, SIGNAL = 1.9; EXPRESSED IN LUNG, SIGNAL = 2.7; EXPRESSED IN PLACENTA, SIGNAL =   2; EST_HUMAN HIT: BF346444.1, EVALUE 4.00e-29; NT HIT: AB040934.1, EVALUE 6.00e-55
ctgacgctccttctaagcgacactcaacctctgacctctcagatgcgaccttcagcaatatcaggagagaaggctggttgtattataagcagattctcaccaagaaggggaaggtaagatgggtggaggaatga

SEQ ID NO: 25472 - DNA, 288 bp, Homo sapiens
  MAP TO AC023553.2; EXPRESSED IN BRAIN, SIGNAL = 1.7; EXPRESSED IN BONE MARROW, SIGNAL =   2; EXPRESSED IN FETAL LIVER, SIGNAL = 2.5; EXPRESSED IN HELA, SIGNAL =   2; EXPRESSED IN HEART, SIGNAL =   2; EST_HUMAN HIT: AW880701.1, EVALUE 2.00e-29; NT HIT: AF202635.1, EVALUE 2.00e-04; SWISSPROT HIT: P35500, EVALUE 5.80e-01
atggtaaagattgtcaatgatatggaagagaacctccatagagagaacattataaaggtttggaagaattacaccattgaatatgccatcattgttatagaaaaaatcctgagagccatcaagcctcaaacagtaaattcctgctggagaaaactgtgcccagatgttgtacatgacttcacggaatttatgacagagctaatcaaggaaatgatgaaagatattatggatatagcaaaaaagatggagggtaaagcatttcaagatatagatcttggagaaattcaa

SEQ ID NO: 25473 - DNA, 405 bp, Homo sapiens
  MAP TO AC021876.2; EXPRESSED IN PLACENTA, SIGNAL = 5.7; EXPRESSED IN BRAIN, SIGNAL =   4; EXPRESSED IN ADULT LIVER, SIGNAL = 3.9; EXPRESSED IN FETAL LIVER, SIGNAL = 4.9; EXPRESSED IN HELA, SIGNAL = 4.8; EXPRESSED IN BONE MARROW, SIGNAL = 3.5; EXPRESSED IN LUNG, SIGNAL = 3.6; EXPRESSED IN HEART, SIGNAL = 4.3; EST_HUMAN HIT: BE513300.1, EVALUE 2.00e-06; SWISSPROT HIT: P11087, EVALUE 5.00e-07
ctagaggctgtaaccaactgctgattcagtgacgccggctgacagacagggacctgcggatgcggtgatgccgactgacggacgggacctgcggatgcagtgatgccgactgacggagggggacctgcggatgcggtgatgccgactgacggagggggacctgcggatgcggtgatgccggctgacggagggggacctgcggatgcggtgatgccgactgatggagggggactggcgatgcggtgatgccgactgatggacgggacctgcggatgcggtgaagccgatgaacggggacctgcggatgtggtgatgctgactgacgtacagggacttggtgatgcggtgatgccgactgatgggtagggacctggtgatgcgttgatgccgactgacggacgggac

SEQ ID NO: 25474 - DNA, 254 bp, Homo sapiens
  MAP TO AC002039.1; EXPRESSED IN ADULT LIVER, SIGNAL =   2; EXPRESSED IN LUNG, SIGNAL = 6.5; EXPRESSED IN BRAIN, SIGNAL = 5.5; EXPRESSED IN BONE MARROW, SIGNAL =   3; EXPRESSED IN FETAL LIVER, SIGNAL = 2.3; EXPRESSED IN HELA, SIGNAL = 2.2; EXPRESSED IN HEART, SIGNAL = 2.4; EXPRESSED IN PLACENTA, SIGNAL = 2.2; EST_HUMAN HIT: BE261660.1, EVALUE 1.00e-126; SWISSPROT HIT: P98161, EVALUE 2.00e-42; NT HIT: gi4505832, EVALUE 1.00e-122
gaccagagacccagtggggagttaccgtctgaacctctccagccacttccgctggtcggcgctggaggtgtccgtgggcttgtacacgtccctgtgccagtacttcagcgaggaggacgtggtgtggcggacagaggggctgctgcccctggaggagacctcgccccgccaggccgtctgcctcacccgccacctcaccgccttcggcaccagcctcttcgtgcccccaagccatatccgctttgtgtttcctg

SEQ ID NO: 25475 - DNA, 257 bp, Homo sapiens
  MAP TO AC008381.5; EXPRESSED IN BRAIN, SIGNAL = 3.4; EXPRESSED IN PLACENTA, SIGNAL = 2.7; EXPRESSED IN HEART, SIGNAL = 3.6; EXPRESSED IN ADULT LIVER, SIGNAL = 3.3; EXPRESSED IN BONE MARROW, SIGNAL = 2.7; EXPRESSED IN FETAL LIVER, SIGNAL = 4.2; EXPRESSED IN HELA, SIGNAL = 4.2; EXPRESSED IN LUNG, SIGNAL = 1.7; NT HIT: AB031007.1, EVALUE 2.40e+00; SWISSPROT HIT: P49220, EVALUE 4.10e+00; EST_HUMAN HIT: AA044015.1, EVALUE 6.00e-05
ctattctctgctgtgggttagcaaccaagtgaaagcccacgttttgagactcactctgtggcaggcatcctcccacacagcccccaatgatctctttctcctggtattcccacccttgaatgccccatagtgctatggttagtctgtgtgaccactgcaagtggcaaaggtgatggcatgtcacttcagagactaggtcataaaagactgtggcttccgtcttggggactggctttctgtctctgagactgcttact

SEQ ID NO: 25476 - DNA, 267 bp, Homo sapiens
  MAP TO AC016993.2; EXPRESSED IN BONE MARROW, SIGNAL =   3; EXPRESSED IN FETAL LIVER, SIGNAL = 5.2; EXPRESSED IN HEART, SIGNAL = 4.1; EXPRESSED IN LUNG, SIGNAL =   3; EXPRESSED IN PLACENTA, SIGNAL = 3.9; EXPRESSED IN BRAIN, SIGNAL = 3.5; EXPRESSED IN HELA, SIGNAL =   5; EXPRESSED IN ADULT LIVER, SIGNAL = 4.1; SWISSPROT HIT: P40912, EVALUE 1.50e+00; EST_HUMAN HIT: AV752605.1, EVALUE 9.60e-01
gcccctgctccacactctcaagttcatcttgcaaaagtcgaaggacctgaaggaccacagggctccagggctgatgcatcacagtttggtctaggaaccagctggagtttagtgtttgactcccaaggcgtttatgttgacccctaccccatctttgacattcactgggcctttagagccctgggaatttcagaggaaaagcaaactgctcctgcccctcaaggagtaaagaagacacaccgaggggatctgctggagctcgaaatg

SEQ ID NO: 25477 - DNA, 479 bp, Homo sapiens
  MAP TO AC022845.2; EXPRESSED IN ADULT LIVER, SIGNAL = 3.6; EXPRESSED IN LUNG, SIGNAL = 1.9; EXPRESSED IN BRAIN, SIGNAL = 3.6; EXPRESSED IN BONE MARROW, SIGNAL = 2.5; EXPRESSED IN FETAL LIVER, SIGNAL = 3.8; EXPRESSED IN HELA, SIGNAL = 3.6; EXPRESSED IN HEART, SIGNAL = 3.3; EXPRESSED IN PLACENTA, SIGNAL = 2.7; SWISSPROT HIT: P30141, EVALUE 7.00e-04; NT HIT: AJ005575.1, EVALUE 4.70e+00; EST_HUMAN HIT: BF217368.1, EVALUE 5.00e-16
aaagatccaagctgtgctttttgaaggcttcagactgcagcctgagttcatcgtaggccttctggatcccatctactttgcgctgaagctccctgactctcaagttgctgtccacagccactgcctcttgctcaaaccgctccagcgcatgcttcctgtcttcatttgctatctccaacttttcctcaagctggcagatctctgcctgtttgttctgaagcactttgcccctttcaatggacagctgcagcaactcctctttctctctagtgacggtctgcagcctggcctgcagctcctggctcaggctgctgtgtgtctcctctgccttagctatctgctccacagcctgctggtgctgctgcttgagggtctgcagctggctgcgcagctgttctgtctccttggtgtgggtgcaggcctgctggctctgtagctccagcagctccttctcgcgcgcctgtgcctggcaggcatcc

SEQ ID NO: 25478 - DNA, 154 bp, Homo sapiens
  MAP TO AC011510.3; EXPRESSED IN BONE MARROW, SIGNAL = 2.1; EXPRESSED IN LUNG, SIGNAL = 5.1; EXPRESSED IN HEART, SIGNAL =   2; EXPRESSED IN BRAIN, SIGNAL =   2; EXPRESSED IN PLACENTA, SIGNAL = 1.9; EXPRESSED IN HELA, SIGNAL = 2.2; EXPRESSED IN ADULT LIVER, SIGNAL = 1.5; EXPRESSED IN FETAL LIVER, SIGNAL = 2.3; EST_HUMAN HIT: BF204253.1, EVALUE 1.00e-81; NT HIT: gi11424059, EVALUE 1.00e-81
ctcctatcctctcggtgctcaaagtacccccgtccccggttttcttcataaggcctctttcgactctggaattgctgcctgtctggcttgagttgagaagcttcaggcgggaggaagctggtgggtgctccttgcttcatctctgtcttcattt

SEQ ID NO: 25479 - DNA, 118 bp, Homo sapiens
  MAP TO AC019224.2; EXPRESSED IN BRAIN, SIGNAL =  66; EXPRESSED IN BONE MARROW, SIGNAL =  32; EXPRESSED IN HELA, SIGNAL =  26; EXPRESSED IN ADULT LIVER, SIGNAL =  53; EXPRESSED IN FETAL LIVER, SIGNAL =  31; EXPRESSED IN HEART, SIGNAL =  94; EXPRESSED IN LUNG, SIGNAL =  52; EXPRESSED IN PLACENTA, SIGNAL =  31; SWISSPROT HIT: P08125, EVALUE 1.40e+00; NT HIT: X51755.1, EVALUE 2.60e-01; EST_HUMAN HIT: R49836.1, EVALUE 1.50e+00
gacaaggccacatagcaccaggcagcgaccctcaatcagaaacctggggatgaccagcttgagaagtaaaaccacagagtccagggtcaccagggtggaaagaaagggaagaagatac

SEQ ID NO: 25480 - DNA, 239 bp, Homo sapiens
  MAP TO AC018507.2; EXPRESSED IN PLACENTA, SIGNAL = 1.5; EXPRESSED IN BONE MARROW, SIGNAL = 1.6; EXPRESSED IN HELA, SIGNAL = 1.6; EXPRESSED IN LUNG, SIGNAL = 2.2; EXPRESSED IN ADULT LIVER, SIGNAL = 1.4; EXPRESSED IN HEART, SIGNAL =   3; EXPRESSED IN BRAIN, SIGNAL = 1.8; NT HIT: X52102.1, EVALUE 1.40e-01; SWISSPROT HIT: O77638, EVALUE 3.50e+00
atgaactggatcatcctgtcttccagtaccacctctttctgggacttcatacagagggaggacaaaacacgcatgaagccaggagtggggtcattatccctggaagacgtgggagccccctccccctccaatgggtcatgcaggtcacagatgtgcaatggccagaggatgtacccattcagcccagccatgactattacagggaaactcaatggcacgtgccctgctgcctgcctgag

SEQ ID NO: 25481 - DNA, 148 bp, Homo sapiens
  MAP TO AC022047.4; EXPRESSED IN BRAIN, SIGNAL = 3.6; EXPRESSED IN PLACENTA, SIGNAL = 3.2; EXPRESSED IN HELA, SIGNAL = 4.7; EXPRESSED IN LUNG, SIGNAL =   3; EXPRESSED IN ADULT LIVER, SIGNAL = 3.9; EXPRESSED IN BONE MARROW, SIGNAL = 3.3; EXPRESSED IN FETAL LIVER, SIGNAL = 4.4; EXPRESSED IN HEART, SIGNAL =   4; SWISSPROT HIT: P37989, EVALUE 9.00e+00; NT HIT: AL161515.2, EVALUE 3.40e-01; EST_HUMAN HIT: AA837027.1, EVALUE 5.00e-01
agctcatcacaaccatccttaaccactgggccactctgggcaagtgacttcctccctccagtgcctctagttttctcatgatgaaagatgtgggtaaacgacatcacgacggtcactttctgaattctgatttcaattacacagctcc

SEQ ID NO: 25482 - DNA, 138 bp, Homo sapiens
  MAP TO AC009144.4; EXPRESSED IN BRAIN, SIGNAL = 7.8; EXPRESSED IN PLACENTA, SIGNAL = 6.3; EXPRESSED IN BONE MARROW, SIGNAL = 5.1; EXPRESSED IN FETAL LIVER, SIGNAL = 7.8; EXPRESSED IN HELA, SIGNAL = 6.7; EXPRESSED IN LUNG, SIGNAL = 7.9; EXPRESSED IN ADULT LIVER, SIGNAL = 7.7; EXPRESSED IN HEART, SIGNAL = 7.3; SWISSPROT HIT: P49256, EVALUE 4.00e+00; EST_HUMAN HIT: H79421.1, EVALUE 4.00e-72; NT HIT: K03196.1, EVALUE 1.20e+00
ctcggagctccgggagcctttcagcacctgcttggtgagcgcgattacgtcagtaccacaggtggtcaccttctccgtgagaagccccttcacggactgaccgaaccgcgcttgagactctggcgttccagtcgccat

SEQ ID NO: 25483 - DNA, 180 bp, Homo sapiens
  MAP TO AC023490.4; EXPRESSED IN HEART, SIGNAL = 4.2; EXPRESSED IN PLACENTA, SIGNAL = 3.5; EXPRESSED IN BRAIN, SIGNAL = 3.9; EXPRESSED IN ADULT LIVER, SIGNAL = 4.3; EXPRESSED IN BONE MARROW, SIGNAL = 3.2; EXPRESSED IN FETAL LIVER, SIGNAL = 5.1; EXPRESSED IN HELA, SIGNAL = 4.6; EXPRESSED IN LUNG, SIGNAL = 3.7; EST_HUMAN HIT: AI867336.1, EVALUE 2.00e-44; NT HIT: gi10092664, EVALUE 1.00e-44; SWISSPROT HIT: Q29010, EVALUE 5.10e+00
ctgtctcctcatagccccacagcttgatggtgtctgtgtgggcagcgcctcaacgtgccaggtcaggctgaggttgcctgaggtgttggcggtgccgtagtattgccaatgcatctcgttcatcaactcactcttctccttcatcaacactttgttggggtgcactgggcaggggaggtg

SEQ ID NO: 25484 - DNA, 343 bp, Homo sapiens
  MAP TO AC023109.2; EXPRESSED IN FETAL LIVER, SIGNAL = 6.6; EXPRESSED IN PLACENTA, SIGNAL = 2.3; EXPRESSED IN BRAIN, SIGNAL = 2.5; EXPRESSED IN ADULT LIVER, SIGNAL = 2.7; EXPRESSED IN BONE MARROW, SIGNAL =   2; EXPRESSED IN HELA, SIGNAL = 6.3; EXPRESSED IN HEART, SIGNAL = 6.3; SWISSPROT HIT: Q10175, EVALUE 6.80e+00; NT HIT: AL163227.2, EVALUE 2.00e-50; EST_HUMAN HIT: AA486105.1, EVALUE 6.00e-83
taatatggacaatgaagtcctggctgaggtgaattcagatggagatgggaaatttgttgggaactggagtaaaggtgactcttgctatgctttagcaaagagactggcagctttttgcccctaccctagagatctgtggaactttgaacttgagagagatgatttaggatatctggtggaagaaatttctaagcagcaaagcattcaagatatgacagagcataaaagtttggaaaatttgcagcctgatgatgaagtagaaaataaaaacccattttctgtagagaaattcaagcctgctgcagcaatttgcagaaataataaggaactgaatggtaatcac

SEQ ID NO: 25485 - DNA, 102 bp, Homo sapiens
  MAP TO AC009044.3; EXPRESSED IN HEART, SIGNAL = 1.9; EXPRESSED IN BRAIN, SIGNAL = 1.9; EXPRESSED IN PLACENTA, SIGNAL = 2.1; EXPRESSED IN HELA, SIGNAL = 2.1; EXPRESSED IN ADULT LIVER, SIGNAL =   2; EXPRESSED IN BONE MARROW, SIGNAL = 2.9; EXPRESSED IN FETAL LIVER, SIGNAL =   2; EXPRESSED IN LUNG, SIGNAL = 2.1; NT HIT: L77570.1, EVALUE 3.40e+00; EST_HUMAN HIT: BE896145.1, EVALUE 5.00e+00
caaaccgtcaccacagtcgagagaagtcaagataaaacaagagaacaggaagagaaagaaaaacaaagagaaggagagaaggaaaagagaagagatttggag

SEQ ID NO: 25486 - DNA, 96 bp, Homo sapiens
  MAP TO AC016910.2; EXPRESSED IN BRAIN, SIGNAL = 1.3; EXPRESSED IN HELA, SIGNAL = 1.8; EXPRESSED IN ADULT LIVER, SIGNAL = 1.6; EXPRESSED IN FETAL LIVER, SIGNAL = 1.8; EXPRESSED IN HEART, SIGNAL = 1.7; EXPRESSED IN PLACENTA, SIGNAL = 1.4; EST_HUMAN HIT: AI347424.1, EVALUE 1.90e-02; NT HIT: AL163209.2, EVALUE 6.00e-08
aaccccagaccctaaactcagtggacacacacacacagaagggagaagtgtctgaacatcgagaggagaagcagcagctggacgttggagactatg

SEQ ID NO: 25487 - DNA, 117 bp, Homo sapiens
  MAP TO AC025251.1; EXPRESSED IN BRAIN, SIGNAL = 3.2; EXPRESSED IN BONE MARROW, SIGNAL = 3.4; EXPRESSED IN HELA, SIGNAL = 3.4; EXPRESSED IN LUNG, SIGNAL = 3.8; EXPRESSED IN PLACENTA, SIGNAL = 2.9; EXPRESSED IN HEART, SIGNAL = 2.8; EXPRESSED IN FETAL LIVER, SIGNAL = 3.5; EXPRESSED IN ADULT LIVER, SIGNAL = 3.6; NT HIT: gi9506510, EVALUE 1.00e+00; EST_HUMAN HIT: BE719219.1, EVALUE 3.80e-01
cttggagtatgttcattgtcctccatggccacatctgagataggcatttggattatcttaataaagctgctctcattagcagcctgctttctctcggtgcctctaggaactagagat

SEQ ID NO: 25488 - DNA, 158 bp, Homo sapiens
  MAP TO AL158137.1; EXPRESSED IN HEART, SIGNAL = 1.9; EXPRESSED IN FETAL LIVER, SIGNAL =   2; EXPRESSED IN HELA, SIGNAL = 2.2; EST_HUMAN HIT: AW369812.1, EVALUE 6.00e-84; SWISSPROT HIT: P56456, EVALUE 4.00e+00
atgaagaactagcactggatggcagttttgatccagacctaaaaaactatcacaaactccattgggaaacagaattcaaacctgtggcacagcagcttctaaaccgaattcagagacatcacaccttcctggaacccctgcccattccctctttctaa

SEQ ID NO: 25489 - DNA, 177 bp, Homo sapiens
  MAP TO AL157912.1; EXPRESSED IN ADULT LIVER, SIGNAL =  16; EXPRESSED IN BRAIN, SIGNAL =  10; EXPRESSED IN BONE MARROW, SIGNAL =  35; EXPRESSED IN FETAL LIVER, SIGNAL =  36; EXPRESSED IN HELA, SIGNAL =  35; EXPRESSED IN HEART, SIGNAL =  15; EXPRESSED IN LUNG, SIGNAL =  70; EXPRESSED IN PLACENTA, SIGNAL =  19; SWISSPROT HIT: O18789, EVALUE 3.00e-09; EST_HUMAN HIT: BF330676.1, EVALUE 9.00e-65; NT HIT: U92700.1, EVALUE 1.00e-07
ttagtccccaatggcaacaagtgccttgaatctggaccactggccagtgcaagtctccatttttactggcataatcttaaactcattcttgagggttgcccccaggaaaaagtcgatgatctcagcctccttgatgggcagggagaggagatagagcttcagggacttaatcttcat

SEQ ID NO: 25490 - DNA, 140 bp, Homo sapiens
  MAP TO AC012576.3; EXPRESSED IN BRAIN, SIGNAL = 2.6; EXPRESSED IN BONE MARROW, SIGNAL = 2.3; EXPRESSED IN FETAL LIVER, SIGNAL =   2; EXPRESSED IN LUNG, SIGNAL = 3.4; EXPRESSED IN HEART, SIGNAL =   2; EXPRESSED IN PLACENTA, SIGNAL = 2.1; EXPRESSED IN HELA, SIGNAL = 2.4; EXPRESSED IN ADULT LIVER, SIGNAL = 2.2; NT HIT: gi7662291, EVALUE 3.10e-01; EST_HUMAN HIT: Z40414.1, EVALUE 4.70e-01
ccttatagtcactattacctgaaggagggtgatgttctcaggaataaaaagaacaggaacaaggtatttttcaggtttctgcagaacatccatcagactatctgtgttagaacccttgaggacataagattaaaagacat

SEQ ID NO: 25491 - DNA, 122 bp, Homo sapiens
  MAP TO AC018573.2; EXPRESSED IN FETAL LIVER, SIGNAL = 7.6; EXPRESSED IN HEART, SIGNAL = 7.2; EXPRESSED IN BRAIN, SIGNAL = 7.5; EXPRESSED IN PLACENTA, SIGNAL = 8.1; EXPRESSED IN BONE MARROW, SIGNAL = 4.8; EXPRESSED IN ADULT LIVER, SIGNAL = 2.4; EXPRESSED IN HELA, SIGNAL = 7.8; EXPRESSED IN LUNG, SIGNAL =   7; EST_HUMAN HIT: AW183725.1, EVALUE 5.00e-19; NT HIT: D67031.1, EVALUE 3.00e-10
tcagcattgagagaagctgctgctgctaatgctgctgctgctgctgccgccgccgccgctgctgctgctgctgttggtctgaggctgcagtaggtttctgtgcagcattgcagaatccacac

SEQ ID NO: 25492 - DNA, 126 bp, Homo sapiens
  MAP TO AL138849.5; EXPRESSED IN BRAIN, SIGNAL = 3.5; EXPRESSED IN HELA, SIGNAL = 4.5; EXPRESSED IN ADULT LIVER, SIGNAL = 5.1; EXPRESSED IN BONE MARROW, SIGNAL = 4.4; EXPRESSED IN FETAL LIVER, SIGNAL = 4.8; EXPRESSED IN HEART, SIGNAL = 3.4; EXPRESSED IN LUNG, SIGNAL = 7.9; EXPRESSED IN PLACENTA, SIGNAL = 3.9; NT HIT: AB024519.1, EVALUE 1.80e-02; EST_HUMAN HIT: AA809411.1, EVALUE 8.00e-21
cctaagtttccaggaaaaaaagtataaagcataagacatgtaaactgaagttatataattaagttttctaaaaacctgccatttatttgatgctttcaatagtgcatgtgccttaaatactgcaac

SEQ ID NO: 25493 - DNA, 141 bp, Homo sapiens
  MAP TO AC011463.3; EXPRESSED IN BRAIN, SIGNAL = 3.2; EXPRESSED IN PLACENTA, SIGNAL = 2.7; EXPRESSED IN BONE MARROW, SIGNAL = 2.6; EXPRESSED IN HELA, SIGNAL = 3.1; EXPRESSED IN LUNG, SIGNAL = 3.9; EXPRESSED IN ADULT LIVER, SIGNAL = 3.5; EXPRESSED IN FETAL LIVER, SIGNAL = 3.1; EXPRESSED IN HEART, SIGNAL = 2.8; NT HIT: D42042.1, EVALUE 1.30e+00; EST_HUMAN HIT: BF001471.1, EVALUE 1.90e+00
catactgcagaggattagcgagagctggcacagctcgcgcccggcttcgcacacctccctgtcgccgtcgtcagcgtcaccgtcggggcctgagccagcctcgcctctctgtgagcaggaagctggagaggagaccaggag

SEQ ID NO: 25494 - DNA, 397 bp, Homo sapiens
  MAP TO AL138829.2; EXPRESSED IN ADULT LIVER, SIGNAL = 7.6; EXPRESSED IN HEART, SIGNAL =  10; EXPRESSED IN LUNG, SIGNAL = 1.3e+02; EXPRESSED IN PLACENTA, SIGNAL =  18; EXPRESSED IN BRAIN, SIGNAL =  14; EXPRESSED IN FETAL LIVER, SIGNAL =  37; EXPRESSED IN BONE MARROW, SIGNAL =  14; EXPRESSED IN HELA, SIGNAL =  26; NT HIT: M90054.1, EVALUE 0.00e+00; SWISSPROT HIT: P39023, EVALUE 8.00e-60; EST_HUMAN HIT: BE748899.1, EVALUE 0.00e+00
tccttgataaggtagccctggccaatcttatagatcttcttgttgatctcagtgcggtgacggtagcctttctccccagcacgtgccacagagaaggccacacgagcaggatgccatgccccaatacaggccaccttgcacaggcctcggtgggtcttgcagggcagcttcttggtgtgccaacgactggtgacccctttgtagcctttgcccttggtcaccccaatgacgtcgatcatctcatcctgcccaaacacttggttcacatttacctgctgctcgagcctctcgcagacccagtccagcttctcagccacggtgcctccgttcacctggatctccatcaggtgggccttcttctggcgcagaggaagcaggcgcatctgggtgtgggcaa

SEQ ID NO: 25495 - DNA, 165 bp, Homo sapiens
  MAP TO AL138741.2; EXPRESSED IN ADULT LIVER, SIGNAL = 4.7; EXPRESSED IN BRAIN, SIGNAL = 6.5; EXPRESSED IN PLACENTA, SIGNAL = 7.7; EXPRESSED IN BONE MARROW, SIGNAL = 6.4; EXPRESSED IN FETAL LIVER, SIGNAL = 9.6; EXPRESSED IN HELA, SIGNAL = 8.7; EXPRESSED IN HEART, SIGNAL =  11; EXPRESSED IN LUNG, SIGNAL = 9.1; SWISSPROT HIT: P32833, EVALUE 3.90e+00; NT HIT: X07380.1, EVALUE 1.50e+00; EST_HUMAN HIT: BF317366.1, EVALUE 2.20e+00
atgtggaaaacctggccaaaccagctgagctaccagccacagacctgggtccacaaacccataaatagcctcatgtgcaatctgctgatcagccacaccagctctaagtcccacaagtaccgagactatgacccttgtaccctgtggttcagtgttctccaaagt

SEQ ID NO: 25496 - DNA, 174 bp, Homo sapiens
  MAP TO AL138761.3; EXPRESSED IN PLACENTA, SIGNAL = 2.4; EXPRESSED IN BRAIN, SIGNAL = 2.1; EXPRESSED IN BONE MARROW, SIGNAL = 1.9; EXPRESSED IN FETAL LIVER, SIGNAL = 2.2; EXPRESSED IN HELA, SIGNAL = 2.3; EXPRESSED IN ADULT LIVER, SIGNAL = 2.4; EXPRESSED IN LUNG, SIGNAL = 2.8; EXPRESSED IN HEART, SIGNAL = 1.8; SWISSPROT HIT: P20268, EVALUE 3.90e+00; NT HIT: AB015212.1, EVALUE 1.60e+00; EST_HUMAN HIT: BF330909.1, EVALUE 2.00e-03
atgaagggttatgatgaggttagttctgtgagtgttggaaaaactacaaactgtattcaacagctgctacagaaagaaactgctgatgctggagcaaaaaaaaaaaaaacctctacaagggtgatggtcaaagtaacaagcagacaggaagttcacaggaaacaagacaaaggt

SEQ ID NO: 25497 - DNA, 183 bp, Homo sapiens
  MAP TO AL133549.2; EXPRESSED IN ADULT LIVER, SIGNAL = 2.8; EXPRESSED IN FETAL LIVER, SIGNAL = 2.7; EXPRESSED IN PLACENTA, SIGNAL = 2.9; EXPRESSED IN BONE MARROW, SIGNAL = 2.1; EXPRESSED IN HELA, SIGNAL = 2.3; EXPRESSED IN HEART, SIGNAL = 2.8; EXPRESSED IN LUNG, SIGNAL = 2.6; EXPRESSED IN BRAIN, SIGNAL = 3.2; EST_HUMAN HIT: AW082678.1, EVALUE 2.00e-81; SWISSPROT HIT: P48379, EVALUE 5.00e-24; NT HIT: gi11428740, EVALUE 5.00e-84
ctgcatatttgtcttttctcttggaacagctcaatggttattcgggacttaaccttacgcagtgctgctagctttggctccttccacctgatccgtctactctacgacgaatatatgttttacttagtagaacatcgtgttgctcaggcaacaggagagactcctatagcagtcatgggcgag

SEQ ID NO: 25498 - DNA, 194 bp, Homo sapiens
  MAP TO AC018843.2; EXPRESSED IN HEART, SIGNAL =   2; EXPRESSED IN PLACENTA, SIGNAL = 2.4; EXPRESSED IN ADULT LIVER, SIGNAL = 2.6; EXPRESSED IN BONE MARROW, SIGNAL = 2.6; EXPRESSED IN FETAL LIVER, SIGNAL = 2.5; EXPRESSED IN HELA, SIGNAL = 1.9; EXPRESSED IN LUNG, SIGNAL = 5.6; EXPRESSED IN BRAIN, SIGNAL = 3.4; EST_HUMAN HIT: AW206990.1, EVALUE 2.00e-93; SWISSPROT HIT: P12752, EVALUE 2.20e+00; NT HIT: gi7662289, EVALUE 6.00e-96
ctaggccaagctcttaccggcttccgagaggtcccgcagggagctgctgagggcgctgcgcttgaggccctcaccgctggcatagctgtcgtccaggcaggcccggctcagtgttccgttgcccgactcctttttgaggctagagcactgggacatgctgggccgcacgacgcctttctgcttctcgagctccg

SEQ ID NO: 25499 - DNA, 180 bp, Homo sapiens
  MAP TO AC011510.3; EXPRESSED IN BRAIN, SIGNAL =   2; EXPRESSED IN ADULT LIVER, SIGNAL = 1.9; EXPRESSED IN HEART, SIGNAL = 1.9; EXPRESSED IN LUNG, SIGNAL = 2.4; EXPRESSED IN PLACENTA, SIGNAL = 1.7; EXPRESSED IN HELA, SIGNAL = 2.4; EXPRESSED IN FETAL LIVER, SIGNAL =   2; EXPRESSED IN BONE MARROW, SIGNAL = 1.7; SWISSPROT HIT: P24460, EVALUE 4.00e-08; EST_HUMAN HIT: BE148597.1, EVALUE 5.00e-97; NT HIT: M63596.1, EVALUE 2.70e-02
ctgtgccatcttcagcaggaaggcatcgacaaggtcacgtgcggggcccgaagcatccaggttcccctggtgctgctgcacctgccggactgtgaaggcagccaaggtgctgacgtggtggaggagctgcttgtgggggcctggcaggggccgcaggaaccaggagaacatctcgtaggt

SEQ ID NO: 25500 - DNA, 77 bp, Homo sapiens
  MAP TO AC019246.4; EXPRESSED IN FETAL LIVER, SIGNAL = 2.6; EXPRESSED IN LUNG, SIGNAL = 2.2; EXPRESSED IN BRAIN, SIGNAL = 3.1; EXPRESSED IN ADULT LIVER, SIGNAL = 2.8; EXPRESSED IN BONE MARROW, SIGNAL = 3.5; EXPRESSED IN HELA, SIGNAL = 2.3; EXPRESSED IN HEART, SIGNAL = 2.7; EXPRESSED IN PLACENTA, SIGNAL = 3.5; NT HIT: AB014607.1, EVALUE 8.00e-19; EST_HUMAN HIT: AI380499.1, EVALUE 6.00e-36
aaacaatgctaatgactggtttgctgttaataaatatgtgggtaaatctctgttcggggctctcagctctgaaggct

SEQ ID NO: 25501 - DNA, 209 bp, Homo sapiens
  MAP TO AC021876.2; EXPRESSED IN HEART, SIGNAL = 2.9; EXPRESSED IN LUNG, SIGNAL =  11; EXPRESSED IN PLACENTA, SIGNAL = 6.3; SWISSPROT HIT: Q14956, EVALUE 1.00e-35; NT HIT: AF322909.1, EVALUE 1.00e-114; EST_HUMAN HIT: AV733454.1, EVALUE 1.00e-114
cattcccacggaggtctgtaccatcatttctgaccccacctgcgagatcacccagaacacagtctgcagccctgtggatgtggatgagatgtgtctgctgactgtgagacgaaccttcaatgggtctgggacgtactgtgtgaacctcaccctgggggatgacacaagcctggctctcacgagcaccctgatttctgttcctgacagag

SEQ ID NO: 25502 - DNA, 158 bp, Homo sapiens
  MAP TO AC020912.3; EXPRESSED IN BRAIN, SIGNAL = 2.3; EXPRESSED IN PLACENTA, SIGNAL =   3; EXPRESSED IN BONE MARROW, SIGNAL = 2.7; EXPRESSED IN ADULT LIVER, SIGNAL = 2.6; EXPRESSED IN HELA, SIGNAL =   4; EXPRESSED IN FETAL LIVER, SIGNAL =   4; EXPRESSED IN HEART, SIGNAL = 3.3; SWISSPROT HIT: P07564, EVALUE 4.00e+00; NT HIT: D87682.1, EVALUE 5.60e+00
ttctgctgcttctgtgctggtttcactctcaggcaggttttcctctgatgtgttggtggtcagatcgcagaggccaaggttctgcatccactgctggaggaaagagatgcggtcagcctcacccaacccacgtggagtgaagatagacaaagagccct

SEQ ID NO: 25503 - DNA, 175 bp, Homo sapiens
  MAP TO AL159191.1; EXPRESSED IN PLACENTA, SIGNAL = 9.6; EXPRESSED IN BONE MARROW, SIGNAL =  10; EXPRESSED IN FETAL LIVER, SIGNAL =  14; EXPRESSED IN HELA, SIGNAL =  16; EXPRESSED IN LUNG, SIGNAL = 6.7; EXPRESSED IN ADULT LIVER, SIGNAL =  11; EXPRESSED IN HEART, SIGNAL =  12; EXPRESSED IN BRAIN, SIGNAL = 9.1; EST_HUMAN HIT: AI825039.1, EVALUE 1.50e-01; SWISSPROT HIT: P09569, EVALUE 3.90e+00; NT HIT: Z11740.1, EVALUE 2.00e-03
atgtatttatctgatggaatactacagagcaacgaaaaagaacaaactactgttattgctacatgcaacaacatagatgcatttcacagacataatgctgatcaaattaaaccagacacaaaaacctatagactggataattccatgtataggaatgtcaacaacagtgacagag

SEQ ID NO: 25504 - DNA, 238 bp, Homo sapiens
  MAP TO AC007227.3; EXPRESSED IN BRAIN, SIGNAL = 1.8; EXPRESSED IN ADULT LIVER, SIGNAL =   2; EXPRESSED IN HELA, SIGNAL = 3.9; EXPRESSED IN HEART, SIGNAL =   3; EXPRESSED IN PLACENTA, SIGNAL = 4.6; EXPRESSED IN LUNG, SIGNAL =  11; EXPRESSED IN FETAL LIVER, SIGNAL = 2.2; EXPRESSED IN BONE MARROW, SIGNAL = 2.5; EST_HUMAN HIT: AU141882.1, EVALUE 0.00e+00; SWISSPROT HIT: P02545, EVALUE 1.00e-14; NT HIT: L12401.1, EVALUE 0.00e+00
ctctcctcctcgccctccaagagcttgcggtaggcgtggatctccatgtccagggccagcttgatgtccagaagctcctggtactcgtccagctgctgctgcatccttgcccgcatctcggccatctcccgctccttttccgccagcagccgccggctggtgtcccgctcacgggccagtgagtcctccaggtctcgaagcttcgcctccttggctgccagctgaaggggggtgggag

SEQ ID NO: 25505 - DNA, 175 bp, Homo sapiens; identical to SEQ ID NO: 21351
  MAP TO AC007341.3; EXPRESSED IN BRAIN, SIGNAL = 3.8; EXPRESSED IN PLACENTA, SIGNAL = 2.7; EXPRESSED IN ADULT LIVER, SIGNAL = 3.2; EXPRESSED IN BONE MARROW, SIGNAL = 2.8; EXPRESSED IN HELA, SIGNAL = 2.7; EXPRESSED IN LUNG, SIGNAL = 5.3; EXPRESSED IN FETAL LIVER, SIGNAL = 2.8; EXPRESSED IN HEART, SIGNAL = 2.7; SWISSPROT HIT: P29919, EVALUE 1.70e+00; EST_HUMAN HIT: AI420623.1, EVALUE 6.00e-01; NT HIT: X85808.1, EVALUE 1.60e+00

SEQ ID NO: 25506 - DNA, 78 bp, Homo sapiens
  MAP TO AC011912.3; EXPRESSED IN HEART, SIGNAL = 2.8; EXPRESSED IN BRAIN, SIGNAL = 2.6; EXPRESSED IN PLACENTA, SIGNAL =   2; EXPRESSED IN ADULT LIVER, SIGNAL = 2.7; EXPRESSED IN BONE MARROW, SIGNAL = 2.1; EXPRESSED IN FETAL LIVER, SIGNAL =   3; EXPRESSED IN HELA, SIGNAL = 3.1; EXPRESSED IN LUNG, SIGNAL = 1.7; SWISSPROT HIT: Q08050, EVALUE 8.50e-01; NT HIT: AF223391.1, EVALUE 1.00e-20; EST_HUMAN HIT: AI961788.1, EVALUE 2.00e-20
tgtatactgctcaggtgatggctgcaccaaaatctcacaatcaccactaaagaacttacccatgtaaccgaataccac

SEQ ID NO: 25507 - DNA, 295 bp, Homo sapiens
  MAP TO AL096814.26; EXPRESSED IN FETAL LIVER, SIGNAL = 2.5; EXPRESSED IN BONE MARROW, SIGNAL =   2; EXPRESSED IN HELA, SIGNAL = 2.5; EXPRESSED IN ADULT LIVER, SIGNAL =   9; EXPRESSED IN HEART, SIGNAL = 2.3; EXPRESSED IN LUNG, SIGNAL = 2.9; EXPRESSED IN BRAIN, SIGNAL = 2.1; EXPRESSED IN PLACENTA, SIGNAL = 2.7; EST_HUMAN HIT: AW006022.1, EVALUE 0.00e+00; NT HIT: AJ277276.1, EVALUE 0.00e+00
caggcagcaggaggaacaacagaggcaaaaggctcagaaggcggcttttgcagctgagatggcagccacgattgagaggactacggggcccgtgggggcgccggggctgctgcccctggaccagctgagtctgatcaaacccatcaaggatgtggacatcctcgacgacgacgtcgtccagcagttgggaggtgtcatggaagaggctgaagttgtggacaccgatcttctcttggatgatcaagattcagtcttgcttcagggtgacgcagaactataaagccctgtgtgtcac

SEQ ID NO: 25508 - DNA, 199 bp, Homo sapiens
  MAP TO AL138970.2; EXPRESSED IN ADULT LIVER, SIGNAL = 1.8; EXPRESSED IN HEART, SIGNAL = 1.9; EXPRESSED IN BRAIN, SIGNAL = 1.6; EXPRESSED IN PLACENTA, SIGNAL = 1.4; EXPRESSED IN BONE MARROW, SIGNAL = 1.5; EXPRESSED IN HELA, SIGNAL = 1.7; NT HIT: gi7525012, EVALUE 7.30e+00; EST_HUMAN HIT: AI565424.1, EVALUE 7.00e-01; SWISSPROT HIT: P11369, EVALUE 3.00e-03
gaatgagagggaacttccacacccaatcatgggcaacctcaaaaatgaaagaaaggaaaaacaaaaaactaccacaaacatcattctttatggtgaaatgttgaaaatgttgccttcaagacaaggaaggggacaagaatgctcactattaacgtacctattcaacttggtactgaaggcatcaatcagagaagtataa

SEQ ID NO: 25509 - DNA, 108 bp, Homo sapiens
  MAP TO AL133474.7; EXPRESSED IN BRAIN, SIGNAL = 1.6; EXPRESSED IN PLACENTA, SIGNAL = 1.4; EXPRESSED IN HELA, SIGNAL =   2; EXPRESSED IN FETAL LIVER, SIGNAL = 1.8; EXPRESSED IN ADULT LIVER, SIGNAL = 1.7; EXPRESSED IN HEART, SIGNAL =   2; NT HIT: AJ240733.1, EVALUE 5.90e-02; SWISSPROT HIT: Q9QWJ9, EVALUE 7.20e+00; EST_HUMAN HIT: AW504144.1, EVALUE 1.40e+00
atgaactcaaaggaaataattaagaatgatcactttgcaacccctaacccgaaccctaacactaatcccaacttcagtggacctaggaaatttatcatcattggctgc

SEQ ID NO: 25510 - DNA, 148 bp, Homo sapiens
  MAP TO AC011462.3; EXPRESSED IN PLACENTA, SIGNAL = 6.7; EXPRESSED IN BRAIN, SIGNAL = 2.1; EXPRESSED IN BONE MARROW, SIGNAL = 5.7; EXPRESSED IN LUNG, SIGNAL =  14; EXPRESSED IN ADULT LIVER, SIGNAL = 2.7; EXPRESSED IN FETAL LIVER, SIGNAL = 4.1; EXPRESSED IN HELA, SIGNAL = 3.4; EXPRESSED IN HEART, SIGNAL =   3; SWISSPROT HIT: P01137, EVALUE 4.00e-23; NT HIT: X05844.1, EVALUE 4.00e-78; EST_HUMAN HIT: AA313211.1, EVALUE 5.00e-78
ctgaagcaatagttggtgtccagggctcggcggtgccgggagctttgcagatgctgggccctctccagcggggtggccatgagaagcaggaaaggccggttcatgccatgaatggtggccaggtcacctcggcggccggtagtgaacc

SEQ ID NO: 25511 - DNA, 79 bp, Homo sapiens
  MAP TO AL133551.4; EXPRESSED IN PLACENTA, SIGNAL =  10; EXPRESSED IN BRAIN, SIGNAL =  11; EXPRESSED IN BONE MARROW, SIGNAL = 8.9; EXPRESSED IN FETAL LIVER, SIGNAL =  19; EXPRESSED IN HELA, SIGNAL =  20; EXPRESSED IN ADULT LIVER, SIGNAL =  11; EXPRESSED IN LUNG, SIGNAL = 7.1; EXPRESSED IN HEART, SIGNAL =  16; EST_HUMAN HIT: BF102499.1, EVALUE 4.00e-37; SWISSPROT HIT: P52868, EVALUE 9.80e-02; NT HIT: AF176013.1, EVALUE 2.00e-37
gttgaacaaatcctggcagaatttaaagtcagagctctggaatgtcacccagacaagcatcctgaaaaccccaaagctg

SEQ ID NO: 25512 - DNA, 156 bp, Homo sapiens
  MAP TO AC012178.2; EXPRESSED IN BRAIN, SIGNAL = 7.3; EXPRESSED IN ADULT LIVER, SIGNAL = 5.8; EXPRESSED IN BONE MARROW, SIGNAL = 5.2; EXPRESSED IN HELA, SIGNAL = 6.3; EXPRESSED IN HEART, SIGNAL = 5.6; EXPRESSED IN PLACENTA, SIGNAL = 5.6; EXPRESSED IN LUNG, SIGNAL = 7.5; EXPRESSED IN FETAL LIVER, SIGNAL = 6.9; NT HIT: D11199.1, EVALUE 1.40e+00; EST_HUMAN HIT: BE566291.1, EVALUE 5.30e-01
tcaattgtaaggcctactgttggggtggtggttgttaatttctttctcctcctcttcttctttctcttttttctcctcctcttctttttcctcctcctcttcctcattggcttgaataacagtagggaggaaggtgggagattggaggtatagcat

SEQ ID NO: 25513 - DNA, 216 bp, Homo sapiens
  MAP TO AL160008.1; EXPRESSED IN ADULT LIVER, SIGNAL = 1.6; EXPRESSED IN HEART, SIGNAL = 1.7; EXPRESSED IN BRAIN, SIGNAL = 1.6; EXPRESSED IN BONE MARROW, SIGNAL = 1.5; EXPRESSED IN FETAL LIVER, SIGNAL = 1.7; EXPRESSED IN HELA, SIGNAL = 1.7; EXPRESSED IN LUNG, SIGNAL = 3.5; EST_HUMAN HIT: BF093687.1, EVALUE 1.00e-118; SWISSPROT HIT: P32455, EVALUE 2.00e-37; NT HIT: gi11424288, EVALUE 1.00e-118
gaggcccgttgacctggatgcctcctgaaagagttttagttttggaattactaaagatgtaggaacagaagtctgctacttgttgcacaaattcggggtccagctcttcatcttgtagtttctcgagctgggcaagcttcctgcggtgaacgggccgatcaaagacaaagcattttttctttgggaagaatttccggatacagagtctgggcaggt

SEQ ID NO: 25514 - DNA, 124 bp, Homo sapiens
  MAP TO AC008407.3; EXPRESSED IN BRAIN, SIGNAL = 2.2; EXPRESSED IN PLACENTA, SIGNAL = 1.4; EXPRESSED IN HELA, SIGNAL = 1.8; EXPRESSED IN ADULT LIVER, SIGNAL = 1.9; EXPRESSED IN BONE MARROW, SIGNAL = 1.6; EXPRESSED IN FETAL LIVER, SIGNAL = 1.6; EXPRESSED IN LUNG, SIGNAL = 1.6; EXPRESSED IN HEART, SIGNAL = 1.9; SWISSPROT HIT: Q38826, EVALUE 7.10e+00; EST_HUMAN HIT: AW500547.1, EVALUE 2.60e-02; NT HIT: V00237.1, EVALUE 4.30e+00
atggtgtcagaagtgggattcaaagtagaacttccaacaacttccaggcacatggagttatcaaaagaggtacataccaagcccattatgtccattgctctcttacagcaactagagattgtag

SEQ ID NO: 25515 - DNA, 98 bp, Homo sapiens
  MAP TO AC008513.4; EXPRESSED IN ADULT LIVER, SIGNAL = 2.8; EXPRESSED IN PLACENTA, SIGNAL = 1.7; EXPRESSED IN BONE MARROW, SIGNAL = 2.2; EXPRESSED IN FETAL LIVER, SIGNAL = 2.2; EXPRESSED IN HELA, SIGNAL = 2.2; EXPRESSED IN LUNG, SIGNAL = 2.2; EXPRESSED IN HEART, SIGNAL = 2.3; EXPRESSED IN BRAIN, SIGNAL = 2.2; NT HIT: gi11036647, EVALUE 2.10e-01; EST_HUMAN HIT: R94004.1, EVALUE 3.10e-01
gaataatttcatgaaatcgaatttcgatgtctgtgtctctttctccatacctatgccaattgtggatgctatcatcagctattttggagcatttaaaa

SEQ ID NO: 25516 - DNA, 357 bp, Homo sapiens
  MAP TO AC007221.2; EXPRESSED IN BRAIN, SIGNAL = 2.3; EXPRESSED IN PLACENTA, SIGNAL = 2.4; EXPRESSED IN BONE MARROW, SIGNAL = 1.9; EXPRESSED IN LUNG, SIGNAL = 2.1; EXPRESSED IN ADULT LIVER, SIGNAL = 2.4; EXPRESSED IN FETAL LIVER, SIGNAL = 2.3; EXPRESSED IN HELA, SIGNAL = 2.7; EXPRESSED IN HEART, SIGNAL = 2.2; SWISSPROT HIT: P42526, EVALUE 6.30e-02; EST_HUMAN HIT: AI681239.1, EVALUE 1.30e+00; NT HIT: AF260225.1, EVALUE 5.60e-02
aaggacatgctgatcaatgctagtatgggtatgctggtcaatgttggtatgggcatgctgatcaatgacagtatgggcatgctgatcaaagctaatataagtatgctgatcaatgctagcatgggcatgctgatcaatgctagtatgggggttcttatcaatgctagtataagcctgccgatcaatgctagtacggacgtgcttaccaatactagtatgggtgtgctgatcaatgctagtataaacctgctgatgaacgctagtatgagcatgctaaacaatgctaatatgggcatgccagtcaatgctagcataggtgtgctgatcaataagcaaagagaacacatgctgaagtca

SEQ ID NO: 25517 - DNA, 261 bp, Homo sapiens
  MAP TO AC007857.2; EXPRESSED IN HEART, SIGNAL = 3.2; EXPRESSED IN PLACENTA, SIGNAL = 1.7; EXPRESSED IN BRAIN, SIGNAL = 2.3; EXPRESSED IN ADULT LIVER, SIGNAL = 2.3; EXPRESSED IN BONE MARROW, SIGNAL =   2; EXPRESSED IN FETAL LIVER, SIGNAL = 3.4; EXPRESSED IN HELA, SIGNAL = 3.3; EST_HUMAN HIT: BF679915.1, EVALUE 4.00e-03; NT HIT: U78027.1, EVALUE 7.00e-04; SWISSPROT HIT: P23961, EVALUE 7.20e+00
gcccttttgtttgtttgtttcttcttcttcttcttcttcttcttcttcttcttcttcttcttcttcttcttcttcttcttcttcttcttcttcttcttcttctcttcttcttcttcctcttcttcttcttcttcctcttcttcttcttcttctttcttcttcttcttcttcctcttctcctcctcctcctcttcttcttcttcctttcttcttcttctttttcttcagaaacagggtgtcactctgtcacccaggttggag
